United States Patent Application Publication US 2008/0168583 A1 - sequence listing, part 4

SEQ ID NO: 20430 - DNA, 295 bp, Gossypium hirsutum
  unsure (1)..(295): unsure at all n locations; Clone ID: LIB3146-027-Q1-K1-A6
cccacgcgtncggaaaaatttgataatgggccttagttatttgggttaatttttggactggtgtaatgaatatttgggttggtcttgttctgagtgggccgggcaaaaatgggctattacagttgcccctctttgctcgttgtcatgtaatgggaacagagcatagactaaaaagcccaattttgcccggtcatactagaccttggtgctcctcttcttttttaaatagcctcattcctttctttaatataaattttatattaatataactataaaccttttattagcttttatt

SEQ ID NO: 20431 - DNA, 404 bp, Gossypium hirsutum
  Clone ID: LIB3146-027-Q1-K1-A7
cactcatttgtttgtttactctgaaagggtgctctgagatcacatagaaaaatggtgaaagcagtggctgtccttagcagcagtgaaggtgttagtggaactgttttcttcactcaagagggagatggcccaactacagtgacgggcaacatttctggtcttaagcctggcctccatgggttccatgttcatgccctaagggacacaacaaatggttgcatgtcaacaggacctcacttcaatcctgctggaaaagagcatggagctcctgaagatgtgaatcgccatgctggtgatctaggaaatgtcactgttggtgctgatagctctgcgagtttctctattgtcgacaaacagattcctctcttcgggccacactccattattggaagaagcagtcgtgt

SEQ ID NO: 20432 - DNA, 324 bp, Gossypium hirsutum
  Clone ID: LIB3146-027-Q1-K1-A8
aaacgttcctttcggaattccaactgtacgtctaaccacactaaatcaaacgacgtcttttttaacttagtgttgatctgactttatgagctgacaaaatcatactcttaatccagagaagtaataagtactgaaattttaggagttaaatgggctcaggttcgtaactcacgagttttgacgaggttaatttcggcctaaagctgaaaatgggtttagttggctaaagtttgggacatgtcggtatttgataaattaactaacgtaaatgggtgaaaaggtgggtgatgtgattgagtacgggagttggaatatatattaaag

SEQ ID NO: 20433 - DNA, 405 bp, Gossypium hirsutum
  Clone ID: LIB3146-027-Q1-K1-A9
ccttccaaccttctccctccttttcatgcttctatcctgaccaaccctttaacaaaccctaacaaccctcaacaaggccttcaattacgaattgtatgaggtaacagagtaacagagaatagcagcaatggttcccaaatgttgagaatgcgcttgcgaagttcacatgggctaaagaagttcataagaagatggttacgctgaaagaggaaggcaagccgatgccaaagaactttgctgaggtgcaaaagctaatgggttcaacaccattggatcttgccaagtttaatatggtaaagagtggagaaatgagccgtaatgctccttgtccatgtggttgcaagaagagatacaaaaggtaatttggcacactatttctcagcgatctgtgttgctgtgagtagc

SEQ ID NO: 20434 - DNA, 418 bp, Gossypium hirsutum
  Clone ID: LIB3146-027-Q1-K1-B1
tcgaccacacgttcggatatgttgatgaagacatggtttcaagcaatggaatcctctatgagcctggtgaacatactgatcatgttgtggccatcaagtatgtgccgtatgtgggagacagcaagagaggcccggatgaatgcacatcaaacatattcatgggaggcaagatcaccattgtgttgcacatcacatgtgaggatttcctggtggctgatgccattatcctagattttgatgtccttgctgaacttatcaccatgatccaaggcaaggctgacggagagggcaaggtccacactttccatcctgtggatacaatgctgagttacctcaccaaagcccctcttgttccaccaggcacaccggtggtgaacgcactgtccaagcagcgtgcaatgcttgagaacatactaag

SEQ ID NO: 20435 - DNA, 420 bp, Gossypium hirsutum
  Clone ID: LIB3146-027-Q1-K1-B10
cttccagctccatcaaaagataacaatggcgggtagattaggcagacgagttgtccacttcgccaaccttccaatcaagctactaatgcccaacaccttcaccaacatcacagaaatagccctcaaaaccatcccatccgcatccaagattgagatcaaacgcgtcctggaatccctctacggtttcgacgtcgacaaagtccgtaccctcaacatggacggaaagaagaagaagcgcggcggtttcttaatcgcccggcccgattacaagaaagcttacgtcaccctgagaacccctctttccatatccgagaacctcttccctatccaggtgattaaagaggaaaaagacagtattaataagaccagtaagagtaagagcattgtggaagaaggggaaaagaagaagcattggcttga

SEQ ID NO: 20436 - DNA, 403 bp, Gossypium hirsutum
  Clone ID: LIB3146-027-Q1-K1-B11
cccacgcgtccgaaaccttagagcgcatcctatgaagcctgttatccattgattgaacaatgaaagctcatagagttgctatagacagcatgttggattaaattccttagacaacatgttaaaagaacctatcatgatgatgagaaacccaatatgtcttaattaacttgatgcatacacatgttatattttattggtagctgattaaatgcttcattcatattgatcacgagctatgcataaaaggtgaaaattttgaatgctgatatctaatctaggactaaatgatagggttgccaattcaacttgctaatatttggtgcaattttattaattgtagtttaacccaaatgagaatgggaagcccttttttttttaatcttacgaaattggtttttttaga

SEQ ID NO: 20437 - DNA, 268 bp, Gossypium hirsutum
  Clone ID: LIB3146-027-Q1-K1-B12
acaggacggcattcttggatcattatcgctaaacgcggtgtagagagctatcgctactctctcatctgctctttataatacacacctaattggatcctcgtaccactgtgggtaaaaacactaatcatttatttctggtgaccctgccacacatgatagatattccaccaacagatactattcagagttttgatgaggcttagatggatgtcttagaacacgaactgcaggaaaaatctgtgatgacttacatgaaatgtgtatcttg

SEQ ID NO: 20438 - DNA, 401 bp, Gossypium hirsutum
  Clone ID: LIB3146-027-Q1-K1-B2
cccacgcgtccggttataagaggcgtttcaaatggtagatagggatcgaagtggattcatcgatgaatatgagttgcagcaggcactgtcttcaagttaccagaggtttaatcttaggactataaggttgcttatgttcttgttcaagaatccttatgattcactcagaattggtaagttgatttcttttgtttttttgttttttaactattttcaacataaaattgaagaaattatctgcataaattgagacttgaatcaaagaattaatggtcttaaaatcactgtttaccacaaaactcattgattgaattgaactgccatggtgctattttatttatttgtttattttattgtgcttaaatgcaaagctatcagattcaaatttgagtatgattgca

SEQ ID NO: 20439 - DNA, 415 bp, Gossypium hirsutum
  Clone ID: LIB3146-027-Q1-K1-B4
ctagaatcttactgtttttgaacacttgattaggaccttttgagttttgtgaagacattgatgatgacatagagaacatatttaggtctgcatttggtggaagccagttcttttattggtccttcattaatgatgagtaccctaaatggaggagatccagatactcggataactatgagaaatcttggaggtggagctctcaatttgatgaggattcagactcaacagaatctggtaatgctgagagttcagaccaagatacaattgcagataggcgggcccttggactaagtgcatctggtcctctaacacttgaagatgtcaaaactgcatatcgagcctgcgcactgaaatggcatccagatcgtcatcatggctcttccaaagtatacattcccgttcattaaggcacttt

SEQ ID NO: 20440 - DNA, 245 bp, Gossypium hirsutum
  Clone ID: LIB3146-027-Q1-K1-B5
gccattcatcccagggtaccatttgttcatggtcggcgtatcagatagcctgaacatctacagtttatgctgaaaccactgctctaggcgtaagaattgctgccggcccaaaaatgagcactgccaaggttgcgtcattcaatgctcttacttgcgtctattgtgcgcctaagacacacttatcaacaggctcttgtgtgaggacattttggtgcctgctgcctttacaagatgatcatgatggt

SEQ ID NO: 20441 - DNA, 325 bp, Gossypium hirsutum
  Clone ID: LIB3146-027-Q1-K1-B6
cggaagagatgcttccttgacatagaccacatgattgatagtgattttaacagtgaggtcagcctgccattccagcagagcggctaaacttctgacggtgcattggttacgagttcatttgagagcagttataatagtgatcaaagtagcggttatgaggagtatcaagattcaagttttgtaatttacgaggaaagctcacatgaggaggattttctggtcgtctaaaaaaagctaccagagctgacgagttcttaaacttgcagccactaagtgatcggataaccaggaaagatgctctctttctcataactgaagctgataa

SEQ ID NO: 20442 - DNA, 409 bp, Gossypium hirsutum
  Clone ID: LIB3146-027-Q1-K1-B8
attttggtccctagtagattcgaaccatgcggtctcattcagctgcatgctatgcgatatggaacagttccgatagttgcctctactggtggacttgttgacacagtcaaagaaggattcacagggttccaaatgggagctttcaatgttgaatgtgatgaagtggatccaagtgatgtgattaaggtggtaaaaactgtcaagagagctcttgcaacatatgggactcaagcactgaaagaaatgatccagaattgtatggcacaagatttttcatggaagggaccatcaaggttgtgggagaagatgttgttgagcctcggggtggctggcagtgaacctggcattgaaggagaggaggttgctcctcttgccaaggaaaatgttgccacaccctgagcataatcag

SEQ ID NO: 20443 - DNA, 425 bp, Gossypium hirsutum
  Clone ID: LIB3146-027-Q1-K1-B9
gtttacagaggaattcttgatcaaagtgaaatcattgtcacagtaaaagtgctgtatttacatcgaacaggagctttaaagagcttcatggctgaatgtgaaactttaagcaatgtccggtaccgcaatcttgtaaagttaataactgcttgctcgagtgttgattttcaaggaaatgaattcaaagctccagtctgagttcatgcctaatgggaatttggagagctggttgcatccagttccaaatgcaggaggtaatggatcggaatatgatctgcggattttaagcctcccccaaagactaaacattgccattgatgttgcctctgctctagaatatctccatcaccgttgccaaaaaccaatcgttcaccgtgatttaaagcctagtaacatccttcttgactacgatatgactgctcatg

SEQ ID NO: 20444 - DNA, 359 bp, Gossypium hirsutum
  Clone ID: LIB3146-027-Q1-K1-C1
gtgaggtacctgctgcagactctcaaacatgtaactcgcgatgatgctcctattgatcttattgctatgtgccataaacccatagacgaaaatccctacttccaatatgagtccagcttacctggccatgacaagctacgcacatatgtgcatggacttatgcttcgcctgttcagttatacgtgtcatttggagatgctgtgattttcgatacgacgcaccgcctggatgcctatgacatgctattaggtgtatgggctggagtagaaaatcatggaatgactactttttttggatgtgtccttttacgagatgaaaacatacaatctttctcatggggattgaaggtagaaaaccta

SEQ ID NO: 20445 - DNA, 381 bp, Gossypium hirsutum
  Clone ID: LIB3146-027-Q1-K1-C10
gctttaagctataatggcggaaccttattttcaaagcttctacttgcattatgcttagctaagctctatttgagtgctcagcttggtcaaaccagggatccttatgataagaaagctattggtatcaatggtcaaagaagaatattggtctctggatctattcattatcccagaagcacacctgatatgtgggaagatctgtttcagaaagctaaagatggcggacttgatgtgattgagagttatgataatcggaatgtgcatgaaccatctatctggaaattataagcttgaaagaggatatgacctttggagattcataaaaacagtacgaaaggccaggcactatgctcagcatagtattggaccttatgattgtgc

SEQ ID NO: 20446 - DNA, 427 bp, Gossypium hirsutum
  Clone ID: LIB3146-027-Q1-K1-C11
ctagctctatggacagagaccttacaaaaaagtttcagattccagcaggctcttatgggatgttcaacatcatctcccttgcactatgggttattttctatgatcgtgcgatcctccccatggcatcaaagatcaagggtaaaccagtacgcattggtgtcaaactaaggatgggaattggactctttcttacctgcattgctatggtagtttcagccattgtcgagaatgcacgacgaaaggaagcaattcgatccgggtttcaaaacaaccctactgcagttgtgaaaatgtctgctatgtggcttgtgccacagttttgcctgaatggttttgctgaggccttcactgcaatagggcagacagagttcttctattccgagttacccaagagtatgtcaagcattgccgctgccctcttcggact

SEQ ID NO: 20447 - DNA, 379 bp, Gossypium hirsutum
  unsure (1)..(379): unsure at all n locations; Clone ID: LIB3146-027-Q1-K1-C12
tagaccggtacctctcggggaatnnaatgaacaggcagcggctacagttacttggtgttgcctgcatgatgattgcttccaaatatgaggagatttgtgcccctcaggtggaggaattctgctacataactgataatacatatttcaaggatgaggttctagaaatggaatcatctgttttgaattacttgaagtttgaaatgactgccccaacagctaaatgtttcttaagacggtttgttcgtgctgctcaagggatcaatgaggttccatcaatgcaattagagtgcatggccaactacattgctgaactgtctttccttgagaacagtatgctttgctaccctccatcactcattgctgcattctgcattgttct

SEQ ID NO: 20448 - DNA, 415 bp, Gossypium hirsutum
  Clone ID: LIB3146-027-Q1-K1-C2
cccacgcgtccgtccacctcttcatttaccttatgtggcgggtgcttctccagtggttacaatagatcacacattgtaacatagagaggttatgcacaaggttttaaaattttatctcactcgggcttaggatcggatgaaatagatggcagacaaatagaggtcagtgcattagaagttgtcacctcaatattttagccattttttcagtagaggctcgtgtgggacaggttgcttacaaactgttattaccatattctgctcgtattcattcaacttttcatgtctcccaattgaagaagcatattgggtcctcggttagtgcttttacctaaccaccagtggggtctgatggagctcttctcaagacaccgattcgagtattgaacaggcgcctaatcaagcaaggtaacca

SEQ ID NO: 20449 - DNA, 402 bp, Gossypium hirsutum
  Clone ID: LIB3146-027-Q1-K1-C3
ctttttcatttgttttcacaaagatggaaatattcaaatccccaaatccctgtctgcttttatgtcttgtggtactgtgtttcacaatcccaatcgcattaaccaaagcagaagcaacttcatccaccctgcctggaaacgaagggaacaatgctggacctgtgggcaacaatgctccatttgctaaacctgttggggacaacgggaaacaatccctcttgggctatcaacagcaaaaagacccaaactatccacaacaaggcattaaccagccactgtcgtcagggttgaaccagccgtattcggctacaaaccatccttactctgtcgggtttaatcagccagtttctagtatcagtcagccatttgggggcaccaaccaaaggggctcaatggaaaacg

SEQ ID NO: 20450 - DNA, 408 bp, Gossypium hirsutum
  Clone ID: LIB3146-027-Q1-K1-C4
gatatttgtctgctagctgagtttccatcggaaggatggtacagtttactcttaaacctaattagttggtagtcgcatcattgttgttagtgtttccttttttcccctcctcacataagcattctaagatcagaaattggaagttcctgggaaatgaatatcgcattttgacttgtttttcttggctttgcagcttccttgacatagaccacatgattgatagtgattttaacagtgagctcagcctgccattccagcagagcggcgaaacttctgacggtgcattggttacgagttcattagagagcagttataatagtgatcaaggtagcggtaatgaggagtatcaagattcaggttttgtaatttacgaggaaagctcagatgaagtggattttctggtcgtct

SEQ ID NO: 20451 - DNA, 98 bp, Gossypium hirsutum
  Clone ID: LIB3146-027-Q1-K1-C6
aaattatctcggtttcatgtcatactacaaaactaatacaataccatttcaaaagtattgtattagttttgtagtatgacatgaaaccgagattattt

SEQ ID NO: 20452 - DNA, 412 bp, Gossypium hirsutum
  Clone ID: LIB3146-027-Q1-K1-C8
ctcagataagatttttcatgatattaaatcgaatgaacttaggttgcgatattaaatcagcgaagcttaacattattagctgtgatattaaatcagtgagctatttagagtagcggtattaaatcagctagctcaaagataattattcatgctagatggaccaaaaaacatttgcaaatagtgtatctttattgaaaaaaggggatagattactcaaacataatatttctttagatggcgtgcattccatgtacgaggtaggacagagccatccatttttgctattctataagctccatagcctattttttctacaacgttgtagggtccttcccaattaggggccatttttccttgttgcaatgctaaaaaactagcttcagtatttcttaaaacaagatcacccacttgg

SEQ ID NO: 20453 - DNA, 429 bp, Gossypium hirsutum
  Clone ID: LIB3146-027-Q1-K1-C9
gagacctcaaataagctagaaggattgcctggtgttctctttgtgctcccagattcttatgtcgatcccgagtacaaggactatggtgctgaattgtttgttaatggggagattgttcaacgatcaccataaagacaaaggagggtggaaccacaaccgcaaagggcccaagacagaccaaggtacaacgatcggactcgttatgttcgtcgcagagagaacatgaggtgaaaagtattattagaaagaaagaaaatgatttatagaactccttttaagtgtttcttgagatatgggagcattactattatgaagataagacatggaaaagaaaagcttatgttgatgttttttaatgtaggtctgaatctgaacttgaatgttttgtggtctgcttgagtttcagcgtaaaactgatgtaagattatt

SEQ ID NO: 20454 - DNA, 412 bp, Gossypium hirsutum
  Clone ID: LIB3146-027-Q1-K1-D1
gtcacgcgtccgaccacgcgtgcgggagattactgctgctacctttcgtggacctagtgacactcacctagacagtcttgtgggccaagcattgattggtgatggtgccgcaactgttataatcggggcagaccccgtgcccgaaatcgagaagcccatgtttgaactagtctcaacagcccaaacgatcttgccagatagtgatggtgcgattgatggtcaccttcgtgaagttggtgttacatttcaccttcttaaggatgtctcggggcttatttcgaagaatatagaaaaaagcctggtcgaagcatttcaaccattgggcatatacgattggaactccctttttgggatagctcatgctggcgagccagcaatattagatcaagtagaagccaaattagcactgaag

SEQ ID NO: 20455 - DNA, 426 bp, Gossypium hirsutum
  Clone ID: LIB3146-027-Q1-K1-D10
cccacgcgtccgcccacgcgtccggtcctctggcatggagattctttcggatccttgtattgatttccatgacctatatcatgctcacaagcttaaaagtgatgatcggtatgggactacaaaaacatgcaacctggtatgtcagtaggtgtcgtaaaaggaaacatcatctcgattgatttgattcaaaaatggtggcccgttacctgttgcatgcatatggttgttttgggttcagcacttatcaatcaatcatataataaatgcaacaagaagatggaggtttcagaatgagagtggtagcaggacatagcatatgatatcgcgatctgactaccgacgagtatactgattcttttgtagagaagatgttcagttgctgggttcagggagttagtcttttgatatgattgaaggtttaagtat

SEQ ID NO: 20456 - DNA, 303 bp, Gossypium hirsutum
  Clone ID: LIB3146-027-Q1-K1-D11
attttctctcaaagttcactacttgtgtgcagacaaaaatggcttttgctgggtttttcttgttgggtttactttcaatggtctcagctgttcatggatatggtggtggatggactaatgctcatgctactttctatggtgggagtgatgcttcaggcacaatgggtggtgcttgtggttatgggaacctgtatagccagggatatgggacaaacaccgcagctttgagcacagctctgttcaacaatgggcttagctgtgggtcttgctatgagattaagtgtgtgaatgatggcaagtggt

SEQ ID NO: 20457 - DNA, 147 bp, Gossypium hirsutum
  Clone ID: LIB3146-027-Q1-K1-D12
cggacgcgtgggtttcttcaaaaaaaaaagttaactatttagtgagttttcatgggatagatccaacaaaaaactggtttccctgctcttttgttcttattgtatgatgtgtacgtgtactcactgaatagttaacttttttcttca

SEQ ID NO: 20458 - DNA, 414 bp, Gossypium hirsutum
  Clone ID: LIB3146-027-Q1-K1-D2
aaaaactccaaatgagttccttgtaaaaagttctagcatgataactctctgcatactgaaattgaaacaggacattcacggaagagatggtccatattctttgttcctctttcacacctggggcagatggtagtatttgttaacatcctatttagcatattaactcgtataggtagatagttccatgatattttccagattgtaatttttattttttaaggtagattgagtagccataattttttgtaaaattccttatagtcggtttgtaaagcataagctctagatcaccttcaatagctctgtaatagtttataggcgctacgcattgtgtattctcccgaaagctcaccactccaagcccgaaaatcatcatggggtttttctgccaacggaatgcggaaaatcttttca

SEQ ID NO: 20459 - DNA, 392 bp, Gossypium hirsutum
  Clone ID: LIB3146-027-Q1-K1-D3
cacaatcaaagggtctgaaatcaaaccccgtcacttctcaatctcagaaactgccttcatttggtcttccaccaatggccggacttcagtctcccaagtttctcatggcctctactcttcgttctggttccaaagaggttgatctcaacaagcctttcatgcctcctaagggggtgcatgttcagggcacgcactcgatgccacctcagaagattgagagcttcaaatctttggaggactgggctgagaacaacattgtaacttacctcaaacccgctgagaaatgttggcaaccccaagattttcttgcggatcctgcatcagatggatttcacgagcaagtcaaagaacttagggaaagggcgaaggagattccagatgattactttgtt

SEQ ID NO: 20460 - DNA, 409 bp, Gossypium hirsutum
  Clone ID: LIB3146-027-Q1-K1-D6
cccacgcgtccgcactattcattccaagacccttctttgttggtggaagcattaacccatggttcttatatgcttgctgaaattccaggatgttatcaggtgataatctgctatacgaatgacacattaaaattttttttttcatcatatgtatcttaatgtcttataatcatgggtagttggttcatttttctctctcaagtttaaattgaacataattaatactttttccttgcagcggctggaatttctaggggactccgttttagattatcttattactctgcatttatataataaatatcctgggatcacgccaggattattaacggatcttaagtcagcatctgttaacaacaattgctatgcattatcagctgtaaaagctggatttcataagcacattctc

SEQ ID NO: 20461 - DNA, 405 bp, Gossypium hirsutum
  Clone ID: LIB3146-027-Q1-K1-D8
cggacgcgtgggcggacgcgtgggattttgtgtttctcattctcactatagggtctggtttgaagtatttatatcgttatctcaatttcttgtaccttatatcgcagcacgggtcagaagtacatttacactggatctcatgactctcgggttttgtatctatgatgtggtaaccggagcccaagttgcagtactcaagcaccatacatcaccggttagagactgtagttggcacccatactacccgatgctggtcagctcttcttgagatggagatgtggttaagtgggaattccctggtagtggagaagcaccaacccctgtgagcaagaaaagaatccgaaggagatattactattgaatggtgaaagccaaccgtaacatcttgtagttgtaaatcatata

SEQ ID NO: 20462 - DNA, 246 bp, Gossypium hirsutum
  Clone ID: LIB3146-027-Q1-K1-D9
cttatctgcttatgggtgcgtggcacagatgctgatctggaatgtcttctgtttattttcttcggtgtcaataaagtgatggtgaaatgggattgtaagcataatgagatgaaaactgaaacttcatttatgcattacagttgaaatgggatgatgaccgaatattaataatggaatcaacctcattgcttataaaaaaaaggaaaaaacaattacataaaaaagaaaacttaatactttagtaca

SEQ ID NO: 20463 - DNA, 411 bp, Gossypium hirsutum
  Clone ID: LIB3146-027-Q1-K1-E1
gtccaatcggtgctgcatatgtagactcactctttggactcgagccaccgacccgaggtccgttaggtgatgaagagtacgtgactctttgttcggaggcgatcagtgccggtaccgatactagcgccacgaccgttgaatgggctatgcttcacttggtaatgaatcaagaaattcaagaacaactgtaccaagaaatcattgattgcgtaggtaaagatggagaaatcaaagaagaagacgtggagaaaatgccgtatctcgaagctatcgttaaagaaactttccggcgacacccaccaggtcatttccttctatctcatgcagctacaaaagatactgagctcgccggttacacgattccggcaggtgtttacgtggagatttacactgcatggattactgaagatc

SEQ ID NO: 20464 - DNA, 424 bp, Gossypium hirsutum
  Clone ID: LIB3146-027-Q1-K1-E10
atgagatgacagctgttggtatctttctatgcatgaaaggaaaacttgtaagctttcatttctttgtgcatgtgtttgacttccagggcttcgcaaacgccatggattggagatgttatgagttgctggttctatacagacttaatcgtgcatttctaaatatcgtagttactaaccacgtgatttaacttacgagtttgcgatttctccatgagaaagcatttgagccttggcaatgaaattcagacattagtgtgagttgtagttaaataacataacttttcggcttttgcttttctggaaggtgcaaaatagccacgattacagcaacatttccagcatcattgatccgaggttgggcagtagcttcacagctgaaggcatggaggaattcataaggttaaccgtccgatgtttggaacca

SEQ ID NO: 20465 - DNA, 416 bp, Gossypium hirsutum
  Clone ID: LIB3146-027-Q1-K1-E11
ggaacttttgatgttaagaccaagacaggaggtccattcggaaccatgaagcatcctgctgagctcgcacatgctgctaacaacggccttgatatcgccgtcagacttctcgagccgatcaaggagcagttccctaacctcacctacgctgacttctatcagctcgctggtgtcgtcgccgttgagattactggtggacctgaaattcccttccatcccggaagagaggacaagcctcacccaccacctgagggccgtcttcctgatgctaccaagggttctgatcacttgaggcaggtgtttagtgctcaaatgggtctcagtgaccaggacattgttgctctttctggtggccacactctgggaaggtgccacaaggagaggtccgggtttgagggaccatggactaccaaccc

SEQ ID NO: 20466 - DNA, 424 bp, Gossypium hirsutum
  unsure (1)..(424): unsure at all n locations; Clone ID: LIB3146-027-Q1-K1-E12
ggagaaacgtctggtgtagacggccaactgtgggttttatgtccaattctttttgctatgcaggggtttgaggcatatgttggactcctattgctcaagacagcattcgttggagttgttaccgaatggcaggtaatttgttgtgggatacttttggttttgatggctgttgggaactttataaacacaatacagacactcatgacaaaatcaaggtttaaagcaaagatgaaaagatcaaagagcaagccggagttggattagaatgtccttgattgttaggtaaatcttacataagcaacgcctagatattctttctccattttgaactctntaagaaaatggcaagtccaagactaggcttctttttttttttctttgaaatgtatttttgtaaggtatttttatttatataaattttgat

SEQ ID NO: 20467 - DNA, 411 bp, Gossypium hirsutum
  Clone ID: LIB3146-027-Q1-K1-E2
caaagacagcttgctattgcggaaaatgaacaacatagattgtggaggcaggcaagaatgaagactgatatacatctccttataactaaagtgcccgaattggaaattgttgactgctttgacgctattgagaggcatcttctcggggaaatgcagctgcagcaatctggaaaggcgatatcggactctgcagcaatgtgtcagaaattgaaaggtgatctacaggcagtgttcaacgtacttccaaacgacatgcagcagcttttgcttttaaacccccaaagagcagctcttttacagggaagttcaagtccagaactaacgatacttcctggccgtccttcgattcaagtcggggttgtatcctccaattcaccaagataacctaaaagggaaaagaaaaggtatctc

SEQ ID NO: 20468 - DNA, 405 bp, Gossypium hirsutum
  Clone ID: LIB3146-027-Q1-K1-E3
tcggtcccacgcgtgcgcccacgcgttcgtgcacgcgtccgagagagggaaggatataatggatcagtattcgtgcccacttatgaagataaaaacggtgatcagtatgttggtcggatatgtcccatgggagatgtgcaccaattcttgcaaaaagctgcggatcatgaaaggatcagaagcatgaggcttgagttgtgttgtttgaataaaaagaatgaaaaaaaaatagcccttcagcttagggtgttcaaagaagaaatgacgatcccttttttctttcttctttgttgaccaagccacagagaagatgaatcttaagatgttgtccaaggcataacccagaaaaatatatattttcatgtatagttgtggcatgtttctaatttgcttgtggaatttgta

SEQ ID NO: 20469 - DNA, 359 bp, Gossypium hirsutum
  Clone ID: LIB3146-027-Q1-K1-E4
cccacgcgtccgagaaagatgagacaaagatctaagtagcctaatgttgcttgatgggtactttcttttttgttaaaggatttgagatttatctttataatttttatggtttagttttgtatttttgttgaacccttttttcatctacatgaacaatgttttctttttagaactaaatgcttatctttttttatgttagctttgagatgggtgtctttgttaagtgctgcccactaaaaaaataattgttaaaagccttttataatttctttttaataccctagaatggtaattttaatattattaatacctattctccttccataaactctattaattttttttgggggggccctttt

SEQ ID NO: 20470 - DNA, 376 bp, Gossypium hirsutum
  Clone ID: LIB3146-027-Q1-K1-E8
cccacgcgtccggtttgaagcaacggctgataagttagctagcagttctaaacggcgggagcgcaagaaaaagtattttgaagcaaagaagaaaaagcataagagtgctggaacagaagagaatctagagtttcctggaagagagcacgtaaaatttggagatgtggttgaagctccaccgaagttggttacagtacccaagggatcaacggccttactcgatgcttcaaaagagaggcttaagttacaggctattgaggcttataggaatcgcaaaggatggaggtcaagaccaggggcgcctcaactatcctcagtgactacatgaaatttcattcaacacttgttctactttaaagtgttgcattcattgaca

SEQ ID NO: 20471 - DNA, 397 bp, Gossypium hirsutum
  Clone ID: LIB3146-027-Q1-K1-E9
cccacgcgtccgcccacgcgtccggagttgctcaacactttgaaactgggtttacattgcgtggacccatcgccatcggcaagacccgaagttcatcaggttctccagcagctagaagagattagaccagagagtgagacacctgctagctctgcaccttctggtgatgatggagctggaggagttccttcaacaagcgagtgaaaaaaggggggtgttcatgtattaggcataggcactagagagcattgattcttttattcttacaagagatatccttagatattaattttgtgtgctgtctgtaaatatgtttttaatagttccaggttgtttgcccctttgaattgttatgatgtagttcagttccactccctggaaagactaggcgattttg

SEQ ID NO: 20472 - DNA, 344 bp, Gossypium hirsutum
  Clone ID: LIB3146-027-Q1-K1-F1
cgttcaaaactctaggagttttacctactgcagtcacttgtcccacaaacatgaacagacctctagatcagctctcccttctttcatcgcttaagtcgacgatcttgaaaggctgaagatgcccggttgtggaaaagttcaccctgcgtttggtcctgttgaggaagaaactaaacgtctggctgtgcttcatgaggagcctggcgcgctggcctatcctttgaggtatgacgtctcccaagcgaggaagtcgattgatgcatctgacacagatttgaagccgtttatgtacacttgcgcaaaaaatgctatggagcgctcagtatctcctgatgcattcattg

SEQ ID NO: 20473 - DNA, 431 bp, Gossypium hirsutum
  Clone ID: LIB3146-027-Q1-K1-F10
gaaatcatggtaagtctcaaatcacttgtatctctcagttcccgatccgctgccgtagcactacttgtgttggtggtttcagtggcagtgcagacccatactacaaatgcacaaagctgcccgaccgagctgacgagcctgaacgtgtgcgcacctttcgtggtgcccggtgcagctgtggctaaccctagcattgactgctgtaacgcactccaatcggtgcaccatgattgcctttgcagcactctaaggatcgcttctcgactcccttctcaatgcaatctcccaccactcacttgtgcttgaaacaaaagcaatggtgctgcctgcttaatgggtaggaaaatataataacgccatggaatatcgatacctccctggttttttctttcttttttaatgggtaataataagcaatggtggtggtaaaa

SEQ ID NO: 20474 - DNA, 423 bp, Gossypium hirsutum
  Clone ID: LIB3146-027-Q1-K1-F11
aggcgctcaatgctaatctgaaaagaattgaagaaagcactgcagctttggctgctgctgatgattgggtgctaacctatcccccaggtggtactaggcaatctggctggccctctagtgcatccgttggtaatacaacaatatttcaacataaacttacgagtagtgctcatcgattcaattcaatggtccaggatttcttcgaggatgttggaccactattaagcatggagttgggagggcaaacactggaaggtttgtttcgagtgtttgactcatatgtaaatatgctcattaaagcattgccgggtttgatggatgaagaaacgaattttgaggatactggaaataaaattgttcgaatggctgagactgaggcccaacaaattgcattgctagcaaatgcatcattgttggcagatg

SEQ ID NO: 20475 - DNA, 410 bp, Gossypium hirsutum
  Clone ID: LIB3146-027-Q1-K1-F12
ccgccgccgccgccgcaagcgtctcatctaacaccacttcttcttctcatcatccaagtaaccaggcgccgaaccatggctggatacccttttttcaaccaccggcacaacgtgcagcgctcccagctttgagccgctacgaatctcagaagcgacgtgactggaaggcgtttgtagagtacctgaagaagcatcgcccccacttgggtctctcccgctgcaccggagtgcatgtgcttgaattcttggactatcagttcgggaatactaaactccacacacggaactgtcctttttggggcaaccctcctgacctaccatcgccatgctcatgctcttgccctctcgaccaagcatggagcagcttggatggtgtggtagggcgccttcgtgtagcttttgaggagaac

SEQ ID NO: 20476 - DNA, 278 bp, Gossypium hirsutum
  unsure (1)..(278): unsure at all n locations; Clone ID: LIB3146-027-Q1-K1-F2
gtttcaaagtagagcttcatgctagaacaggaaaactggtttgaagaagtcttaagcttgatcactatttcaccattttgaaagactggtcttgtctgcagtgtaaatatgctgtctttgtcccaatggggacaatgtcacatgaataaggaaaagctggtagtacttttgttcttcattggcttaatgtataatttgatacacttttttctaacanaaaaaaaaaaaaaaaaaaaaaaaaaaaaaaaaaaaaaaaaaaaaaaataatcatttatttt

SEQ ID NO: 20477 - DNA, 344 bp, Gossypium hirsutum
  Clone ID: LIB3146-027-Q1-K1-F3
cccacgcagcctgtgtccaatggttaagactccaaacatggctatttccagcgtgggtttcaaagtctccatgactctcatggtgatccagacgatacctacatcacccatggctgtcaatgccaccatcactgtgcaaagacataatccaaccacatagatggctgagcttgtgctacttacaaaaacagggttcacccggtgatccttactatgatgctgtaactgctctctaccgagatgctcacacctccccggcccgtggagacgtgtaccatatcatcaaatatggatcaaacggtgttaccgacaacagccctaacctaactgtgtgagccggtcta

SEQ ID NO: 20478 - DNA, 227 bp, Gossypium hirsutum
  Clone ID: LIB3146-027-Q1-K1-F4
accactcgtacgataacgtaacacaggttaccttctcaccttccccaccttactactttaaaaaatcctctctctttcgccatgcatgggctgtaccggccccttatgtgccctcaccaccgccactgttctaacgagatccacaacgctctgttcaccgttactgcggagaggcccacctacactgatgtgacagctgctacatctattaacgaaggcgcctgcta

SEQ ID NO: 20479 - DNA, 406 bp, Gossypium hirsutum
  Clone ID: LIB3146-027-Q1-K1-F7
gggaaagtatcttgatctggacacaagcatcattgtcaccaaccagaagttgatggcattacggtttaatgcagttagaaaatctatccaggagaaagcttcatctttgtgattcattttagaggcaggcttcatcctttcctcctaacttgctctgttaagctggctgaaacttgattatttttgccttcaatgcttgaacttttatcattcttctccccaatgctcataggaagatttacatttagcatgcatgaacaagaatgggaccaataaatctcatctctacaattatgacaacgtaattttagactatgaacttgaaagcatggtcctaggctttgagcccttctctttgttcaaccttgcaattggggttaggggtgattaattatataaagtaaca

SEQ ID NO: 20480 - DNA, 292 bp, Gossypium hirsutum
  Clone ID: LIB3146-027-Q1-K1-F8
aattgccggatccactccacgcgttcgggacagaatggttagacagataacgtgtattcaaactctactcttctctcttgcatgtgtcgagtggcaaaggggattcttgttaagcagggcctcctccagtaaagtcaccggcgtggttgaacattccgaatccatatcgctctaaccattccttacatcggttgattaaatgcgcacttttaatgttccagcatctcctgaaaccattaatgagagacacgtaccttaccgacagattatggacactctcttgccgagcact

SEQ ID NO: 20481 - DNA, 390 bp, Gossypium hirsutum
  Clone ID: LIB3146-027-Q1-K1-F9
gagccacaccagtggaagaaaaagaaaccgtagtattcaggggcattaattttcgtggaatttgaagtatattcttttggcaccaatggagcgtgcggaactaacaactgagcaggttctgaagagagacatcccatgggaaacatacatgacaactaagctgatttcaggaacaggccttcagctgttaaggcgttttgataatagagctgaaagtgtcagggcacagttgttggatgatgatggtccagcctatgttcaagtgtttgttagcatattacgtgatatatttaaagaagaaacagtggaatatgttctggctctaattgatgaaatgcttacagccaatccgaaaagagccagattatttcatgacaggtctctttgcaa

SEQ ID NO: 20482 - DNA, 370 bp, Gossypium hirsutum
  Clone ID: LIB3146-027-Q1-K1-G1
acggggaaagcatctcgacctggacacaagcatgattgtcaccaaccatgaagttgatgccattactgaggaatgcagccagaaaatctatcccggacaaagcttcatctttgcgattcattttaaaggcaggctgcatcctttgctcctaacttgctctgggaagctggttgaaacttgattatttttggcctcaatgcttgaactttgatcattcctctccccaatgctgataggaagacttacatttagcatgcgtgagcaagaatgggacccatagatcgcatctgtacgaccatgacactagaattttacactacgaacttgaatgcatggtcctaagctctgagcccttctatttgtccaacct

SEQ ID NO: 20483 - DNA, 431 bp, Gossypium hirsutum
  Clone ID: LIB3146-027-Q1-K1-G10
ggactgttcgtgatgggataatcacccaagtgagggagtatttcaacacttctctcaccgttactcgccttagagactctccaccgtcagcttgcagttcttcgacggcggagattgcgccagtgtattgcccttacgtttgggagagtagtctttccaaccgggtggggaaatcggttccaggtcttgttcttgcaatttagtttcctcctcccacgtgtggctaagataacagatgttagttccatgagttgagtttggtctggtgttaaaaattattgtgtctggactgtcaatttggtaacttattagtattgttgtgtttcaagtgttgtcttccaatgcaattggatttagtgaagtgtgtggggtccggtatgagaagagttcctccacctcctcattttcagtgtttccattgtgtaataaaa

SEQ ID NO: 20484 - DNA, 225 bp, Gossypium hirsutum
  Clone ID: LIB3146-027-Q1-K1-G12
gctgattgctttcccaggagcttttgttgaagatggatgttggtaatggtacaaaatgaatcagacactttgttgatgttgcttgtgctacaccactttttgtcattttgtgcctatggtactgtcatggtatggtatgggtcccttactatattagatttagggttgtttgaacaaaggtgaatgacattattataatgggaaaatatagggtgattgaccgat

SEQ ID NO: 20485 - DNA, 245 bp, Gossypium hirsutum
  Clone ID: LIB3146-027-Q1-K1-G2
cgtcactcggcggcagaagcagagagcctcaacatctacactttatcctcaaaccatgactttcaagcgtaggaatggtggccgcaacaaacatggccgtggccacgtgaagttcatccgctgctctaactgtggcaaatgctgccctaaggataagtcgatcaaaaggtttcttgtgaggaacattgtggagcaagctgctgttagggatgtccaagaagcttgcgtctatgacacctacactc

SEQ ID NO: 20486 - DNA, 303 bp, Gossypium hirsutum
  Clone ID: LIB3146-027-Q1-K1-G3
acgaaggctaggtgttgtataaaggcacctcaattcaactcactgagggccttcttactaacatccaacggataaaaccaccgcgtatcccaactttatctccttggggaagatttcaccgtctccagctgtcgttctaccaagaaagcccgcgactgtcgaccattcctatcagataaccagacccaataggccatgagacacactctgcagcggcgcattaagacgcggacgcggatgtgattacgctcatgcccgtccagatacacttgccagactccctaccgcccgctgcgttagatt

SEQ ID NO: 20487 - DNA, 406 bp, Gossypium hirsutum
  unsure (1)..(406): unsure at all n locations; Clone ID: LIB3146-027-Q1-K1-G4
gatgaggaaaatcatgggtgccaaagttctcttcttctttgctttgctttccttttcagctgtgtcggcatttgcacaggatgaggaagaccaaggtcttgttatgaacttctacaaggattcttgtcctcaggctgaagacattatcaaggagcaagttaagctactgtacaagcgacacaaaaacactgctttttcttggctgagaaacattttccatgactgtgctgtccagtcatgtgatgcttcactgctgctggactccacaagaaagagcttgtctgaaaaagaaacagacaggagctttggccttaagaatttcaaggtcattgagaccatcaaagaagctgtagaaagggaatgtcctggagttgnttcttgtgctgatatccttgttctgtctgct

SEQ ID NO: 20488 - DNA, 369 bp, Gossypium hirsutum
  Clone ID: LIB3146-027-Q1-K1-G6
gaaccagctgttggtaatacccctttctgcagtggctggacttttaggaagtatcatagattctctgttgggagcaacccttcaattcagtgggttctgctctgtccgaaataagggtgttggaaaacctggaccaacagtgaagaggatttcaggtcttaactttcttgacaacaatgcggtgaacctcgtctcgatactactgaccacactgctgacttcatttgcctgtgcgtacattttctgattccttaatactcttcagacagtttagacagtgtatgttttgataaagtcgaaacaaatctcagaaaaggatccaattcccataaaaaacttcgtatgtgatgtgtgatcaacataagggga

SEQ ID NO: 20489 - DNA, 319 bp, Gossypium hirsutum
  Clone ID: LIB3146-027-Q1-K1-G7
acatccacacatccgggagtttatgagctatactttcttagactgccaacccccacatcaggaacgcgcagttttttgaaatggccgctcaaacctctcatctatggtctctccaaaaagacattcgacgccctacaattccagaaaacccacctcaatctattctgggaagttttaaacctagcatatcatagatctaccaagtatccccagcaagggggtccatcgatttggatgtcacaactccaaagcacttgaatcacacagtgtacctgaaacatataacagtagacttatttgcaattgaacataaaattct

SEQ ID NO: 20490 - DNA, 312 bp, Gossypium hirsutum
  unsure (1)..(312): unsure at all n locations; Clone ID: LIB3146-027-Q1-K1-G8
cggacgcgtgggttcgagtccgatgaccctgagaatgaagtcataaaaccaacaatcaatggagtgctaagcatcatgaaagcttgcgccaaagccaaaactgttagaaggttagtgttcacatcatcagctggaactattgatgttgcagaacaacaaaagccctgttatgatgaaacctgttgaagcgaccttgaattcattcaggccaaaaaaatgactggttggatgtattctgtctncgaaacaaaggctgagcaagcagactgcatattcgcttaaaaaaataacattgatttttgcagcataata

SEQ ID NO: 20491 - DNA, 426 bp, Gossypium hirsutum
  Clone ID: LIB3146-027-Q1-K1-G9
cttttgcatgtttctgcatgtacatacatctgtttgattttttgaaccatgctggcattctaacattctattttggatgcaagtttgaagcactatttaagggttttgatagaaggggaaggaaaaggaaatgtctaaagcactacataattctttctgacttaataaaatgacaactccatgatgccgtgatttgctatgttggttttcatcaagttttttggaagtacatacaatgattcttgcttacagtttctgctttactgtaattgtgatattgttaatcttcagtttcaatctttaaacaacaagcagaactgaaattttatatctgcttataaatgttatgcagtctgcatttgcattcatacattacaagacattatcaaaatgtatccatcgcctttatgtttttattatgatata

SEQ ID NO: 20492 - DNA, 410 bp, Gossypium hirsutum
  Clone ID: LIB3146-027-Q1-K1-H1
cccacgcgtccgggagttaatggcatatgcttacttggcagtcagtcccccaagcatgagcaagcagtttgatgagatcgccgctgcagcatcaaataaatctactatcaaaaaggacttaagataccctgatattgaagaaaaagcactgcaatttattctcgatagttgtgaatcaagcatatcaaagtactccaagtttttgcaagcaagtggctctatggatttggatgtgacaactccaaagcagttgaatcgaagagtgtttctgaaacagctagcagtagatttatgtacaagtgagcagagaatactatttcgcgctcaatatatactgaggacgagattgagggatatgaggagtggtgaactgagagctttaagaatcttcgatggattgcgaaacattt

SEQ ID NO: 20493 - DNA, 437 bp, Gossypium hirsutum
  Clone ID: LIB3146-027-Q1-K1-H10
cccacgcgtccgcccacgcgtccgcccacgcgtccgaaaaaaaaactaaaggaacctttaatctctcccccctcttccccatggccaacaatcgggtttcttcgccgcaccaccgtaccaccaccgtatccggtggccggtgatgcgtaaaaaggggcttttaacctgcttcaaacggatccaaagcgaggctcttcaaatccgaagaaaaacgaaagaaaaggcctctccccctcacttttagatctgatctagacgaaggagaagagtccttcgacgacgtaaccgtgggttctccagtaaggtgcttcctttccattttttgttcaaaagcaaaaataaaatataataaaacgaaaatttgaaagtaaaaagatccacctttttcttgtttttgctctttgatttcttaaaagtgcgcggtaaaaaaaaaacaa

SEQ ID NO: 20494 - DNA, 428 bp, Gossypium hirsutum
  Clone ID: LIB3146-027-Q1-K1-H11
ccaacctgaatcgactagtcctggctggaaacaggtttacaggtcgaatcccagatagtttgggaaggttaaagaagctgttaatcttggatttaagtagaaattcactctccggccatttacctctaggtcttggtggtctggcatcactcttgaagtttgatttgagtaacaatcaattgaaggggaagctgtttgcacgtaatgcatatctgaagaatttgacccttttagatgtgagaaacaaccagttttcaggtgggttaaaccagccaattctagacatgcattctttggaagagttgatgctgtcttgcaacccattaggtggagatattatgaggctagattggcaaagtttacaaagtcttgtggtgttggatctcagtaatgtaggattaaaaggtgaaattcctgaatccctatct

SEQ ID NO: 20495 - DNA, 347 bp, Gossypium hirsutum
  Clone ID: LIB3146-027-Q1-K1-H12
gctacgcgaacagatgccggactagacgcggggcggctaaaagggcggcgacgaggacgacgaataggatcccacacctgaccggggtggatacagtggtggcctcactcacggccgaacttagggaccctccgaggagacttgctacgatactggttcaccttccgatggacactttgatgatgcacgtgatgatgcacgttccggttactctcactgagacgatcacttagaagatgccgacactgcttacggaacctattacagaccctatctcagacctgaacgatgacgcagctggacctgcacctggcgctggatctggtgactgttgaagggaccctgga

SEQ ID NO: 20496 - DNA, 374 bp, Gossypium hirsutum
  Clone ID: LIB3146-027-Q1-K1-H2
attcctgcggaagcagagcggacgagcgagaaagaaagaaaaaaagaaacaaacaggagagggaaacaatgagccggagcttgggcataccggtgaagctactgcacgaggcatccggccacgtggtaacggtggagcttaagagcggagagctttacagaggaagcatggtcgaatgcgaggataactggaattgccagctcgagaacatcacctacaccgctaaagatggaaaggtatcacagcttgagcatgttttcattcgaggcagtaaagtcaggtttatggtcataccggacatgttgaagaatgctcccatgttcaaacgcctcgatgctaaaatcaagggtaagagctcatctctaggagttggc

SEQ ID NO: 20497 - DNA, 263 bp, Gossypium hirsutum
  Clone ID: LIB3146-027-Q1-K1-H3
tcgagacataataacaaaaagtgtatcccatagtcctctggatgatttggatggagatcacggaattgctcattttgcctccttacaatctgttgaagatggttctgaaatagctttttacatatcacctactatactataggaggcctcacctgaaaattcggtgtgcattttctatgtactgggttggctgattttccatctggaccaatgtctattggagagggacttgaggaaatgtgtttggtgatgggaaggtaaaa

SEQ ID NO: 20498 - DNA, 413 bp, Gossypium hirsutum
  Clone ID: LIB3146-027-Q1-K1-H4
caattataaagtttctgcagttccagatgggttgaaggcatgggagatgctgaagggaaaaccccataactatgatctcattttggcagaagtggatttgccatctatatctggatttgctcttcttacactaatcatggagcatgagctttgtaaaagcatccctgttataatgatgtcctcacaagattcagtaagcacagtatacaaatgcatgttgagaggggctgctgattaccttgttaagccagtaaggagaaatgaactgagaaacttatggcagcatgcgtggagaagacaatcatctataattgatggaaacttccccggggatgagagcattggacgcaaacaggttgaagctacctctgaaaatgatgctgcaagacaaactgataaaggaagtgatactc

SEQ ID NO: 20499 - DNA, 320 bp, Gossypium hirsutum
  Clone ID: LIB3146-027-Q1-K1-H5
acgcgtgcgggagttaatggcatatgctttcttggcgggaactcccccaatcatgaacaagcagtttgaagaaatcgccgctgcaccatcaaataaatcttctttcaaaaatgacttaagacaccctgatattgaagaaaaaacactggaatgtactctcgatagttgcgaatcaagcgtatcaaagaactccaagcttttgcaagcatgaggctctatggatttggatgtgacaacttctaagcagttgaatctaataatgtttctgacacagccttcagtagatttatgtacacgtgatcagagtaaactatttttcg

SEQ ID NO: 20500 - DNA, 400 bp, Gossypium hirsutum
  Clone ID: LIB3146-027-Q1-K1-H6
ggattcggcatgttagggatatcggttttcgtggttgttctcgtgccttacttggcggtactggtttatatttccttggtttggcaattggctagcgtggtttcagtgttggaagacgactatgggatcaaagccatgaagaagagcaaggcgttgataaagggtaagacgggggttgcggtcgccatgtttcttgtgctggttgtttgttttattgggattcaagtggtgttcgagatcggggtgttgttttattggtcgatgagtgttgaaatgaggattgggattccaatcctttgctttttgatgctgtttatggtggttctgttcggacttgttgctcaaacagttatctactttgtgtgcaaatcatatcaccacgagaatatagacaagtctt

SEQ ID NO: 20501 - DNA, 421 bp, Gossypium hirsutum
  Clone ID: LIB3146-027-Q1-K1-H7
gccacgcgtccgccgaaattgatgagctaaccgtggatacgtggggagaagatggttagttagggatcaagagcttcactttgctgtgaagataggtccgaccttttgcctgacctaatcaaaacattgaaagctttacgcttgaagacactaaaagctgagattacaacgcttggtgggcgtgtaaagaatagttctgtttataaccggagaggaagactccagtagtagcgctgagcagcagcagcttctgctgcagaattgtattagatcaatacaagaagcatttaaagcggtgatggagaagacttccgtggacgaggcttcttcagggaatgtgaagagacatagaaccaacatcggtgtcctggaacataagtctctttagcttaaaaaagaccgcgggccccaactttttttt

SEQ ID NO: 20502 - DNA, 384 bp, Gossypium hirsutum
  Clone ID: LIB3146-027-Q1-K1-H8
gagaactctcagttgaagagaaacaacctgaggatatcaaaagttcttttgagaatggaaatctcgaggtgaaatcttatcctcaattggtaaaactatgtgaagaaatggactctgaaggactacagaagtttatttcagataatcgtaagaaccttgctgctctgaaagaggaaattccttgggcgttgaaagctgcagcaagtccagctcgcttggtcctggaatcgttggaaggattttacccttcagaagttgatggaaagaaagatgcaaacctattggggcttaagcgaacttgtattatgttgatggaatgtcttagtgtcttgctttctaatctggatatggtttctgttttggctttgatctctgaagatatta

SEQ ID NO: 20503 - DNA, 428 bp, Gossypium hirsutum
  Clone ID: LIB3146-027-Q1-K1-H9
cggacgcgtgggctctgctcgaaatcttcttcattctcattctctctccactgaactcttgctaaacggtatcgttttagtcagtctttcatcaatggcgaaagaaccagttcgcgtcctcgttactggagctgcaggacaaatcgggtatgctcttgtacccatgattgctaggggagtcatgttgggtgctgaccagcccgtgatccttcacatgcttgatatcccacctgctgcggaggctttgaatggtgtcaaaatggagttggtggatgctgcatttcctcttctaaagggtgttgttgctacaactgatgctgttgaggcatgcactggagtcaatgttgctgtcatggttggtggtttcccaaggaaggaaggaatggagaggaaagatgttatgtcaaagaatgtgtctatttacaagt

SEQ ID NO: 20504 - DNA, 403 bp, Gossypium hirsutum
  Clone ID: LIB3146-028-Q1-K1-A1
aatggatttggttcagttgcaaaggcaactagttgactacagaacctcactctaccatgagggttttctggatgaacaattcacccaacttcagtcactccaagatgaaaataacccagattttgttgtggaagtagtgtctcttttctttgaagattctgaaagacttcttaatgaactgagtaaagcactagagcagcaggtcatagatttcaaaaggatggatgctcaagttcaccagttgaaaggtagcagctccagcattggtgctcacagagtccagaaactctgcatcgtcttccggaactattgcgaagctcagaacgtggaaggatgtcttaaatgtctgcaacaagtgaagcatgagtatggcattattaaaacccaagcttgaatctatgtt

SEQ ID NO: 20505 - DNA, 422 bp, Gossypium hirsutum
  Clone ID: LIB3146-028-Q1-K1-A10
ggggaaagtgaaaagcttgtctcgaaccttttcgagatggcgcgtgatagtgctccttccatcatattcattgatgaaatagattccttgtgcggccagcgtggagagggcaatgagagtgaagcttcaagacgtatcaaaactgaacttcttgtgcagatgcagggtgttggacataatgatcagaaagtcctagttcttgcggcaacaaatactccctatgctcttgatcaggccatccgccggcgttttgataagcgcatttacattcctctcccagacgtgaaggctcggcaacatatgttcaaagtgcacctaggtgatactcctcacaacttgactgaaagtgattttgaaaacttagctcgccggacagagggattttcagggtcagacatatctgtttgtgttaaggatgttct

SEQ ID NO: 20506 - DNA, 70 bp, Gossypium hirsutum
  Clone ID: LIB3146-028-Q1-K1-A11
gacgtagtagcattgccatattgactccaaaacgcaatgcacaggccgtcggtgtacgacgtctagtctg

SEQ ID NO: 20507 - DNA, 281 bp, Gossypium hirsutum
  Clone ID: LIB3146-028-Q1-K1-A12
ataagactcaaggttcgatatgctgaccgatttgatttcaaaacaacatatgtgggtgattccaaggaagttatctcgaatttgtaaggcattgattcaggactgctggagcaggatgttgcaccacatgcactcatccacatgcggaaagacaacctaaacttgatatggctacactttctaggctgcgagcctctgttaacataaaaacaaagccccgtttcattctccatcatgatgattaatatctttctgtcattacattaatgctcactttatct

SEQ ID NO: 20508 - DNA, 254 bp, Gossypium hirsutum
  Clone ID: LIB3146-028-Q1-K1-A2
cggacgcgtgggcggacgcgtggggtcgccggtcaccatcagctgatcgcctcctcttccagcaatggcggaagctcaaacagaaactccgccttccctatctgagcaatattcactgaaggagaaagcggagaaatcagatgtggctacaaaagtagctgacgcagaagaggtcgaaaattcagcgagtacttcttccaaggaagtggtgaccgaggaagttgagactcctgctcctcttgtggaaagtactg

SEQ ID NO: 20509 - DNA, 440 bp, Gossypium hirsutum
  Clone ID: LIB3146-028-Q1-K1-A3
ttcgccagcactaccggcgcgcaatgcctgggtcgacgcacacgcgtgcatcatcgtcccattggttagaatggaatgggacgtttgctttgagtaccctctattatggggagtacctgaaccgagggcccgggtccaatacgagtgcaagagtaacttggcctggttatagggtcatcaacagttccactgaggcaactcagtttacaattgagccatttatacaaggaaatgagtggctaaattctagcaatattccattcgctctcggcttgaattgagagctaaatgccacttacgtgcctcccttattttatttttcgttaataattggattctgtgtttgtctgatcaagtaagccaccatgcattttgatcccatgtcaaattgcttttgtactgaaattaataagaaaatgaataaggcttcttttctctct

SEQ ID NO: 20510 - DNA, 402 bp, Gossypium hirsutum
  Clone ID: LIB3146-028-Q1-K1-A4
gtttgatctcttttagcgaaagaaatggctgaaactcttatgcatgctttacaatatgacagctatggcggaggcgctgctgctttgaagctagtgatgtagcaggagaagtcgtaaaggttggaccaggagttacaaatttcaaagctggggataaagttgtagctacgcttcatcattttaccggaggtggactagctgaatatgctgtggctaaggagaatctgacagttgcaaggtcaccagaagtatcagctgccgaaggtgcaggtttgcctgttgctggtctcacagctcaccaggcactcacccaggcagctggggtcaagcttgacggaagtggccagcaagtaaacctcttgattactgctgcttcaggtggtgtaggtcattacgcagttc

SEQ ID NO: 20511 - DNA, 176 bp, Gossypium hirsutum
  Clone ID: LIB3146-028-Q1-K1-A5
ggatctcccattgagtttgagagggggcctgtgagatatgatatgatatgattgtgttttgcaagtcaaaaaaaaaatgtttatatgtaaagctcttattatttgtcactctcaatatccattttggtgcttgcttgtaactaaagttcaatacaaatgtgtttttttgctttgtc

SEQ ID NO: 20512 - DNA, 393 bp, Gossypium hirsutum
  Clone ID: LIB3146-028-Q1-K1-A6
cccacgcgtccgcggacgcgtggggttggagaagggtgaccctccagatgccatcacatataaggtaatatttcgcggcctttgtagtggtggaggaccaattggagaagctgttgattttgtagttgagatgaccgagaaaggatttttacccgaattctcatcattttatatgctggctgaaggactttgtgctttatctatggaggataccttaattaagctggttaatatggtgatcgataaagctaactgttcagacagtgaggtttccattataagaggttttcttagaatccgtaaatttcaagatgcattggctaccctcggaaacatcctggacagcagaaagcagaagaaaccttactggtcaggatgaagctagatagtgct

SEQ ID NO: 20513 - DNA, 391 bp, Gossypium hirsutum
  Clone ID: LIB3146-028-Q1-K1-A7
cccacgcgtccggccgcccaaagaatcaaatctctgctactgcatagtaaaagagagaaagagcgacaatggaggcagcatgaacagttaaggacgtttcccctcacgatttcgtcaaggcttacgccgcccatctcaagcgctccggcaagattgagcttccttcatggactgatattgtcaagaccggcaaactcaaggaacttcctccatatgatcctgattggtactatatcagagccgcttccatggcgaggaaaatatacctgaggggaggtcttggtgttggtgcctttagaaggatttacggtggggctaagagaaatggaagccgtcctcgccatttctgtaagagcagtggatctgttgctcgccacattcttcaacaatt

SEQ ID NO: 20514 - DNA, 184 bp, Gossypium hirsutum
  Clone ID: LIB3146-028-Q1-K1-A9
cccacgcgtccgatctatcaattgtgtttggtgttttgcttagctcagagcaatttctaggttaaataaatgggtgaaaattaataaattgagatacttatgggcttgtgttgtgttggtatcacgttgttgtttatgttagagaagtttcatcatcaatgaagaaattcattttaattgtgtg

SEQ ID NO: 20515 - DNA, 403 bp, Gossypium hirsutum
  Clone ID: LIB3146-028-Q1-K1-B1
cgactaacaaacaatagcgggacgggaggatctctcagggtttaggtgatggcttcaaagcggatattgaaggagctcaaggatctccagaaagatcctcctacctcttgcagcgctggccctgttgctgaagacatgtttcattggcaagcaactattatgggtcctccagatagcccgtatgccggtggggtgtttctagtcaccattcatttccctccggattatccatttaaaccacccaaggttgcattcaggacaaaggtatttcaccctaatattaacagcaacggtagcatttgccttgatattttaaaggaacagtggagccctgccctcaccatatccaaggtgttgctgtcaatctgctcactcctgacggatccaaatcctgatgaccctt

SEQ ID NO: 20516 - DNA, 421 bp, Gossypium hirsutum
  Clone ID: LIB3146-028-Q1-K1-B10
attggagtatatcatgattggtgtgaacctttctcaacatacccacgtacttacgattttattcatgtagctggcattgaatcactaataaagcttcctggttcaagcaagagcaggtgtaaccttgtggacctaatggtggagatggatcgcatgttgcgtcctgaaggaacagttgtgattcgagattcacctgaagtaatcgacaaagtggcacgcatagctcacgcagtaaggtggacggctaccataaatgacaaggaacctgaatcacatgggagagagaaaatcctggtagcaacaaaaaccttttggaagctaacttcatcccattgagacagacttgttctttataatgtaggtattttccttttcgtttcaatttttttattatctcgagccaagttgtcttcctcatgca

SEQ ID NO: 20517 - DNA, 418 bp, Gossypium hirsutum
  Clone ID: LIB3146-028-Q1-K1-B11
cccacgcgtccggggagctcaaagaggacaaaatgggattcaagtggaatgagtgatagacccggaggtttgggtgtaacagggttcaatatgtatgaaaccaggagttattgaaacataatcattgtattgatcttgaaagccattggagcttctagaacgtttggaaacacaaccctgaatgaatggggatgggatgctcacacttgttggatattagtgagggatgtgctagtatttttgggatttggatcttcaggttcggcatggcaagatcagattgcttaggcatctaacactcctcatctttggtgcaatttcattaattgtagtttaaccaaatgagaatgggaagccttttttttcttaatcttccgaaattggttttttgagaaaaatcgttatttgtagattgtag

SEQ ID NO: 20518 - DNA, 424 bp, Gossypium hirsutum
  Clone ID: LIB3146-028-Q1-K1-B12
cgaaggtcatcatgagggagaaggagatggaactgttaggtcaaagcaaagccgaagtgaaaagaagagtcgcaaagctatgttgaagcttgggatgaaaccgatctctggtgtcagccgggtcactgtgaagaagagcaagaatatcttatttgtcatctcaaaaccagacgtgttcaagagcccagcatcagatacttatgtaatatttggagaggctaagattgaggacttaagctcacaactgcagagtcaagctgcagagcaattcaaggctcctgatctaagccatgtgatatcgaaaccggagtcatcaacagcagtccaggacgatgaagaagtggatgacacaggggtggagcccaaggacattgaattagttatgacacaagcaggagtgtccaggtcaaaagctgtcaaggca

SEQ ID NO: 20519 - DNA, 403 bp, Gossypium hirsutum
  Clone ID: LIB3146-028-Q1-K1-B2
ggaagatacaagagttgcctgcatagagcagtggtgaacaaggagagagagaggagatcattggtatactttgtgtgcccaaaagaagacaaaatagtgagacccccacaagatctaatgtgcagatcaggagggccaagagtgtatcctgatttcacatgctctgatttgttggacttcactcaaaatcactatagagctgacgttgctacactccaaagcttctttccttggctcctttcttctaaccctacttccaacttctagttcttctctactcccctatcttttcatataaatatcttggtttccactttgtatctatctactatagattataatatgttttaagtctctctatatttgaatttgagttttcctattttaaaaattcaagtataat

SEQ ID NO: 20520 - DNA, 372 bp, Gossypium hirsutum
  Clone ID: LIB3146-028-Q1-K1-B3
gccgtatcgatgctcgaggtgcagagattgaaccagctagggaggggatgaggatttggtgtgagctgattgagatgcttaacgctcacaagatgggtatgacaacagatactgtcaatacctatggatatatagctaaagccattgatcacacatgatgtacatggcaactcataaagaacgaatatcaaagtgcatgaaccccagaaccgagttagcacaactgtggctatcctcaatcgtcgctgaaacaacgatcacacaactacagaaagagccagcattgatgaatgagtaccgagtgccatatctaaatgtgcacaatggtgactcgaagggatactactgcctgatggagtatactggacaaat

SEQ ID NO: 20521 - DNA, 404 bp, Gossypium hirsutum
  Clone ID: LIB3146-028-Q1-K1-B4
tctgagagtccttcggtaaaccgagcctttgagcgaatgtctagcttcagtaggttgagaatgaatgttagaaacaccaatgcgttgatagtcaatggtggcacaactgctcggaggagaagcaggagtaaggggttctttttcttttctattttaggtgcattgtgtgccatattatggtttctgatagggatggttagggtcgtaaggagttcgatctcctcgtgaagatataatgtaagtgggaagttttgttagttatgttctactgggaagttggtgaaattgttgcatagtgaagtccaaatttgtcattaaattaaatagtttttaatgtctcaggaagaagtgttagcagaaagaaagcataataggtaccttgaaatttctttgtagtaggcgtc

SEQ ID NO: 20522 - DNA, 389 bp, Gossypium hirsutum
  Clone ID: LIB3146-028-Q1-K1-B5
gtaaactaaagtatttaaatgctgtaaattaaagtgtttaaatgttctttgtgtagcattttaagaacttcaaagctcacagatgatttcttatactctatatgagttcattgattctatgtttttgcaattttagatatgatcatgggtgcagcagcttcaactgacaagacttgtgcaggtctggagcaggtcaatcaagaagctctgctggaattaaactgacaagtaattgtagtatgcttgtagttgaagtttcttatagtgaacatcatgttgtttattcggcagaagtttcaaagattttactttttagaagaaagtgtattgtagtcattagattgggttttcaaagattgattatgttaacattttgatcaaatgaaaag

SEQ ID NO: 20523 - DNA, 393 bp, Gossypium hirsutum
  Clone ID: LIB3146-028-Q1-K1-B6
atctgccctcacaggcctcaggtctcaccttcaccttctgctgcttcttcatttctatttttaatcagaaaatatatattaatactaaaattaaaatgggaagaggaaaattcaagggcaagcccaccggtcaccgccatttctccactcctgaagagctccgtgctggtacctctgctcgtccccgtacttttaagaaggaagaagctgaagtggaggaggaagaagaagagtctgaagaggaagtagaagaagaacccgagaaacgaaagggtactcaagggcttattgagattgagaatccaaatttggccaaacaaaagaatgtcaaagctaaagatgttgatatgggaagaacaactgaactatcaaggcgtgaaagagaggaaatag

SEQ ID NO: 20524 - DNA, 391 bp, Gossypium hirsutum
  Clone ID: LIB3146-028-Q1-K1-B7
gacccacgcgtccgaagctaagctgcttccttttagaggaccaagttgtaaggaagacaacccttcagattatcaagtgaggatgttttcttcttagttttgcagttttaaagtactttgtttgatcacctaacatcatgctacggggaaattcatccaatatattgaagcagaatttaagaattgaatgtacatttggatggagctaaagctgtgtttcttttagcgatatatttgaacttgctagtgttaggtccctggtttttgttatctctagatttaagggtagaaggcaaaggaaaatattttggtctacattagtatgtaatctacatgcttaatacaacaatttaatgtgttgaaaaaaaaaagaatgaaaaaaaagaagggg

SEQ ID NO: 20525 - DNA, 361 bp, Gossypium hirsutum
  Clone ID: LIB3146-028-Q1-K1-B8
gaaaaatcctaatggtccaatgtatacatctcttggtgtcatgaccaaaggaacaatcatcgaggtgaatgtaagtgaattgggtttggtcacgccagctgggaaagttgtttggggaaaatatgctcaagtaacaaataacccagaaaatgacgggtgtataaatgcagttttgcttgtctaagaggtttacaccccatgtgttgggttgagtctgctaactttgcttgattgtcatttcatttcatgttgtttagtatgttacgtgtttcaaattttgagtagtcataaagggtaatttgaaaagtggaatgttttaagtggtgaaaaaaaaaagcttaatacaacaatataatgtgtt

SEQ ID NO: 20526 - DNA, 421 bp, Gossypium hirsutum
  Clone ID: LIB3146-028-Q1-K1-B9
gttcggttcagtcggaggcgtttcagcgaaaagcaagcagaacaatggtgggcagcaaacagggctagagtatatcagcggtacaacgttcccttggttgaaaaacccactcttggtgtgggaagggaagggttagctcattgacttggcagattcaagactctggctacttaatccgaagttcattccgggctacagctttcaagactgagccaaggtaagatgccctcaattttgttttagttttgcgagggtgtgtactagttctggtttcggcactttaaatttcggctgtaaatgtataattgtactatgttggattttaggagataaactgtgaggaattgattgagttctttatgactaggctgcggagggctttgtattcgaaactgattgtaaatgcataagaaattactaa

SEQ ID NO: 20527 - DNA, 121 bp, Gossypium hirsutum
  Clone ID: LIB3146-028-Q1-K1-C1
cacacatattgtaaatggactaaagaaattggacttttatttgggtttctttaaaaaaaaaaaaaaaaaaaaaaaaaaagaaaaaaaaaaaaaagaaaaaaaaaaaggaggacgcatacat

SEQ ID NO: 20528 - DNA, 422 bp, Gossypium hirsutum
  unsure (1)..(422): unsure at all n locations; Clone ID: LIB3146-028-Q1-K1-C10
cggacgcgtgggcggacgcgtggggtaaagtgttgaagaaagtagtaggctcatctttacctacaaacatgtatatatcggaagaaaaatgccttgagctcatctattatatgtttttactataatctatgagttgtatgtatcatctcactttagctccaacatgcttgatcattgtgtaattgatttttctcttctttgtgtatgtaggggtctgcaaccatgcatttcacttccattgtatcagccgatggctcaagactcgtcaagtttgcccattggataacagtgagtgggagttccaaaagtatgggcactagagagctttcaggccaatactggttgaaccctcttacctttctggtatggtgagagaagaatgcatatatttcattagctnttatgctgattcaaacagtagt

SEQ ID NO: 20529 - DNA, 421 bp, Gossypium hirsutum
  Clone ID: LIB3146-028-Q1-K1-C11
cccacgcgtccgcccacgcgtccggtgaaaaatcgatgatcaagaagcgatacatgtaccttacagaagagattttgaaagagaatcccaatgtatgtgaatacatggctccttcactggatgctaggcaagatatggtggtagttgaggtgccaaagctaggcaaagaagcagccaccaaggccattaaggaatggggccagcccaagtccaagatcacccaccttgtcttttgcaccactagtggtgtggacatgcctggggctgactaccagctcaccaagcttttgggcctccgcccgtccgttaagcgcctcatgatgtaccaacaaggttgcttcgcaggggggacggtgctccgagtggctaaggacttagctgagaacaacaaaggtgctcgtgtacttgttgtgtgctcgga

SEQ ID NO: 20530 - DNA, 426 bp, Gossypium hirsutum
  Clone ID: LIB3146-028-Q1-K1-C12
cccacgcgtccgcccacgcgtccgagattctcaaaggtgttaattatgcatctggttctgctggaattctcaatgatagtggccaacatctgggtgttcgaataagcatgaacatgcagttaagcaaccaccaaagtgttatctcaacaatagttgagatgttgggaaattgtgcagcatcaaagcttttaggcaaatgcatgtatgcggttcaaataggcagcaatgactacattaacaactatttcaagccagagatgtacaacagcagccacctattcactccagagcaatatgctgcttatctcatcgaacaatattcacggcaaataaagactctgtacaataacggcgcaaggatgtttgcactgttcggacttggtgccataaggtgtactccaaatgcaatcgcggtgcatggaacaa

SEQ ID NO: 20531 - DNA, 403 bp, Gossypium hirsutum
  Clone ID: LIB3146-028-Q1-K1-C2
cacatctcagtttcccagcattcatgttaaggaaaaatgggcaaaaaatctctatcttgcttgtctatgctatggaaggactgtatcatgaaatccatgtcattggtgacaattttactgagggataaaagggtggattttgttttcttcccctaattttatctgttatttgctttctctcgatgttccatgttaaatgtttagaggaggggagtacactagggatgtctaaatatacctcaagcccttgctatttagtttttgtattttaaaaatgtataagtgttcacaccctttgctccttttaaatattacttatgtgtaatattttcttgatataaagtaatgatgtggaattaaaatgatgttcttttcaatgttgtggaattattttgaaaatata

SEQ ID NO: 20532 - DNA, 403 bp, Gossypium hirsutum
  Clone ID: LIB3146-028-Q1-K1-C4
cttccatctcttccctttccttttccccttcgccgccccaccttttcgccaccgcctactccacttccgtttccctcttctccccgctctccctctccgacggcgatgtttcaccttcctccacaatctcctccttctccgacgtcgtttcttctattgccttccgtaacgacggcctcctcttagccgcttccgatctctccggtctcatccaggtcttcgatgtcaaaacccggaccccgcttcgtcgcctccggtctcatacccgtccggttcggttcgttaagtacccggttctggataagctccatttgctatctggtggtgacgatgcggtcgttaagttctgggacgttgctggggagagcttggtattggacttgatgggtcataaggattacgt

SEQ ID NO: 20533 - DNA, 391 bp, Gossypium hirsutum
  Clone ID: LIB3146-028-Q1-K1-C5
atcttctgaagccatctgatgttatacttagttttgatggggtaaaagttgctaatgatggaacagttccattcaggcatggggagcgcataggcttcagctatcttgtttctcagaagtatactggggatactgcactagttaaagttctccgtgattcgaagatacttgaatttgatataaaacttgcgactcacaagaggctcatcccagcgcacaccagtgcgatacctccttcttattacattattgctggatttgtttttactgctgtaactgttccatacttgcgttctgagtatgggaaggattatgaatttgatgcacctgtcaagctattggataagcatctacatgcaatggccgagtctacagatgaacagcttgttgt

SEQ ID NO: 20534 - DNA, 394 bp, Gossypium hirsutum
  Clone ID: LIB3146-028-Q1-K1-C6
cccacgcgtccgagagacgttaaggaaaagttggcttacattgccctcgactatgaacaggagctagagacctcaaaaacaagctcatcagtagagaagagctatgagttacctgatggtcaggttattaccattggtgctgaacgtttcagatgccccgaagtgcttttccaaccatccttgattggtatggaagctgcaggcatgcatgaaactacatacaattcaataatgaagtgcgatgtggatatcaagaaggactagtatggtaacattgaccttagtggtggtacaaccatgttctcggctattgccgacagaatgagcaaggagctttcggcactcgctccgagcagcatgaagatcaaggatgcagctccacctgagcgaaagt

SEQ ID NO: 20535 - DNA, 394 bp, Gossypium hirsutum
  Clone ID: LIB3146-028-Q1-K1-C7
ctccgataacgtttccggcaagatatctggctccggcaacagcaagtgccattgctcaaagcgaaggaaaaatagggtgaagaaagtaataagggttcctgccataagttcgaagatcgccgatattccaccagacgagtattcatggaggaaatacgggcaaaagccaatcaaaggctccccattcccgcgaggatattataagtgcagtagcgttagagggtgccccgcgaggaaacacgtggagcgagcccccgatgatccgtcaatgttgattgtaacgtacgaaggggagcaccgacacactcaacccgcaatgcacgagaatatggctcctgccgtgggaatggactggacttcgagtcaacgtgataataagcaaatattaatctaa

SEQ ID NO: 20536 - DNA, 394 bp, Gossypium hirsutum
  Clone ID: LIB3146-028-Q1-K1-C8
gctcatcaacggtccaaccaacgttaccctcaactccactggcgaacaatattacatttgcacaattgcgcggcactgtgaactgggtcaaagattagccattaccgtctccgccacttccagctctcctttgcctgcaccttcacctactactcctgcaaccccttctcctacttccaatgattgtacaccggctcctacatccggtccaacagctggctcgatacctgctcccaatgccactcctaattcttcatcttcatcatctgtccttgccactctgttgctgtccctattccccattttcatgggtttaattttctgatctatattgaggatcgaggataccaatcttcttatacttcatgattaattatttgttccttccacgata

SEQ ID NO: 20537 - DNA, 415 bp, Gossypium hirsutum
  Clone ID: LIB3146-028-Q1-K1-C9
cattgtttgaacatacaagtgctgacaattttattactttctcttaacttttagcatattctttggaggcattatcacaattgtttttttgaggcgagtgccactttgatatgtagaaagaaaactgagaattagtgatgattttacccaattcagtccacttttattgttttaaatcttagatgctaatttgattctcccttttgaggctgtaatcttttttgggattacatttgcagtctctcctccaaatgaaacttgtaatctaaacatatatctattaaaagaaatgacttttcatgctcttgcagttgcaaaaaaaaaaaaaaaaaaaaaaaaaaaaaaaaaataaataaaaaaaataaaaataataaaaattattaaaaaaatatatattataaataatatattaaaa

SEQ ID NO: 20538 - DNA, 242 bp, Gossypium hirsutum
  Clone ID: LIB3146-028-Q1-K1-D1
cttatatcaccttaccgttaacaatataagcttagataacaaacaatgcgatagcttaatgggtaggataaattcggtgaagaaacatataagggttcctgtcataactactaagatctccgtatattccactatacgactattcatggcagaaatactggcaaaagccaatcaatcgcttccccatttccgctaggatattataaattcaatatcgttagaaggtaaccccgttaggaatc

SEQ ID NO: 20539 - DNA, 423 bp, Gossypium hirsutum
  Clone ID: LIB3146-028-Q1-K1-D10
gtttcgactgttctcagatctaaacgacaacgtttccagatccacaatggcttctacattcagcggcgatgaaacggctccgttcttcggctttctcggcgccgccgccgctcttgtcttctcttgtatgggagctgcatatgggaccgctaagagcggtgtcggtgtggcatctatgggtgtgatgaggccagaattggtgatgaaatcgattgtacccgttgttatggctggtgtcttgggtatttacgggttgattattgctgtcattattagtaccgggatcaatcctaaggcaaaatcgtattaccttttcgatggatacgcccatctttcatctggtcttgcttgtggccttgccggtctttctgctggaatggctattggaattgttggtgatgctggtgtcagagctaatgcaca

SEQ ID NO: 20540 - DNA, 425 bp, Gossypium hirsutum
  Clone ID: LIB3146-028-Q1-K1-D12
gccagccgagaaaaagccagccgaggagaaaaaagccgagaaggccccagctgagaaaaaaccaagagccgagaagaagctccctaaagaagccggggacaagagggagaagcgaagcaagaagagcatcgaaacctacaagatctacatcttcaaggtgctgaagcaagtccaccctgatatcggcatttccagcaaagccatgggtattatgaacagcttcatcaacgacatcttcgagaagctggctcaagaatcttcgaggctcgcacgctataacaagaagcccaccatcacctcccgtgagattcagactgccgtaagattggtcctgcctggggagttggccaagcatgctgtttcagaagggaccaaggcggttacaaagttcaccagttcttagtttccaaaaatctgggaaataa

SEQ ID NO: 20541 - DNA, 396 bp, Gossypium hirsutum
  Clone ID: LIB3146-028-Q1-K1-D2
cccacgcgtccgcccacgcgtccgcaagaaactggtggtggtggatttcacagcatcatggtgcgggccatgccgttttatatcaccaatcctggtggatcttgctaagaagctgcccaacgtcatattcttgaaggtggacgtggatgaactgaatactgtggctcaggagtgggctattgaggcgatgccaacttttgtgtttctgaaagaaggcaccataattgacaaggttgtgggtgcaaggaaagaagaattgcagcagaaaattgcctttcattcatctaacccggtgcagacagcatgaatcaacatttaaatgtacttgatgtctggagttgtttatgaaactaggatcttatgaatgtctgacagacagaccctaaataatgtgtg

SEQ ID NO: 20542 - DNA, 404 bp, Gossypium hirsutum
  Clone ID: LIB3146-028-Q1-K1-D3
ggcctgccatgtttgaagtataccagctcttaagagctatcggtgaacaatacaatttcactacagaagatgaaatttcgatgccttcagataccaatgatgtcggttatttagaggaacttatagttgctcgataaatcaacaagaataagtgcaaagatatgggatacggtgagtatttcttgttgtttacgtttaataaagggttgagattacatgcactttctaattaggtctgtgtcttttgtttcatagtagaatacttgattagtttcatggaggaaacactttagattcattactaagatattcttatctccttaattaggctttcacccttagttacaccaaggaaatgctacattgtaaagtaagatcaatttataattatggattcttgttct

SEQ ID NO: 20543 - DNA, 381 bp, Gossypium hirsutum
  Clone ID: LIB3146-028-Q1-K1-D4
attagatttgagcttttagccaggctgtgtcctaattccactggagctgacataagaagcgtgtgcacagaggctggaatgtatgccattcgggctcggagaaaaactgtgacagagaaagacttccttgatgctgtgaacaaagtgatcaaaggttatcaaaagttcagtgcaactcccaaatacatggtttacaattaaccaggttctcctaaagacatgttctacattcaaaccaaaacatatatacatttttcaatgtattggaatagatattcaatgctgtttctttttatgaatttgagttgctttaatgtggattttacacttccctatatatacactaatggtcaatatatagacattgatttttactttact

SEQ ID NO: 20544 - DNA, 380 bp, Gossypium hirsutum
  Clone ID: LIB3146-028-Q1-K1-D5
cccacgcgtccgggcggcaagccatttgtgatgagatgaacaacaagacgtgaatgttgggtattcccgggatctctgagtggagcagtgatggtatgttgataagctgagaagaggtccgttgatggtatccatgaggcggcaagccatttgttttagaaaaatatttcaattatcctacagtgtgcttttctttatgttttagcaattttggttgatattttatgagtcaggaatactgatactcctgttttatttacttttaagagcaaaggtatgctgttgacatgagagagctttgaattatccatgtagctagagaattattattattattattattacccttttactttaaaaaaaaaaaaatataatataat

SEQ ID NO: 20545 - DNA, 382 bp, Gossypium hirsutum
  Clone ID: LIB3146-028-Q1-K1-D6
cccacgcgtccgggcggcaagccatttgtgatgagatgaacaacaagacgtgaatgttgggtattcccgggatctctgagtggagcagtgatggtatgttgataagctgagaagaggtccgatgatggtatccatgaggcggcaagccatttgttttagaaaaatatttcaattatcctacagtgtgcttttctttatgttatagcaattttggttgatattttatgagtcaggaatactgatacttctgttttatttacttttaaaagcaaaggtatgctgtggacatgagagagctttgaattattcatgtagctagagaattattattattattattattacccttttacttttaaacattagtaaataactatactat

SEQ ID NO: 20546 - DNA, 410 bp, Gossypium hirsutum
  Clone ID: LIB3146-028-Q1-K1-D7
aataataaattgcatctcattaaaaatattttaagtatgaaattttacatcatcccgttaaaaagtcatcaaatttttttaaaaaaacaattttaaaaaaaaataaaagttgatggtaaaaaaaggtttaaaatacaattaaaattattttgacaaaatatgtaaacgttaatcactgaattatcattaagccttctgaaatttatccctttctactatcagaatgaattttccattttcaattttttttccccggtgatggtgtttgggcctaagcccaactataacccaaagatataatttcgacgccagcgcgcaagattgacgtagaagaaagatgagtgccgaaaaagaatcctctgtctctcaacgtcgcttgtcctgcactaaatgcttggacgtgctctggt

SEQ ID NO: 20547 - DNA, 394 bp, Gossypium hirsutum
  Clone ID: LIB3146-028-Q1-K1-D8
gagaaatgatagggattacagagatagattggagcgctctgaaaagtcccgggcagatgatattttgattgagaagtcgagagatagatcaatagagagacacggaagagagtgttctgttgagagaagcattgataggaatttggatagacttggtgataaagctaaggatgagcgcagcaaagacgaaagaagtaaagtacgatatgctgatacatccgtagaaaagtctcatgctgatgaccggtttcatgggcaaagcttgccgccaccaccacctttacctcctcatatggtcccacaatctgttaatgctactggtagaagggatgatgatcctgacagaaggtttggtagtacaagacacactcaaagactctctccaagacatgaa

SEQ ID NO: 20548 - DNA, 422 bp, Gossypium hirsutum
  Clone ID: LIB3146-028-Q1-K1-D9
atggggtcttggatttgtcattccagcattgtttatgggccttgcaattggaagttttttctcaggcacggcactctatagatttcaaagaccaggaggaagccctattacaagaatgttccaggttttggttgcagcatttcataaacggagcctcaaggtacctgaagacagtactctcctatatgaaactggtgacaagcactctgccatagaaggaagtcggaaactagagcacagtgaggagttgaagtgcctagataaagctgccatagtcactgatgttgaaaccaaaagtggggacttctcaaatccttggaggctttgcactgtaacacaagtggaggaattgaaaatcttgatccgcatgtttcccatatgggctactggaattgtgttctctgctgtatatgctcaaatgt

SEQ ID NO: 20549 - DNA, 410 bp, Gossypium hirsutum
  Clone ID: LIB3146-028-Q1-K1-E1
aataataaattgcatctcattaaaaatattttattatgaaattttacatcattccgtgaaaaaggcatcaatttttgttaaaaaaacaattttaaaaaaaaataaaagttgatggtaaaaaaaggtttaaaatacaattaaaattattttgacaaaatatgtaaacgttaatcactgaattatcattaagccttctgaaatttatccctttttactatcaaaatgaattttccattttcaattttttttcccctgtgatggtgtttgggccttagcccaactataacccaaagatataatttctacgccagcgcgcaagattgacgtagaagaaagatgattgccgaaaaagaatcctttgtttttcaacgttgcttgtactgcactaaatgcttggacttgctctggtt

SEQ ID NO: 20550 - DNA, 183 bp, Gossypium hirsutum
  Clone ID: LIB3146-028-Q1-K1-E10
catacatgtgggtcggtaccttacacaggattatttacctgtacgaaaattaatggtgaaaaagattgttttgattgccattgttcgacataaagagcatgacaatgtacacattgtcctgtccaaagctgccacactttctgacctcacggttaacatggagcttacaggactttttaacaa

SEQ ID NO: 20551 - DNA, 395 bp, Gossypium hirsutum
  Clone ID: LIB3146-028-Q1-K1-E11
gaaagaaactcgaaacgagaatctgaaatttcatctaatggtgacaccaaccaaaatgcattggaaagagcagcatatgcagatgcaaattcactacttgacaaggaagaacaagatattgaaagggcaattactgggattacagaagtgcagatgaaagagatacaagacaagtttcttcgttttgaggagatggatttgcagactgagaaagagaggcaacaactggagagcatgaagaatctactttttattgaccagctcaatctttcatttcgtagaaactatacatgaaatactgaacaagtggtgaagaacaattgttttctttttcttctgtattctgcctctgcagatggttatggccaaaggagaaaatttcttgaattgcaggt

SEQ ID NO: 20552 - DNA, 426 bp, Gossypium hirsutum
  Clone ID: LIB3146-028-Q1-K1-E12
gttttctcagctgggtttttcaccttcaagccattcaaacaaccaaccttatgcagccaaaaaccaagtgttcatcccaaccagcttcttccgccgcccattcttcctccaaacccacttctgccgccgcccattcttcctccaaacccacttctgccacccccagtgctccctcctaacccatttcagccgccaccagctccactagttccaaacccattgcagcctccaccagctccactagttccagacccattgcagcctcctccagaacctgcagcaccatccttgccgccggttccaggactagctcctccaccatcgtccccgtctccaccgccagacttcccatttccacttccaccattccctttccttcctgtaccccccttcccaggtgtgcccccatcgaaatcttctccttga

SEQ ID NO: 20553 - DNA, 378 bp, Gossypium hirsutum
  Clone ID: LIB3146-028-Q1-K1-E2
cccacgcgtccgcccacgcgtccgcccacgcgtccggctactgatagtgaagacccagggcattgtagaaaaacatggataccatcttcttccgcattatgacagcgaggacagaagctgtttgcaaccactctcttgagtctgagattcgatagagtaggaataaaattccataagattcgccatatagtaatagtaattttttatgggagatgtaaattccatagctttttatagaaattttttgtttcagcctgtaataaataagaactaggatccatactagcctcttgtaatagtttataggcacttcggactgaaaattcgccggaatgttcttctcgccagacttgaaagtcatcacgtgcttcttttgcc

SEQ ID NO: 20554 - DNA, 402 bp, Gossypium hirsutum
  Clone ID: LIB3146-028-Q1-K1-E3
actagttctagatcgcgatctaggaagatcacccttaagagctcggacggcgaatcattcgaggttgatgaagcggtggcgttggagtcgcagacgattaagcatatgatcgaggacgattgcgctgataacgggataccgttgcctaatgttacgagcaagatcttagcgaaggtgatcgagtactgcaagaaacacgtcgaggctcctaagacagacgatcgatccgccgatgacgagctcaaggcatgggatgatgattttgtcaaggttgatcaaaaaaccctcttcgacctcattctggcggcccgctctttgaatatagagagcttgttggacttgacatgccgaactgttgccaacatgataaaggggaagacagtcgaggagattcgcactacc

SEQ ID NO: 20555 - DNA, 405 bp, Gossypium hirsutum
  Clone ID: LIB3146-028-Q1-K1-E4
gcaagatcttagcgaaggtgatcgagtactgcaagaaacacgtcgaggctcctaagacagacgatcgatccgccgatgacgagctcaagagttgggacgctgactttgtcaaggtcgatcaagctactctctttgatctcattctggcagcgaactatttgaacatcaagggcttgctggatctcacttgccaaactgttgctgacatgatcaagggaaagaccccagaagagatcaggaagactttcaatatcaagaatgacttcaccccggaagaggaagaagaggttcgtcgggagaaccagtgggcattcgaatgaagggtcaatttcgagtgccggttcaattgtatcaaactcatctatatataaaaatgtagtttgttgctctgacttttcatttgta

SEQ ID NO: 20556 - DNA, 393 bp, Gossypium hirsutum
  Clone ID: LIB3146-028-Q1-K1-E5
tcgaaaatctgtcatccagcggaatttgatttttacctttgcagtcatgctggtattcagggaacaagccggccagcgcactaccatgttctttgggatgaaaacaattttacagcagacggtatacagtctctaacaaacaacctttgttacacatatgcaaggtgtacgcgctcagtctcagtcgttcctcctgcatattatgcacatttagctgcattccgtgcacggttctacatggaaccagagatgcaagagaatgggtcgaacagctgcagtaatggtcaaaataaaggtacaagggtagtgggagaatcgggggtgcggccattgccagccttgaaggagaatgtgaagagagtgatgttctactgttagaatggatgagtggag

SEQ ID NO: 20557 - DNA, 394 bp, Gossypium hirsutum
  Clone ID: LIB3146-028-Q1-K1-E6
ctaatttaaaaggggaaaggcagagccaaacaatctccgatatgagcatcaatatattcccgattttattctgttcgataattgctttgtgttgtttaatccaaatggctgaatctacagacgcaacgaaatcatcttcggcggcggcggcggcggcgggtgggacggatgcggcggtccacatcgtttacaccgagaggcctcaggatgagcagcctgaagcctaccatatccggaccctctccaacgtcctcggcagcgaagaagctgctaaggaagccctgatctacagttacaagacggctgccagtggcttctccgccaagcttactccccaacaggttgccgaaatatcaaaacaacttggtgttcttcaagttgtcccgagcaggac

SEQ ID NO: 20558 - DNA, 391 bp, Gossypium hirsutum
  Clone ID: LIB3146-028-Q1-K1-E7
gttttggcaaacaaagaaatataaaggaatcccactgtaaccaatatccccaagccttcttcctttcaagcaattatatcattgtaagttagcaatggagaatgatctcaaggcaacagaactgagattgggattacctggcagtgatgagcccgagagacaaatgatccctaggcctaacaagagaaccttatctgacattgtttctgagggatcaaggtcgaccacagaggaagatcatcaagacactgctcctcctgccaaggtgcaaattgtaggatggccaccagtcagatcataccggaaaaattgtttacaaggcaagaaagatgaggttgaaggggggacaggaatgtatgtcaaagtaagcgttgacggagctccttatctc

SEQ ID NO: 20559 - DNA, 162 bp, Gossypium hirsutum
  Clone ID: LIB3146-028-Q1-K1-E8
cccacgcgtccgctatacttaaatctatcatgcgagtgttgaaatagtttttggtagcccggaaatcagggtttgtttttggtagtattgcagatgatgatcttacatatgaactttgaactgctatggatatattttaatatatggacttattttggtacc

SEQ ID NO: 20560 - DNA, 421 bp, Gossypium hirsutum
  Clone ID: LIB3146-028-Q1-K1-E9
tatgcatgaggtacgggatcttacacagttgccatttgctgaacgagaattaatgttgataaagattgctgtgaatgccgctgctcgacgggatgtccttgacattgccaacatttttagggccaaggctgtcgatgtttctgaccacactgtcaccctcgagcttacaggagatctggacaagatggttgcactgcagagattgttggagccctacggtatctgtgaggttgctcgaactggacgtctcgcactggtgagagagtcgggtgtcgactccagatatctacgtggttactctcttcctctataaaattttaaagtatttttaaggtattggtgtgatatgtatgacatattttgctctttatatacagtttgtgttatgttttgaataatcagaactctagtgaaatagacg

SEQ ID NO: 20561 - DNA, 402 bp, Gossypium hirsutum
  Clone ID: LIB3146-028-Q1-K1-F1
caaaaactcgtaacaatggccatgtccgtccctattttagccatcatctttgctctccatctcatcgccttcgtcttcgccgtcggcgctgaacgacgccgtagcttcgctaaggtggtgcctgatcagtacgacgagaggacctactgcctctacagtacggatgcgtcgacggtgtacggactatctgcttttggtctgctccttcttagccaggttgctgtgaacggcgttactagatgtctctgctttggcaaaggccttgtctccgccacttcatccaccacttgcgccatctttttcttcgttttctcctggttaagctttttgggagctgaggcatgtttactggcgggatcagcaaaaaatgcataccacaccaagtacagaggaatctttggc

SEQ ID NO: 20562 - DNA, 419 bp, Gossypium hirsutum
  Clone ID: LIB3146-028-Q1-K1-F10
cccacgcgttcgcccacgcgtccggttcctttctcacagatatcatcgaaatccactgcagaagagcttttagataaggagctccctttgaagtttgtagaggttgacgaggaacagtccaggcttgtcttcagtaaccgcaaggccatggctgatagccaagcacagctcggaattggatcggttgtcctcggaactgttcagagcctgaaaccatatggtgctttcatcgacattggtggaattaacggccttcttcatgtcagtcaaatcagtcatgatcgtgtttcagatattgctacggttcttcaacctggtgacactctgaaggtcatgatattgaaccatgaccgtgaaagaagccgagtaagtcttttcacaaagaaactagagcctacccttggagacatgattcgcaa

SEQ ID NO: 20563 - DNA, 419 bp, Gossypium hirsutum
  Clone ID: LIB3146-028-Q1-K1-F11
gatttaacttattctgtttgattatattagaataagaaatgaaataaatgaaaagtttacaaaccatttcttctatttattacatgaatcttttaccatggtccatatttgccatgttgggtcacatttaggaaccccatgactaagggtttatgtagaacaaaagaggagagttaccccttattcttacaaactttggttatcagagaaaaggtagatttgggggtattggagtacctattcatttcttgacaaaggcaacccccttctcaatgctagtttctagttctttcttcgtcttctccaagccaaccctctcatactctattagtgggccaagagggtatatttcctcaactccgcaacgaccgagtcttaccttggatgcgaagaagggcaattcagtcacatgagaagcc

SEQ ID NO: 20564 - DNA, 424 bp, Gossypium hirsutum
  Clone ID: LIB3146-028-Q1-K1-F12
ctcaacagctactgggtttcctaagtttgatctcatgcttctcggaatgggaccggatggacacgtggcttccctctttcctggccatcctctggtgaaggagaacgaaaagtgggttaccttcattaaggactcaccaaaaccgcccccggagagaatcacctttactttcccagttatcaactcatctgctcacattgcacttgtgatctgtggtgctggtaaagctggtgcggtgcattccgcattgggaaatagtcaaaattccgatccactgcctgttcagatggtttcaccagaaggggatcttgtttggtttttggacaaagatgcagcttccaaactataagttttgaagcctatagcttatctgagttgttactcgagacttactttgagtgtgttaaattggagttaactggtc

SEQ ID NO: 20565 - DNA, 400 bp, Gossypium hirsutum
  Clone ID: LIB3146-028-Q1-K1-F2
ctagatcgcgagcggccgctcgcgatctagaatatcataagacattatagaggatgtgcatctgatcgactacgaataatgcgtcagagctcaacgacgacctataatcactaatgtagtgcgtgatcagtacgactagaggacctactgactctacagtactgatgcgtgcaccgtgtacggactatctgattggggtctgctacttcttaaccaggttgctgagaacagcattactagatgtctctgatttagcaaaagccttgtctacagcacttgatgcaccacttgcgccatctttttcttcgttgtctcctgcttaagctttatgggagctgaggcatgtttactggcgggatcagcaaaaaatgcataccacaccaagtacagaggaatcttt

SEQ ID NO: 20566 - DNA, 404 bp, Gossypium hirsutum
  Clone ID: LIB3146-028-Q1-K1-F3
aagatctccatcaaaatcaacgtctcagagatattgccatgaggattctagtttcggaaggtcggggagtttcagataccagtcgggtgatgatactggcagaaactatcatacagtgtaccaaagacccactgatgtcgatatcccccacgatagtaggtttattgatagcagaaaacatagagaaaggagtggttcatcgcatatggaaagaaactggaaaatgaaaaggagatctccatctaaacctaagcatcagagttatttcgacaaggactcccatagtttcagatgccagccgggtgacagtagaaccaaaagttatgacagtaaccctcaccatggaaggtctattgatagcaaaaagcatagagaaaagagaggtgcatcacccttggagattg

SEQ ID NO: 20567 - DNA, 386 bp, Gossypium hirsutum
  Clone ID: LIB3146-028-Q1-K1-F4
cccacgcgtacgagaagactgatgctagagattgattgtggaggattatgcaagaaaagatgcagtcaacactcgaggccaaacagatgcaacagggcgtgtgggacttgctgcttgaggtgcaagtgcgtgccaccggggacttcagggaacagggaggtctgcgggacctgctatactggcatgaccacccatggaaacgttgccaagtgcccttaacctttacgtcgcccaatatgtgttgcagccatcaaggggaaaaatgaaatgtttgtttgtgtaatatgtatgttgtagctcagatgtctcacctactcctaaaattattagtacttgtaatatatatttttaaaatagtagtatgcatttagcctccgttcagtatt

SEQ ID NO: 20568 - DNA, 395 bp, Gossypium hirsutum
  Clone ID: LIB3146-028-Q1-K1-F5
cccacgcgtccgcccacgcgtccgggaagaacgggacgtgcagggaagactggtgtggctacaacatttttgactcttcacgacaccgatgtcttcttcgatctcaagcagatgcttgttcaaagtggcagccctgtgcctcatgagctggcaaagcatgaggcttctaaattcaaaccaggaacaatacctgatagacctcctagacgcaatgacactgtttttgctcactgagaagctctgtactatggtattttagttgccaaattttctttcgttgctgcttacaagtgattgcttttgtacttttatcgcagcatttgaaagtggtatttgctgactttgcctttacttgctgctacaattgctgatcatagcaaaagtaacattttgaa

SEQ ID NO: 20569 - DNA, 394 bp, Gossypium hirsutum
  Clone ID: LIB3146-028-Q1-K1-F6
gcgaacggggagattagtggcttcggtttccgagtttcaagtgaagcgataaaatttggagaagaaaaagttatcgctggtcggcgacggtgagttggaaggaggggacccaccgccaccaaacaaatgccggagcgagttgccggcggtaccaataacgtttgcatgatgaccggatgatgtgcaagggccggttgggcaccgggaccggtggtaaatggcaacagttccggtttgcccaatggatttggaatttcatttggtttataccaagttcatggagaaatcgaatcattcttctgaatttttttttttgccatttaaaggtttaccatcataaatattggaccatgtattaatttaatttttattaatatatttgtgatagtattgg

SEQ ID NO: 20570 - DNA, 394 bp, Gossypium hirsutum
  Clone ID: LIB3146-028-Q1-K1-F7
cccacgcgtccgggcaataaatgttaacaaactgacctccgctgggtgtagagtaaaaatctggattgcagattggtttgcacagctaaacaataaaatgggtggtgacttgaagaaaatcaaagtagttggacagtatttgattgaaatctggaaggcagttggcatggacctgaatgaaaaggttgaattcttgtggtcttcagatgaaattaactccagggcatcagagtattggccacttgtgatggatatagctcgcagaaacaagctgcccaggataatgaggtgttgtcaaattatgggccgtagtgagcaagatgagttgtcagctgcccaaattctttacccatgcatgcagtgtgctgacatatttttcctcaaggcggacatt

SEQ ID NO: 20571 - DNA, 246 bp, Gossypium hirsutum
  Clone ID: LIB3146-028-Q1-K1-F9
ggtggacagatgggaatgaggcagcttgatcctaaggcatcgaaggctgagggtaatggccttgctactgctaaagacttaaaccgtcttacggctgtcttaataaaaatgcgcggtggtcattgatctttgatcatctttgtctatatgatgaattataatggatgtatctcctaggaaaaaatttacctagtatatttttgatagtttacatgaaagagatcacaaactgttcttaaaacaaac

SEQ ID NO: 20572 - DNA, 319 bp, Gossypium hirsutum
  Clone ID: LIB3146-028-Q1-K1-G10
cggacgcgtgggcggagtataaattaaatgatacaccgcaaataattccaacaacggataacaagtttcaacacaacgtctacttcaaggaatgcattcaccaaacatatctatggagcatccactaagaaagaaaatgcaacagctacgaacaagaagatggggaatgtgagtttagaataaaattatcgaaaaaagcttgtctcggaaacctccccaaattcattccttaagccaactttagagagaaaacaaaacctaaaacatctgtgtcgttggcttcttcctgtatctgcaactatgatcagcttatgcatca

SEQ ID NO: 20573 - DNA, 408 bp, Gossypium hirsutum
  Clone ID: LIB3146-028-Q1-K1-G11
cttttttttcccgagaaaattaagatttccattttattttcttcctaatgtcatgtttcagtatgtcttctgttgggccatccatccctatcagaagttagtttctgcacccatatgcctcttcgaagcaccgacaatttctgagatgatgctttgttgatgtaacctttttatgtagagccagtaaaaaactgttattgtgtgatgtccagggggatgatcgtcccattttattttcaaccaaagggtagtaagaaatccatgtaaatgttagtccaaaatggctgaaaattgtaaaagctgtatgtcttatgcttgattgtatataattaaaagagctttcatgttgcaaggctcatcctcctaaaaaaaaaaaaaaaaaaacccacgcgtccgcccacgcgttcg

SEQ ID NO: 20574 - DNA, 402 bp, Gossypium hirsutum
  Clone ID: LIB3146-028-Q1-K1-G2
gatcaaaatacaatttaccattatattaacttataatattttaaaaattaaaaagaattaagagaatttttaattttggggtcaagaccactgtctctctccctctgcccttgtgttttggttaataaaaataaaaattatgcatattttcaaattgggttcgaagtaaattaatatttaatttcgaatcggattctattgaggcatattaagtcgagatcgtagaatggacatgctgggtttttgctatcatgttatgatgctaaacttagctatgattccaaaactgacacctttcaagcaagatactcgcctcacgtccggcaaacaacagagcagaacatatcatgggataggctaagagcgccgccggtcgatacttgctcatatgatcttcacatt

SEQ ID NO: 20575 - DNA, 403 bp, Gossypium hirsutum
  Clone ID: LIB3146-028-Q1-K1-G4
ctgaagtccaaatctgaaaatccagtaactggaattgacttcaaacgcagagagacttatttgtccgatgaggagttcgagacggtattcgggatgccgaaagaagcattttacaagttgccaaagtggaagcaagatcttcaaaagaaggaagttgatctattctagagcttcatgcacttgaacaagtgatttaagtgtttccattgcattctacctagcaatccctcctatatttgatcttcaattccgcccaaaaatcatgatttcgtctacacgatgcctggattaccatttttgtccgtttttccttcttgataaacgtacgtgtaattagtattcggatggattccgatgttgcatggattaccatgaactcatattggaatgtttcgcaggtcaa

SEQ ID NO: 20576 - DNA, 397 bp, Gossypium hirsutum
  Clone ID: LIB3146-028-Q1-K1-G5
caattaccggcgaatttccgcaaagtcttacttgttcagacgaggaagtttgttgcttccggaaagctcgtaaaagtgaaagcctcttttaagctgccttcggcttatgccgcagctaagaaaccagccgccgtagctaagaaacctgccgccgcgaagcctaaatctgcaactaccactaccgccgcaaagtccaagccgaaggcgactaaaaccgcgtcgaaagcgaaagcgaaagctaaagttgcaacgcctgtgaaggcaaaggctaaagttgcggcgaaaccgaaggctactacaagtaaggccaaagctaaaccagcggctaagccagctaaggtagcgaagacggcgaagaagagttcgccagggaagaaagtaaaggctccagcaaaga

SEQ ID NO: 20577 - DNA, 393 bp, Gossypium hirsutum
  Clone ID: LIB3146-028-Q1-K1-G6
cccacgcgtccggcaggatcaatgaggcgattacatcaaaaggtggacaattcctcgaggcccctgtttccggtagtaaacagcctgcagaaaccggtcaactggtgattcttgccgctggagataaggcattgtatgaagcagcaatgccagctttcgatatcttggggaagaagtctttcttcttgggacaagtcggaaatggagctaaaatgaaacttgttgtcaacatgatcatgggcagtatgatgaatgcattttcggagggactcacactagctgatcgaagcggactgaacccacgtgaccttcttgatgtgctggacttgggtgccattgctaatccgatgttcaaagggaaaggaccagcaatgctccaaaacaactattccc

SEQ ID NO: 20578 - DNA, 247 bp, Gossypium hirsutum
  Clone ID: LIB3146-028-Q1-K1-G7
cacatgcgtgcggcttgatcaatggtgcgattacttcaaacggtggacaatgacgcttggcggcagcttgtagaagtgaacaccttgtataaactgcttaactgatgtttcttggctatgaaaaataggcatggggttaaggaacattgcgaagttgggatataatatggaaatactattatttacaggtagatgatgtggatggatattaaatcaaattggaatgcaacatctatcagtttcagtt

SEQ ID NO: 20579 - DNA, 392 bp, Gossypium hirsutum
  Clone ID: LIB3146-028-Q1-K1-G8
cccacgcgtccgaccacgcgtacgcggaaactacattacaaccctggtggcatatgcactattgtgcagatcaatgacctgaagaattccacacgacttactaaatgggagcttagacaagctaccaaacaagcccttcagttgctgtaggataactaccctgaatttgttgccagacaggtgtttatcaatgtgccatggtggtaccttgcggcgaataagatgataagtccatttttaacgcaaagaaccagaagtaagtttgtgttcgcaggcccttcaaaatctgcagagaaccttttcaggtacatcgctgcggagcaagtaccagacaggtacggagggttgatcaaagacggtgaattcggcaacaccgatgccgtcaccgaaat

SEQ ID NO: 20580 - DNA, 419 bp, Gossypium hirsutum
  Clone ID: LIB3146-028-Q1-K1-G9
cccacgcgtccggctgtttaccgcaatgtttcctttgcttggataggtcaagatatactaggaattgctcttataatcacagttctgcaaattgtccatgtacctaatctcaaggtgggaacagttctactcagttgtgccttcttatatgacatcttttgggtatttgtttcgaaaaagttgttccatgaaagcgtgatgattgtggtagctcgtggggatagaagcggagaggatggcatcccaatgctactgaagatcccacgcatgtttgatccatggggtggttatagcataataggattcggtgacatccttttacctggactgttgataacattttcactcaggtatgattggctggctaacaagactcttcgagctggctacttcttgtgggcaatgattgcttacggctt

SEQ ID NO: 20581 - DNA, 407 bp, Gossypium hirsutum
  Clone ID: LIB3146-028-Q1-K1-H1
cccacgcgtccgctaaaactaattggattatgcatgaatatcgactcattgaatcttctcgtaaaagtggtagctccaagttggatgattgggttttatgtcgaatatacaagaagaattcaagtggtcaaaaaccattgtcaagtgtttcaagcagagagcaaagcacgaatgggtcatcatcatcgtgttcttcacaactggataacatgcttgactcattgcccgagttggacgatcgtttctttgctttgccgcgcattaactcgttcaaaacgcttcaaaacgatgtgaaactggggtttcaaaatctgggtatagggaatttggattgggggagtcttggtgggcttagctcggtgcctgagctggtaccgagtggacaaactcaaacacaaactcaaact

SEQ ID NO: 20582 - DNA, 399 bp, Gossypium hirsutum
  Clone ID: LIB3146-028-Q1-K1-H10
tttttctcgtccaatccaatttgttgaggaatcagacaaaggtttaggttatttgctgataatattttgaagaaaacatgacaactgctgctagaccgacatggcaacctgccaaaggtgggaatgaacagggtggcactcgcattttcggcccatctcagaagtattcgtcgagggaccttgctgctcatactactctaaagcctagaaaggatgggcaggacacccaggatgagttgcagaagagaaacctccgcaatgagcttgaagagcgtgaacggaggcatttctcatcgagggacaagtcctataatgatgacagagatcataggaagggaaaccatcttcttttagaaggggcaaaaagggaggctgaagaccgaattgttccgcgcagtg

SEQ ID NO: 20583 - DNA, 233 bp, Gossypium hirsutum
  Clone ID: LIB3146-028-Q1-K1-H11
gaaaaaaataagaaatggttgaaaacatcgtaaaatagacgaatcccaatatagattgggaaggataaaataagatgagaatattggaaaataaaataaaaataaaatataacagacgtttacctctccgtctttgaaagtctggcttgactcttgaaatttattgagagttcctttttttttttaggtgaagctgttagcactttatgcctttctgaataattcgacccttt

SEQ ID NO: 20584 - DNA, 396 bp, Gossypium hirsutum
  Clone ID: LIB3146-028-Q1-K1-H2
agtacagccatttaacccagtgaagaatcgtgggttctctgcatttctgtctcgtggcccttctccattagctacttccaaggtttcggtttctgggtttcattcaaaattccctgttgggtcgagtttcagttgttttgctcgaaggggtttcgttgtgagggcagaatctaaccctgaaggtgaaggtgaagctgaagctgaaagaaatgaaaatggtgttgaagaacccgaaacgaaagctgaagctgaagttgaaggtgaaggtgaaggtgaaggagaagatgaggctgaagaagagaaacccaatgagcctagaaaaccaaggattaagcttggtgatattatggggatattgaataaaagagcaattgaagcatcagataaggaaaggcc

SEQ ID NO: 20585 - DNA, 402 bp, Gossypium hirsutum
  Clone ID: LIB3146-028-Q1-K1-H3
gggggttgtatgatggtttcatcactatcatctcggataggttgcatcacttttgcaagttcctccatgaagaagaccaagccaattggtttagcaaatgttaagtagtggttaatagcgtaagtgttttaagacacctcttgtttatttataaaactctaaaattgttatttgtttttctttttaagttaattgtaagtcggaattatgaaagtgtaagtgactttcttgacaattttgagaaaaattctcctaatgctctctctctctctctctctcccctctctaacaaaatatatattgaaatacactacatttataacaccaacatactggattgtttagaaatcgatgattatatatatttgtcatttttcatgttcattttactgtccatgttta

SEQ ID NO: 20586 - DNA, 390 bp, Gossypium hirsutum
  Clone ID: LIB3146-028-Q1-K1-H4
gcgcccacgcgtccgcccacgcgtccgcggacgcgtggggcaaaattggatttgagttttgatgttacggagaaccatttataggagactttgttttcttttccacaaggaaattagatttcttcggctcctttatcttatgtaaacccttcaatgccttagtttatcgggtaacgaaaggtttaaagatggtcactctcactcactttgtccttgttacaaaaagatcgattgggctaacccttcaatacacataaaaatttggactgcaaaaaaaatataccatctctaacaaaatatatattgaaaaaacactacatatatgacaccaacatactggattgattagaaatccacgattatatatatgcgtcatttttcatgtgcatt

SEQ ID NO: 20587 - DNA, 392 bp, Gossypium hirsutum
  Clone ID: LIB3146-028-Q1-K1-H5
cgattattggcagcaatcttgttcaaggtaatgcatccacacgaagttcttcctcctgttctcggggcgtctgtatatgcaatagcttggattctatcttatgatgggttatcaggcatcccaacgccagcagaatctgtagattcactgacttcgagggtgcgttctactgatatcaacaaatctatgccagtgatgaaagatacaagtcccaatccaagtaggttccttttgtcacttttgaaccgaagcccattcagctgttcaagtttccagaaaggtgttaagggccctgcagtaggggctgtaacaaatggagttgagtccatgagttacaaccaacaggcacctgtaatgtcagctggaatgagcttatatcaagctgcgttgca

SEQ ID NO: 20588 - DNA, 390 bp, Gossypium hirsutum
  Clone ID: LIB3146-028-Q1-K1-H6
cgaccgaaaaccctaattttcggaggtaaggaggaaaagaagaaatggcggtgccgcttctaagtaagaaaatcgtgaagaagagggtcaagaagttcaagagacctcagagcgaccgcaaaatctgcgttaagacaaactggcgtagaccaaagggtattgattctcgtgtcagaagaaagttcaagggatgtactttgatgcccaatattggctatggttcagacaagaagacccgacactatcttccaaatggctttaagaagtttgtcgtgcacaatgttggagagcttgaactgttaatgatgcacaacaggacatattgtgccgagattgcccatgatgtttcaacaaagaagagaaaggagattgtggaacgggcagcccagc

SEQ ID NO: 20589 - DNA, 394 bp, Gossypium hirsutum
  Clone ID: LIB3146-028-Q1-K1-H7
cccacgcgtccgagtttttcaaccgggtttgaatgaaaagttggatcgaacttctccgcaaagggatgacatcccagagatcgttctggctgatgagccttacgtcggtcaggagtttgaatctgaggcatctgcacatgctttttataatgcatatgccacgagggtaggattcatcattcgtgtgagcaaactttcccgttcgaggcgtgacggatctgctatcggtagggctcttgtttgtaacaaagaaggttttagaatgcctgacaaacgagaaaaaattatgaggcacagggcagagacgagggtcggatgcagggcaatgattttggtgaggaaagtaagttctggtaaatgggttgtcacaaaattcgtgaaggaacacacacat

SEQ ID NO: 20590 - DNA, 394 bp, Gossypium hirsutum
  Clone ID: LIB3146-028-Q1-K1-H8
cccacgcgttcgattttttcaaccgggtatgaatgaaaagttggatcgaactttttcgcattgggatgacatcccagagaacgagctggctgatgagccttacatcagtcacgagtttgaatctgaggcatctgcacatgctttttataatgcatatgccacgagggtaggattcataatgcgtgtgagcaaactttcctgtacgaggcgtgacggatctgctatcggtagggctcttgtttgtaacaaagaaggttttagaatgcctgacaaacgaaaaaaaattatgaggcacagggcagagacgacggtcggatgcagggcaatgattttggtgaggaaagtaagttctggtaaatgggttgtcacaaaattcgtgaaggaacacacacat

SEQ ID NO: 20591 - DNA, 233 bp, Gossypium hirsutum
  Clone ID: LIB3146-028-Q1-K1-H9
gttggttgctttgaattctcttgcttgattttaaagaatggtgtgcttttggtattttcctttttactcttaaaacttaaaccgtcttccggttgtcttaataaaaatggcggtggtaattgatctttgatcatctttgatatatgatgaaataaaataaatatataaactaggaaaaaatttacctagtatatattttatagtttacatgaaagagattacaaattgttctt

SEQ ID NO: 20592 - DNA, 137 bp, Gossypium hirsutum
  Clone ID: LIB3146-030-Q1-K1-A1
cacggacggtgtatgataaggccattgttattaaggcttgctgtatgaactaggagctatacccaaggcatgtgcttgtttggagccaaataatcagccttctgtgccctttggggtatacaaaagcgacaccacac

SEQ ID NO: 20593 - DNA, 305 bp, Gossypium hirsutum
  Clone ID: LIB3146-030-Q1-K1-A10
gccaaaaccccagtacatggctaggaaagttgctgctgcccaaggtggatcaagaagtcagtggtattgacctaatatcaactacaaatggccaacaaaaaatgccggtgaggatttagtcccaaattgctcttcctactgctggttgaggaaaagctcagacaagttacaagtgaagctatgcattgtaatttatagcactaatttcaaagagatgaaactgtgcctacctatccttcataagatatgtgaaagttagagacttgaggaaaaggcaaaagtgaactcttttaacttatgaagtt

SEQ ID NO: 20594 - DNA, 284 bp, Gossypium hirsutum
  Clone ID: LIB3146-030-Q1-K1-A11
ctgatataactttatatcaaactcggtccgcttctaatctccttagtcgtgcaataactgtaacggtgattgctttcagcacaggtagttatgtggttttaaaaccttctcatggacttgccatcgcttcatgtttcatctgtcctgccgtatatttctgttattacatagaagtatttatagcttgggtgaagatggatctgtgataataaagaattttgtcacaaatattgtattatatgtgacgagttttatatgtgacactaataaaataagtgtgattt

SEQ ID NO: 20595 - DNA, 402 bp, Gossypium hirsutum
  Clone ID: LIB3146-030-Q1-K1-A12
cccacgcgtccgcccacgcgtccgcccacgcgtccgcagtttcaacaatcttcatcctctattgggctcctcttgccagtggatgggaatggaacaaagacaacatttgattgagttgctataaccaggcttcaactttaatttcaggaagccactcgattgtaagttgttattagtgcgtagcagtaatatatattgatttgatcgcctattgctactaatttcatatggacttcctattactgtatgatgaggcctgtaagcaagttgaatttatagtgtgtacccaaaaaacaattctaatatcaacttgttatggtgttccgtagaagatatgtaaggtagtgttaccctttagcttgtatgttgcttgcttgatttacagttcgaagttgttacaat

SEQ ID NO: 20596 - DNA, 126 bp, Gossypium hirsutum
  Clone ID: LIB3146-030-Q1-K1-A2
gcggcaggagcatatgagcctcgctggttctctacaccgcaaatccgtcgaagttggaaagcttctgaactgcgtgtaaagtcctgggatgatctccataaactatggtatgttctgttgaaagag

SEQ ID NO: 20597 - DNA, 166 bp, Gossypium hirsutum
  Clone ID: LIB3146-030-Q1-K1-A3
cccacgcgtccggttttaattaaacatataactgaagataaataagtagtatatattaagttcccttttgttctcgttaaggaaattgtatgttctaagcagaatgtaagcctaatatatgtttatatttaaacattgagaaataaataataaatctgagtagcat

SEQ ID NO: 20598 - DNA, 392 bp, Gossypium hirsutum
  unsure (1)..(392): unsure at all n locations; Clone ID: LIB3146-030-Q1-K1-A4
ggttctatgaggcatattaatagtcttgttgatgaaatgcaaaatgtccacctgtctatcaatccccctggaattctcaacagttttgcttgcttgagtttttgattcccaggaacaatcaacttatgtgaagcaaacaattgatggcagtttgaagatggaactttctcctatcatcagatgatgttccagagcaaggtaccaaagtattgaaatgaattatggggcagcatgaaagaaaagattgagttcctaaaaagagttccgaacactagcctatatccatccgattatcaagtcatgaaaagaaaggtagaaatatggtatggntcctattttttttttctttntctgactttttgttgatattcttttatcctaccgagagatca

SEQ ID NO: 20599 - DNA, 325 bp, Gossypium hirsutum
  Clone ID: LIB3146-030-Q1-K1-A5
gaccttgcagctgcacttaaagagatgaacggtaaatatgtgggaaatagaccaatcaagcttcgaaagagtaactggaaggagaggatagatcaggatgcccttgtgagacagaaaaaccattatcagaaaaagccaaagctacagaagaaagggatattgcacaagtgagcacagctctggtgaagctttttcgccttccttgtcttggtggagcctgtttgaccgactgaatcattagtagtaaatcaagtgtgtttgctctactaagcaattcttaaaatttgggggggggggggagggagaattgaaggattaaaaagaa

SEQ ID NO: 20600 - DNA, 396 bp, Gossypium hirsutum
  Clone ID: LIB3146-030-Q1-K1-A6
cggacgcgtgggtggagctggtgtagtgaaaggattcgaaggagacagtagatatgagatgttgggtggtggagccaatgttgtgaaccatggctacaccaaaggtgatggtcttggtgctgaaatcgttggcacttttattcttgtctacactgttttctctgctactgatgccaagagaaatgccagagactctcacgttcctattttggctcccctacctatagggtttgcagtgttcttggttcatttggccaccattcccatcactggaactggtattaacccagcaaggagtcttggagctgccattatatataacaaagaccatgcatgggatgatcattggatcttctgggttggacccttcattggagctgctcttgctgcaattta

SEQ ID NO: 20601 - DNA, 353 bp, Gossypium hirsutum
  Clone ID: LIB3146-030-Q1-K1-A7
gcaggaacttaggagggttaggtctgggattttaggtgagaaagataatatggtgaccatgcatgatgttatggatgctcaatgggtttatgataattatagagatgagacttatttgaggagggtgattatgcctcttgaagtccttttgactagttataagaggctggttgtgaaggactctgctgttaatgctatttgttatggggcgaagttgatgattcctggattactgaggtttgagaatgacattgaggttggggaggaagttgtgttaatgacgacaaaaggagaggcaattgctctgggaattgctgaaatgaccactgcggttatggctacttgtgatcatg

SEQ ID NO: 20602 - DNA, 397 bp, Gossypium hirsutum
  Clone ID: LIB3146-030-Q1-K1-A8
gaaaaaagaggaagggcctcaggttccgaccatcgatttgacagaaatcgagtcggaggacaaagaggtccaggagagatgtcggcaggagctgaaaaaagctgccatggaatggggtgtgatgcaccttgttaaccatggcatctccgaggagctcatggatcgtgttaggaaagttgggcagaaattctttgaactccctgtggaggagaaagagaagtatgccaacgaccagagctttgggaatgttcagggctatggtagcaagcttgctaataatgctagtgggcagcttgagtgggaggactacttcttccatctaatttttcctgaggataagagagacttgtcaatttggcctaaaatccccagcgagtacactgaagttacaagtgag

SEQ ID NO: 20603 - DNA, 396 bp, Gossypium hirsutum
  Clone ID: LIB3146-030-Q1-K1-A9
cggacgcgtgggctggtatagtcacagacgagatgctttccatgccaaaagctccttatcttgttattggtcttttggaggctcttgctgctgcgactggaatggcagctggagcaattctatctggggcatctattccaattctgtctcagacatttcttgtgtggcaaattctcctgtctactatttttcttgggaggagatatagagtaaatcaattacttggatgctttcttgtaactgttggtgttgtcataactgtagcaagtggatccagctctggtcattcattgaaggaagctggcatattttggagtctaatgatgatagtttcttttttgttgcaagcagctgatactgtgctgaaggaagtaatatttttggatgccgaaaagc

SEQ ID NO: 20604 - DNA, 323 bp, Gossypium hirsutum
  Clone ID: LIB3146-030-Q1-K1-B1
cccacgcgtccgcggacgcgtggggtgaaccagcagccaagtgttccacctggtggcttcaaatttggttgaagtgtttttagtttgggattggggccatagttttgtaggtctactacattggtcgcaatgaaatttttaaaagactgtttttatgtttttgcaatttggtgggtgggtgccaaggggtcagggtttttgttctggcgcataggcttttgctgtgtctggttttggtttattttggaatgtgttgaaagggtttaaactttgatttgtatttctatatttacataggaaaaatattccttgtggttgtggtc

SEQ ID NO: 20605 - DNA, 382 bp, Gossypium hirsutum
  Clone ID: LIB3146-030-Q1-K1-B10
cccacgcgtccgccctatcttcgcatcctcagctttagcttaatctcttgtaaaagccatttctttagctagttgtttatctaagtttttgctccaatgactgattctggtggttcagcctctgctaacaggatgttgtgttccgttcctgaaaggctacagctgcatatggccatgttggccttgcaatttggctacgcagggttccatgtggtctccagggctgccctaaacatgggaattagcaaacttgtattcccagtttataggaatatcattgcgttgcttctgctccttccctttgcatattttcttgagaagaaggagagacctcccattactctaaattttcttttacagttctttctcctcgctcttgttg

SEQ ID NO: 20606 - DNA, 408 bp, Gossypium hirsutum
  Clone ID: LIB3146-030-Q1-K1-B11
cccacgcgtccggtttgtctagattaaccacaaccaacagcagaagagccgacattgctcctttgtaccttgactaaacacccaaggcactgtcgaaaaatgtggctgatgttctccccacttggctgacacctcgaacatagatcttcaacagcaactcttttcagcttgagattcaaaaaattgggaataaaatcccaataaatctttcacattgtaatttttattttcgatggcatgttcatggtccatagttttttgtaaaaagctgtagtatcggcctgtatatgattactaggattaagagtagactcctgtaataatttataggcactcctcactgagaagttacctgatggttctcccctccaaacttgaaaatcgtcgttgggtggattttgccaaggg

SEQ ID NO: 20607 - DNA, 401 bp, Gossypium hirsutum
  Clone ID: LIB3146-030-Q1-K1-B2
gtggcatcagatcctagtgatgctaatacaaacagtactactttgttctcggatgatacagatgagaggtcccggaagagctctaatccagagatgggaatttcaactcatcaagaagatgaatctgctgctgctactgtcgagcctcctcagtctgattcaccagaatgccgtcctgatgttcctggaataagtgaccgtcgaacagggcagttttcatctgttccaaagaagagtgagctaaagattggcgagtcatctgccttctttacttatgtgaagtcaagtgcagtaaaaaccagcagtactcaagttgcaacccctaatcatgaaagtgctgctgaaaataagatcggtgaagagcatctcccgcaacctggtgaacaagtggttagtgatac

SEQ ID NO: 20608 - DNA, 405 bp, Gossypium hirsutum
  Clone ID: LIB3146-030-Q1-K1-B3
caaaaaattatagctttcgagcaatctaaacactcattttctcatcaaatcgttttgacatatggctcgtaccaagcaaactgctagaaaatcaaccggtggtaaggctccgcgtaagcagctggccactaaagctgctcggaagtcagcaccggcgaccggaggagtgaagaagcctcaccgtttcaggccaggaactgtagctcttagggaaatcaggaagtaccagaagagcaccgaactcttgatccgaaagcttccgttccagaggcttgtgagagaaatcgctcaagattttaagactgatttgaggttccaaagcagtgccgttgctgctcttcaagaggctgctgaagcttaccttgtcggactgttcgaggatactaatctatgtgctattcatgc

SEQ ID NO: 20609 - DNA, 389 bp, Gossypium hirsutum
  Clone ID: LIB3146-030-Q1-K1-B4
gcaggttctagacatttaccgtccagtagtccccaaatatttgccactactgccataacctcttcttggttgggaactgccaaaatggaacctgatataggctcggaatccagccgaaatggtttcttccgtggatcctttccacacagctacaaaagggaagaacagttgtcattattacaaaccaatcattcatcactccatggagtttctgtttatcagttacctttattaagcaatggtgtaggcagcagccaaaaaatgttctcaaatgcgatcgactccgatcgtgctctctctcttctgtcatcacagccggctgagactcgggagattggttttgaaacccatggtgctatctggtccaacttcatcactgatccaaacat

SEQ ID NO: 20610 - DNA, 196 bp, Gossypium hirsutum
  Clone ID: LIB3146-030-Q1-K1-B5
gcaagttcttgcatcatatgcggcatcaaaattaatcttcacaacctgatcagatgggtgcctccattttctaacactaaaagagtgttgcgtatttcttttatcactctcgtttagctctgatttttaattattaactaaagtcactatttcttttccagatttactagccttcttatgcactccagcgttcctg

SEQ ID NO: 20611 - DNA, 408 bp, Gossypium hirsutum
  Clone ID: LIB3146-030-Q1-K1-B6
tgaattctttcaatcaaaagtgaagcaagcagttggagtactaaagtctcagttcagcagtgaaagcaacatcagtgcaatcgatgctatccaagagttagaagtacttgcagctatggacattaacaaaccatttaaagatgatgctcagccaccgcccccaccacccccagcaccagaaccaacacagccagcaccgatgccccaaaatatggagggacaagtatattaataacgaagccctatctctctgtatgattattaagaaggcaaggcgtggaagaaaatgttctgaccctagacatatgatattctgtaaagggaaaagtaggaagttgcagatcatctaatttgtgttgttattgttgttgaggtgtgtgttcgtttgtgaaccctgttcatcgactt

SEQ ID NO: 20612 - DNA, 387 bp, Gossypium hirsutum
  Clone ID: LIB3146-030-Q1-K1-B8
aactggggttccatcctgatgcaggggcttcattttatctttctcgcctacctggttacttaggggaatacttagctctaacaggagacaagcttaatggtgttgaaatgattgcctgtggccttgctacccactattgcttaaatgctgtttgttttttcttctgcttcttattgtgcttttcctcctttcctcttttctcaacttatttgaacaaactgccctatagagacttgcttggattgaagaacgtctcggcaacttgatgaatgatgatccagctgccatagattcttctcttgcacaatatggtgaccttgtttatcccgataggagcagcattcttcgcaggattgacacaattgataaatgtttcagccatgacac

SEQ ID NO: 20613 - DNA, 360 bp, Gossypium hirsutum
  Clone ID: LIB3146-030-Q1-K1-B9
tcggttgctgaagccggctttcaggaagcgaaaatctgttaccataggtcaaaagcagatgcagaggcttggtacatcgtgccagttttgagatttgaggtgataccaaaagaggcaagttgagttgagtgaagaagaaataagagattgtaggtttgttgggagttgagatgcatggattggtaggatagatacagtgatatggatttgcatggaatgttgtaggatgaatttccctgtaaataatctttggcttcagccaattggagagggaaatgaggttagtagaaatgcttggattttttttttcttaaaccctttagctttgattttctttctttggtcccctttgacttttca

SEQ ID NO: 20614 - DNA, 354 bp, Gossypium hirsutum
  Clone ID: LIB3146-030-Q1-K1-C1
tagaccggtacctctcggggaataccatgaacaggcagcggctacagttacttggtgttgcctgcatgatgattgcttccaaatatgaggagatttgtgcccctcaggtggaggaattctgctacataactgataatacatatttcaaggatgaggttctagaaatggaatcatctgttttgaattacttgaagtttgaaatgactgccccaacagctaaatgtttcttaagacggtttgttcgtgctgctcaagggatcaatgaggttccatcaatgcaattagagtgcatggccaactacattgctgaactgtctctccttgagtacagtatgctttgctacccttcatcac

SEQ ID NO: 20615 - DNA, 404 bp, Gossypium hirsutum
  Clone ID: LIB3146-030-Q1-K1-C10
cgcaaatccctagcccgactgccctccatttttttctcaaccttcaccttcatctccggcagcagtcctccaccgatccacctccagtcctccatttcagtcacctctatttaagatgaagctgatcgaatgcttgacatgggtttgaagaggatgttaactttatattgggaaagacatgttctgctcatcagatggtaatgttcagtgctacatggcctgcagcggttcatcggttagctcaggagtacatggaccctaatcctgttaaggttttagatgatcgtgcacattatgagcgattgactgcatttaaaatttctcttcattggctaaatagaatgggcagcattttaaaatttgcactttggttgtgtgtgactgtgtgttctctaacattttaa

SEQ ID NO: 20616 - DNA, 301 bp, Gossypium hirsutum
  Clone ID: LIB3146-030-Q1-K1-C11
cggacgcgtcttatgttctttttttttgtttatttttcttttttttttttctttttttttttttttgcttttttttttcttatcttctttttttttcttttttttttttttttttcttttttttttttttttttttttttttttttttttttttttttttttttttttttttttttttttttttttttttttttttttttttttttttttttttttttttttttttttttttttttttttctttttttttttttttttttcttcttttctttttttttttttttttttttttttttttttt

SEQ ID NO: 20617 - DNA, 388 bp, Gossypium hirsutum
  Clone ID: LIB3146-030-Q1-K1-C12
cccacgcgtccgggcaaactcgctttgtatctcgcaaaccaccaagagatgtaatctcaagtgttgaagctgttgcggaatcaatgggtctcaaggttcatacaagaaattacaaggtatgacttgtaaacatatcttcattgacaaattgcaggttactgttccatagagttatgctttagagacttttccacaaaatgaagtaaatttatctttttatgtaaaaagttctcaccattttatcattttcttctcttccaaagaagacaaaaaggggcattgctaacatgatagtaagaaacccttgaaatggctcctttatagcaggcacttattcaatattgattttgattacttttcaaaacactctaagaagtattttttttat

SEQ ID NO: 20618 - DNA, 276 bp, Gossypium hirsutum
  Clone ID: LIB3146-030-Q1-K1-C2
cccggaattaatgggggggaccaaccattcgtaccaaaatatccttttttttacttcattcatgtaaagatgtcaagtcgatttcatatgggtgtgatcacttctttattcccctttatttaccttgtggtagggaaattgtatttgaataagaggactgagtgtttagtctttaaggctctctaattagtaaaacaaaatctgttccagctataaaaggaaggtgtagcagaaggaggagaaacaaagaacaccaacctggctgttttattttat

SEQ ID NO: 20619 - DNA, 385 bp, Gossypium hirsutum
  Clone ID: LIB3146-030-Q1-K1-C3
cttgctatttcatttcctgatcaagaataggaagttgaaggatgcttcagtgctgttcaacgagatggttaaaaatgagtttttcccaagtaaaacagattgcattgcggcggttaagatttttcttgacattggggacccttatgtggctgtaaaagtttggaaattcatgatagagaattatgattctgatttggatgagactggaaatctgctgattaatgggcttcgtgatgcaaacatgcttcctgaggcagttaagtatgctgaggatatgattgagaaaggaatcaaggtcacctcagccacattgtcaaggctgaaacacagccttagccgagaaaaaaaggatggggtttatgaaagaactttaaagaaatggaaa

SEQ ID NO: 20620 - DNA, 407 bp, Gossypium hirsutum
  Clone ID: LIB3146-030-Q1-K1-C4
ggttcataccctggagctcccatgaactatcctgcatacgggggctatggtaatggtttggcaccagcatatcagcaggcttactaccgataggcaatgatgacactactctggcgatggtaaccactgatacgctgactaccgacccatctaagtttttatttctaaatggtttgtttgtaatcactaaccgtttaatggtagcgatatctgtgtgtttaattaataactgccgtgcttcttgcttttgcccaaagtaagaagctgtatctctaatgttgatcagaactctagtactaggtgattgtgaagtagtaatcatgatggtaagcataacaatgtctaaactcgagactacccccatgtaggatttagttgtagaaaaatgttgtactggttatctgatc

SEQ ID NO: 20621 - DNA, 399 bp, Gossypium hirsutum
  Clone ID: LIB3146-030-Q1-K1-C5
gaaaactgctaagaaaccacagagtgagagagtgaagaaggcgggtaatgaggcagctaatgttgatggtagtgggaatttgagtggatcgtccactgtgccagaaggtgtggtgactgctgaatcgagtagaagaggagttgttaatagtgggaggaagcagatggcgaggggcacaaagaatttggggaagttggatttgaatgtggagtttagtaatgaagttgaagagccggcaccgaggaggaatgaggggaatcaccccggctatggggaggaggataacattgaagggaatgggttctttgagggtcttgatgagtttttgagtagcttgcctatactttcagctgttggggatgataaagttaaggctacttaatgaagtaagatccttgc

SEQ ID NO: 20622 - DNA, 375 bp, Gossypium hirsutum
  Clone ID: LIB3146-030-Q1-K1-C6
cggacgcgtgggaaggaatgtttgttaagggctatacctattaaggcgtaagacactgtaatatctggtttttgggcatctatggctttttgtgcgaggattattacttgctgttagataagttttttacatattattgttatgcctcctgaaactagggaggttgaataagttacttgggagagtagaagaaacaatcctcgaatcacttcccttgacgccttttgaacgaaacaggttcatatttaagatagtttatttggctggcagatcaatttcaatcaattttaggcttggatgattttgtatttcgatgttttttttttttttgaagatattttaagttcgggttaaaaaaataaaatttattttttt

SEQ ID NO: 20623 - DNA, 396 bp, Gossypium hirsutum
  Clone ID: LIB3146-030-Q1-K1-C7
gggaagcgaggtcgacccatgatcggaaacttatctgaattactagttccaacacataaatccgggttatcggatccttcaaggagccccaaaagtccactagacttattcaagaccccatcatcatcatcaagaagagggtcgatgaagagatgctatgatgtttttggtgatggagtagggcttggaatcattgcttcaatggagaaatccactgttgatcatcatccttcttgtaagctacaacacaccatttgtagattcaaaggaagatttcaagaaaattcagaagaggattacacttttgttacaagacatggagaatcatctacaaaagtttattttaatggaagtgacgaagaagaagaacagagacttgttggaaaaattaaagga

SEQ ID NO: 20624 - DNA, 331 bp, Gossypium hirsutum
  Clone ID: LIB3146-030-Q1-K1-C8
gaaaaaagatgaagggccttaagttccgaccatcgatttgacagaaatcgagtcggaggacaaagaggtccaggagagatgtcggcaggagctgaaaaaagctgccatggaatggggtgtgatgcaccttgttaaccatggcatctccgaggagctcatggatcgtgttaggaaagttgggcagaaattctttgaactccctgtggaggagaaagagaagtatgccaacgaccagagctctgggaatgttcagggctatggtagcaagcttgctaataatgctagtggggcagcttgagtgggagggactacttttttccaatctattttt

SEQ ID NO: 20625 - DNA, 280 bp, Gossypium hirsutum
  unsure (1)..(280): unsure at all n locations; Clone ID: LIB3146-030-Q1-K1-C9
cggggcgacccacgcgnccgcccacgcgagcggaaaaaccaaggaaaaacgacagagaagacaaggccggggggggggggaaaacaggcccggaagagcacagnaccgggccaaaaacaaccgacgngaagcaggaacaaaaacacgaacgggacaaaggcgaaaaacaaagaggaaagcgggacagangccgaaaaagaaaagcaggggcgnaaacgcaggcggaccgcaaaggaagagaccaccacagagaggagggaaacgaagccaaagcaagcgg

SEQ ID NO: 20626 - DNA, 406 bp, Gossypium hirsutum
  Clone ID: LIB3146-030-Q1-K1-D1
caaaaagcttgaagattgtttagaagaggaagaaatggagtcagagagcaacaggagggtgctggtgatgcaaaggaagtacattagctatgagacactgaggagagacatggtcccatgtgctacccctggtgcttcttactatgattgcaatggcggtcatcaagcgaatcattacaaccgagggtgtgaagttattacaagatgtgctagaggtatcaaaggtatcaaagcttgaaaaaaataaaaatcccccccaaaattttatgtttttaacctaccatatatagctgctttgtcctaagtggtatctttctgggtttttcttatattggtgtatatttaaggttgttaaatttaacctgcttaatataattgcatgtttaactttgaatttttggatctg

SEQ ID NO: 20627 - DNA, 83 bp, Gossypium hirsutum
  Clone ID: LIB3146-030-Q1-K1-D10
aaaaaaaaaaaaaaaaaaaaaaaaaaaaaaaaaaaaaaaaaaggaaaaaaagaaaaaaaaaaaaaaaaaaaaaaaaaacaagg

SEQ ID NO: 20628 - DNA, 68 bp, Gossypium hirsutum
  Clone ID: LIB3146-030-Q1-K1-D11
aacaaacataaaaaactaaaataataataaaaaagaaaaaaaaaacaaaaaaggggggaataatatat

SEQ ID NO: 20629 - DNA, 275 bp, Gossypium hirsutum
  Clone ID: LIB3146-030-Q1-K1-D12
cccacgcgttcgggtgaatcctttggttttatcataaatttctttccagggggcattcatggcctgtaaatacctccaatctctatcgattagtcaacgatcatatttccttctttcggttacgtttcagacgacgttgggtgcttttcagatctgggttcagacgcaaactattttcatgtgtccatatctttcacagtgaaaacatacccttggtaaaaattcatactcaacttttctgttttttaccatcgattataatttgagacaccaat

SEQ ID NO: 20630 - DNA, 123 bp, Gossypium hirsutum
  Clone ID: LIB3146-030-Q1-K1-D2
cgaaaaatatcgaaagccctaactttgccggtcgagcctaaaggcggaagccgcgagttttcttcttcgcgacactcacaacttaccagcttttttttgtaatccaaaaagaaaccatgtctt

SEQ ID NO: 20631 - DNA, 405 bp, Gossypium hirsutum
  Clone ID: LIB3146-030-Q1-K1-D3
cggacgcgtgggtgttaatgttcacagatgtgtagattattttcgatggcaagctagagtttttatttaaaatatttgaggatggattttgcaccgctaacttgatgcttgattgtaggagtcgtgaatttctatggcaggaagggcatactgccttcgcaacaaaggaagaggcagacattgagtttgtggctgaaggcttcagtgcaagaccttgcttctcgtgcagctagtcgagccatggctgaagctgcaaaaagcatcagcctccaaatacagcatatcaatttgaggtttcctgtagagccctatctagtgtccgttcgctacaggctcatcttctgaaggtcgcttgtagttcatattttctatttctggtttacataataaggcacctatattggg

SEQ ID NO: 20632 - DNA, 410 bp, Gossypium hirsutum
  Clone ID: LIB3146-030-Q1-K1-D4
cagagaagaagtggagggacaaacgtgagaaactcgaatgggaaactaacatcgtttacaaggaggccaaagagtccgtggatgctttgttcgtgaactcccaatatgatcagttgcaagccgacaccaacatcgccatgatccacgccgcagacaaacgtgtgcacagcattcgtgaggcttacttgcctgagttgtccgtgatccctggtgtgaacgctgccatcttcgaggaacttgagggacgtatctttaccgcattctccttgtacgatgccagaaacgtcatcaagaacggtgacttcaacaatggcctcagctgctggaatgtgaaaggtcatgtggacgtggaggaacagaacaatcagcgttccgtcctggttgtgcctgagtgggaagctgaagtgtcc

SEQ ID NO: 20633 - DNA, 402 bp, Gossypium hirsutum
  Clone ID: LIB3146-030-Q1-K1-D5
cccacgcgtccggcttcctggatgcaaaaaccagaagcagaggattgtaatgtttctcaccttcaatcgaaagaaaccatttctgctcccagtttccagtcccaaccacagtaccatgcacccaaatcaagagctgctgcaattgatcgtcaacgcaggctacgaatagatgaaagtatcaaggcattgcaggaactgcttccaagttcttctgagcgtggcctaggaaatgcactggatgatattattgactatgtcaaatttctgcagttgcaagtcaaggaattaagtcgaagcagactggggggtgaaccaacttctaatccttttgttttttttgagggatatggtcactatgttctccatgaacagatgataaatgaacctcttgaagagatgatg

SEQ ID NO: 20634 - DNA, 390 bp, Gossypium hirsutum
  Clone ID: LIB3146-030-Q1-K1-D6
ctgccttgttgctgcaacccatcaatgacaaagatcccaccgactcggcctccgcctcttctttatcttccaacttggttgagtcaatcaagaccatctgcaacgtgactcggtaccctgactcatgtttcaccgctctatcttctcttaacgcctctacaaaacctgacctagaggccttccttgacctctctctccaagtagccatcacccatctctccgacctctcttcctcattcaagtccctcaacgatctccactctcagcctgctttaaaagactgcttgaccctgtttgatgacgccctcagtcgactcaacgactcagtgtctgccatgaaggtgggtaccgggaaagagcttgtgttgactaaggagaagatcagtgata

SEQ ID NO: 20635 - DNA, 394 bp, Gossypium hirsutum
  Clone ID: LIB3146-030-Q1-K1-D8
cccacgcgtccgtaggactatatatgaggaggctgatgcaaacaagcggaggaagcgatatgccagacctcttatcgatctgcatatgaagatatattactctgagggcatggagccatggagcttgaagaaaaatacgattagcgatgtgccagagggagccataattataagggaacatacagcactgaataatttgtttaactgcttgtggttcaatgaggtcaatctcttcacaccaagagaccaactgagctttggctatgttgtatacaggttaaaggggttgtttaagttctttatgtttcaaaattgcgagtactattcactttttatcctgcacccccatactcgggaacattcttctaaagtagagtgggtgaaaagcttgagt

SEQ ID NO: 20636 - DNA, 371 bp, Gossypium hirsutum
  Clone ID: LIB3146-030-Q1-K1-D9
cccacgcgtccgcgctttgaagcagtccaatgagctcttacgcaaagtcggagctttcgatggtggtcgtgttaccatgcgcagaactgtgaaaagtgcccctaccagcatctggtatggccctgaccgcccaaagtacttgggtccattctcagaccaaatcccatcatacctgacaggtgaattccctggtgactatgggtgggacactgctgggttatcagctgacccagagacatttgctaagaaccgtgagcttgaagtgatccactgcagatgggcaatgcttggtgcccttggttgtgtcttccctgaaattctttcaaagaatggagttaagttcggagaggcagtttgtttaaagctggatc

SEQ ID NO: 20637 - DNA, 394 bp, Gossypium hirsutum
  Clone ID: LIB3146-030-Q1-K1-E1
gaaatcatcaaattcaaaggctttcaagtgccaccagctgagcttgagtccctccttataagccatccatcaattgcagatgcagctgtagttccgcaaaaagatgaagttgctggtgaagttccggttgcatttgtggttcgatcaaatggttttgaactcactgaagaagctgtcaaggaattcattgctaaacaggtggtttactacaagagattgcataaggtgcactttgttcatgcaattcccaagtctccttcaggaaagattttgagaaaagatctgagagccaagctggctgctgcagcacctaatacccacattccatgaaaatttcttctataatctatttgcttttaaaatgcaacgccttttgctgattttgctttaactt

SEQ ID NO: 20638 - DNA, 401 bp, Gossypium hirsutum
  Clone ID: LIB3146-030-Q1-K1-E10
cggacgcgtggtggtgagcgaaccgctggagaagaaattcaagaagttgatattatttccgcaattgaattcgataaaactggggatcatcttgcaactggtgaccgtgggggccgtgtggttctttttgagaggacagatgcaaaggatcatggtctatcaagaagggatctagaaagaacggattatccaattagtcggcaccctgagttccgttacaagacagagttccagagccatgagcctgagtttgactacctcaaaagcttggaaatagaggaaaaaatcaacaaaatcagatggtgccaaacagccaacagtgcactgtttctcctctccgccaatgataaaaccatcaaatttttgaaggtacaggaaaagaagatcaagaaaatttctaa

SEQ ID NO: 20639 - DNA, 263 bp, Gossypium hirsutum
  Clone ID: LIB3146-030-Q1-K1-E11
cagtcatgttgacactaaatttagacttgaccattcatatacttgtgttgtgtgcgtataatattttttttcgtgttgtgtccgacatttccagtgtcgattaggaaatagtttctgttatcatattgttaatgtagatataatggtctgtacagaaatcaattcatcgccgtgaagtatgaatttgctgttgatttttgtgttggaatttttggaacatttaagaaacatagtgaccgataacctgtattgattcgtaatgg

SEQ ID NO: 20640 - DNA, 395 bp, Gossypium hirsutum
  Clone ID: LIB3146-030-Q1-K1-E12
cccacgcgtccgggacagtgttatcctatcaatgaagattttgatagtggagtggatgatcttcagcatccaaagtactatattatctggaacatgaatatcagcactcacatttatccagagtttgttgttagtttcaagatctccaatgctgaagggcgtttgattggaagtgagactaatcatgctgtttcaggcgtcactgcatctactccaggacttcagggtcgtttaccagtattatcatctgccggtgaattggggagtattaatcaccaaacctcagaatcaggtggatcccacgaaaatgatcctagcctgggttcaaacacttcaaagacccctaaatcttcttggatgcctttcccaatgttggttgctgctatcttaaacaa

SEQ ID NO: 20641 - DNA, 344 bp, Gossypium hirsutum
  unsure (1)..(344): unsure at all n locations; Clone ID: LIB3146-030-Q1-K1-E2
cggacgcgtgggttcggctgaacccctgcctctttcttcctgctttaccaaaccctaaactcccccttttttgttcgaatctcaataggccctagccgccacttgaccgccgaacggcgatcgacggagggagacttgttcgctcactaaccccgcttgggcccttgctttaaggactactgatttcaggccttacaccccgccccgactttgattaaagcgaatgagacgaagattccggaggttcgttcttagaagtaatccctttactccctttntatgctcgaaatgactgtgtgtgtnaccaaacaattagaaaagaagatgaaaaccaacgggaaaag

SEQ ID NO: 20642 - DNA, 404 bp, Gossypium hirsutum
  Clone ID: LIB3146-030-Q1-K1-E3
gcaatctatttagatgggccaattatccatctatttttgcagcaactgtattgtacttgccacaatttgcctctagcctagggttattaattttgtgattgtctatctacaggcttcttggaaatagcttccttgttcgttgctaatgtaaccaaatttgtgttttaggtgcttctgagccgattgagattgtttttgagtcctgggtatccatatgaggaaatattgagtacgtttcataatcaaaccagcataattatgtgctcattccttccagttttcactagctttaatagaacaaaaggaggtttgattcagttaaaccatggaaggcctcagccactgcaatacgtagtcaatgcagccttcttagccgccctatatagtgattatcttgatgctgc

SEQ ID NO: 20643 - DNA, 404 bp, Gossypium hirsutum
  Clone ID: LIB3146-030-Q1-K1-E4
gaaacaaaggcaagcatgctagccaagaaaccttcacacagctaaggggcttcttgtttcgtgccattaccatttcatctgaagtggtcaattccacgctcacccgtattccctgtagtgcgatttcggatttcacctctgatctctgctggtttggctctttgtagaaaatttgttgtttacgcagttttttagctgtaccaaagacagatgtcaattggtgttttggtttgtcttctgatgtattaactactcataataacatatcttagagattgatttggatctgaatcaaagttatcaacttttcaattttgatggatcggatcgaattaagcaaaacttgaatgtatttactagagatttaagactgaatgaagatatatataattttttacttattt

SEQ ID NO: 20644 - DNA, 398 bp, Gossypium hirsutum
  unsure (1)..(398): unsure at all n locations; Clone ID: LIB3146-030-Q1-K1-E5
tgttacgaaccacgacgtcgattggtggagcgcgtttgtatttaccttttaagccgctacataaaagattcattaacccatacaaaacctgactcgtttctcctcttcctctgaacgccggcctctcaaactccaaccaaggaagcaccaaacatttatttggttggagctgaaaatgaaaccttaccttattggctgtccagcacctcagcacttttgtgtctgctacagaaaaatttgcgatcaaatggctttttatctgctggcactcaacgctctgggggaaacactggttttcttgggagagtttcttatgataagtggattaatggtgcanatggtgaagctctagcgcgcagtgcnaggttttattgtgttgaacctattctatatgttat

SEQ ID NO: 20645 - DNA, 390 bp, Gossypium hirsutum
  Clone ID: LIB3146-030-Q1-K1-E6
ctttctttttggggggtgggggtggaggactgaaatgtaatgtttttttttttgcaggagtgaaatcggtgaacataaacaggaaacagcagaaggtgactgtaacgggatatgttgaagctaacaaagtgttgaagaaagctaagtcaacagggaaaaaggctgagatttggccttatgttccttacaatctggtggctcaaccttacgctgttactgcttatgacaagaaggcacctcctggttatgttaggaaagtagacaacaatgtaagcagcactgctaccgtcactagatatgaagatccttacatcaccatgttcagtgatgaaaacccaaatgcatgttctgtcatgtgaagctgcaattttatattactatttctttttg

SEQ ID NO: 20646 - DNA, 348 bp, Gossypium hirsutum
  Clone ID: LIB3146-030-Q1-K1-E7
ggccgctacttcactacgtgaggaaaatgtctacaaggcgaaactcgccgagcaagccgagcgctacgaggagatggttaagttcatggaaaccgtcgtttcctccgtcgttgctcccgacgaactcaccgtcgaggaacggaatctcctctccgttgcctacaagaacgtgatcggcgcccgccgtgcttcctggaggattgtttcttccatcgagcagaaagaggaaggacgtggcaacgccgatcacgtctccatcattcgtgagtacagggccaagatcgaggctgagttgtctgagatttgtgccggaattttgaagcttctcgaaaagaaactcgttccggc

SEQ ID NO: 20647 - DNA, 355 bp, Gossypium hirsutum
  unsure (1)..(355): unsure at all n locations; Clone ID: LIB3146-030-Q1-K1-E8
agaggccagtgactggcctccgactatatctagaaggtaaaaggagtaatcgcttggccatccacttgcagcatctttcctctcttccaaaaatcttccaacttgtagatgatccaaatgagaacttcagccaaatgtctcgtgatcgtaaatactatgagaaagtttattggaagaactactctcatgtatgcactgctcctgtcgaggctgaagaggatctttccatagtaactggagcacaactgcaggttgagaatcatggttttaaaaatattctctttttacggctacgnctttcaactgtcttgggagctatgtctcttaagcagccagaatgggatggatcacctgg

SEQ ID NO: 20648 - DNA, 402 bp, Gossypium hirsutum
  Clone ID: LIB3146-030-Q1-K1-E9
aagcgtctgatggatgagaatgccaccgcatatgttgaaatgaccaaccttattgaaaaggctaaaaataatgcatccgcatatgagaagaggtccgagtactgtgaccgtgacctcacaaaggcagatcttgagatggtcactcgaatagatccactcagggtatatccttaccgttatcgagctgcagtgttaatggatagccgcaaggagaaggaagccattgcagaactgtcaagggcaattgcatttaaagcagaccttcaccttctacacctacgagctgccttccatgagcatgttggtgatgtcttggctgcccttcgagattgtcgagcagctctctctgttgatcctaaccatcaagaaatgttggaacttgcagccgtgtcaacagccatg

SEQ ID NO: 20649 - DNA, 406 bp, Gossypium hirsutum
  Clone ID: LIB3146-030-Q1-K1-F1
gcgtccacgcgtccgatggaggagattatcgttgccaggctgattcagggggccaaactcattttgctcttgcatttgaacttcctggtggttggcacaatgagaaggaagctataattttgaccgttcttcagattctaatgggaggaggtggatcattttcagctggtggccctggaaaaggaatgtattcaagattatatctacgtgtcttgaatcagtatccacaagttcagtccttttcagcattcaacagcatttacaaccatactggcttatttggaatacaagctacaactggttctgattttgtaccatctgccattgatgttgctgtcaaggagcttatttgctgtgcaactcctggacaagttgagcagaaagaaactgagcgtgctaaacagtc

SEQ ID NO: 20650 - DNA, 405 bp, Gossypium hirsutum
  Clone ID: LIB3146-030-Q1-K1-F10
gagaactgatgctcttgatgctgcaggaaacaccactgctgctattggaaagggtttcgccattggttcagcagcccttgtgtcccttgccctctttggtgcctttgtgagccgtgctgctatttcaacagttgatgtattgacccctaaagtttttattgggttgcttgtcggggcaatgcttccttactggttctctgctatgaccatgaagagtgtgggaagtgctgctttgaagatggttgaggaagtgcgtcggcaatttaacacgatcccaggtctcatggagggcactgctaagccagactatgctacctgtgttaagatctctactgatgctttcatcaaagaaatgatcccacctggtgcgctagttatgctcacaccccttattgttgggatctt

SEQ ID NO: 20651 - DNA, 284 bp, Gossypium hirsutum
  Clone ID: LIB3146-030-Q1-K1-F11
ggtatcctctaattttaaacctaagagttttaagttaacgaagcatttgggtcgtttcgaagtaatggaaacttcatgtaaagtaaagaagggagccggaggaaggaaaggcggtggcccgaataagaagcccgtttcaaggtccgtcaaagtcggtctccagttcctcgttggtaggatcggccgttatttgaagaaaggaaggtattcacagcgggtcttatccggagccccattttacttggctgcagttcttgagtacttgtcgtctgaagttttggaat

SEQ ID NO: 20652 - DNA, 375 bp, Gossypium hirsutum
  Clone ID: LIB3146-030-Q1-K1-F2
gaaaaagtttcaggcaaaaacacaacaagctgaagctgctcgagtgctaccacgttcaggccgtgctggctgggaggttggggaactaggtgtgattgatagggatggaagagaaagaagcagagacagaggaagggaacgggatgatagagaaagtagcaagaatagagagcgtgaagatagggaaagacgccgtagtcgaagcagagagagggataggggaaaggatcggagccgtgattatgattatgagcgtgatagagattatggacgggatcgagaccgaggcagatacttttactgagaaaagaaagaatgggtgactttaatgtggttagaatatggcaagtgattgaaacattttgagtaaaattg

SEQ ID NO: 20653 - DNA, 394 bp, Gossypium hirsutum
  unsure (1)..(394): unsure at all n locations; Clone ID: LIB3146-030-Q1-K1-F3
gttctctgcccttttttggccatttcctgtggaacaacactgagcataaaaccaacctcaaagataaagatggaaggccggacgaggctgcaccccaaagcactcaaatgaagcaagtaatgtgcgctctctcaatacaaaaagaaaacatcagcaaccatcagtccccaggagctaatccaagaccagatgatattgcagcctaaccttgtgattgctggagagaaagtggttgaagtggtgggctcattggtgatgtattagaatgtacagttttatatccctaaccggaggaagttgtcatgaaatttcctgaactccactctttgtatatctttgtccttaatttgaagtttctaggaatgaggactngagttggaaataaaaggaagac

SEQ ID NO: 20654 - DNA, 412 bp, Gossypium hirsutum
  unsure (1)..(412): unsure at all n locations; Clone ID: LIB3146-030-Q1-K1-F4
cccacgcgtccgtgtagaagcagctgtgtgagcgtcctaagctacctagggtttccttcattcgaaaatgatttacgacgtcaattctcctctcttccgttctttcctcagccagaagggaggctcctccgacaagagaaaaatggaggagcagaagcctaaggaacagagacccaaagcaaatgagaataagcctgtcatgacagagtaacagctgcttttgtttagtatgcatggcaagttggtggatggttgttcttagaactctgatatgttcaagattgaaaatgcttgttgatgtattcaaatactgtcataacggtttttctttgagatggaatgatattcaactttgtggatgnnaaaaaaaaaaaaaattttttttatttttttttttttattatttaatttt

SEQ ID NO: 20655 - DNA, 392 bp, Gossypium hirsutum
  Clone ID: LIB3146-030-Q1-K1-F5
agtgattctgatgatgaggatgaaggtaggaggaagaggaggaaagaaaagagaaagaagagggatgattcttcggacgaggataatgatgaccatcgtcgtcataggaaaagaaagagtaggaaggagaagaggagaaggagaagtcataggcattctgatgattctgaatcatcggacgtgtctgatgatcctggtaaacgacataggaggaagagccaaaggcatgaatccctctctgattctgatgttagtggttcggatgattctcgggttggaaggggtgcaaagaggtctgagaagaggagcaggaaacgccatcacgaagatgatgagtagaggcttgttagctaagggatttagaagaggggatatgatgtttgtgctagaag

SEQ ID NO: 20656 - DNA, 408 bp, Gossypium hirsutum
  unsure (1)..(408): unsure at all n locations; Clone ID: LIB3146-030-Q1-K1-F6
gagacgggaatgggagaggaagaatccgaaacctgctccaccgcctaaacagaaatggaggtttatgcagaaatactatcacaagggtgctttcttccagacagatgctgatgatcctgctgcaactgctggagcccaaaatatttatcaccgcgatttctctgccccgacgggtgacgacaagatggacaagacaatattgcccaaggtcatgcaagtcaagcattttggtcgtagtggcagaaccaaatggactcatcttgtcaacgaggatacaactgattggaacaatccatggacatacaacgatccccttcgggcaaaatacaatgcanaaatggctgctgtgaatgtaccgatagcgaaaccaaaagaagcaagaagttgaaagatttggaaatgaaatga

SEQ ID NO: 20657 - DNA, 373 bp, Gossypium hirsutum
  Clone ID: LIB3146-030-Q1-K1-F7
ggtaaagaagaataagattgtgaataggccattggctggaacaacaaggagaggaaagactcaggctgaagatgagctggcagaaaagctattgctaagtaatgaaaaggaatgtgcagaacacatcatgcttgttgatttgggtcgcaatgatgttggaaaggtctccaaatatggttctgtaaaggtggagaagctgatgaatattgaacgatattcccatgtgatgcacataagctccacggttactggtgagttgcaggatcatctcactagttgggatgtcctccgtgctgcgcttcctgttggaactgttagtggagcaccaaaggtgaaggcgatggagctaatcgatgagttagaggtgtcaaga

SEQ ID NO: 20658 - DNA, 275 bp, Gossypium hirsutum
  Clone ID: LIB3146-030-Q1-K1-F8
caatgattgcactatgggtaacggactgttttgagagaaaagacatggaacgggatcttttggcgaagctacttgtcaacctgacaaggtcccatgatggtgtattgagccaggctgaacttattaaagggtttgaatctgtcctgagtacattggaggatgctgtgaacgatgcgccaaaagctccagaatttctgggacgtatttttgggaaaatggtagtggaagatgtgataagtatgaaggagatagggcggttaataatggatggtggg

SEQ ID NO: 20659 - DNA, 324 bp, Gossypium hirsutum
  Clone ID: LIB3146-030-Q1-K1-F9
cccacgcgtacgcaaccatcaaggcttgggacatgcttaagggaccgcaaaaaggggcccaaagggaggtgtcaaggtcgctgccccgcccgagaaggaacaggatacggttgtgaatacactgttcaagaagcgtgcaatgcactttgctcttcccggagcactagctctacagaaggatctacatcgatctgtagagtggcctattgatgggcgcattcagaggcaaaagaggatgcttaagctgacgctgaaggtcccaccagcatccaaccattttaccaagactcttgatacgaacctatctacgattctattcaagct

SEQ ID NO: 20660 - DNA, 359 bp, Gossypium hirsutum
  Clone ID: LIB3146-030-Q1-K1-G1
cggacgcgtgggttctcaaccaaggtgtagaagaatccacagttgcttcaaatatgggtacgacgcaagatcttcatcgtgctctctctcttctgtcaaatgagtcttcggtttcttgtgagccaaaacaacatggttcacttgcgtaccctgtgcatgttagtggtagcagcatgtctcagcccacgatgaatgtgatttcgcagagtttccccattccatatgccttatctgaaaactggcagatggaacaagagcagactactcaatcccaagttgagggtgacaaccatcttcaagagtttcagattctcaaggttccatatgataatagcttttattccaatcagatgaattga

SEQ ID NO: 20661 - DNA, 253 bp, Gossypium hirsutum
  Clone ID: LIB3146-030-Q1-K1-G10
ggaaaattatgaattcctttcaagatgtatcaaagaaaatttagggtttcacaatggtaaaccgctggctgcttgtatcatatataaatgtctccatcattggcattcctttgagtctgaacggacagctatatttgactacataatagaaggaaatcaatgatgttctgaaggttggagctgaaaatgaaaccttaccttattgggctgtcaacaccttagcacttttgtgtctgctgcagaaaaatttgcg

SEQ ID NO: 20662 - DNA, 252 bp, Gossypium hirsutum
  Clone ID: LIB3146-030-Q1-K1-G11
gaaggtttaagtctcttgtgatgggaagtgcttagctttaaagggtttgggaccttattagtttagcttgccgccctcctctggctctattattctcgcttttgtaaaaaaaggaaatatagtttgcatctaatgaatttataaaagataaatttgaatatctatgcttatcctaaaccaaaatgttgtttaacttgcgtcatcaattcatgtttgattcttggagttattgataattataattgttgcctt

SEQ ID NO: 20663 - DNA, 373 bp, Gossypium hirsutum
  Clone ID: LIB3146-030-Q1-K1-G12
cggacgcgtgggggggagctctgacgacgcggccacggtgtagatccggtgagactctcttcccctcctctttcctttgtctattttcgtataaaaataaaaataaaaaaacaaataatacaaaaaataaatgaaatcagaacatagaacaagactagaaataaaatcaacctttctgtttttatgctattgtgattttgtttgctaaagttcgtgttccccaaaaaaaaaaactcaaatggatgttttcacttttataaccgaattacatagattcggttttttggttttttcttcttggctgctatttttttctttcttcgatttttttgggttttcgcggtgccttattttcgtctttgcagggtgttaa

SEQ ID NO: 20664 - DNA, 341 bp, Gossypium hirsutum
  unsure (1)..(341): unsure at all n locations; Clone ID: LIB3146-030-Q1-K1-G2
tttaccctttgaacgagggtctcggagtaatagcttgtattggtgaattactagaagaaagagaagcaggcaaaactttcgatgtatgtttccagcaactgaaggcttttgctgatgttgtacccagttgggacaatatagttattgcttatgaacctgtatgggccatcgggaccggcaaagttgctacaccccaacaagctcaggaagtgcatgtagctgtccgtgattggcttaaaaagaatgtgtccgaggaagttgcatctaaaacacgtatcatatatggagggtctgttaatggaagcaactgtgctgagcttgcaaagcangaagatatcgac

SEQ ID NO: 20665 - DNA, 395 bp, Gossypium hirsutum
  Clone ID: LIB3146-030-Q1-K1-G4
caagaatcagagagcatggcagccacactcagcctcctgaaatccccgttattaccccaaaagcctcaccttctacaatctaaactccccctcctttctaaccccacaaagcaatttatctgcaatgagtcttttaaccctccaaaactcttcgctgagactgttcatcacctaaaatcagcttctcttccccttacaacactcgcatttcccttcttatttgacgccgaggatgctcttgctgttggtggagagtttgggattttggagggtagaagttttgcacttgtacaccccattgtcatgggtggtctcttcttttacactttgtgggctgggtatttgggttggcaatggaggcgagtgaggaccatccagaatgagattaatgaact

SEQ ID NO: 20666 - DNA, 369 bp, Gossypium hirsutum
  unsure (1)..(369): unsure at all n locations; Clone ID: LIB3146-030-Q1-K1-G5
caaggaatgaatgggaaaatgataaaacctgaagctggttattcgggcggcgctccttacatgtttggcgctgagagcaatgttctggaggcacgtccaacaattggggatacgtctttcagtactgtagaatcaagcactcaaccactgaatgaaccacttctggatgccgacatttcttcatttggatttttagaccagatccctcgtaatttcagtctttccgatcttacagctgatttttctcagagttcaggtttatttctctctgtcggtttgtgtggggacatgcatgttcaccataccacatatacatatatntgtctgcatgcaagcatgtgtttgtgcatcgacatcttggttgtgagt

SEQ ID NO: 20667 - DNA, 415 bp, Gossypium hirsutum
  Clone ID: LIB3146-030-Q1-K1-G6
cccacccgtccgccaacccgtccgggaggtgcaaagagttttttatggtgaaatggaggatgaggaggaggcggactgcttgcagtggcggaggcagcaccggtggtcgatcagttagaatgaagatcaaaaggttgcaaaagctaattccgggagggaaattgatgcaaccggatcgcctgttcttgaggacggcagattatatactgcatttgcgcttacaacttaatcttctgcaagctctttccaagatttgccaaccctcaatttaatctctccttttctttttataagggtaaaggtaaaagttatttaaagatttgatgatgttaactaaacactccaataattcagtcgacattaatattcaaatatttatgtagattatatataatatagaatttatatggcattt

SEQ ID NO: 20668 - DNA, 351 bp, Gossypium hirsutum
  unsure (1)..(351): unsure at all n locations; Clone ID: LIB3146-030-Q1-K1-G7
cccacgcgtccgcccacgcgtccggattatagaaactacggattctatacaaagagaaagaaaataaagaataaccaagcagcttgatatatgattgaattacaatgtgctagctgtttttttttatctttaattattatatgaataaaagagatttaaagtaagcttgattgaaaattatcattaaaaatgcttgttggtttatgtggacattaaggagttaataagtgctgtgttttgagtggtaaaaaattaaatatgttgtttaaagctcaatgatgagtaattcanaagataattgagatttaatgtagtatgttactaaatacaaaaagtcttaattgttttttt

SEQ ID NO: 20669 - DNA, 154 bp, Gossypium hirsutum
  Clone ID: LIB3146-030-Q1-K1-G8
tcgctcacactttcgaccacgcgttttttttatataaactaccgattctatggggggagaaagaaaataaataatctccaatctacttgatatatgattgtattacaatgtgctaactgtatttgtattttattaaatattatatgattaatag

SEQ ID NO: 20670 - DNA, 389 bp, Gossypium hirsutum
  Clone ID: LIB3146-030-Q1-K1-G9
cggacgcgtgggtgctgctgctcagattgaaggatcagaaaaatctaagggaaaaaggcctactgtatgggatcaatttatttggaaattgccagataaaatattggacaatagttctttggaagtagcaattgatttgcacaactgttataaggtatgaagctttttgtgacattattgcactttgattcgtcggaaacttttcaagacaagtatggaggcttcttaaatcgtatccttgtgttagtactatgtttgattctaacatttatttagctcttactagactttgctgcatgttatacaaactataggcgaatattgggggaggttgacccttttaaacttgaacaatacaattcttgctctttattcattttataaattaa

SEQ ID NO: 20671 - DNA, 311 bp, Gossypium hirsutum
  Clone ID: LIB3146-030-Q1-K1-H11
tcggcaccagataaagaggttgggaaggtgagtgtgcaatggttagctggggataagacaaaagtggtcgggacatttccgcctcgccgacggggctggactggctatgtcgaaaaggacaccgcggggcagaccaacatttattcaatagagcctgcagtttacgtagctgaaagtgcgataagctcgggaaccgccggttcttcagcggacggagctgagaatactgctgcagttgctgccggatttgcccttatcttttgtgctgcagcttcatctataggcctttaagttggtcaagaactcacctt

SEQ ID NO: 20672 - DNA, 339 bp, Gossypium hirsutum
  Clone ID: LIB3146-030-Q1-K1-H12
gctccacccacgcgtgcggttctagatcgcgagcggcgccctttaaaagggaaatcttttttttttttaaaagtaaaaggctcatatcagataaacacggcaacatttttctacaactaaatcctacatgggggtagtctcgagtttagacattgttatgcttaccatcatgaatactacttcacaatcacctagtactagagttctgatcaacattagagatacagcttcttactttgggcaaaagcaagaaacacggcagttattaattaaacacacaaaatttcgctaccattaaacgggttgggattacaaaccaaccattttaaaataaaaact

SEQ ID NO: 20673 - DNA, 289 bp, Gossypium hirsutum
  Clone ID: LIB3146-030-Q1-K1-H2
gtccagccgattcaaatggaccggaggtggcctaatggcctttggctaaatgcaatgcgttacacgatgggtgatgttagcaaagctcatggagcatcacaggagccacaattaacttcatcagataaatttgatatctactctaaaccaattgtgctctagtatttttttgttgctcataatgaattgcatcccgttatactcggagatttctctatccgttccatattcgtgcaatacttgtgtttacaatacattaatccatgttcatgagaatgaaatatattca

SEQ ID NO: 20674 - DNA, 353 bp, Gossypium hirsutum
  Clone ID: LIB3146-030-Q1-K1-H3
caaattccaaatccaacccattgattatctcttcaaatagtcaaaacccaaatttccttgcacaaaatttgatccgaatttgtaccttttttttttttgaaagcagcatggaatccgaactcaaggacttggattcgaaaccggcgaagattcaacaacccgatccgacccatgacgatacttcctccaaagacgaccgccccttactcaaacccgactcctcatccaccgccgccgccaacatccacgagctcgagaagaaattcgctgcttacgttcgtaacgacgtgtacggtaccatgggacgtggagagctcccattgaaggagaaaatcatgcttgggatctccctc

SEQ ID NO: 20675 - DNA, 343 bp, Gossypium hirsutum
  Clone ID: LIB3146-030-Q1-K1-H4
gtcgacactgaagagaattggggatgttcttacagttgttgttgtagcaggttgttgctatgaaatttatgtcaaggcagtaatgcgagaagaagctaggaacaaggcaaaggctggtggtggaagtaaatgaggctgtgcaagctttggcctgtgtgtggaaacgaaaaagtggatgtcagcatttcatcttgtttttggcaatgctgttttagattttaaagattttgcctagtgataaataagcaaaactgacatatgttatgacattgttgaagaccctagtctgcacatttccatcatgttctcatcatatgaattctgtcataaaaaaaaatgatga

SEQ ID NO: 20676 - DNA, 387 bp, Gossypium hirsutum
  Clone ID: LIB3146-030-Q1-K1-H5
gatgattctgaatttcgaaatccttttgctagggcttatatcagggtgaactcctatgaggccggtcctcgcaggggtcgaagccagagtagaagtcacattaagagtccaagggggaatcaaaggtctgtatcaaaatcgaggtcaccttcacctgccagattatccagatcaaggtcaaggtccaactaattgcaggttttgttgctgttgcaggaatgtttgcagaatggctagcatctgttgagtttcctgttgacttgtagcattagaaacttgaatagatatatgaatattttggtaccatatggttgtgacttgtgaggatagctcagtatctttatggtgtaatcttgtattggaccccgcttatttgatacatggact

SEQ ID NO: 20677 - DNA, 360 bp, Gossypium hirsutum
  Clone ID: LIB3146-030-Q1-K1-H6
gggttccctgaagaaagagttttatggttccaaagggccaacttttggtaccaaagtcagcaactaccctccatgccctaaacccgacctaatcaaggggctaagggctcacactgatgctggtggaatcatattactcttccaagatgacaaagtcagtgggcttcaactcctcaaggatgaccaatggattgatgtccctccattgaaacactccattgtcatcaaccttggtgaccaacttgaggtgatcaccaatggcaagtacaagagtgtgatgcaccgtgtgctggctcaaacagatgggacccgaatgtccattgcttccttttacaaccctggaagtgatgctgttatata

SEQ ID NO: 20678 - DNA, 59 bp, Gossypium hirsutum
  Clone ID: LIB3146-030-Q1-K1-H7
tcggagcaacagtattaaaaaacctttatggtccgaggatatatcattgttgggggggg

SEQ ID NO: 20679 - DNA, 240 bp, Gossypium hirsutum
  Clone ID: LIB3146-030-Q1-K1-H9
aaccttttgactgttaccgataaatttatgtgcttcaagttctttcttggacctcagtgctgttagtatttcaatcctcctgctgagatttttttttttttttgcttcaaagctagttgcaattgcttatttaacagataatatgaagaccattattatctacacgaaatgttacgtgaatcccttgcttttaagcggtagatttcgatttctaaataaaaataaaaaataaataaaatt

SEQ ID NO: 20680 - DNA, 284 bp, Gossypium hirsutum
  Clone ID: LIB3146-032-Q1-K1-A1
ctttgcctaagctcatgtttagaaggcttactcacaaacacaaaccgatggggggagcgtaggcgcctattaacatacgatccgaacgcatggctactgagaaactccgcatcgaatgtgaggaccagacccctcataatgcaagctctctcagcgtggtgcacgccagtggcccatgtggggatgtactgctagtaaagaacgctggtcatatactacaagagaaacatgttatctatatggagggaaaggccaggaataccctgctggtcgccatgactttg

SEQ ID NO: 20681 - DNA, 220 bp, Gossypium hirsutum
  Clone ID: LIB3146-032-Q1-K1-A10
gggatttctagaaacttcgtgaaaactcgaactccgacacaagtagcaagccatgctcagaaatactttctccgacgaagcaatctcaaccgtcgtcgtcgcagatctagcctctttgatatcaccaccgatacggtgcaggcaattccaatggaagaagagcgaattgatcgacaagaaaactcaactcagccatctgaaaccaatgtgtttcccatta

SEQ ID NO: 20682 - DNA, 153 bp, Gossypium hirsutum
  unsure (1)..(153): unsure at all n locations; Clone ID: LIB3146-032-Q1-K1-A11
gttgctgttggcattataaagattagaaaacaaagtaacttgttaactctctctctctctctctctctatatatatatatatatatattcatatattgtgcttgttttagttgacatgacatggaaaatgacattgagttctttatctttgnt

SEQ ID NO: 20683 - DNA, 414 bp, Gossypium hirsutum
  Clone ID: LIB3146-032-Q1-K1-A12
gcaagaaatcatggtaagtctcaaatcacttgtatctctcagttcccgatccgctgccgtagcactacttgttttggtggtttcagtggcagtgcagacccatactacaaatgcacaaagctgcccgaccgagctgacgagcctgaacgtgtgcgcacctttcgtggtgcccggtgcagctgtggctaaccctagcattgactgctgtaacgcactccaatcggtgcaccatgattgcctttgcagcactctaaggatcgcttctcgactcccttctcaatgcaatcttccaccactcacttgtgctttgaaagaaaagcagtggtgctgcatgctaaattgggtaggaaaatctaataacgccatggaatatggataccgccctgtttttttctttctttttaaaggggaaat

SEQ ID NO: 20684 - DNA, 363 bp, Gossypium hirsutum
  unsure (1)..(363): unsure at all n locations; Clone ID: LIB3146-032-Q1-K1-A2
cgtccgggcttcttctagggtttctttaacccttgggggccgccgttcaagagctcccctcggcttcaaacgccgttttagcttctgatcgagacagagagaatagcagaacgcaaccaagtctggtattgttggcgcatggagcggtgcacgctggggagggtcgtggcgcgagattctcggcggtgtgcgagggtggtactggaaactgctggggcttgcggcgttggggccaaagctgctagggttttcggtagaaatttgtttgtggctgtggggtttggcctangttagttattggtgtttactattgtaggcctgacatttggcgatacacttataacatacaattatgatgtatgt

SEQ ID NO: 20685 - DNA, 448 bp, Gossypium hirsutum
  Clone ID: LIB3146-032-Q1-K1-A3
ccggtacggaatggctcggacccacgcgtccgcccacgcgtccgcccacgcgtccgcccacgcgtccggcaagttttgggggttctaacattgatccgactgcttgggaagacaaaaagtgtaaaggcgagtcaagatttcctgctcaggtgagaatccgtattaggaaactctgcaaagcattggaagaggatgcttttcggccagtcttgcaccactatgatggtcccaagtttcgtcttgagctctcgattcctgagactttggacctactagacctctgtgaacaagctggctctccataagcaaaaatgttagctgagtgcaaatgtagcaagggttatgcaattcagctgcctgcttcttaaagaattttaatggagcacaagctatggcttgtagtccaagtggtgaaatcatctttgaaaaaaagtagtaggaaatgaca

SEQ ID NO: 20686 - DNA, 58 bp, Gossypium hirsutum
  Clone ID: LIB3146-032-Q1-K1-A4
ctcagcagtattcatagcattcggcagagattactgataagcttggccttcactccct

SEQ ID NO: 20687 - DNA, 413 bp, Gossypium hirsutum
  Clone ID: LIB3146-032-Q1-K1-A5
cccacgcgtccgaccagctatagctgaaatcttaccaccacattccactgatctcctgaatgaagaagaaataaatgttgaggagcatttaagtctcacaagaggtttagagaaccacaataaagtacaacatcctgaatttggacaagttaatgatgtcatgttcccttggactcaactctatccaacaggtagtacttggggaccaaacaaactagttcgtggttgggcttttgaagcttaattgtcctacttctcttacaaacttatggcccggacaattctccatattaaaggatatggggtaatatataaaatctagaattagaatggagatttttgatattttatacactggaaatgaaaccaaaaattaccaaaaaatggatcaatggttatattggacttttata

SEQ ID NO: 20688 - DNA, 394 bp, Gossypium hirsutum
  Clone ID: LIB3146-032-Q1-K1-A6
aagggcttcaacattctccgctctgtgaataaactggaaactcacctctggaaggctggttcttttgctctgaatatctcgaataattgctccaagaactgatttgtctatttcttgcgattgacatttcttaataactgttttcgagtctcattgtattactactgaggataaacccattgatattactaatttgatagcctctaaccctgcatgagcttctgctacgaacaaagaagagatgttttcatggagagtcgacttttcagctgctacctcgcccctttggtcacaaacaattaaacccgaggccgatctaaaatttcgtttgtcaaggctgtatcaaactggaccgttacacttgttgtctcccctgcttggttatggatacttt

SEQ ID NO: 20689 - DNA, 302 bp, Gossypium hirsutum
  Clone ID: LIB3146-032-Q1-K1-A7
caagatcccatttgtcccaatctctggatttgagggtgataacatgattgagaggtctaccaaccttgactggtacaagggtcccactctccttgaggctcttgaccagatcaatgagcccaagaggccttcagacaagccgctccggcttccacttcaggatgtctacaagattggcggcattggaactgtgcctgttggtcgtgttgagactggtgtccttaaacctggtatggtagtgacctttggcccctctggtctgaccactgaagttaaagtctgtgagatgcaccatgaaaccc

SEQ ID NO: 20690 - DNA, 288 bp, Gossypium hirsutum
  Clone ID: LIB3146-032-Q1-K1-A8
gtaccagctggacaggacaattatgtaaatgaaatgtatctcaagggatcaaaatattacctctatgtacacagttatttgcattatggcttactggcagctcgagcagaaattttgaaggccactgaagattctggcaacccttgcatcttggagggttttgatggtacttataaatatggaggagaagaatataaagcatcagcgccgtcatctggttcaagcatggaagaatgcaggagggtgactctcaaggctcttaaagtaaatgattcatgcacgcatatg

SEQ ID NO: 20691 - DNA, 260 bp, Gossypium hirsutum
  Clone ID: LIB3146-032-Q1-K1-A9
caatattttcacctttttttttttcaattaatttctcaaaaagaaactaaaaacctaagtgacgccgaaatttactacaagatgccgaagaagatgggtgtaaacagcaaagccgaggcggcgcgtgcgcgcaagagcgccgccgaatccgatcggaaagagcgtgaagcacgggagaaagaagagaattactggcgcgaagccgagggtcccaaatccagggcggccaagaaacgcgaggaagacgcagagaaacgagc

SEQ ID NO: 20692 - DNA, 330 bp, Gossypium hirsutum
  Clone ID: LIB3146-032-Q1-K1-B1
cccacgcgtccgggttttcattggaattgacaaaggtcatgtttgattaagttagggaattgatgtacaaaattgttatatgaatcaaagacctcacagctgtaaatacttttgagatcaaaaaaaaaaaaaaaaaaaaaaaaaaaaaaaaaaaaaaaaaaaaaaaaaaaaaaaaaaaaaaaaaaaaaaaaaaaaaaaataaaaaaaataattaaaaaaaaaaaaaaaaaaaaaaaaaaataataaaaaaaaaaattaaaaaaaaaataatttccccaaaaaaaaaaatatgggggggggctcttataaaaaaaaaaaaattttatcccg

SEQ ID NO: 20693 - DNA, 365 bp, Gossypium hirsutum
  Clone ID: LIB3146-032-Q1-K1-B10
agagaagagatataattgaaagaaaagaaaaatggttctgctagagaaactttgggatgatgtagtggccggtcctcaaccggaacgtggccttggccggctgaggaagatcaccaccaccccacccttgtccaccaaagatgaggcttcatcaatggcgatgccgacgagtccgacgacacctgggacaccatcgacgccggtgtcggctcgtagggacaacgtgtggaggagcgtgttcaatccaggtagcaaccttgcaaccaaaggtattggcgctgaagttttcgacaagcctcaacctaactcttctactgtttatgactggctttacagccggggagacccggagcaagcatcaccgt

SEQ ID NO: 20694 - DNA, 335 bp, Gossypium hirsutum
  Clone ID: LIB3146-032-Q1-K1-B11
cgatttttgactgatcataaagcaagacaacagtttctgctagaagctgcccgccaatgccaagattctgggctgtacgacaagtctatagagattcagaagagaattggagcattttcgatggcattggatacgataaataagtgcctctctgaagcaatttgtgccttatcacgtggtagattggatggtgagagtcaaactgctggcctcattcactccgggaacgagatcttggagactttcaaatattatcctgaagtcagtttccaagagagggaacatgtttcggagcaacaaaccatattaagacagctcgagactatattatcgat

SEQ ID NO: 20695 - DNA, 202 bp, Gossypium hirsutum
  Clone ID: LIB3146-032-Q1-K1-B12
cccacgcgtactgccactcatgcacgaacgcattctattctgtaaactgctcgccgtggccggcattctgtgctgttcgacaggtctgtatagaatcaaaatagaactggagctttatggatgtcatagggtacgagaaatcagtgccacttggaagcaattggtggcttatcacctggcctattgcatggtgagcgtcaaa

SEQ ID NO: 20696 - DNA, 374 bp, Gossypium hirsutum
  Clone ID: LIB3146-032-Q1-K1-B2
ggctttatagccaaaatcccaaaaagatcaaaacataaaaaataaaaaatacaacttttctttgtttttctatttgctactgctgtggtttgtctgttcttcgcaggtacggggtgcgttggcatcgtacggaggctgtgctggcgcgggcgtggctgctggagggtacggaggcggtacggaggctggggctgctgcggcgcaaacagattgctagggttctgccctatttttgaatcttgggccacttgggctgatataatttggactagttttattagttttgggctatgggtcatgtaactgggctatggggtattgggtttgtgacttgggtcttggattttaattttgggtttagggtcatgtactaa

SEQ ID NO: 20697 - DNA, 433 bp, Gossypium hirsutum
  Clone ID: LIB3146-032-Q1-K1-B3
aaaaaggaaaaagaaaaaagaaaaacaatagctgattcggacccccgaaaaccggatttcgaaaccctaatcggatctcccaaatagctccgtagaagaaagaagatgacgggagtaaccaatcaagaggaggacaagaaacccgctgatcaaacggctcacatcaatctcaaagtcaaaggccaggacgggaatgaagtgttctttaggattaaaagaagtactcaactaaagaaacttatgaatgcttattgtgatcggcaatcggtggatttcaactctattgccttccttttcaatggtcgccgtctgcggggcgagcagactccggatgagttggaaatggaagatggggatgagatcgatgcaatgctgcatcaaaactgtggtaccatggcctaactagctagcttatttatagggttactaccta

SEQ ID NO: 20698 - DNA, 323 bp, Gossypium hirsutum
  Clone ID: LIB3146-032-Q1-K1-B4
gaaagacatgctagtttaattgatcaatttggttaattcttctatagcttttggccatatcagttgcagccagttgctgttcaaattaattgttctacgcgaggacttgttatcttgagacaaattgtttcttcctctaagctttttatacaagtttgtattcgaaagaaattcaaaaaattatggcgtgtaatatctgctcaaaatcacttaaatgcgtggatgtttctgcagatggaagtctatgtatcgtggcgatttcatgtttcatggcattgggagatgaaaattgtttcatcggtgttctggtatcgagttcattg

SEQ ID NO: 20699 - DNA, 256 bp, Gossypium hirsutum
  unsure (1)..(256): unsure at all n locations; Clone ID: LIB3146-032-Q1-K1-B5
gtttgccttcttgtgaatggtgaaattgttgagattttgaagcctaatgaactctctgaagccaagcatcccatggcacaaaggtttcttcagctaagttcgtaatttacttttctataatagttgttatatttcccttttctttgtgcttaggatttgatgttaatttggtttaaacaatgttcagcattgcaagtttatttgttgtnnaaaaaaacaaaaataaaaataaaaataaaaaaataatatataatat

SEQ ID NO: 20700 - DNA, 423 bp, Gossypium hirsutum
  unsure (1)..(423): unsure at all n locations; Clone ID: LIB3146-032-Q1-K1-B6
cccacgcgtccggtcttgaagtctctttccttcctttttgagtatattggtgaaatgggaaaggattacatctatgctgtgactccattacttgaggatgctcttatggatagagatttggttcacaggcaaactgcagcttcagctgtcaagcacatggctttgggtgttgctgggttaggttgtgaggatgctttagtccacttgatgaactatgtctggcccaacatatttgagacttcacctcacgtaatcaatgcttgaatggaagccatcgaaagggatgagggtagccttaggtgctgcaattgtgctgaactactgtctncagggactcttncatcctgctcgtaaggttaggggaagtgtattgaaagatttataatcactttataatggatcccaagatgctctagttgcagc

SEQ ID NO: 20701 - DNA, 408 bp, Gossypium hirsutum
  Clone ID: LIB3146-032-Q1-K1-B7
cccacgcgtccggtcatgcagtctctttccttccttttggagtatattggtgaaatgggaaaggattacatctatgctgtgactccattacttgaggatgctcttatggatagagatttggttcacaggcaaactgcagctttagctgtcaagcacatggctttgggtgttgctgggttaggttgtgaggatgctttataccacttgatgaactatgtctggcccaacatatttgagacttcacctcacgtaatcaatgctgtaatggaagccatcgaagggatgagggtagccttaggtgctgcaattgtgctgaactactgtctccagggactcttccatcctgcttcgaaagttaggggaagtgttttggaagaattattatttcactttatattggattccaaa

SEQ ID NO: 20702 - DNA, 355 bp, Gossypium hirsutum
  Clone ID: LIB3146-032-Q1-K1-B8
atcatgttagccataaaagtttgatgtaccaaaggatttggatgttgaacttggcttagactgaaatgtatgctagacatgaaaatgaggtccttgtattcttagtagtctctttgagttttaattttactatggatctagaaaggggaaattgaagttttgatgacttttgagctggggatatcaatggggactggggaggaatggtttaaaatccttgtgaatgttaatgtagtaaaattgattcaatgaatgcttgttgatcttacttgtagtaaatatactgatcttgagtttgtcttactacatgctatatgttaattgatgcaaattaaacttaacattatcgtatcat

SEQ ID NO: 20703 - DNA, 359 bp, Gossypium hirsutum
  Clone ID: LIB3146-032-Q1-K1-B9
cccacgcgtccgcccacgcgtccgcccacgcgtccgattttgtgaagtgctggttctggttggccttggatctcatttcatctgtgagtataagattaagatggatctctgtctgtctggatttgccagcggtgttggtttggttgtgatgtgttgggttgggttgcgtgactaaaacattattgagattatatcttatggagaaattacgatgataccaatatttatatgtacattgataccctttttttccatcaaggagaaaatgctatcctgtacccatttttcccaagaaaaagattactaacatgctatatgttaattgatgcaaattaaacttaacaattatcgtataatgg

SEQ ID NO: 20704 - DNA, 402 bp, Gossypium hirsutum
  Clone ID: LIB3146-032-Q1-K1-C1
cagacacttccctcttccggtggttggccgcctgatcttgcagtgaagccaagcgtcctcgtgtcgagaacgccttttacggtggtttctgatttagtgtacttatttttttggtttccctcatcgtagcatgtattattgtatatagtagaaaatgattgatatggatatgatgggtgtaaagtaaaaggtctgagcaaaagggaaaaagcttatgctggtagttgataatggcgtcgaagttaaaagcaaagggagagggccctagtccttgttttaaagtcattgcagtgcgactcgcgcaacctctcccacaacaaaattcaaatatgcctaaagcttattagcaatggctgttgatatgggttgaaataaaaaggcgtgggctgtgtttttagtatt

SEQ ID NO: 20705 - DNA, 378 bp, Gossypium hirsutum
  Clone ID: LIB3146-032-Q1-K1-C10
cggacgcgtgggcggacgcgtgggcggacgcgtgggaaaaaggcaataggagatgccggtttcatgcctgaacttctcaaattgctcgatgcaaagtcatatgaagtgcgtgaaatggcaaccgaggcactctctagcttggtctcggtcccaaaaaatcgaaaacgattcgttcaagatgatcggaacgtaggctttcttctccagttgcttgatcaagaggatggcatatcaggtaacaaaaagctcttactatctatattaatgtcattgacaaattgcaacagtggaagaagaaaaattgccagtccggatatctaaagacatagaaagctggctgaacttgaagtttatgatgccaaaaaacttgtcaggaag

SEQ ID NO: 20706 - DNA, 333 bp, Gossypium hirsutum
  Clone ID: LIB3146-032-Q1-K1-C11
atttcaacaaccgccctaattctttcaaagtactctcaccagctcgcacatgtgtggtttattataaagtggatgaaagtgtagaagaaactaatggtatcaatgtaattagtgtcagtgagacattagaaatggatgcatcaaagcagaagaatgctgaggaatcggctatcttggttgatcatggagataaagaaaatccacaagaaactaatgaccgtgacaccgccagtttcgatgaggaattgcaaaaagatggagcaaagcaggaaagtattgaagaaccagcagcttctgtgctagacaaaaagattgtgggaagtaagttagatg

SEQ ID NO: 20707 - DNA, 364 bp, Gossypium hirsutum
  Clone ID: LIB3146-032-Q1-K1-C12
ggactccctcctcttctccctcgacctcctctcctccgcccgcctttacactttctctctctttctccacgtctccccacatttcctctcctcctcagacctcctcgccctccctcgccccgccttcatcgacaccctcctccctaaccgtcgactcttcgtagaacatgctatgtctacccgcaacggcacagccttgctaactgtttccgtcgacggggttgtcgtctccgtcccggatcttttccttggatccaacattgttgtccacgggcttgatgggattcttgttgcaagatacgggtccttgggtagtgaaggtagtgacaatgctattgctgagccaccccaagttccctatcaa

SEQ ID NO: 20708 - DNA, 429 bp, Gossypium hirsutum
  Clone ID: LIB3146-032-Q1-K1-C2
gcatcgggcaagaaagatgtgagtatgagaaggacctcatcttataatgaggctgtagtgtctgaagcatcattcatggagattcttaagaagccggctcttcatgggacagaggtccccgtgtatggctctgcttttgagccaccatcatctgatgttgcttcacaagctggacgaagtggcaagaaaaaagggaaaaagggaagacagattgatcctgccttgcttggttttaaggtttcaagcaaccgcattttgatgggtgagatccagcgtcttgacgattaatttttctcgtttacacgcgccatgtcttgttgtacatttcctgtaaatttttttactttctttttttttgctttctatagataaattttaattttgtatagtatattcgaggtaattaattgattttttgtccttaaaaat

SEQ ID NO: 20709 - DNA, 408 bp, Gossypium hirsutum
  unsure (1)..(408): unsure at all n locations; Clone ID: LIB3146-032-Q1-K1-C3
gtaaaagcaatgacactttccctctcggttttagttgccatcgaaatgttcaactcccttaatgccctctctgaagatggaagtctcttgacaatgcctccatgggtcaatccttggctcctcctcgccatgtctgtgtcattcggcctgcacttcttgatcctctatgtgccattccttgctcaagtattcggtatcgtacctttaagctttaacgaatggctgctggttctggccgtcgcattccctgtgattttgatcgacgaagtgttgaagttcgtagggaggttgggacggcggatgagatcctccagtcaaagacctttgaaacccaaaacagagtgaagacagatatggtataaatncgataagtggatactagacagccaatgctagcctctaaaatga

SEQ ID NO: 20710 - DNA, 381 bp, Gossypium hirsutum
  unsure (1)..(381): unsure at all n locations; Clone ID: LIB3146-032-Q1-K1-C4
caaaaaccaggtccgacatcagagagaaactatgggttattttaccctaatgaacaaagggtatataacataccgttatcacaaaaggggctgaatggtaaccagtcaccaccggcgagcaacgtgaatcagacggcgcctgtgaacaactggggaggagtgtcaaaggcgacgtcagggcagacctggtgcatggcgagccccaacgctgaggcggaggagctgcangaggggttggattatgcttgtggtgagggaggggctgattgtgggccaattcaaccaaatggtgcttgttataatccaaattcactcgttgcacatgcctcgtatgcttacaatagttactatcaaaagagggcacgtgtgaagtggtcatgc

SEQ ID NO: 20711 - DNA, 176 bp, Gossypium hirsutum
  Clone ID: LIB3146-032-Q1-K1-C5
agccatccatctgtgctggtttacgctggctttaattggaagcgggtcaacactgatgctgaggaggagactatgtgcgaacactactggcgtgtctgaaacgaacaatcgcgttggattccttgaaagagaagcaactcgctgaggtgcgatgaatgctacagcatatggctact

SEQ ID NO: 20712 - DNA, 267 bp, Gossypium hirsutum
  unsure (1)..(267): unsure at all n locations; Clone ID: LIB3146-032-Q1-K1-C6
gtttgccttcttgtgaatggtgaaattgttgagattttgaagcctaatgaactctctgaagccaagcatcccatggcacaaaggtttcttcagctaagttcgtaatttacttttctataatagttgttatatttcccttttctttgtgcttaggatttgatgttaatttggtttaaacaatgttcagcattgcaagtttatttgttgtnnaaaaaaaaaaaactaaaaaaaaaaaaatttaattttatttttaaaataaataattaa

SEQ ID NO: 20713 - DNA, 413 bp, Gossypium hirsutum
  Clone ID: LIB3146-032-Q1-K1-C7
attttatccaactttgctggtatttgctcgcttcacttggaaacggatcaatcgagatgtaaagttgggaactatgttggaacatcctttgctgatctgaaacgaacaattgggttgaattccctgaaagagaagcaacttgcaaaggtgcaatgaatgctagagcatcttgctactgctgcgatcggcaatgccaatgagtggatcttgctgagtctttagctggtgtgggacaggtatttgtttcctctagaagtttggttgcaatctcttggaagcaagagcctttttgtttcatatttttatccaaagcaacattggtatttaatttgggcctgtaatacttaattttcatttgtgatatgatttagaatacatcttttgccttgcctgtatgtaagcggcactgcaac

SEQ ID NO: 20714 - DNA, 404 bp, Gossypium hirsutum
  Clone ID: LIB3146-032-Q1-K1-C8
cggacgcgtgggaaatttacagaattgtcaaaattgtcggatctttgtccgccaaactctacaaaccttggatattgtttagttctgaaaatcccacaaacttccctgctcttgtgagggagtgttcttctgtgtggtcaagttcaggacttgaagaagcccttcaaaatctgactgatttgacagatttaaaatatgatgttcaagctttacttggttccattcagagtattcatgatcctgatgcgcatgaactctataaacaagttttcttggagcaagaatctacatgttgtctgtcaagtttaactgcaggagcagtgccaggcatgaaaatggtgctttgggatggacggcattactttgtaaccattgtcaacttgtgggcaaatttaataagtcgc

SEQ ID NO: 20715 - DNA, 416 bp, Gossypium hirsutum
  Clone ID: LIB3146-032-Q1-K1-C9
cggacgcgtgggaaatttacagaattgtcaaaattgtcggatctttgtccgccaaactctacaaaccttggatattgtttagttctgaaaatcccacaaacttccctgctcttgtgagggagtgttcttctgtgtggtcaagttcaggacttgaagaagcccttcaaaatctgactgatttgacagatttaaaatatgatgttcaagctttacttggttccattcagagtattcatgatcctgatgcgcatgaactctataaacaagttttcttggagcaagaatctacatgttgtctgtcaggtttaactgcaggagcagtgccaggcatgaaaatggtgctttgggatggacggcattactttgtaaccattgtcaacttgggggcaaatttaataagtcgcaatccaccaaat

SEQ ID NO: 20716 - DNA, 199 bp, Gossypium hirsutum
  Clone ID: LIB3146-032-Q1-K1-D1
aaggaatccactctccaccttgtcttgcgtcttcgtggtggtttctaagctctcctatgaaaatgaggtttctggattttatgtgaatgattgtgatgtctggccctgttaaggcctcataaataaacctaaactattttatctatgttttatcttatgtaatgatattatatgaataaaaattaccatgtttacctta

SEQ ID NO: 20717 - DNA, 388 bp, Gossypium hirsutum
  unsure (1)..(388): unsure at all n locations; Clone ID: LIB3146-032-Q1-K1-D10
gaaaccggcaattgagcttctcggaaaatgaaaaggagggtggtggtcgccgtcgttgtaaagctccggtgagtttttcgatggatttggggaactggttcgatgattgggaaggttatagaagtaggaaaacggtgttggaagtgttgagagaattggacgcagatatattgggtttgcaagatgtgaaagcggaggaagagaaagggatgagacctttgtcggatttagcagctgcgttggggatgaactacgtgtttgccgagagttgggcgccggagtacggcaacgccgtgctttcgaagtggccgattaaaccggtggaaagtgcagaagatatttgatgacgcagatttcatgaatgtnctaaaagcaaccattgatgtgc

SEQ ID NO: 20718 - DNA, 367 bp, Gossypium hirsutum
  Clone ID: LIB3146-032-Q1-K1-D11
aaatcccctgagaaaccgaatcctggaggcatattctgggatttgccaagggtttaagaactcttccaaaacccagctggtgattccctatgcacctcacatcctacagttattggatggcatatacatggagaaagacatggatgatatggtcatgaagactgccattggagtccttggtgatctagctgatacattaagaaatcatgctagttctatgatacagcaatctgtatcaagcaaagactttctgaatgaatgcttgtcttcagaagaccttctggttaaagaatctgcttaatgggccaagcttgttattagtccatccatttctgtttgagggtggcgccatttggcattttttatt

SEQ ID NO: 20719 - DNA, 394 bp, Gossypium hirsutum
  Clone ID: LIB3146-032-Q1-K1-D12
cccacgcgtccgtggtaaataagattctaattcccggaattgcagccaggaagtttcatgccgtggatgttatatattctgatggtagaaaatcaaagctgtcaattgttttttatgctagcaagttgttagttgttagtgtttttaaataaagcaacatgttagtgagtttttcacaacccctctggcagctgctttattagtttgtgttataaaaatgattttgtctttattgaacaaaatgttgatttatttatacctttgtttttttttttacttctctcaggaatttggtcaaaatttgttgtgaagttgaagtaaaaaccaaactatatgcatgcataagccttgcctgcactcctttcaaagtttttaagatgtaccctttttttat

SEQ ID NO: 20720 - DNA, 401 bp, Gossypium hirsutum
  Clone ID: LIB3146-032-Q1-K1-D2
cttttacagtgggtgactttactgggtagataaagcctatcaaagaagatttctaccagaattgggctcatggaaaatccttcgttaaaggggatgttcttggtgagtttttgagctttaaaatctttgttaattgagcttgttgattcgaaatttgatatttttatgcgtgtggttttgcagggttcaaatccggtcttgaaaaatctgaaaaagttgcagaagtaacggaaaaggcttacgatctgtgcgaaattgccaatactatatcatccgccatccccataccgataaatattactcttaacaggaccggagcttattacttcatttctactatcgccgataactgttggaacgggcaaaagctcaacatcacagtcggagatgagagcaaccct

SEQ ID NO: 20721 - DNA, 105 bp, Gossypium hirsutum
  Clone ID: LIB3146-032-Q1-K1-D3
gaatttttggatatttcaaagcttgttttgtagtcaaatttctcattacaagcagcattttttcagtgtaattgtcactttctatatagagtgtaaagttgcatt

SEQ ID NO: 20722 - DNA, 117 bp, Gossypium hirsutum
  Clone ID: LIB3146-032-Q1-K1-D4
cccacgcgtccgggagaatacagtgtcatttgtcacaatgaacaaggtcggaggattcctgcagagaatggatttggcccgcaagtttgcatttgggaagatgttggtgatcggtgc

SEQ ID NO: 20723 - DNA, 399 bp, Gossypium hirsutum
  Clone ID: LIB3146-032-Q1-K1-D6
gtttgggattgcattgtccgcaagatgagatattcctatagacctgagtgggtgtagtagtcttggtgttatattagttcgtactaagacaataaaattagaaataggtagcatcaaaacttttattttagggaaaaggctaaaaagtaaaaaagagaaaagctttatagggaaatgtatacgagttagaggaacctgttaaagcaaaaactgaaaactgggttttaaagcattttaagtattcatggataacaaggcatgtaacaaaatgcaaacagtagtgagtaaagcgaaaaagaagcaggtgaaggatgagttggaacgtattaaacaagctgagaagaaaaaagaggcggtggagaaaagcccttgctacatccgcagccatccgttctgagc

SEQ ID NO: 20724 - DNA, 339 bp, Gossypium hirsutum
  Clone ID: LIB3146-032-Q1-K1-D7
ttttgaactcactgaagaagctgtcaaggaattcattgctaaacaggtggtttactacaagagattgcataaggtgcactttgttcatgcaattcccaagtctccttcaggaaagattttgagaaaagatctgagagccaagctggctgctgcagcacctaatacccacattccatgaaaatttcttctataatctatttggcttttaaattgcaacgccttttgctgattttgctttaacttaagcttttaatgtttctaactcaagaggtcctgaaaagaaaaaattagtatggcgatgatcctatgtcatatttaagtttgttctctttttctcat

SEQ ID NO: 20725 - DNA, 295 bp, Gossypium hirsutum
  Clone ID: LIB3146-032-Q1-K1-D8
cccacgcgtccgcccacgcgtccggtaattgttctgcattcttggaatccagaagagggaaacagggatggacaagagtggaatgtgcttgctgtcaaggcacgggcaggtgcttttgtgtataattgtgcggtaatgggctgttaatgagagttgccgcatctttggtgcaaacattgacatctggaagaccaagatcaacgatcctctatctgttataatttttattgtctcagtatcattaattttattgttctttttcccattttatgattcagaagaataattgacctcg

SEQ ID NO: 20726 - DNA, 375 bp, Gossypium hirsutum
  Clone ID: LIB3146-032-Q1-K1-D9
aaattccctgagaaacggaatcctggaggcatattctgggattttccaagggtttaagaactctcccaaaacccagctgttgattccctatgcacctcacatcctccagtttttggatggcatatacatggagaaagacatggatgatatggtcatgaagactgccattggagtccttggtgatctagctgatacattaggaaatcatgctagttctatgatacagcaatctgtatcaagcaaagactttttgaatgaatgcttgtcttcagaagaccttctggttaaagaatctgctcaatgggccaagttggctattagtcgtgccatttctgtttgaagggtgttgccatttggcattttttattttctttc

SEQ ID NO: 20727 - DNA, 64 bp, Gossypium hirsutum
  Clone ID: LIB3146-032-Q1-K1-E1
gttcatcatcaagttgtagataaattatataatatattgaccaacaagtaatgtaattaccccc

SEQ ID NO: 20728 - DNA, 212 bp, Gossypium hirsutum
  Clone ID: LIB3146-032-Q1-K1-E10
gctgaggtttgaagcaaagaaaaaaaaaagtggttgctgaagaatttagtcctttttattattgcttttgtctcttgttttcagtactctgctaaagacataaattatttgtggtttttgatgtttttgttttaattgcttgttgttttatcatggaatggtttctatttttatgggttggcttaccagtctgggaaagcacaaacatgcat

SEQ ID NO: 20729 - DNA, 354 bp, Gossypium hirsutum
  Clone ID: LIB3146-032-Q1-K1-E11
cccacgcgtccgcccacgcgtccgcggacgcgtgggcaaagattgatttttgctggaaaacaacttgaagatggaagaactcttgccgattataatatccagaaggagtctactctccatttggttctccgccttcggggtggtatgcagatctttgtaaagactcttaccggaaagaccatcactttggaggttgaaagttccgataccattgacaatgtgaaggcaaagatccaagacaaggagggtatccccccagaccagcaaaggctcatctttgctggcaagcagctcgaagatggtaggacattgggccgactacaatatccaaaaagagtctaccctttcattggt

SEQ ID NO: 20730 - DNA, 227 bp, Gossypium hirsutum
  Clone ID: LIB3146-032-Q1-K1-E12
atcaaacgtgaaagcatgcatatcgaaagacaatggatatgcatggcctttggtgaaaagcagctttaatatggacgaacttttgccgattgtaatatccacaatgagtctagtgtgcatctggttctccgacttcggcgtggtatgcatacctttgtgaagactcttaccggatcgaccattactttggaggatgaaagttccgataccattgactgtgtgaaggc

SEQ ID NO: 20731 - DNA, 319 bp, Gossypium hirsutum
  Clone ID: LIB3146-032-Q1-K1-E2
gccaaccgttggattgactgccagggactacaccaggatgtactgggctgttcatcctgggggacctgcaatcttgaacagaatagaaaaacgactatagttgtttccagagaaactaagtgccaagcgaagaacgttggtggatatgggaatgctagcgtaacacacattgtatgtgttggatacatgatagacgagatcttgatgaatcagcagcagcagatgaaagagtgccaagaagaacagagtgaatggggcttgattttagcttttggaccagcggttaccttcgagggtattctcgcaagacacctgacag

SEQ ID NO: 20732 - DNA, 424 bp, Gossypium hirsutum
  Clone ID: LIB3146-032-Q1-K1-E3
catcagtcttttcaaatccccttcctttcccatagttggaaatttaaatcctctctccttcactttcccaattcttcaccatctctttctcttcaaatttttcctctctcatccgttttcttctcttccttctcaatcgtttatgttttttttatatggaaatcacttgcttcatccatagattttgggttttcagccctaggaaatattgtttcggttcgtcttttcaaatctatggatgtctttgtggttgttcttgttgcatgctttgggaatgaaagaaactctggctctgcaagatttcaacagcaatggcctctcttttgcagtcaatctctattacattgattcttatcccaaaaagacacgctattcccttcatcgtattgcacgggtttcctgttttcttattcaaagagtcact

SEQ ID NO: 20733 - DNA, 370 bp, Gossypium hirsutum
  unsure (1)..(370): unsure at all n locations; Clone ID: LIB3146-032-Q1-K1-E4
ccttccgcatttttggagacatccagtgacccaagagctctggctgttgcttgcttcgatctctcacaatttattcagcaccatcctgctgngccggtgatagtaaacgacctcaaggcaaaagagcgggtgatgaaagtgatgaaccacgacagtgcggaggttaccaagaatgccttgctctgcatccagaggcttttcctaagtgccaaatatgctagctttttgcaggcgtagttttgcttcattgtgctcggtcatgtctcatcggatggtaagtaaattatgctttgtaggagttttatattctcgttcaaggttcagtcgggatggctgatatttctattggatacttcatttcgaacatgtc

SEQ ID NO: 20734 - DNA, 217 bp, Gossypium hirsutum
  Clone ID: LIB3146-032-Q1-K1-E5
gaggccacgaaattcactactgttaaactactcactcggccactgaaacaaccactcttgcatgcggacattggttcaccatgatctttatgccggatccaatcaaatttcactcttggcgcacctacaattgttgtttatgagacaatatatatactgtggagactcccacagctacctttaaaaacgccggataatgaaacatttatggattatt

SEQ ID NO: 20735 - DNA, 227 bp, Gossypium hirsutum
  Clone ID: LIB3146-032-Q1-K1-E6
ttcttggaaattggccctggtttttatcggcacgttccatctaatattcctctagtacctacaatgaaaactattcgacactgagctttagcatagcttagctaggtgtcgattctatgctgtattgctggactgcagcccgaaggattttggagtttgggtgggctgattttcaggttgttttcaagattctttggttttttatcaagaccattttttaatttttg

SEQ ID NO: 20736 - DNA, 344 bp, Gossypium hirsutum
  Clone ID: LIB3146-032-Q1-K1-E7
ctcacgcgtccgaataaatttttctttctttcctatttatctattcctttttgtagaaacgcttgcaaaacttttcttatattcactcttattcattaatatttcatgtttcgattgtttaatctattagaatggtgtaaaacccaagttaatagtgtttgaatgcatgattacgtttgattttacattctttgtttttatcagacatttccattctgtcggaatatattgttttattaaaaatatagtgtatgtatcttgtatttagatttttgattttttattattttttttgttattttttcattatttcattttcactaataatttcttttttcattttt

SEQ ID NO: 20737 - DNA, 417 bp, Gossypium hirsutum
  Clone ID: LIB3146-032-Q1-K1-E9
agacagagagacatcaacattagaccttaatagaaagatgttagattctcgttccgacagtcaagaagtagagaaaaatgcattatcaaaagatgagaagaagaatgcagcaggccggtactatccgtaaaaacggctacatcgtcatcaaaggccgtccttgcaaggttgtcgaagtttccacttccaagactgggaagcacggacatgctaagtgtcactttgttgggatcgacatcttcactgctaagaagctggaagatatcgttccttcttcccacaattgtgatgtgccgcacgtcaaccgtactgattaccaattgatcgacatttctgaggatggaatttgtgagcttgctgactgagagcggagacactaaggatgatctgaggctccaactgatgaaaacttgttga

SEQ ID NO: 20738 - DNA, 322 bp, Gossypium hirsutum
  Clone ID: LIB3146-032-Q1-K1-F1
cgggactgaatggccgggccgacccgtgcgtccacgcgtccgcctttttcttttttgtgtgcgctctctgtcctcatatataattctctcttgtatttttaccttttaattccattaaacccttttaatttcaaagaattattattaggcgtctgttacgctcgcctgttctctcaggttcttttactttcagtttttcttttttgggtttgaatgggtcggatttggcgaagactatttttgtgaaccgccgggccgggtattttgggaggcacaccggggtgcaggtggtggttagccggtaccaaaccaggggtggtgg

SEQ ID NO: 20739 - DNA, 343 bp, Gossypium hirsutum
  Clone ID: LIB3146-032-Q1-K1-F10
cgggggtcccagtcccgaacccgtcggctgccggcgcactgctcgagctgctcccgcggcgagagcgggtcgccgcgtgccggccgggggacggactgggaacggctccctcgggggccttccccgggcgacgaacagtcgactcagaactggtacggacaagggggggcatttttcatgttcaatctgttctctgtaatgggtgggtcctgggtcccaagcaggtcgattaaatttagtgtttgtgcttgtatgtttttattagaagaggcagtttgcatgttgtcttttacaagtgataatcatcaatcatagtgcgtttgtttaaaaaaataaaattata

SEQ ID NO: 20740 - DNA, 319 bp, Gossypium hirsutum
  Clone ID: LIB3146-032-Q1-K1-F11
cccacgcgtccggtgtgaaggtgcccattgcgatattgggagctgagattgacaatttgtctcccccagaacttgtaaaacagtttgatgagatattaaaagcgagtgaggttgatagatttgtgaagatatttcctaaatgtgcccatggatggacggtcagatacgatgtcaatgatacaacagctgtgtcatgcgctaatgaagctcatcaagatatgctggagtggtttgcaaagtacgttaagtgagcaacttatccgatgatgatggtgttaatgcgtattatctagaattctgtttacaatatggtcttgtt

SEQ ID NO: 20741 - DNA, 274 bp, Gossypium hirsutum
  Clone ID: LIB3146-032-Q1-K1-F12
ataaggcaaaaataatggcagccatgggctgcgttgcaaagctcaatgactgctctttctctatcctcaaactcctttttgggccaacgtttctcaattcctccttctctctcccctcttcacatcaaaccaagagagaatccatgtctcattgtagtgaagcttaaacgatgggaacggaaggaatgcaaaccgaacagcctttcagatttgcataaaatgcacgttaaggttggagataccatcaaagtaatatccggtcgcgatagggcac

SEQ ID NO: 20742 - DNA, 317 bp, Gossypium hirsutum
  Clone ID: LIB3146-032-Q1-K1-F2
ccgttcaattcctggttctttattctgatccgtctaaaaaccctcgtttcccatcttattcctatggctcaaggtgggagagaacccgcgagaaaaagcgcggaaaggctcgcggagaagagccaggcggagaagaagatctcaaaagaggcggcgcagatagaagaaaagaaggttagaaagcgtcagacttacaagatttacatcttcaggtattgaaacggttatcctgatacgggatctcgacaaagcgatgggataatgaacagttcataacgatatctttgagaaatggctcaagagcatcgagattggct

SEQ ID NO: 20743 - DNA, 327 bp, Gossypium hirsutum
  Clone ID: LIB3146-032-Q1-K1-F3
aaagaacatgaaggcctacaataagagacaggctgagggtcccaaagacgaagatgttgagtctgacaaatcagtgtctgaggtgaatgatgaggatgatgatgaagaaaacactatattaggtacgaggaagatcaagaggcatatatgtgctagcttatgtcgttttaaagcaacttttcgtccctagtagaacattgtttagtcttcctgttgggttatgtttctttggtagtactcagtaatgtggtacttactaaaaacattttcttattttggttttatgtactattcggtcaatggatttaaaaaaacgatattttttgg

SEQ ID NO: 20744 - DNA, 366 bp, Gossypium hirsutum
  unsure (1)..(366): unsure at all n locations; Clone ID: LIB3146-032-Q1-K1-F4
gtcatgatgtgaacactatttaattcaattggggttaattatatccactaagctgaagctttcggttatactaataactttttccctattacaggagcacgctactgctgccctccagtatttccttggaatcagaagtaaaacagcattgcattctcttttgcactgaatatgcagctaccaaattttattcaccaaagtctgcaacttgtattcttctctggtaataaaacgatgaaccctttggtacaacaaatgcggacggctattggcaatggacatgcaatcagctttaatcttacctnctgtacatcgtccttatcgaactctttctgtttcaaaacaatcatcgactcaatctatttt

SEQ ID NO: 20745 - DNA, 422 bp, Gossypium hirsutum
  Clone ID: LIB3146-032-Q1-K1-F6
aggaaactaacaagaaccaagaggtggttcttgccctctatgaggccttaaacactcgagacgtcgaaactgttcacaaaatccttgcccctgaccttgaatggtggttccacggtcccccgactcaccagtttttgatgcgcctgctcaccggtgcttcttccgacgattctttccgtttcgaggttgatcccctttcggttaccacctttgggcccaccgtcatcgtcgaaggctgcgatcacagccgttcaatctcttgggttcacgcttggaccgtaaccgatgggataattacccaagtgagggaatacttgaacactttttctcaccgttactcgccttggaaactctaccccatcttcatcgttcgactacaatccatcatcatcatcatcatcatcatcatcatcatcatcatc

SEQ ID NO: 20746 - DNA, 326 bp, Gossypium hirsutum
  Clone ID: LIB3146-032-Q1-K1-F7
cgggggtcccagtcccgaacccgtcggctgccggcgcactgctcgagctgctcccgcggcgagagcgggtcgccgcgtgccggccgggggacggactgggaacggctccctcgggggccttccccgggcgacgaacagtcgactcagaactggtacggacaagggggggcatttttcatgttcaatctgttctctgtaatgggtggttcctgggtcccaagcaggtcgtttaaatttagtgtttgtgcttgtatgtttttattagaagaggcagtttgcatgttgtcttttacaagtaataataataaatcatagtgcgtttgttt

SEQ ID NO: 20747 - DNA, 368 bp, Gossypium hirsutum
  Clone ID: LIB3146-032-Q1-K1-F8
aactgatactcatatcgctcatcatttgttttcgacaatgccgcattaccacgcaatggaagcaacaaaggcaataaagccaatattgggcgagtattattcatttgatggtacaccagtttataaagcgatatttagagaggcaaaggagtgtatttacgttgaaccagacgaaggtgagcagagcagcaaaggtgtattttggtttagaaataagatctaattttgccgatagcgttgcggttgccgatgatgatgcgtttaagaatgggttaaatttgttacattattgttaaggatttggggttacttctattttagatgcttttgaatttggacttcgatggttctcatcgactttgttgatc

SEQ ID NO: 20748 - DNA, 322 bp, Gossypium hirsutum
  Clone ID: LIB3146-032-Q1-K1-F9
cccacgcgttcgcggacgcgtgggttgttacactgtctatttccctatattttgctggtgttgcgtattctgtttgttgtgcaggtggtggttgaacggtggagcagaggctggttgggggttgacagagatgatgggacagaagcggcgggtagggatcttttttctgataatggtttgggctgatgttagtggcttaggggttgtttaatttgggctggtagtttacgttttattttgttttggcgtaaaggttgttgggccactcgggtttgattgttaacaggctaaaattggcctacaacaacaagtgttttttttt

SEQ ID NO: 20749 - DNA, 181 bp, Gossypium hirsutum
  Clone ID: LIB3146-032-Q1-K1-G1
tccgcccaaccgtccgtttatttatccttcttatcatttccaaattttgatgattttcctcttttttatttaatttattaaaattgaactgctacatattcatttattgccttaagagaaaaaaatgtatcgttaatgttggtatgacagcacaaacaaattcgagggcttctgttacaca

SEQ ID NO: 20750 - DNA, 284 bp, Gossypium hirsutum
  Clone ID: LIB3146-032-Q1-K1-G11
ctcagtatctttggctggtcgaattatgagcaaaagatcatcaagttcaaagcttttcttttatgacttgcatggtgatggtgccaaagtccaagttatggctgatgcaagcaagtcaggcttggatgaagcagaatttgcaaaattccattccagtgtgaagcgtggtgatatagttggtgtcactgggtttccaggaaaaacaaagagaggggagttgagcatctttcctaagtcatttactgctgtatcccattgtctccatatgatgccaacgcaaaaag

SEQ ID NO: 20751 - DNA, 286 bp, Gossypium hirsutum
  Clone ID: LIB3146-032-Q1-K1-G12
ctccctctctttccttcatccccttctaaccccccccccccaaaaaaaaaaccacttgtgtaaacaaaatttcagcttgatgggtattgatgatgcatgtaatacaggccttgttcttgggttaggcttttcatcaaccctggaaactccattcaaggccaacaacaatcaaactcccaagaaatcatctatgtccatggcagcaacaagtttcgagccatcgctgacgttggggttatccggtcagatatacatagttaatgataataacaaaaagattgatgtg

SEQ ID NO: 20752 - DNA, 347 bp, Gossypium hirsutum
  Clone ID: LIB3146-032-Q1-K1-G3
gaccacgcgtccggcatccccagtccccattggttgccaacaatgggaaaagggggaggtgatgtatgatgtgtagcatggagaagagagtgagaatgggtcaacatggggatgagtgcatcattgctggcagcagcctgtgcagcaaccatgtcaagcccagccattgctctggtggacgagagaatgtccactgaaggaacaggacttccctttggtttgagcaacaacctcctcgggtggatcctgtttggtgtgttcggcctgatctgggcttttttacttcatctatactgcctccctggaagatgatgaagagtctgggttgtccctctaaaacccaaacc

SEQ ID NO: 20753 - DNA, 353 bp, Gossypium hirsutum
  Clone ID: LIB3146-032-Q1-K1-G4
cccacgcgtccgcccacgcgtccggggttcgactccccgactctaaacgccaacggattgattccgccgtctccgagaaaaaacctcctccgccgcaacaattcgacgaatcgcggcggttatttcaacgtttatggactgatgaagacgagatcgagcttctcaaaggatttctcgattacacgacttcgaaaaccaactctaattcttctcaccatcaccatcacgatacggcgttgttttacgatctaatcaaatcgaaactccagctcgatttcaacaagaatcagttagtcgagaagcttcgaagattgaagaagaaatataggaacgtgatgaataagatcaattcg

SEQ ID NO: 20754 - DNA, 388 bp, Gossypium hirsutum
  Clone ID: LIB3146-032-Q1-K1-G5
ctcccaatagttagctcagtccacagtcctcatcactcaatatcctttgaaactcagtgtttaagctttgattcccaagtttttttatttaagaaatggctcaggcaagaggcggtgcaatagcggtggcagcggtggcggcggcggtgctctgcttgttgctgagtcactttgagttggctcaagcagcaacgtatactgttggtggaaccggtggttgggccattaacgtggctggttggaccaaagataagcgttttaaggctggtgatacacttgtattcaaatacaacccatcaatccacaatgtggtagcttgtaaccaggcaggttacagttcatgcacaccccaaaaggtgctaaagttaccagtcgggcaaggatcaaa

SEQ ID NO: 20755 - DNA, 394 bp, Gossypium hirsutum
  Clone ID: LIB3146-032-Q1-K1-G6
cccacgcgtccggctaaagataaggccttgaaggtacgacagtacatggactcgcgggcttctgttagacagggggttctagctcaaagaaggtctaatttccaggggaaccggtttccttttgtggctgaggctgcacgtagagctgcagttgctccatttcgcaatagagcatttaatagtaggagggtggctaatttgaacaaaccaagggttggagcaccacctgtccaaaggagggctacaaatgggggttttactgccaagccacaagcggcagcaaccaacaactacaggcaggaccacaagaggacaatagtacaaaacaaaggcctaaaacattggattccctctttgccaatatgaaagaagagcgattgagggtattgtcaca

SEQ ID NO: 20756 - DNA, 285 bp, Gossypium hirsutum
  Clone ID: LIB3146-032-Q1-K1-G7
cccacgcatccggatctacagcgggtactgaatgcgacgcatgctctgcacctcggagtgagggatacaaacgcacctctattggctaacgctgttggagcgctggaggctagctgcggcgcaagcataagctaggagcaactgcctaggacatggcttttgggcattgtgcctatttgtatctgagccgtttctatcaatacagcttgcagtacttgaagctgctaactgggcatttaatggactggcacaatatagattattggttgaatcaaaggatgaccc

SEQ ID NO: 20757 - DNA, 372 bp, Gossypium hirsutum
  unsure (1)..(372): unsure at all n locations; Clone ID: LIB3146-032-Q1-K1-G8
aaggtttcatatactacctcgaaagctcacctacatggaacttgcttctttacctgcaaatgcaacattatgtactttagctccggaccatgatctcgagatatccaaggccgtaaatattacacaagaattgatgattaaccaagttaagattgttgcaccaaatatgtttgaatccaagaagtttgtgatccatggaatatcacaagcattcaaattgggtgagcttcctaacaccttccagatgaatgcatttttatagtaaagaaggattcaatagcttggagaatttcattagaggcatgtatatttgacctcttacttgtttgtataattnttggtatttgagagcctgncagagctcaatataca

SEQ ID NO: 20758 - DNA, 329 bp, Gossypium hirsutum
  Clone ID: LIB3146-032-Q1-K1-G9
agctttttgagattacgcataggaagaaagatagatctcctatgacatccgaagctggagaaattatggagaaactaaagaagaagaaggcggagtatgaagcgattgcttcaactgatagttctgttaatcttgagaacattgataacagaattattattgaagttttgggtcctgaaaggtatggccgggttcgatttcaatgatctggtgttaccccgacccaatattttggatccggctcccagcaatacatgccttctgggagtcaagctgaagctgaagtttagaggttaagaaaccagatagcttagagccaagcgagcaca

SEQ ID NO: 20759 - DNA, 211 bp, Gossypium hirsutum
  Clone ID: LIB3146-032-Q1-K1-H1
caccttatttcttaccctctaacagcctcaaacccaaacattcaccgtttcgtcgtccttgggggcctattaacataagatccgaaagcatggctactgaaaaactcggcatcaaagttgaaaccaacccttaaaaatccaagctttttaaccttggtgtacgccaggggcccaagtggggttgtcctcctagaaaatccccatggacata

SEQ ID NO: 20760 - DNA, 268 bp, Gossypium hirsutum
  unsure (1)..(268): unsure at all n locations; Clone ID: LIB3146-032-Q1-K1-H10
aagagaaacaagtgaatggagctgtggaagtgaaggaagtctagagtcctttttcaattcccaacagaagaaagccttaatgtactaaatatcattattagcaatcaataaaaaaaatgattttattttatggtactgcatagtttcagaaaatgtgttgtgttgttgcttcaatcagctggaatggtagtgtaaccaaatgcctatgtaagtgaaaaaaaatgctccgtttccgcgaaaataatcanatagtaaaatataaattaat

SEQ ID NO: 20761 - DNA, 269 bp, Gossypium hirsutum
  Clone ID: LIB3146-032-Q1-K1-H11
cggacgcgtgggatcgcgagggccgcccttttatttatttttatttacctttttctattcggggtagatgaaatccttactgttactaaatatacattatcaccaatcaataaaaaaaatgatttatggtatcaaactgtcttgttttaataaaaggggagaactggtgcttcaaacagaaggaatggtattgtaacccactgccttatgaagtgaaaaaaaatgcaccgtttaccaaaaaaaaaaaaaaaaacaatcttttgtttatt

SEQ ID NO: 20762 - DNA, 372 bp, Gossypium hirsutum
  unsure (1)..(372): unsure at all n locations; Clone ID: LIB3146-032-Q1-K1-H12
atcgacttcagcgacggagaggagaatttcgatggccgaccacggggcgttcggggtatagccggtgttggtggtggaagtgtcagacggtatgggcgtcgtgggggcgagggcgcgcatgcaatgctggggggcagacgagactgagcggcgcacatgggcatagggctgctagggtttctgtcattttttgatttgggctagggtttatttttgttggcccgttgggtttgtttagttagggtaggttagttgggttttgggggtgggccaaaaatggcctgtacacagactaaacatatcaaaaatccaggaaaccatccattacaagttaatattggttaaatcaattaaaacatttaccttgttnna

SEQ ID NO: 20763 - DNA, 379 bp, Gossypium hirsutum
  Clone ID: LIB3146-032-Q1-K1-H3
cccacgcgtccgaaacacccttggctggctcctcctaaggaggaaggctacttgtcactggaaaagatatgtttttccaggccaaatgagggaagaagatattgatcaaattagtcaaaattgacaccgggggaagaagagacctgttgttcaagaaacgaagatgttcttgatgatgccacattggttcaaagcaatcatcatgaattacattactgtgactttcaaatagtgtacagtagtacatttagggttccggtgctatattttcgtgcttactgcagcgatggaagacctttgccattggatgaaatagaaaaggagctccctgcatgctcttcaaaggaattgtcaaaaaaaaaatggacattcataactc

SEQ ID NO: 20764 - DNA, 239 bp, Gossypium hirsutum
  unsure (1)..(239): unsure at all n locations; Clone ID: LIB3146-032-Q1-K1-H4
cggaanttcccgggtncnngacccacgcgnttccggtgctannatggtgtnntggcgaanccaaannagaacttctnctcactttnacggtggcngtnntgggggcctancctctggagagttggcttcttaatgnnngctttgccatttgnnngtggagtttggnngggtcttgggtagggattacctnncccctcggtgggtgcacggttggactctggaaggtggaagtcgggggc

SEQ ID NO: 20765 - DNA, 460 bp, Gossypium hirsutum
  unsure (1)..(460): unsure at all n locations; Clone ID: LIB3146-032-Q1-K1-H5
cggtgatttggntcttggnnttcggtcgccgctcgaccctaataagaaccctaanctaagcgcattgtnagccatggaaggtgatanaagttacctttctcgttagaaccccacttcggagncttcanngctcccgttctcttttgtggttccaaacggggcatgtttgtgattcaaggggggataacttgtattgtttcaacgtgattcacnggcattttggtcccttcttccttatgnggcttattgaaagggaaaagttgtttatgaaggggtatggcccacnnctagcaagctttggtttatttgggttaaatgaagaaagaatacattcaaaggtattataangttcgcttgttaagtgggcttttaaagaaactttgtgataatggttcgaagaaaatggtcttttctgggtgctaagttttaaaatgatgtacaaattgtttttttttttttt

SEQ ID NO: 20766 - DNA, 350 bp, Gossypium hirsutum
  Clone ID: LIB3146-032-Q1-K1-H7
attttccattcatctttcattggtcgagcatcttcgaagaacaagggccgaatggcacgctatcttgcaaacaagtgttccattgcatctcgtatagattgtttttcagagaggggttccactgtctttggggagaaactgcgggaacaggtggaggaacgacttgaattctatgacaaaggtgttgcacctcgtaaaaacatcgatgtaatgaaatctgcaattgaaagtactcagaacaaagatactgaaatggaagaagtggaacctgaagaagcttccgcaaagaaaagcaagaaaaagaaagtccaaaacccgaagatgctccagctgctgctacaaatggagat

SEQ ID NO: 20767 - DNA, 285 bp, Gossypium hirsutum
  Clone ID: LIB3146-032-Q1-K1-H8
gccaaaccaagttattgaggagaagcttggtgagccaaccgagagctctgacgatagcactaaaggtcttactgatggtgaatgtcgtgatgcagggtacgatgctgagtacgtaacggacgagaacgcgccaaagagcagaatctatagcattgcatggtctatcgattcatctacgatcacgagcaagatgatgtacgctagcatctacgacagattcaagcacaaactggatcgaatacaggttggattgcaagcgacatatccaaccgcaaatgctatcga

SEQ ID NO: 20768 - DNA, 346 bp, Gossypium hirsutum
  Clone ID: LIB3146-032-Q1-K1-H9
ctcagcagcattcatagcattcggcagagattactgataagcttggccttcactcccttcgtcagcgccactggtatatccagagtacttgtgccacctctggcgaaaggctgtatgagggactggactggctttccaacaacattgctaacaagggttgagggttggttgaattccagtcatatcttcaggcagctatcctattattttctgggtccttttttaagttttacaggaaatgtatcagaatgtgttatataattaatatatattcaccgtactactgaaattaggcatttgcctgctttgtagattgatttctcaaataatttttttctatatgatc

SEQ ID NO: 20769 - DNA, 387 bp, Gossypium hirsutum
  Clone ID: LIB3146-033-Q1-K1-A1
cggacgcgtgggtgaggaggtggctgctgctgctcaatacttaaaggatacgctgggaaaggagggtgtgcaagacctcatcaccaatctttcaaaagatagagatggaaaaattcttgtggaaaacattgtgaagttgggcagtcagatggaggatgacaatagtagggaggaggaagagggaagaatgtaaagattataatccattttggaccgagcttaatggctataatcttatattatctccgaatacccttttaggtagaaatagtagttggtggaatgcatatatgttcttggctttggcaggcatggcggtggtctccgaaaatggagtttcttctagatctttggctctctttctttatagggaaagccgaatttagt

SEQ ID NO: 20770 - DNA, 295 bp, Gossypium hirsutum
  Clone ID: LIB3146-033-Q1-K1-A10
gaaacagtcaagaaaatgttgtccttggcattgcagggcaaggaagaaaagaacggccactttgagatcaaaactcatgggttgaggtctgaggttggccccgtcagtttagttgtcaatgcttgtgcgaaccgggatctccatgaaaatgttgtgggggtttgttttgtggctcaagatataactggtcagaaaattgtaatggacaaatttacccggatcgaaggggatttccaaacaattttgccaaattcaaacccggttgtttcaaccattttttgaaccaaataaattt

SEQ ID NO: 20771 - DNA, 358 bp, Gossypium hirsutum
  Clone ID: LIB3146-033-Q1-K1-A11
ctgaaattttatagcaagactccttatttctccgatgtcgatcttcgaatgcaacgggagtgccctaatagccatggtaggcaagaactgcttcgccattgccagcgatcggagactcggagttcaactccaaactatcgccaccgatttccagaggatttataaagtccacgatcggctcttcctcggtctctccggcctcgccaccgatgctcaaaccttgtatcaaaagcttgtctttcggcacaaactggatcagcttagaaaagaaagaaaccttgaacccgggaactttggttaactggtttttgcattctttacaaaaaagggtttggtccatacttctgccaacctgtaa

SEQ ID NO: 20772 - DNA, 317 bp, Gossypium hirsutum
  Clone ID: LIB3146-033-Q1-K1-A12
gacgaaaaagagtatcttatttaatggtagttaatcgtaaaaactacataaagcaagttcctgaaaaccaccaaacccagtgacgataaaaacagcaccataaaagagtctaaatgacagacattaaatattctagacattagacaacatcccaacttaacacatagttctctttttcttctctaagagagctgtccccataattttttgtaaaattccttatagtcatcttgtaaagcgtaagctctaagatcatctcaatactctgaatagtttataggctcttcgcactgtgaattcgcccgacgcctttacac

SEQ ID NO: 20773 - DNA, 392 bp, Gossypium hirsutum
  Clone ID: LIB3146-033-Q1-K1-A2
gattcaataatggaggaaccttctaaatcgccattgcccgaaccgggccttggggttcttcaagcaaatgggatcgacccatcaatttatatagcctctgattcaacccctcgttacctaaggttgaaaccagggaatgaagctgaaattgaaggaattgaagctgagataaagtgtaagcttgaaaaagtgaattggttacctggtttttattctcttcgacctgatattttgattgccaattcaaaatcatacttggatgggaagatttatggaattgatgctgcttctggtgctgctgtctcagtcttgaatatttcaccaggggaccatgtgctcgatctctgtgctgctcccagggcataaacttgtatgattttggatcttctcgg

SEQ ID NO: 20774 - DNA, 403 bp, Gossypium hirsutum
  Clone ID: LIB3146-033-Q1-K1-A4
accacgcgttcgtccaagcgtacgcacacgcgttcgcggacgcgtgggtgcggaaacatttgcatgtgtttttttttaaataattttttgttaaagtgactgtaaactaattaaaaaactagttgtgttttgatattgataaacacgcttacgttcagcaactagaagtaagtggaataaagctagctcaacttgtacaagatctgcagagaacaagatcccggtgatttttcgtgggtgggtgtgctgctgctttcggaaatatcagctcacgagctgcaatgtttgacatggaatattcaagatggttagaagatgatcacacgcacttgtcggagcttacaactgggttacatgctcaccttcccgacaccgatcttcagaccatcgtcgacggttacat

SEQ ID NO: 20775 - DNA, 371 bp, Gossypium hirsutum
  Clone ID: LIB3146-033-Q1-K1-A5
cccttttgcaggctggtgcttctttggaatctcttgctaaaggtactaagaactcaatgggcttgtcaacaattgcactgaattgcacagaaagtagctattagtttggagaaggccgcattatctgacgaatattttattaagaggaagctttatccaaatgttgatttctattttgggttaatatatcgggccatgggatttccaccagagttcttcactgtgttatttgcaatccctcgaatggctgggtacttggcacactggcacgagtctctagatgatcccgatacaaagataataagaccccaacagcaaaaattgtgagagtgaaagaaggggaaagaagatgaaagcaaaaagggaacttg

SEQ ID NO: 20776 - DNA, 231 bp, Gossypium hirsutum
  Clone ID: LIB3146-033-Q1-K1-A6
cccacgcgtacgctacctttcgatcactgaccttctatcaatcctcgcacatctttatttccaagggaagatcccaggtactttaacatatggtcaggcctctattctactctgcatgggcttgcaaaaccgggatgtctcttatgttgagggacaattgaagaaagcactaaaaaggcagcagatactatcatattttaagaaagttatgataaagctgtacaaatattt

SEQ ID NO: 20777 - DNA, 400 bp, Gossypium hirsutum
  Clone ID: LIB3146-033-Q1-K1-A7
cccacgcgtccgctcgattatcttgttggagctgtggcaaatcccaacacgccatttgctgcaattgacggtggttctaacgtatcaaccaagattggagtgattgaatcactcttggccaaggctgatattctcatactgggtggaggaatgacgtttaccttctacaaggcccaaggatatgcggctggatcttcacttgtgggagaagacaaacttgatctaacaacatcactccttgagaaggccaaggcaaaaggagtctctctcttgctccccactgatgtggttgttgctgacaagtatgctgctgatgctaacagcaaggtggtgccagcatcaaggatcccagatggttggatgggcttggatattggacctgactccatcaaaaccttta

SEQ ID NO: 20778 - DNA, 205 bp, Gossypium hirsutum
  Clone ID: LIB3146-033-Q1-K1-A8
ttttatgttttgtgttttttttttttttggtttttttgcggcgagccaaatgatgttgggtctacaatcctatttctatctttgattctattccttgggggggaaactgctggtcttatagttcacggaggattttttggataaattatgtacaagtgctttcttttttgtttgtaattacaaatctgattcatatggatgcttc

SEQ ID NO: 20779 - DNA, 400 bp, Gossypium hirsutum
  unsure (1)..(400): unsure at all n locations; Clone ID: LIB3146-033-Q1-K1-A9
attcaaaccatagggaaaatcgttgaatcggagtcattctctaaattcagatatgattacatgtcttggccaggactcgttaacatgacagaacattccccaataaacttgctgcctagacattacaactcctcaatcccacttgaaacgttctgcagagacaccgtgatgactatatggcactatcatggtggctgccaagttagtagggttgttgaccccgattataaggttcttggtgtcgaagctctaagggttatcgacggttccactttcaactattcgcctgggactaatnctcagccactgtcatgatgcttggaaggtagtacataaattaatcactagcagaaatattcattttatgttgggttttttaaaattgacattttagtttgat

SEQ ID NO: 20780 - DNA, 333 bp, Gossypium hirsutum
  Clone ID: LIB3146-033-Q1-K1-B1
ggaaagcaaaacgccaaggaccttaatttcctttattcacatactggcactgttcaagaagttaagccagtacactcgttgatttgtttctaaggatttaatctccaaaccttcttcccattttttcattacattggtcaagaaaaaagaagcaaaaaaacatggccaaagttctgttgttcattgcactatgtgtgcttccagctttggttagtgctacacgcattctgaataatcaattggggggagaaggctatgtgtactgggatacttgccgggctggttttgaaacccctaaaactagaaacctaactgatgccatggttaggttgg

SEQ ID NO: 20781 - DNA, 239 bp, Gossypium hirsutum
  Clone ID: LIB3146-033-Q1-K1-B10
cggacgcgtgggcttgaagaatgatttcattaagtacggtcaagatgaagaagcggctgatgatcaagaagagactggatggaaatatattcatggagacgtattccgtttcccaaagtacaaatctctctttgcttctgctctcggatctggaacacagctgttcactttaacggtcttcatttttatgcttgcactggttggtgtcttttatccatacaaccgaggagctctattta

SEQ ID NO: 20782 - DNA, 257 bp, Gossypium hirsutum
  Clone ID: LIB3146-033-Q1-K1-B11
tgctcttaaagtttctggtgattctgaagcagcttcagccctcaacaagggcttcttggctacccattttgccactctccatcctggttcagtcactgtcaatcttggttcttctggtttcatggcttactctcttgataaacaaaacccacttctccccaggctctttgcagttgtggatgacattttctgcttgtttcaaggccacattgagaatgttgctgttcttaagcaacaatatgggttgaacaaaactg

SEQ ID NO: 20783 - DNA, 58 bp, Gossypium hirsutum
  Clone ID: LIB3146-033-Q1-K1-B12
ccgtccgcaccaactgaggactctgtgttctttggtgttatgcaccccacaaaagcac

SEQ ID NO: 20784 - DNA, 254 bp, Gossypium hirsutum
  Clone ID: LIB3146-033-Q1-K1-B2
aaaccccagtcgacccacgcatcacccccttttttaacccatatttttttttttccatttccccccccttttttttttttgtttttgtaaacaaaaccccggggcccttaatcccccccataaacaaactttcacttcaaaaaaaatttaactatttcacttttttatttttttgtaaaaaataaagctccaaaccttcttcccatatttttattacattatttaataaaaaacccccttttttttttttccaa

SEQ ID NO: 20785 - DNA, 398 bp, Gossypium hirsutum
  Clone ID: LIB3146-033-Q1-K1-B3
gaaaacaataaaaaaaaaaaaaataaataaaaattaaaaaaaaaaaaaaaaaaaaggggaaaggaaaaaaaaaaaaaattaaaaaaaaaaaaaaaaaaaaaaaaaaaaaaaaaaaaaaaaaaaaaaaaaaaaaaaaaaaaaaataaaaaaaaaaataaaaaaataaaaaaaaaaaaaaaaagtggcccccttttttttataaacaaatttttctttcccttcttttaaagtttttacttttttttttttttcccaaaattatatttatttgcccctctttttaaaatgttaaatttgaaaaacccttggcttacccaaattaaatggttttaaaaaaatttactttttcataaattgctttaatacaaaaaagcctccccccatttccttttacaaaa

SEQ ID NO: 20786 - DNA, 394 bp, Gossypium hirsutum
  unsure (1)..(394): unsure at all n locations; Clone ID: LIB3146-033-Q1-K1-B4
cccacgcgtccgcccacgcgtccgcccacgcgtccgcccacgcgtccgcccacgcgtgcgcccacgcgtccggttagcagtggtggattctccagtctgcttgtctttctggcggagggcgtgctggtaaaacttttgggtgcttgggttgtccggaacctgtgtgcacctgtggggcaggtctcattggaccaaatcaggcggaagatagtagttaaaagtgccacggggctctcagctgcaaggatggccaagcagttagcagttgattcgagttgggtatcaatcaccgaaagcttaatgttcattctcaatctggaagatgtgattcctgtacgaacctgaattcctttgatttggacacaaagagtggagcttggatatgactngatag

SEQ ID NO: 20787 - DNA, 353 bp, Gossypium hirsutum
  Clone ID: LIB3146-033-Q1-K1-B5
attttgctcatcatttatgagcttgctaataaaatgtaagattgcagtattttgttcttgatattgaattgaattgaattgaattgttcatcacttgtaaagtcctgaaaatgtagaaaagttgcatacaagtggtaaaagctgtgaacttgatgaaagatgccatctaaaattagcagatactaaaatgaaatggtaaatgtaggaatggaatccaacagaggaagaattcttatgaatatggtgtatatggaacaacctgtcctattccaccaggaaagaactttacatacattcttcatgtcaaggatcaaataggaagattcttttacttgccctatcttgcattccat

SEQ ID NO: 20788 - DNA, 399 bp, Gossypium hirsutum
  Clone ID: LIB3146-033-Q1-K1-B6
cttagtgatagtgaaggatgcctgtaatgtcccagatgatgatagcgtgggaaatgaaagtggagttcgtttatttaaaaattctactcctgggatagtatttgaccacttagatgaaattcaaggaccccaaaagaaaccaaaacttcttcccagaagagggattgatgagaactcaaaagagttcagacgacaactattgtccatagctgttgatggaaaagatatattggctgcagcaagatatgcaagccagagatcgttagctagattggaagctaaagaagcaacagccaaagaaaaagcaaagagagaggaagccaggatcgcggaactgaaaaggattaggggagagaggtggctaccttcaatggctagagagatgcagttaagcaaaag

SEQ ID NO: 20789 - DNA, 401 bp, Gossypium hirsutum
  Clone ID: LIB3146-033-Q1-K1-B7
cccacgcgtccggctaaatattaatacagaaaccagagtttggttctgcagaaaggtccgaggagaaaagaaatggcaggaagattgagcaacgtagcgtcacgtataatgggcggaactggcgtcgtatcgcgctccgtcgcctcttcttttcgactccgttccggtatgggtctccctgtcggcaaacatatcgttcccgacaagccccttcctgtaaatgacgagctaatttgggacaatggaactgcatttccagaaccttgtattgatcgaatcgctgataccgtcggaaagtatgaggcattagcttggatgtgtggaggcttgagcttctttgcatcgttgggatttttggcttggtggaatgataaggcctccaagattccattcgcaccaaa

SEQ ID NO: 20790 - DNA, 394 bp, Gossypium hirsutum
  Clone ID: LIB3146-033-Q1-K1-B8
gcggaaagcaccaagtttgttgaaggcgcagggaagtgattcgaagtctggaaaaaagaggcaaagatgagttgaaagtcgcacctactgcattgtcatttgccaagggttggttcttctccaatgtggaacttgggtgaattgtagtatttattgtagcatttgggtatttgacgtagatcttaggtttgtgggtagcaaatattcgtagttaatgcagtttatagtagttgtactttgtagggttaagataccttttttatatagatatagtttttttccttttcctttattattgatgcacgcgttaggatcacattgggtttagagtttttgcctttgtaccaaagagttgcttctatagattaacgtaatagattggattcgagaaaaa

SEQ ID NO: 20791 - DNA, 393 bp, Gossypium hirsutum
  unsure (1)..(393): unsure at all n locations; Clone ID: LIB3146-033-Q1-K1-B9
caaagagcaggaaaacaagaaaagcagagccgcatcactttttgctagctaagcggctgtgggagttattggtcttcanaacagcttctgcagtagctaataataacgttatatattatataaattttatacatcctttttaccctacgactccatatataagcaagtaaaaataaatatggctcgctctgtttcttcctttaagttccttggtgcttctgtttttgatgctctttatgtctccatatcaaggagaggttactcaagtgcacctccggcggcagtgacagctagctttggtggcctggagcatggggaaagtggaacgaagatatgctatgaaagagtcgtcgtcgtcggagacaaaggcttattcttcagcttgggcgcctg

SEQ ID NO: 20792 - DNA, 405 bp, Gossypium hirsutum
  Clone ID: LIB3146-033-Q1-K1-C1
cattttcattgatgctgaccttcttatacttaggaatattgatttcttatttgagatgcctgaaatttcagctatagggaataatgctacgctcttcaactctggtgtgatggtcattgagccatcgaattgtacattccagattctaatggatcacatcaatgaaattaaatcctacaatggtggagatcaggggtatcttaatgaaatcttcacctggtggcatcggattccgaaacacatgaacttcttgaagcacttctgggaaggtgatgaggaggagaagaaacagatgaagactcgactcttcggagccgatcctccaatcctttatgtcatccattatctgggaaataaaccatggctatgcttccgggactatgattgcaactggaatgtggacat

SEQ ID NO: 20793 - DNA, 214 bp, Gossypium hirsutum
  Clone ID: LIB3146-033-Q1-K1-C10
attttatgggaaaatcgctgtccggctcaaccaagcttcaacatctctcagagagtaccttcgccatccacgcatcttaacacaactgggaaaaacccataacccactactctgaaccggagcattatatatgtacacaacaaacccaattccaagaaaaatatggacagctccaataccagtcaacgcataacactttccgaactcatctccg

SEQ ID NO: 20794 - DNA, 399 bp, Gossypium hirsutum
  Clone ID: LIB3146-033-Q1-K1-C11
cccacgcgtccgaaaatttctaaaattttgaagcttcgttgaaggaattatcgtgtttttttttttcccttttcttctttgattttttttttggggttttttgaggtgcaaattgcaaaagcaggcaaaattaatggctactgaagaggtcaataagcctccttcacttccttcatacccacagctgattatgaacgccatcgaagcattgaacgacaagaatggttctaacaagacatcaatatccaaatacattgaatccaagtatggagatttgcctgctggtcacactactctccttcacaccaccttaatcgtatgaaacaaacaagggaacttgtcttcttgaaaaacaattacatgaaagctgaccctaatgcaccacctaaacgtggtcgt

SEQ ID NO: 20795 - DNA, 396 bp, Gossypium hirsutum
  Clone ID: LIB3146-033-Q1-K1-C2
gatcagttccacgctaccaaataggttggggaaaatgcttgcacctttacactggcatgattacaagaagtatggaaagctggatgactttgtagccagtcaccctgcgttgtttctgattgagggcgattatattcagcttcgagagggagcacaagaaatgatagcagccactgctgctgttgctaaagttgctgcagcagctgcagcctcatctccttactcctcgattttgccttctgttgctgttactccaatggcacaacctaaccgactaaagaagggtctcccaacagctgactccaaccatgcgaagaatgagaatgctgctttcaaggggtatgcagttatctccaaaactgcagctggtgatcattcacagctgtcaggaatgca

SEQ ID NO: 20796 - DNA, 404 bp, Gossypium hirsutum
  unsure (1)..(404): unsure at all n locations; Clone ID: LIB3146-033-Q1-K1-C3
agcgacatgctggttgcaaaacaaagcatccaaataatcacatatactttgagaatgggaagaccatttatgggattgtccaagagcttanaagcacacctcagaatatgttgttcgatgttattcagacaataactggctcgcctattaaccagaagtgcttccggatttggaaagagtcgtttttagctgccactcttgaacttcagcgtatatatgggaaggatgaaatgaaacaattgtcataaaacaaccattttcatttgcaagcttgttaatggtgacagcgccgggcgtgggtttttttttttttaatttacgggagtagggactatgttaaaaagtagggagttaatgcctgaaagagagatacttgttatttgtgtatttgcttgtatctctgc

SEQ ID NO: 20797 - DNA, 395 bp, Gossypium hirsutum
  Clone ID: LIB3146-033-Q1-K1-C5
agattgagttagccttttatgcttgtgatttcaattttgagttttgacttatttgtggtcatacttaaaatgcactgagttttgacttgcggctttaatagctactgttacattgggtgaagaattctacttgggagggtaagccttaacttttaacccatacattgttgcctacaatcatactttgcagggtaggagtgactttgaatatagcttgcaaaatatgtgaaacttgcaaggtagtaggagcagcattgataatggttggattgtatctggttatcctaggaaaaagtgaagagagcaagtatctgtctaaaaatgaaccaatctattcaatgtctgaaaataatgacatggaatccaccttcattcggccgttgctgggaaataaa

SEQ ID NO: 20798 - DNA, 290 bp, Gossypium hirsutum
  Clone ID: LIB3146-033-Q1-K1-C6
cccacgcgtccgcaactcccttgctgaaccctgttatgggcttaattgattcttgggtctgatacttaccaagttcaagtaatgctcaaaatttgaaactagaaggctctttgtcaacatgtcagtcagattgtgttttatgccaattttaagaatccaaacatccccttaaatatccacctctcaaacaaaatgataacgaatgtttatatgcttagttctctcgtgatgcatttgatctttggtaagatgtataacactttggctatcgcaatatacaacagttgctc

SEQ ID NO: 20799 - DNA, 310 bp, Gossypium hirsutum
  Clone ID: LIB3146-033-Q1-K1-C7
accacacgtccgaaggaattctgtatgaacctggtgaacattcagatcatgtcggggtcatcaagtatgtgccatatgtgggagacagcaatagagccattgatgtgtattcatcatagatattcatgggaggctagaacaccattgtgttgcacaacaaatgttagtatatgctgttagacgctactaatattctataaatggttctacttgctgaacttaacaccacgaatcaagttaatgctgatcgagaggggatgttacacttttttcatacttgggctacaatgctaatttacctaatcaaaac

SEQ ID NO: 20800 - DNA, 292 bp, Gossypium hirsutum
  Clone ID: LIB3146-033-Q1-K1-C8
cccacgcgtccgaccacgcgtccgcccacgcgtccgcgatttttatatattggctgtgttcctatacccaaacatcaatttagaataaggttcaaaatgttatatttttgttctttttttggccaaaaaacgttatatttttgttagacaattgtggttgaagtgtttttccaggaaaactttgggcttcattgcccctttttctttaaattggacctcataattttcccttttaaaaaaagggtaatcgagagggcaagttacactctattcatactttagctacaaatac

SEQ ID NO: 20801 - DNA, 331 bp, Gossypium hirsutum
  Clone ID: LIB3146-033-Q1-K1-C9
cattttatgggaaaatcgctggccggcgcaaccaagcttcaacatctcgcaaaggtgtaccggcgccgcccaccatcttaacacaactgggaaaaacccaaaacccactactctgaaccggcggattataagtgaagacaacaaacccaattccaagaagaagatggagagctccagtgccagtcaacgcctcccactttccgaagtcgtctccgattgcgttaaacgttggttcaaagatactctcaaggaagccaaagccggggacgttaacatgcaagttcttgggggtcaaatgtattattaccgtatggggttccccggaatggcc

SEQ ID NO: 20802 - DNA, 403 bp, Gossypium hirsutum
  Clone ID: LIB3146-033-Q1-K1-D1
accatttcatggcagaacaactggcagtgattgccaaagaacatggtggtatcatgagattgattcaagtttcttgcttagggtcttctctgtcatctccatcaagatttctaagagctaaggctgctggagaagaagctgttttgaaagaacttcctgaggctactgtcatgaaacctgctgtaatgattggtaccgaggatcgtattatgaatcgatgggcacattttgcaaagaaatatagttttcttccactcattggtggtggatctaccaaaatccagccagtatatgttgttgatgttgcttctgcaattgttgcggccttgaaagatgatggaagcagcatgggaaacgtttatgaattgggtggaccagagatctatactgtgcatgaactggc

SEQ ID NO: 20803 - DNA, 307 bp, Gossypium hirsutum
  Clone ID: LIB3146-033-Q1-K1-D10
cctggatgcacggttggatgttgcattcaataagaaacttccagagatccgcaagtggctttttggtcaggttgctgcttgaaggctgaagatggtattgtttttctcagcagcttttgtcatcggccatagagcatagtgattaagttatttgttccatgtatttgctttctcatattgttctccccgaatagtttatttgtttgataaaagtcagtgaaactcttgttcgattggtccgtatatcattttctgggattgtgaaagtactgtttttaaataatgaataaaatttgaaagtttgctt

SEQ ID NO: 20804 - DNA, 299 bp, Gossypium hirsutum
  Clone ID: LIB3146-033-Q1-K1-D11
atccattgccgccgctgtcgtcgcaatggtgaagtttctaaaaccgaacaaggccgtgatcgtcctccaaggccgatacgccggccgcaaagccgtgatcgttagatccttcgacgaaagcacacgcgaccgcccttacggccattgtttggtcgccgggacaaagaagtacccgagcaaagtcatccgcaaggactcggccaagaaaacggcgaagaaatcgcgtgtgaaatgcttcgtcaagctagtgaattaccagcacctgatgcccacgcgctacaccctcgacgtggatttga

SEQ ID NO: 20805 - DNA, 386 bp, Gossypium hirsutum
  Clone ID: LIB3146-033-Q1-K1-D12
cccacgcgtccgtgcaaaccctgatggtcgtaagagagcccttctcattggagggggcattgctaacttcactgatgtagctgctactttcaacggaatcattcgagcattgagagaaaaggaagccaagttaaaagcagcaagaatgcacatctatgttcgaagaggtggtccaaactatcaaactggtttggcaaggatgcgtgctcttggggaggaactaggagtaccccttgaggtttacgggcctgaagccacgatgactggcatatgcaagcaggctatagattgcattatgtctaagcataaaagggtattatttttgttctccaaaatcgaagtattctgcccatgcaatttggtattctttggtcaaagtataaact

SEQ ID NO: 20806 - DNA, 398 bp, Gossypium hirsutum
  Clone ID: LIB3146-033-Q1-K1-D2
cggacgcgtgggtttgtaccagccatatccggcttgttctatgccaatgtagctggaaaaagaatagcttcagggaagcctcaaatccttgttccagctgatatacctgctacgtctgcccccatcaccaactacctctctccttacgttgccaagaggaaccacttggcttattcctgtttctgctagtcgtgtcggttcgatgcacgtgtgccttcgtaaaagggtgtcgggtcttcccgtttacctcagttggagtctttttgagtaagcagagggaaagaccaactttggtgttcatacttgggtgttaactggccctgataaaagttatatgttaagatgatttttggtttttctttaatgcgtttctcaatggggggggggggtcagaaatg

SEQ ID NO: 20807 - DNA, 394 bp, Gossypium hirsutum
  Clone ID: LIB3146-033-Q1-K1-D3
cgactttcttgacggggtaaacgtatcggttattctcagtattggtacaaaatggtgaaatgcaaaggttgtgggaaattaggaaggatgctaccgggtgacgggcctgcaaaagcttaccattatgctcttctttgttcccctgttgtttctgtttgggattgcattgtccgtaagatgagatactcctacatacctgaatgggtgtagtctttggtgttatataactatataggtagcatcagaagcttttttttagaatacaattatagaagaaggaaaaaaagacagctatatagggaaaaatatacaatttaggggaacctttttaaagtttcatggataacaaggcttgtaataaagtgcgactgtgcgtgagaaaagcaaaaaaaga

SEQ ID NO: 20808 - DNA, 182 bp, Gossypium hirsutum
  Clone ID: LIB3146-033-Q1-K1-D4
cccacgcgtccgcccacgcgtccggaataagaagagatatcaacttagcagcaagccaaatatatagttttaagtgatcaaatcctattttcttttatttagttgttgaaaaatacatgtatttattattatactacgcttttgcttctaagcctttttgtatatgatgggggtgattcttt

SEQ ID NO: 20809 - DNA, 401 bp, Gossypium hirsutum
  Clone ID: LIB3146-033-Q1-K1-D5
agaaaatatcacaaatcttcttctccttctcagaaatcttagtatcatcactatggcctcaaatcccaaggtcttctttgacatgacgatcggtggtcagcccgctggtcggattgtgatggagcttttcgcagattgcactcctcgcactgcggagaacttccgtgccctctgtactggcgagaaaggcgtcggccgcagcggtaagcccctccactacaaaagctcttctttccatcgtgtgatccctaactttatgtgccaaggaggtgacttcaccgccggaaacggtaccggaggtgaatccatctacggatcaaagttcgctgacgagaacttcatcaagaagcacactggtcccggtattctctcaatggctaacgctggaccgggaactaacg

SEQ ID NO: 20810 - DNA, 392 bp, Gossypium hirsutum
  Clone ID: LIB3146-033-Q1-K1-D6
ctttttacaacagttatgtacatcattatatggaaggggagtccatgagagtaagttttgagccatggtttgtggagtacaaggttgatgttgtattcgctggacacgtccatgcctatgagagatccgaacgcatatcgaatattgcgtataacattgttaatggattgtgcactcccataaaggatccatctgctccagtgtacttgaccattggagatggaggaaatctggaaggattggtgaaagagatgacagagccacagccgaactactcggcgtatcgtgaagctagtttcggtcatggaatactggaaattaagaacaggactcatgcttactttggctggcatcgaaatcaagactgttatgctgtggaagccgattcccta

SEQ ID NO: 20811 - DNA, 362 bp, Gossypium hirsutum
  Clone ID: LIB3146-033-Q1-K1-D7
cccacgcgtccgcggtgctgcagatgttccatcgcgggcatgttgtttgggtgctgaaactattgcttacgaagcacagaccaaagatgaccgacgggctatctgcgagtgccttgttaatgcattagcaaatattggcacatctgactccttcactgcgcggatacctttaattgctacccaatgcggtgttgatgtttctcttccgccaattaccagcgacaaagattattgttccaagctcttcccttgacttcgtttgatataccatcgtgttgtgccacactagggaagatattaattatatctagctcaatccatcatcctttaaatttctttaagtaatttacattgtacttagt

SEQ ID NO: 20812 - DNA, 390 bp, Gossypium hirsutum
  Clone ID: LIB3146-033-Q1-K1-D8
aagcagcggtgctgcatgcttaattgtttaggaaaatgtaataacgccatgtaatatggataccgccctgtatttatataccatttataatgggtaatatataatggagtgcgtaaaatgtaaactaataaatatcagcacatctgactatatatactgcgcacatacctttaattgctacccaatgcggtgttgatgtttctcttccgccaattaccagcgacaaaaattgttggtccaatctcttgacttgacttcacttgatataccatgcgattgtgccacactatggaagatattaattatatatagctcaatccatcattctctaaatttgtttaagtaattcacattgtacttagagaataacaaattctagttgtagacaaa

SEQ ID NO: 20813 - DNA, 118 bp, Gossypium hirsutum
  Clone ID: LIB3146-033-Q1-K1-D9
ggcattcctagaccccacggtaaaacagcaaaatatcatttaaaggaaaaactcggagtctgaccactagctgcacactaaaattcgcttgttactggattgacatccctatggttta

SEQ ID NO: 20814 - DNA, 399 bp, Gossypium hirsutum
  Clone ID: LIB3146-033-Q1-K1-E1
gtagcaaatttcttctttaccttctggagaagcaagaacatttggtgggttgggaaagcctgttggtggtgcaatgcctgctcgtccaatagctgatcctcctgtgatgggtcgtcctggatctgctgctccagatatggtatcaaatggtcgaaatgtaggttatggtaatcaacttcctttggatgcaatgtcgaggctaggtcgggatactgtacctctacctccagatgcttccaatactctatatgttgagggacttccttctgacagcacaaggagggaagtagcccacatctttcgcccttttgtgggatataaagaagtacgactagttagcaaagaattccgacatcgtggtggagatcctcttatcctctgttttggtgatttcaccac

SEQ ID NO: 20815 - DNA, 383 bp, Gossypium hirsutum
  Clone ID: LIB3146-033-Q1-K1-E10
attcaaaccatagggaaaatcgttgaatcggagtcattctctaaattcagatatgattacatgtcttggccaggactcgttaacatgacagaacattccccaataaacttgctgcctagacattacaactcctcaatcccacttgaaacgttctgcagagacaccgtgatgactatatggcactatcatggtggctgccaagttagtagggttgttgaccccgattataaggttcttggtgtcgaagctctaagggttatcgacgggtccactttcaactattccgctgggactaaatctaagccactgcattattcttggaaaggtggtccttaattaatcacttgccgaaatattcaatttatggtggggtttttaaaaat

SEQ ID NO: 20816 - DNA, 272 bp, Gossypium hirsutum
  Clone ID: LIB3146-033-Q1-K1-E11
tctctctccattgacgcagactccaatctacagcgcacacaaaaatcaaaaagaagcaacgatgttcccaggcatgtttatgcgcaagccatacaaggctgcagccttgaagcagttgaaggcacacgtagccatgtttggggtgtgggtagctgttgttcgtgtcactccttacattcttcattacctctctgatgaaaaagaagagctcaagattgagttctagaggtcatctctcattctttttcagttgatcgacacgaagagaaagg

SEQ ID NO: 20817 - DNA, 298 bp, Gossypium hirsutum
  Clone ID: LIB3146-033-Q1-K1-E12
tttcaaaccatacacacaatctttttttcacagctatcccttaacttaagaccagaccacttttgccgggcactattcattctcttgacagaccattctccccccatcgtgctgtctagccatctcatctcatctataagactatagacatcctttcaattcacctcaaccaccataaacctctctcatcttcactgcccaataacaaagcctgtggaccccaaccataaactcctcctacttgttcaactacacgtcatggacacatatatattcaaattttgacttggcgctacac

SEQ ID NO: 20818 - DNA, 399 bp, Gossypium hirsutum
  Clone ID: LIB3146-033-Q1-K1-E2
cccacgcgtccgcccacgcgtccgagttctagatcgcgagcgcccacgcgtccgatcacccgctagcctcaaacgtatcatcaacatctctctctcgctctctctctgttgagttgttatatgtgtctactgagaagccaaagcaaacggaactttttttttttctgtgtgtggggctataaggttaagcatcaagactccatttttgaattttttttccataaatattgcaaaatataatattaaaagtgaacttcaaattatttgttaggtgttaatattttgatgagatttcagggctgttctgtttattccaggagaataaatttgtctgttttcttgaagcacaagaataatgcctgagaaaataacaacagaggacttatttaacaatctagt

SEQ ID NO: 20819 - DNA, 401 bp, Gossypium hirsutum
  Clone ID: LIB3146-033-Q1-K1-E3
cggacgcgtgggaaagtcacaactcacaaatctgcaatcgggttctcaacttctcggttctgaatctgaatctcagattttcagacgggaaaatccaccatttttgctatccatttctcttcctgcacactaattgactaatacccagaggccaggtttaatgcaaatggagattttttggagagaagaaatggatataatataaatagagaatgttaaagacttacatttcaattatgtgttaatttcaagacttatgtaatatttttaattatgtagtgattcaaagacttatgtaatgtttttaattatgtagtgattcaaagacttatgtaattttttaattaaaaagaaaacggcctataaaaaaatacttgctgtaattattttacaatctagta

SEQ ID NO: 20820 - DNA, 383 bp, Gossypium hirsutum
  Clone ID: LIB3146-033-Q1-K1-E4
cccacgcgtccgcccacgcgtccgcccacgcgtccgcaataccctctaattttaaagctaggagatttaagttaacgaagcatttggtcggttcgaagtaatggaaactaccggaaaagtaaagaagggagccggaggaaggaaaggtggtggcccgaagaagaagcccgtttcaaggtctgtcaaagccggtctccagttcccagttggtaggatcggccgttacttgaagaaaggaaggtattcacagcgggtcgggaccggagccccggtttacttggctgcagttcttgagtacttggccgctgaagttctggaattggctgggaacgctgcacgtgacaacaagaaaaacaggatcatcccaaggcacgtgctacttg

SEQ ID NO: 20821 - DNA, 398 bp, Gossypium hirsutum
  Clone ID: LIB3146-033-Q1-K1-E5
cggacgcgtgggctgaaaaggcaccttatgtagctaaggcagaaaagcggaaggttgagtatgaaaagaacatgaaggcctacaataagagacaggctgagggtcccaaagacgaagatgttgagtctgacaaatcagtgtctgaggtgaatgatgaggatgatgatgaagaaggcagcggagacgaggaagatgatgagtaggaaggtccgtggtggatagcataatcaatgtaggctgtgatagtgtttgatcaaaaccttatgttaatgctttagatgtttccatgttattcttttagatgcgcatgccatctaaaggagaaatgtacctctgaatcctgttggttccttttgaccttcagaaattaatagttgtagatgggataatctgcttct

SEQ ID NO: 20822 - DNA, 385 bp, Gossypium hirsutum
  Clone ID: LIB3146-033-Q1-K1-E6
aaaaaatgactggttggatgtattttgtcttcaagacaatggcagagcaagcagcctggaaattcgctaaagaaaataacattgattttgtcagcataataccacctttggtggtcggtccatttattatgcaatcaatgccggcaagcctaataactgcactttgtcctatcaccgggaacgaagctcattattcgatcataaaacaaggccaattcattcatttggatgacttgtgcagagctcatatctttctattcgagaatccaaaagcggaaggtcgccacatttgcgcctctcaccatgctaccattatcgatcttgcaaaaatgctcagtgaaaaataccctgaatataatgttcccaccaagctcaaagatgtgga

SEQ ID NO: 20823 - DNA, 400 bp, Gossypium hirsutum
  Clone ID: LIB3146-033-Q1-K1-E7
attttggtcactggtgtacatgaggaagcacaagaggatgatttgcacaatacatttggtgaatttggtgagatcaagaatttgcatttaaatcttgatcgtcgcactggatttgtcaagggatatgcactgattgaatacgaaaagtttgaagaagcaaagaatgccatatctgcaatggatggagcagaacttcttacgcagactatgaatgttgattgggcctttagcaatggacccagtgttggagcctctaagagaaaaaatattagagctggacggacacatcgctcgcgaagtcctaggagaagatactaacttgaactctattacgagaatcaatttgtaacaagagattttaagatttggtgcttgaaatttactggaattatggaatttt

SEQ ID NO: 20824 - DNA, 384 bp, Gossypium hirsutum
  Clone ID: LIB3146-033-Q1-K1-E8
cccacgcgtacggccacgcgtgcggccagcaaaagttcttgacaggacttgatctgtaagtaggcttttgttactagataagtacatatgtacatatctaactagagagaccctcattttatctaaaatgggagttgataattaatggattgagcagagaaccgcttaaatgcttttacttcccctgcttagcatcttttttgtactatccccccattttgtacttgctttactattatagatagtctggaagatgaatcatggatgtccataagttcttttgtctttcagaggttgtgtgaactgaaaatacatttaatgtacacaagccttgggcttttgaatatttgaataattttctcaacccgagatttgagatgttcc

SEQ ID NO: 20825 - DNA, 406 bp, Gossypium hirsutum
  Clone ID: LIB3146-033-Q1-K1-F1
cagggtaaccaaggagaacagggctgctggggttttggacaactttgctgagggagaaaaatattctgaacatttcttgagaaaatatgtccgcaacaagacgccagaaatcatgcccagtatcaacagcttcttcactgacccaaagtgaggcttcactcttgctttatgctgaaactaaaataaaaaaatagaagaactaagtcttattcaatcaataccaagttttgccctttctttctgctgactgtgatgcaaatttgtgttggttttgcacttggatgaggtgtgttttttaagagaataaaaggtgttgtggatttttcgaagaagtgttgttttagcttaaatgaatgacccttatttgcaataatatgattttggtaagtgggcaattatgggttct

SEQ ID NO: 20826 - DNA, 279 bp, Gossypium hirsutum
  Clone ID: LIB3146-033-Q1-K1-F10
ggaagagcagactacaagcaccaaatagaaagtaaatgcatgagtgttctaccaaggccttgtgacttcaacctattcatggttcaaactgggtaaaggcccacgagaggcagcttcggctctatgatattagattgaggcataccgaactgcattcttttgggtggaaacaagaaagtagtgactcacaatcagctttgataaatcaagcttggtctcctgatggtttatacctctcatctggttcagcagaccctgttatccacatatttgatatta

SEQ ID NO: 20827 - DNA, 194 bp, Gossypium hirsutum
  unsure (1)..(194): unsure at all n locations; Clone ID: LIB3146-033-Q1-K1-F11
cggacgcgtgggctgacgcataatacaacgcttttgcaaactcatgagcagacaagtaactatacttacaacaaaacctncaacaaccaatttaccatcattccaaaattaaagaaaaaaataacatgctaaaaatccaaaatgaagaactccgttttaatcttcggaaaaaagaaattgttctttcacattta

SEQ ID NO: 20828 - DNA, 401 bp, Gossypium hirsutum
  Clone ID: LIB3146-033-Q1-K1-F12
gctaaagttgtttcgatcaatgattatgaggatgttccggtaaatgacgagaaagcattgaaaaaggcagtcgcgaatcaaccggtgagcgttgccattgaggcaggaggaaggagtttccagttatatcaatcaggtatatttgatggaaaatgtggaacacaactagaccacggtgtcactgctgttggatatggcacagagaaaggtaaagactattggattgtaaagaactcatggggaagcagctggggagaagcaagctatctcatgatggcaaggaatgtggccaataccgtactggcaaatggggatcgcgatggaagcctcttatccgatcaaaacaggtgaaaatccccccaatcccggaccgtctgcaccatctcctataaaacctccga

SEQ ID NO: 20829 - DNA, 393 bp, Gossypium hirsutum
  Clone ID: LIB3146-033-Q1-K1-F2
gggatcttgtcggtgcatgaaggaaatgatgtcacaaaatatttccttagcagtggttttgctcttatccatgccaactctgttgcggatattattgctgtggaagcagtgccagtcgaccgccttgacccagccttggtccagaagggtctggctgactttactcaaaagcttgtctcggctacaactgatctggagaaagctgaagcccaaataggtgttgacgttcacagtgctatgaattcagctatcacaggttaatcattttcttaaccagctttggttcaatcctaagactttttttctcatattgcttcccttttttgtatgtgttcatgatcaacaaatgactgagatatctcaagatgcctaaattgttggttttcagagttt

SEQ ID NO: 20830 - DNA, 402 bp, Gossypium hirsutum
  Clone ID: LIB3146-033-Q1-K1-F3
ggtttcttgacattttcagcaggttgaagagaaagtgcgattagctattgaaatggcggcggtgagaggagttgtgctaaagcacctgagaatgaatgcaacatccttgtccctgcttcgtaaccctaaacccatccctaacggccactgtgctctcaccttcaacgccatacggcgccgatattccgacgacgtcatgggctcattccttgacaaatctgaagtcaccgatcgcgttgtctccgtagtaaaaaacttccagaaaattgatccatccaaggttactccaaatgcccattttcaaaaagatctcgggttagatagtttggacacttgggaagttgttatggctcttgaagaagaatttgggtttgagatacctgataatgaggcagacaagat

SEQ ID NO: 20831 - DNA, 394 bp, Gossypium hirsutum
  Clone ID: LIB3146-033-Q1-K1-F4
cccacgcgtacgcaaaatatctgctttttcttagttttcctttttgtcccttgtggatttgatatttccccctcatggccgccgctgatgtcgagttccggtgcttcgtcggagggctcgcatgggccaccgacgaccgggccctcgaagaagccttcagtgcgtttggtgaaatcgtcgaatcgaagatcattaatgatcgtgagactggaagatcccgaggctttggattcgttactttccgtgacgagaaagctatgagggacgcgatcgaaggaatgaacggtcaaaatcttgatggaaggaacatcaccgtcaacgaagcccaatcgcgcagaagtggaggcggtggcggaagatttggaagaggaaacggtggttacagccgcggtgg

SEQ ID NO: 20832 - DNA, 400 bp, Gossypium hirsutum
  Clone ID: LIB3146-033-Q1-K1-F5
ggggggttctgatggaattctccacccaactttggatgaaaagttgaataacttgcatgaagctatagcagaacttgcagcaaagcctaaatccgatgaatccgaggaagaacatgtgcttgaaaacttccattccagtcgcaccatacggaaactaatcttagactgccctgcacttgcttccacattgtggaagaaatctttggaaggaaagtgtcaattatgggcccagggtcacagttcaaaggtagtgtctgcatttttggaatcctcagactccgaggtccgtaaagtggcaaaagaagagttgcagcccttggtagatgatggtactctcaaaatccctgaaaccaagcaatcagcaaatgaaaattaggtctgcctgaaacggagaagacta

SEQ ID NO: 20833 - DNA, 391 bp, Gossypium hirsutum
  Clone ID: LIB3146-033-Q1-K1-F6
cggacgcgtgggcgcgggttctacaccctgatgtctcggctaatggtcgaaacgacgccgctgccaacgagttcatcaaagtacatgaagcttactctacgctatcggatcctgagaaacgggcggattatgatcgaacgttgttgttcaggccaagacggtccttttctgtttccatcgaatcgatggccggtcaaacgtcttcagggttttctggttattcgaaacgaacatgggaaaccgatcaatgttggtgatactggagattaactgtgaaatccatagatggattttggtttattttcattctttttggcttctgaggaattactgattttgtgctaatttcgcctgtaaatatagaaatatgttaactgaaaaaggctgtttt

SEQ ID NO: 20834 - DNA, 372 bp, Gossypium hirsutum
  Clone ID: LIB3146-033-Q1-K1-F7
ctgaatacagtggagcacccaacgaggtggaagtgttgcagtatgccagagtcgtgattgattgtgccactgctgaacctgatggtcgtgaaagagcccttgtaattggtggaggaatagccaactttactgatgtgggtgccacgtttaatggcataattcgagccttgaaggagaaggaatcaaaactcaaagcagccaacatgcacatatatgtgaggagaggaggtcccaattaccacaatgggcttgcaaaaatgcgggcactttgagaggaaattggcatcccaattgaggtttatggtcctgaatctacaatgtcgggtatatgccaggaggccatccagtacatcactgcatctgcataatgtg

SEQ ID NO: 20835 - DNA, 295 bp, Gossypium hirsutum
  Clone ID: LIB3146-033-Q1-K1-F8
ggctgttttaatggcctttgccgaccatcctgttatatcaccacccatattccgagtcccctttttaaaaaaaaaaaaaaaaaaaaaaaaaaaaaaaaaaaaaaaaaaaaaaaaaaaaaaaaaaaaaaaaaaaaaaaaaaaataaaaaaaaaaaaaaaaaaaaaaaaaaaaaaaaaccaaaaaaaaaaaaaaataaataataaacaaaaattgaaaaaaactgaaaatatggattacattacccaaacttaaaaaaaaagccccaaataaccaccatccaaagaatggaataaaa

SEQ ID NO: 20836 - DNA, 390 bp, Gossypium hirsutum
  Clone ID: LIB3146-033-Q1-K1-F9
cccacgcgtccggtaaactacaataaaaaggtattggaacttgaacgagaagtggggaaactatctggccaagaaaacctccaacaacgaattcaccatcatgccaaaattaaggaagaaaataacatgctaaaaatccaaaatgaagagctcggcgtcaagctgcggcgaacagaggttgtactttcacgtgtaagagaagagctcggtcattatcgtgcttctattgggaaaagcccttgcgttaatttcgacgaggagcaacgtttgaataacaaactgagggagtctgatgaagacgggtgcaactgcgcacaagttattggcattgtgtacaagtgttttaaaggctgccggtataacaatgcctatttctgatatatgccctgc

SEQ ID NO: 20837 - DNA, 405 bp, Gossypium hirsutum
  unsure (1)..(405): unsure at all n locations; Clone ID: LIB3146-033-Q1-K1-G1
ctttctccagtgatgtgttcctcttcatatttctcaagaattgatgaaaaataaagcaagtgttaattccagaaggtagtgaagaggatggacggtttcatttcaaggaaagggtggtttctctttgcacagcatttaaccttcttcaataatcaatcagccaagctcactttggggggcttcagctatagacttcaccattcacctttgtttatttatatcaattctgatattttgagacattgtcctatctgtgttctttttcaataagatatctgtgtttgtgttgaaaaaaaaaaaaaaaaaaaaaaaaaaaaaaaaaaaaaaaaaaaaaaaaaaaaaaaaaaaaaaaaaaaaaaaaaaaaaaaaaaaaaaaaaaaanngggggcggccgttttaaaggat

SEQ ID NO: 20838 - DNA, 400 bp, Gossypium hirsutum
  unsure (1)..(400): unsure at all n locations; Clone ID: LIB3146-033-Q1-K1-G10
cccacgcgtccgcgagcacagcagctttgagcactgcacttttcaacaatggctggagctgcggtgcctgctacgagctccggtgcaacaatgatcctcaatggtgcattagtcgaaccataaccgtgacagccaccaacttttgtccccctaactatgctttatctagtgacaatggcggttggtgcaatcccccacgagaacactttgatttggccgaaccggcattcttgcagatcgcggaatatcgagctgggatcgtccctgttatgttcagaaaggtgtcatgtgtgaagaaagaggcatcangacaccatgaatggacattcgtacttcaacatggtgttgataaccaacgtgggaggtgcaggggatataacgtcagtgtccatcaagggtt

SEQ ID NO: 20839 - DNA, 391 bp, Gossypium hirsutum
  Clone ID: LIB3146-033-Q1-K1-G11
gtgtttctctctgccaccaccgtcttcatcatcatcttcccctctatccctctttgtgcatacatctcagaagagctcatactttatctgtttctcatgtgactctgaagcctctttctttccttcaacatacccaagggcatttgaaattttggaagaagaaagcagttgggattgagtttgcaaagcattttagatcccacctggatcccattgaaggtctctttgggaccaagtagagagcacaagtgagagcgaaagcagtgcaagtgatgaagtgcttgttgttccttatgatacttagcaccatgtcttgtgatattgctgaatctaagcaacttttggataagcttgttgtggtgaagtataatggagctttgggaaagaatat

SEQ ID NO: 20840 - DNA, 384 bp, Gossypium hirsutum
  unsure (1)..(384): unsure at all n locations; Clone ID: LIB3146-033-Q1-K1-G12
ctccaaaaaaaattcctaatttttcatcttttttaacttacaccacatgatctgatctgggttttttcccctctgtttctcattcagatcatagttaaaaaaataaaaaagaagcttccgttttgttctttaatggctttcacatttgaaaaaaaaatccattgaaagaaagagcaaaaaacccaactttttttattggggatttagttgcttcattgatttatacaatgggattttgttcaaagatgcagattattgatctatatttcaagaaaatgtanggaaatagaaagggattcgaaatcangaaaatttcatttcttattgatttcaaaaggggcaaaatctgtggtggatgaatcattaaagatttttttttttggt

SEQ ID NO: 20841 - DNA, 398 bp, Gossypium hirsutum
  Clone ID: LIB3146-033-Q1-K1-G2
ctaaaactaagtggtagtgccaaagaagctaatgattgctccccgcttagtggagcaacctctggtgaatacgagggaaatgttcataatcttcatgttgatattgtctcttcctgcaatggtgatgtaaaccatatcaatggctccaattctatatcagaagaggaaaatgaggatttacttgctgacttcattgatgaagatagccaactccctagtcgaatatcacaacccaactttccaagaagtcgctcgttgcatttcagtaatgatgagtttacagcacaaactggatcatctgtttgtcttctaaggtcaatggataaatatgcaaggttgatgcagaaacttgaaatagtaaatgttgagtttttcaagggcatatgccagttatttga

SEQ ID NO: 20842 - DNA, 311 bp, Gossypium hirsutum
  Clone ID: LIB3146-033-Q1-K1-G3
cggacgcgtgggctgtagggcttcgagctattcagagtttttcaaacatgcttgggcggccacatttacttacgcccatgatagcccttcgctcatgcacgactgttcttccccacgtgagctaaaagttatcttctgtcactagaggaagacgataatgggtttgagtttgttgaataatctgtagtgctatgctagagatatggtgaatgtttgattgttgggattgaagcattaatggtgtttgaagaagttgaagtgtgtaattgcttatttttagacaaaattaatgaaggttgtttttcatcttc

SEQ ID NO: 20843 - DNA, 393 bp, Gossypium hirsutum
  Clone ID: LIB3146-033-Q1-K1-G4
gcaactgaaagaggttaacacgaacctgtgcaaagagattaggaaacggatgggcgactgcgtgtatgattagagcattgaaaatcttggtgctatgcaacacgagattgacagctctgacactattattctctattgaaagtataggaagatcttcaaccagatcgatactttcaataataaggtgaggtatgttgaagatatacacaaagatctattacatgaactggaatccttgaaagaagatccatatggattagtgtataatggatgatattatgacaccatgaacgaatgtcaaaatggatgttctcgtatatttgctttacgcctgcagccaaaccatcctagccttcacagtggcggaggctccgatctcaccacctctccctt

SEQ ID NO: 20844 - DNA, 378 bp, Gossypium hirsutum
  Clone ID: LIB3146-033-Q1-K1-G5
accgcaactggaacccgaaaaacaagaagagaagaaggaaggcgaagagaagccagcggaagaagctaagccagaagaaaacccggataaaaaagaagaagaaaaaccagcagccgaagaagaagccaaggaagaaggaaacaatgaagctactggtgagaccaaggaaggagaagataagaaagaagacaacaatggcagcaacaatgaggatgaatctatgaagaagatgatctactattatcagccgctctacgttattgaacgaatgccaccggctcctcagttgttcagcgatgaaaatcctaatgcttggctgatttcataagcaaatgatcatactaagtggcaggatataggggatatgtatatattttg

SEQ ID NO: 20845 - DNA, 368 bp, Gossypium hirsutum
  Clone ID: LIB3146-033-Q1-K1-G6
gctacgcgttacgataagagatgttttatatgcacacaatctggatgtgagctcagcccaataaattatatatcataagaatgttaacgaaactgtaagcaccatcaataacaactaatgactgaaataggtaacaaacaccaccttgaaagcgatatgctagaatggatggcactgaaaaaactgctgaatcataaaaactgtgtcatgaaatgtatgtaagatgactgaatgtatatatatacaatcacatatgggatcactggatgtggaatcagtcttatgtgataagctatactcagcagcatatgtgcttgtactacaatgagatgccacacgacctatggtgagccactcaacatatatac

SEQ ID NO: 20846 - DNA, 388 bp, Gossypium hirsutum
  Clone ID: LIB3146-033-Q1-K1-G7
ctttgggtaatcatggaggaaaccaattgggaaagcctgttgtttgagtttgactgtcccaatcttggaaatatcttacaaaatgaatcagaatcggtaactccaccaatctccacccactctcccgatgaaaaaccgatttggacatcctccattggtgagatcgagaagcttttaatggaggacgatcgttttgatgacaaggttgagactcaacctatccccaatgagtttttggcggatttattggttgattcatctcctagtggctgcggcgatgaggtcatcgatgatactgcttttgacaaacaaaaccagacccttttcaacgttgataatgatgatcccattgataagaaacagagaaagaaattgagaaatagagatg

SEQ ID NO: 20847 - DNA, 390 bp, Gossypium hirsutum
  Clone ID: LIB3146-033-Q1-K1-G8
cccacgcgtacgaccacgcgtacgaccacgcgtacgtatcaacagtcaaccaacacggtttctacttcttcatcttcactgtaactgaaacatggagaatgaaaggaagaagagaaaaatggggaatgaagaggaaaaagacgatgaatatgaagatgaagatgatgatgaacaagagaaagtggacaagttctttgctttgataaggagcacaagggagatgcgtgatcgtctaagaaacgcggcggtgcctaatggaccaaaagaggaagaatatcagaagaagaaacaggaagataaggcggttgatgatggtggcggcggcgtctgacagtggaatacaaagatccaagcagaggatttcatggaaggttccatatccatgtctgg

SEQ ID NO: 20848 - DNA, 290 bp, Gossypium hirsutum
  Clone ID: LIB3146-033-Q1-K1-G9
gcttttggagagtcttggtaagggtaagatttggggtgtttttgccaggccgtaggaaatggaagggattatcttcaaagtggggctcattgaactgtatgtatatcataaattcatagttgtgttttttttcccctcttgttcatattggttgtttatttgctttacagctggtctatatgtttagtgtaattgttcatggagaaacaactatgtttgtagtttgtagacaaaatctttagttttggtgacataattagtctggttttcagttttcatgaaacatattt

SEQ ID NO: 20849 - DNA, 340 bp, Gossypium hirsutum
  Clone ID: LIB3146-033-Q1-K1-H1
tgagatgattggtccagattggttagaaggaagccctcctcgacttacctgcgttggaaagtgcatatttcttgggatttcaagcattggttaccattcattcatattccacaatggtaggtgctgtgctgacttattgtttaatttgagtctcttgtacctcttagagttttatattgcacagcctatacctgaagcatcatctgtcatcacacagacacagctagattaatagtattactcttccctttttctttttcctccctaagaccagaaatgattttgatttcattgattatcagtaaatcctaatatatatacatacaaaactcctaagtcg

SEQ ID NO: 20850 - DNA, 277 bp, Gossypium hirsutum
  Clone ID: LIB3146-033-Q1-K1-H10
tcgcggacgcgtggggagaaatttcctaaaaaaaaaaaatgttttctccaaataaacggccagagatggacttgatgaaacttgttattagtgacttcaaaagtggggatgatgaatgatggcgttcagaattttatgttgaattcaacggaccaaaagacagtccttaccatggtggtgtgtggaggataaaggtagagctcccaaatgcttatccttacaaatctccaataattggatttgtgaacaagatttaccacccaaatgttgatgaaat

SEQ ID NO: 20851 - DNA, 249 bp, Gossypium hirsutum
  Clone ID: LIB3146-033-Q1-K1-H11
gcaaagcagcggtgggatggagcacgcttgttgcgtttgcatggttaggcataagggtgctgcgtttattccatgcgggcatacattttgtcgtctctgttcaagagaactctgggttcagcgagggaattgcccactttgcaatggctccatcttggaaattcttgatatcttttaatctatatttaaatccgcgttatcgtttgttcttcataacaattttatctattctttttcttcattatcagt

SEQ ID NO: 20852 - DNA, 210 bp, Gossypium hirsutum
  Clone ID: LIB3146-033-Q1-K1-H12
ggtgtggggaattgctaaacgtgggtggagacggatgccattaccttggcatatgctgcagcaccaatttgcttcaatcttcttaaggtttctgctataccctgtgttcttttgggctaacaagctaatgctagcaatattggttgtttgggtattgggcttgtaaattggttattgggtcagggagatattgggtttaaaactgggtct

SEQ ID NO: 20853 - DNA, 397 bp, Gossypium hirsutum
  Clone ID: LIB3146-033-Q1-K1-H2
gtgattccctgcctagaggaagttgtggtccaagtaagatcaccattaaatgctgaacagaaaatgaacactctggaatcccttctcaagtatgggaaaaacttgaagaaaatggtaataaggattcttcaaatgaagagcagccatagcagcacggatgaattctttgatgagatttgcaggcttagatttatgaaccgcaaaatagttcgaattgaataaggctgacaacagccacctcctatttgttcttttcttcagcttccaagtgaacagcattgactgctaatcaaacaacggctcgaatagatggttgcttcatgatgattctcatggagatgcttttaacttctcaagtttttcatttcacacctcttctgttgcaatgtcttctgtt

SEQ ID NO: 20854 - DNA, 372 bp, Gossypium hirsutum
  Clone ID: LIB3146-033-Q1-K1-H3
ctctcctttccatcccctattccaccgtcgaccccatcatttcccgccattttgactccgagaaaaccgataattccgtttacatttatattctcaatctgggtgttgcccccaagcaaccttatgcctactcttactctcattccgagtcttccgcaggctacaccaattgtttagggacgctttggactggcaacaaaaggtatctttggattgatctcggggctggtcccgttgactatgggccggctttatctggtgatggggtactcccgagaggcgagtttcaccctttggcagctgcacatggaagacccaaatccgaaaaaaccttgcttgccgacttggcttctttgatatacagtgcttatc

SEQ ID NO: 20855 - DNA, 396 bp, Gossypium hirsutum
  Clone ID: LIB3146-033-Q1-K1-H4
cccagaactggtaaaatcattgaagcaagtgaaagaaaaggtggtacaaattagcctaacaaactcaatacactggaatgcccatacatttgcactcactgaatcagggaagctttatgcatttggggcaggagataaaggtcagctaggcgtagagctaatgaacaatcagacagaaaggataaaccccgagcgaattgatattgatctcgaatgaattccccctccaatctcttagatcatatcatccctttaacttatcatgtcacaaaattgcattggatgtctagattttcaatgtgttgtaaatagatacaaacagaaggatttgaagctttcagttaggttagtaagggccgataagcagtgctacacgtttgatttcctaagaaaatg

SEQ ID NO: 20856 - DNA, 328 bp, Gossypium hirsutum
  Clone ID: LIB3146-033-Q1-K1-H5
aaagaaaccaaatttgaacacgaaagcaaccaaatctcctggagatgtttgagcttgcctagtcctcgtggtagatatttaattccagatctgaaaaatagaatagattcaagacaagcggtttcctcaaacttttgggctatgtattccaactctggacattccccaattatcaaatgtttaagtgttatgggaaaacttggtgtttgaaaataggcaactcagctttgagcattcggtaatttggagaagttgaagctgattgcaaatatttttgtgccctttcgatgacaaagacattagagacgagcacttatagatagacaac

SEQ ID NO: 20857 - DNA, 387 bp, Gossypium hirsutum
  unsure (1)..(387): unsure at all n locations; Clone ID: LIB3146-033-Q1-K1-H6
tacaagggtacatcaagatttcctaaaggtagttcttactttaaaaggttgccaaaatctagtgccattaaggtaatagattttggtagcactacttatgagcgtcaagatcagacttacattgtgtcaacacgacattatcgtgctccagaggttattcttggaatgggatggagttacccttgtgacatatggagtgttggttgcatcttanttgaattatgcacgggtgaggcattgtttcaaacacatgagaatctggagcaccttgccatgatggagcgggtgttgggcccactacatcagcacatgttgaagagagtagatcgacgtgcggagaagtatgttagaaggggtagactggattggccagatggtgctgcatca

SEQ ID NO: 20858 - DNA, 390 bp, Gossypium hirsutum
  Clone ID: LIB3146-033-Q1-K1-H7
tgatgatcaaaacaaggaacaaagcaattcaactggattttggaataataatggtgtattaggtggtggaggatcatggtaaaaaaaagaagaagaagaaatgaagatgatcaagaaaggaactgctttttctagtttttaattttttttcactatttttcacatggttgatattattattacttgttcaaagtttcttttttttagaactaacagatcatcatcatcatcatcatcatcatcatcatcataggatacatacatatataatggggtttcttttctttgctttctttttttaaattacaagattgtatccaatttgggttttggtttcttgtatcagattcaagtctaaaatttgttgcagtgatgagtgatatatatgga

SEQ ID NO: 20859 - DNA, 386 bp, Gossypium hirsutum
  unsure (1)..(386): unsure at all n locations; Clone ID: LIB3146-033-Q1-K1-H8
tgaaaatnaaaacaaggaacaaagttatttaccttgattttggaataatggtggtggtttaatttcttgaggatcatgctaaaaaaaagaagaagaaaaaatgaagatgatcaagaaaggaactgctttttatagtttttaattttttttcactatttttcacatggttgatattattattacttgttcaaagtttattttttttagaactaacagatcatcatcatcatcataatcatcatcatcatcatatgatacatacatatataatggggttttttttctttggtttctttttttaaattacaagattgtatacaatttggattttggtttcttgtatcaaattcaaatataaaatttgttgcagtgattagtgatatata

SEQ ID NO: 20860 - DNA, 351 bp, Gossypium hirsutum
  Clone ID: LIB3146-033-Q1-K1-H9
agacagagagacatcaacattagaccttaatagaaagatgttagattctcgttgcgacagtcaagaagtagagaaaaatgcattatcaaaagatgagaagaagaatgcagcaggccggtactatccgtaaaaacggctacatcgtcatcaaaggccgtccttgcaaggttgtcgaagtttccacttccaagactgggaagcacggacatgctaagtgtcactttgttgggatcgacatcttcactgctaagaagctggaagatatcgttccttcttcccacaattgtgatgtgccgcacgtaaccgtactgttaccaattgatcgacatttctgaggatggatttgtgagc

SEQ ID NO: 20861 - DNA, 403 bp, Gossypium hirsutum
  Clone ID: LIB3146-034-Q1-K1-A1
cccacgcgtccgtggggagggaaatttgttgtgaataactatctttagtaccaatagttccccccctcagatcccaccccaccagacctgtcgctgatttgaaatttctactgtcaaacgctgcatcaaagtagatcgttattctcgcataacagaaaagtcggtattgagcgtcgttaccactcttgaaaacctaggacattcacggaagaatgaaggctttcttctgcccaagagcagcaacggggatatttgtcgtttgagtttataggcactgcatactgaaaactcgctggataattctcctttccaaacttgagtatcctcgggatcaatctctgcaagagggatctgtagaattttctaagcaattttcgtttgcaagttatcttcccagatagaa

SEQ ID NO: 20862 - DNA, 366 bp, Gossypium hirsutum
  unsure (1)..(366): unsure at all n locations; Clone ID: LIB3146-034-Q1-K1-A10
gcctgatggaagttatgaagactggggagtcgatgagttgattgtggaagactcatggaagagacaagtcggaggagattgattacgtgttcttacttctcgaatttggtgtgtggtatgtaagagtcgtgatgcttagattcagtcagtaaatgtaaaaaagacaatctagaaggatgtctttggaaccgtggtagtagactcgttttgaaccctgttgtgcttttcgacattaacgtaggttataatgggagttttgaccctctgaaacttgttnngaaaaaaaaaaaannnntaatataaaaaaaaatataaaaaaaaaaaaaaaaaaaattttttttttttttaattaatataatttaaaaa

SEQ ID NO: 20863 - DNA, 277 bp, Gossypium hirsutum
  Clone ID: LIB3146-034-Q1-K1-A11
gcaaaattttacgatgatccaactgaaagagggataaataataatggcaagataacaaattcgagatgcaagtgggaacggatggtggagatgctgctgagcactaaaacgaaaaatgtgctgaaagccactaacatcgggaaaacgaaagcttctaaacaaattctctgccatcgcaaccaaatgaaaatgcaatggccaatacaatctgatctcctagtgattatccaagtgatccaagaaactgaccgcaagtgcaaggatgctgtattagcag

SEQ ID NO: 20864 - DNA, 264 bp, Gossypium hirsutum
  Clone ID: LIB3146-034-Q1-K1-A12
cccacgcgtccgccttaacggagatttcgggcccatcctgctcgcccaaggaaaaggagatcttccggggaggcggcgaataggagccgctcattcaatactgcgtagtgtcgcatttgccaagaagaagattccgctgagaatatcgagaccccttgtgcctacaccgtctgcctcaactattctcataggaaatgcgtgcaacattggtgcaacgtgataggagttatcatttgcgagatatgtcatctgccttatcaacct

SEQ ID NO: 20865 - DNA, 113 bp, Gossypium hirsutum
  Clone ID: LIB3146-034-Q1-K1-A2
cccacgcgtccggccaatctgaactacttatatatcgttcacgcttttcccagctttaagcgatcattcttttaacaatgcctcgcccaagctctggagggaggggagcccca

SEQ ID NO: 20866 - DNA, 401 bp, Gossypium hirsutum
  Clone ID: LIB3146-034-Q1-K1-A3
ctcgtcgcaagaacattggaatctgcgtgctcacgggatctgggaccgtttctaacgtgacgctccgtcaaccttcttcagcaactccgggagctaccataactttccatggcagattcgacatcttgtccctctccgccacgttcctatcccaaacgacgtcgtgtcatgtgcccaacaggttctccatctctttggctggtcctcaaggccagatcgttggtgggttcgtagctggctcgttggtagcagcgggcaacgtgtttatagtggctgctacgttcaacaacccttcgtaccatcggttacccgttgaagaagaagcgagaaacgcggtgtcgtctggtggtgccggtggacagtccccacctttatccggtggcggcggggatagtagtcac

SEQ ID NO: 20867 - DNA, 147 bp, Gossypium hirsutum
  Clone ID: LIB3146-034-Q1-K1-A4
gttagaactgataagacctaccctgctggtttcatggatgttgtttccattcctaaaacagaggagggctttcgtcttctttacgacactaaaggacgtttacgtctccatgctatcactggcgatgaaaccaaatttttaactttt

SEQ ID NO: 20868 - DNA, 395 bp, Gossypium hirsutum
  Clone ID: LIB3146-034-Q1-K1-A5
atgaattcgaggtgggagacgtttgtgtgtttgagctgatgaatgaaaatggaaacttgttggaagttgtcattcatcgcaagcttttactcgtcgaaattaattaagttgtcaagtatttcaatccaaattggaattgtttgatgattttgtgtatttattcaatggaactgagagttgcggatgggaggagttggaaagttgagtatgaaagaagaggaaggagtaaatgtagaaaagcagtgtttgggggtaagagttggggacaatttgcgatggacaatgaatttgaggtgggagacgtttgtgtgtttgagctgatgaatgaaaatgggaacttgttggaagttgtcattcattgtccaaattggaactgtttgatgattttgtgtatt

SEQ ID NO: 20869 - DNA, 230 bp, Gossypium hirsutum
  Clone ID: LIB3146-034-Q1-K1-A6
cccacgcgtccgtaagaaacttgctcagaggaagcatttcccttctgtcaactggcttatttcatactcgaagtattcgggggcattggaaagtttctatgagaaatttgatccagattttattagcatcaggacaaaagcccgagaggttcttcagagagaagatgatctgaatgaaattgtccagcttgtcggaaaggatgctctagctgaaacagacaaaatcacac

SEQ ID NO: 20870 - DNA, 376 bp, Gossypium hirsutum
  Clone ID: LIB3146-034-Q1-K1-A7
cccacgcgtccggatacatttgttagtgctatggccttccctaggtggaagaggcttgtagaaactcaaaaaaatcaaagactatcaaaagatcctatgagaaatttgatccagattttattagcatcatgacaaaagcccgagaggttctttatagataagatgatcttaatgaaattgtccagcttgtctgaaaggatgctctatcttaaacagacaaaattacacttgaaactgccaaacttttaagggaagattatcttgctcagaatgcttttactccatatgataagttatgcccatttctacaagttcgtttggatgatgcgcaacattgttcatttcaatgctttggccaaccagtcagttgagaaag

SEQ ID NO: 20871 - DNA, 292 bp, Gossypium hirsutum
  unsure (1)..(292): unsure at all n locations; Clone ID: LIB3146-034-Q1-K1-A8
gtcgagacttacaagatttacatcttcaaggtattgaaacaggttcatcctgatatcgggatctcgagcaaagcgatggggataatgaacagtttcatcaacgatatctttgagaaattggctcaagaagcatcgagattggctaggtataataagaagccgacgattacatctagggagatccaaaccgccgttcgattggttttgcctggtgaattggctaagcatgccgtttctgaaggaactaaggcggntactaagttcactagttcttagatttatctttcttttt

SEQ ID NO: 20872 - DNA, 264 bp, Gossypium hirsutum
  Clone ID: LIB3146-034-Q1-K1-A9
atcaaaccagattattacaccaacaaggtatctgatattctcagtttattgggagaatgatctgattgcttcattttcaccattttactccttattcttgcctgtttggtagtgttgtttgcaaatgtatactcaaaagaattatctccgcgatttactgtacccggtaaatgttgaaatattctcgcattatctagaaactggccagtttgcttcatggcctatccttgttctgaaaacaaactgataaatttaagctcatag

SEQ ID NO: 20873 - DNA, 415 bp, Gossypium hirsutum
  Clone ID: LIB3146-034-Q1-K1-B1
actgatcgtagtagtgccaaacttaaaccaattcatttctttattttcgggcatgtggatgttgaatgtcactcgggggaactgacctctctgatggctgttgaaggataccattgccgggagagtatcatcgaatagcttggttcaggcggttccatcatttaccagagcttcaacggcatttggggatgtggatcacctatatcaactctaagttgcctcttggaagatgaggaagagtattattataattaaaacggcttattttcttatgttataactattaaataaattgctacccatgcattgtctggtgataaagcatggtgtgtgtttctattctagtactttttatggcttttatcaagttaattcttatgccaacaaacctgtacttgatactgtcatttgtaca

SEQ ID NO: 20874 - DNA, 225 bp, Gossypium hirsutum
  Clone ID: LIB3146-034-Q1-K1-B10
cgcatttgcatatggggatgggggttatttttgctcaagatgcccatcgtgtaagtcaaataccaaaagaggctcttgcttgtggattaacaggaaacaagcagaactgagagactgatttgagctaatttatgtattaagctatttggtgtcaggctttttttctttatttgctggtgtttgttagatggggttggtcttggttaaagaaaaagggtaggctac

SEQ ID NO: 20875 - DNA, 252 bp, Gossypium hirsutum
  Clone ID: LIB3146-034-Q1-K1-B12
cccacgcgtccgcccacgcgtccgctgctcctgatactcatggctcagatggcataattgaactcgatgagtttgttttccgtgagaaattatgaatgcagtgctgttgtgcataggatattactgctgtcagcttttgatcatgagaggcacattaaaaattgggaattgtgctacaatgttaatattgaatgcggagagttcctgaaattttccgggttttattttgagataagtgaaccgtaactcagc

SEQ ID NO: 20876 - DNA, 399 bp, Gossypium hirsutum
  Clone ID: LIB3146-034-Q1-K1-B2
cggacgcgtgggtttcttttcaattaaacttctgccaagatccagagaactcaccagctggaacacactaacactcctcaaagcttctttaatctgaaactagtttactaccatgaacaatcataacaacctcctgctgccattctgtatcctttccggttctgctgtagtttacagtgatggtaatgccagaatctttgatataactcacaaaatcacttcccagttgcccacttttgactcccagaagggacttggtcacttcatttggcttgtttccagcattaaaaatgggtccatggctaatatttccgagtttaagctgggaacccacactggaactaacgttgatgcccctagccacttttttcaaaagtattatgaggagggctttgatgt

SEQ ID NO: 20877 - DNA, 404 bp, Gossypium hirsutum
  Clone ID: LIB3146-034-Q1-K1-B3
tcccaacccttgtcactcaccaggaatcactagagtcgaaggtgaatgagacaaaggcagtggttaagttccagctgaagaaagttttatgcatgggagttgctgttgggaatgttgcaatggaggagaagcagatcttccaaaatgtgcaaatgagcgtcaatttccttgtttccttgttgaagaaaaattggcaaaatgtgaggtgcctctacttgaagagcaccatgggtccttcaaacaggatcttttgagttcatatttttaccttctgttatgtacggactgaaagtagtagtggggatttaatactaaaatcagtttttttcttctcttttacttagaatgtttaagtttatgttatgttctgttgttccctagaaatgttatgaatacgagacatt

SEQ ID NO: 20878 - DNA, 343 bp, Gossypium hirsutum
  Clone ID: LIB3146-034-Q1-K1-B4
cccacgcgtccgtgggttcatttctgcagccgagctgcgccatgtcatgacaaaccttggtgaaaagcttacagatgaggaagtcgacgagatgatccgcgaagccgatgttgatggtgatgggcagatcaactacgaggagttcgtcaaagtcatgatggccaagtaaaggacctctccaactataaccaggattaaaaaatggggtttaaaaaaaaggaagaaagtaacagggcagataagtttgctaaaatatctattaatgaataggacatcaatgtttttaagttacaaagcttttgttggatggtttcttttgttcatgttttgcattttttttggg

SEQ ID NO: 20879 - DNA, 430 bp, Gossypium hirsutum
  unsure (1)..(430): unsure at all n locations; Clone ID: LIB3146-034-Q1-K1-B5
caccggnccggaatccgcgcggctcgacagcacgcgtccggtggaattgctgccttgatcaattccagactcccagattggagtgccgcagcgggtaaatttgctctaatgacaaccgcttatgttcatgataacatccataatccactccaagactcttccactgcagcatcttccactccctatgatcatggagctggtcatattaaccctttgaaagctctagacccaggtttgatctatgacatttcagcccaggattacttttttttcctctgcacacataaattgactgcaatgcatctaaaagcttatagcaagcatttcaatatgttttgccattacaacacctctgccactacatgagatttgacattacccagcaatcttaattgtctttctcagatgatacattcattttaacattgat

SEQ ID NO: 20880 - DNA, 287 bp, Gossypium hirsutum
  Clone ID: LIB3146-034-Q1-K1-B6
gggagaaatgaaaggttctgccattactggtccaattgggaaggagtgtgctgatctgtggccaagaattgcaagtgcagccaatgccattgtttagggatttgaatttttctagagttttttgttcccttgagtcatggctttttgctggatcaagattttgttatgtgttttttagggtttcttgaaaaatatcgtatggatagttttgatttggattttgatgctgggatgtagttaatggatttcttccatgtttaagcttattatttcgtttttcattgagg

SEQ ID NO: 20881 - DNA, 310 bp, Gossypium hirsutum
  Clone ID: LIB3146-034-Q1-K1-B7
ataagaaacttaaggttatgcctttactggtccacacaggaaggaaatggctggggtgtggacaagtattgacagttcatccaatgccatatttatccgatgtgaacatatccagcaacaatcgttagccaaaactatcactgtgaactagatcaataaatcgtgatatgtttcaactggcacaatactctatttaacgtggattgcatttattctctatcaaacacataatatgtattgaatggagtggtaccaattttcaaacacaaatttcagtgttcaaagtgttactattattgtatttattaat

SEQ ID NO: 20882 - DNA, 164 bp, Gossypium hirsutum
  Clone ID: LIB3146-034-Q1-K1-B8
ttaacaaatcaaacgttctacctttacttttccaattgttaagcaaaacactgggctatttccaataattacaagttcttccaactccattctttatccttttttatttttttatatccttttttctcctttaacttcgcttttttctttttctacattttttt

SEQ ID NO: 20883 - DNA, 412 bp, Gossypium hirsutum
  Clone ID: LIB3146-034-Q1-K1-B9
gaagaaatgaagcttctggctgaggtggaccaaccaggcagccacattgacaattatgtgacccagctgagcttcgttctttcacgcaaggctgctagtctggtgagtcttcaagctcgccttgcccggttccagcatcgactgaaagagcaggagatactgagtcggaaaagagttcctcgttgatgccagctctttgttctctgctttcattgctgcatcagactctgtccatcgatgcacggagctgcattagggtcttgagaggaaattcagcagtgtgcaaagatcctgatcctatttcccccagcatcaaacgttgcagatcgcgtttccttcaaacgcaatggcaaaaataattcacgtgcagatacttgtgtgatgcttgatttatcaaaatgcgtattgttta

SEQ ID NO: 20884 - DNA, 405 bp, Gossypium hirsutum
  Clone ID: LIB3146-034-Q1-K1-C1
gtgagaagtgagttccattggtatgatcagaggtaaataaacacagttttagaatggatgcgttgcaaaagtgttgcaacagttgttggtctccaagatttatccattgtatgcatatgctgcaacaatcgtaagccaagactagcaaggagaactagatttttgaatcgtgatatgttgcaactgtcacaatactctgctgaacggcaagtgcagctctgctctagcaaacaaataattgggttgggttgggtggtttggaattttgaaacacaaaagtgagtgtaaaaagtgtgacgatgattggatttagtaattaagaaaaatagaagaatattgcggattggtgttctatgatggctctgggtcagtctcttttacacaaaaggcaattatagaacaagg

SEQ ID NO: 20885 - DNA, 405 bp, Gossypium hirsutum
  Clone ID: LIB3146-034-Q1-K1-C10
ataaactgtaattccacaaagccaacttctttttatacatagaaaaaggagaatatgaaggcgtcatatattgcattgtgtgcagtgatggtgatcctcttggcagaagcagtagaggtgtcaacggcggtgacatgcagcccaacgcagctgagctcctgcgtgagcgccataacatcttcatctccaccatctcaactgtgctgtagcaagatcaaggagcagaagccatgcctttgccaatatcttaagaaccctaaccttaagaaatttattaacactggcaatgccaggaaagttgcttccacctgtgggactcctttccctaagtgctaagctagactctttgctgaaagctttctttctctctattttcactgcagaatggatagagagaaagtacta

SEQ ID NO: 20886 - DNA, 249 bp, Gossypium hirsutum
  Clone ID: LIB3146-034-Q1-K1-C11
cccacgcgtccggctgcagctaccattcggagttattcatctccgctagaaattccaagtgccgttggccaaagatgggatgttcctgtaggcattagtccaagttctggacttcatcccgaacctagtattggttctgtaccggctggagctagcatatagggttatccttctcctctaaaagattcaaccttagtttaccaaagagatgacagtccaccgggcacaaattctggcattcccaatgcg

SEQ ID NO: 20887 - DNA, 299 bp, Gossypium hirsutum
  Clone ID: LIB3146-034-Q1-K1-C12
cccacgcgtccttccacataaacctatcttttcaattcatagtaaaacaatattatccaggcctttgaggttcttataaacttctctgatcttcattcttcaaacaaaacctctttaggactcaacctccctaacttcctttagaacacaactaagatcctccattattctaatatcatccttttctaaaacatcttatctctccatataaaaaatatattttctttaaatatccctctaccattatgttatttttccctaaaatataaaaatcaattaactcttgttcttccaaaaac

SEQ ID NO: 20888 - DNA, 364 bp, Gossypium hirsutum
  Clone ID: LIB3146-034-Q1-K1-C2
ggaaaagctgatagatcggtttggttaatgaagtgtccggtcgctgtggccaaatcatgggggagtcagaccgcttcttcttccgattcacaccctgtcgccaacgttgtcctatctctctaccctcgcaaaccccatgacccttcttctattcagtttactatggagatggctggatctgagattggcaatataccaaaaagttacgccttgaatatgtctaaaaactttcttcctatgtctgttttctttgaaacaactcatggtagggctgcaatggaaggagaaattgagcataaatttggcatgtaaccccttgagcaaaaccttgaggagtattggtggctttttcatgaaaaggcca

SEQ ID NO: 20889 - DNA, 402 bp, Gossypium hirsutum
  Clone ID: LIB3146-034-Q1-K1-C3
gaaggagaggaaggcggcggacagctgagacctagcaacactgggagaagacaagagtgggagattgatccgtttaagcttatcatcaaaagtgttatagctcgtggcacttttggaaccgttcatcgtgggatgtatgatggccaagatgttgctgttaaacttcttgactggggagaagagggtcacagatccgaggccgaaatagcttcacttcgagcagcttttactcaagaggttgcggtgtggcataagcttaatcatcctaatgtaacaaagtttataggggcgacaatgggctcatcggacctgaacatacagacggaaaatggtcaaattggcatgccaatttgttgtgttattgtggaatattgtcctgggggtgcactgaaatcctacttg

SEQ ID NO: 20890 - DNA, 321 bp, Gossypium hirsutum
  Clone ID: LIB3146-034-Q1-K1-C4
ctgttactcacacttccacatttgcaaagggatggaccgttccaagtttggtgaagtttttgacacctgcatcgggtctccaaggatactgggacccttatcccattgatatggaatttcgaccaccttgtatggtgttatcaaccattgggatatcaaagccgggaaaactcgaaggacaaagtaccaaggaatgcacaacacaccttcaccagcttcatgtatgcataccttcatcgagaaataagacgagattattatatagaatgtcactcgattttgctcccgtgttgaagcacatttcctttatgcattatttat

SEQ ID NO: 20891 - DNA, 397 bp, Gossypium hirsutum
  Clone ID: LIB3146-034-Q1-K1-C5
cccacgcgtccgcccacgcgtccgtcactctccaccccaacaaatggctgatcgggaatcccccactgctaaggactctgccgcaccaaccacggagccccaccacacccaaacccaagtagacgacactgccgccaaactcagcaacctcacctttaaaatttggccccccacccaacgaactcgtgacgccgtcctcaaccgtctcgtcgagacgctatcctccgaatccgtcctttccaaacgctatggaaccatcccaaaggaggaggcttccgctgcggccaagttgatcgaggaggaggctttctcggtcgccggcgcatccttcttcaccgacgaggacggcatcgagatcctccaggtgtattccaaggaaatcagcaagcgtatgctc

SEQ ID NO: 20892 - DNA, 179 bp, Gossypium hirsutum
  Clone ID: LIB3146-034-Q1-K1-C6
gttatgtgtttgcataggcccggtctcaaaattggttataacagctgcccttcggggctgatgttagtgtaaggagaatagcgcaaatactataaaacggccactcttgctcgggttggctgaccattgggtcttctaagcccttaatactcttcatgtaaaattagcatggtatgctt

SEQ ID NO: 20893 - DNA, 180 bp, Gossypium hirsutum
  Clone ID: LIB3146-034-Q1-K1-C7
tttcattcttattttacattctttttttaaattttaccaaaacaaattacatatcgcgaatgttaaaatttaaatacaatctttcatcaactataaaatccaactacacataaacataaattaacctaaacaacttcaaacttatcatcctctctttaaaaaatttcaaactcaattaac

SEQ ID NO: 20894 - DNA, 391 bp, Gossypium hirsutum
  Clone ID: LIB3146-034-Q1-K1-D1
cccacgcgtccgggtttatctagggtttcctattttctaccgttcctctctttgtattcggccaatggcgaaaccgacgagaggccgccgttctccttctgtctccggctccggatcctgttcccgctctcgttcacggtctaggtctcgctcccgctcttattccggttcagactccaagtccagttttcgctctcgctcagtgtcccgctccagatctgcttgctcgtctagctctcgatctcgctccaaatctttatcctcttgtccttctcgtagcggtagctcatgaagtctcatgcctcctcagcgtttaagtgcgactgatgcatctaggcgaggtcgtccccctccttcatattctaaaaaatcatattctgtttcgaggaag

SEQ ID NO: 20895 - DNA, 406 bp, Gossypium hirsutum
  Clone ID: LIB3146-034-Q1-K1-D10
cccacgcgtccgatcaaaataacccatagatgaagtccgggataagggtttgtgtgttggtttgtctaaaattatttctctatattatgaatccaagataccccaaagaaagtgaaaggtccaatttcactacgtggttgttgattcatgtaaattaatcaatgtatgatgatgtgttgaaagttagcagcaaggaaatttgcaatgtgtaatttggatgtttgaatttttttgtaatatgtaaactaagtcttgtctgattgtaattttgtttttgctaaggttagtcagctacttagctgatttagtagcttcttaacttatcattaagctgattttacagcttggatactagaacaagttattttttgtgttcttccaatgtaatgaactagctatttatgca

SEQ ID NO: 20896 - DNA, 338 bp, Gossypium hirsutum
  unsure (1)..(338): unsure at all n locations; Clone ID: LIB3146-034-Q1-K1-D11
gcccaccgtcgatatatagccatacatgtaatcctgataagggttggtgttgggtgctaaaattatttcttatatataatccagatccccaaaaaggaaggtcaattcactacgtggtgtgancatgaaattaatcaatgttgagatgtgtgaagtagcacaggaaattgcaatgggtattggatgtttgaattttttataatatgtaaaccttatcttggctgattggaattttgtttttggttaagttagtcacctccttactgtttttataacttcttaaactattattaaacttattttacaactttgattcttaaacaaagtatttttttgtg

SEQ ID NO: 20897 - DNA, 409 bp, Gossypium hirsutum
  Clone ID: LIB3146-034-Q1-K1-D12
gtttttctttttcctacttcggtacttccttcctcattctatctcgatttctccctctttctccccgaaatgacgaagttcaagaagcttaatcgacccactggtcatcgcatgtccatgctcagaacaatggtttcccagttggtaaagcacgagcgcattgaaactactgttgccaaggcaaaggagattcggcgacttgctgataacatggtacagcttgggaaagagggttcactttgtgcggcaaggcatgctgctgcttttgtccgaggagatgatgtcattcacaagctatttacagaactggcatatcgatacaaagacagggcaggtggatatacaagactgcttcgaactcgcatccgagttggtgatgctgccccaatggcctatatagagttcattg

SEQ ID NO: 20898 - DNA, 86 bp, Gossypium hirsutum
  Clone ID: LIB3146-034-Q1-K1-D2
cctttatcatgatctatttttatgagatatttaattctctcttaaaaggcattagatttggtaaattttaaaaccatgtctgtcct

SEQ ID NO: 20899 - DNA, 355 bp, Gossypium hirsutum
  Clone ID: LIB3146-034-Q1-K1-D3
cttctgataattcgaataattctgctaccttaaactgttggcaactggatgagttcttagggcaaaggttcggtgcctaagccagttgagaattattgttttgtacagtaatagagacatccacatctgaaggaaacactattagaaaccaatcctcagctcatgcaaattgcttttgtagaaatgactcaaggtaaggaatctattaacctattctattttttcggtccctgctagattcggttgttgaaatgttttttaagttagaaaatcttgaaattattaacctacattggtgaaccacaatcttgtttttctacctataggcattgatttttgaaccctttaccaattt

SEQ ID NO: 20900 - DNA, 107 bp, Gossypium hirsutum
  Clone ID: LIB3146-034-Q1-K1-D4
cccacgcttccgcccacgcttccgtggctttttaaatttcttaactacggagaatagagggcgagtggttttacatcctaattgtcagggatcttattctgcaccca

SEQ ID NO: 20901 - DNA, 211 bp, Gossypium hirsutum
  Clone ID: LIB3146-034-Q1-K1-D5
cttctgataattcgaataattctgctaccttaaactgggggcaactggatgagttcttaggacaaatgttcggggcctaagccagttgagaattattgttttgtacagtaatagagacatcttcattcgtaggaaactctatcataaactcttcttaattccttgcaaatttattttggtggattgattcatggcatggattttattaaca

SEQ ID NO: 20902 - DNA, 270 bp, Gossypium hirsutum
  Clone ID: LIB3146-034-Q1-K1-D7
gtgatatgtacttggacaaagatggggaatttcgtgaaatgaatatatatacggccatatgcgaatttagaggaacttcacacacaaccaaacaatcttacactaaatcactacaaaacaaaatttccattctaaaaaaagaaaatgaaaggcttatgaaactcaaagagctataaaaactgtttgcctccctaccttcttccgatccaaaaaattaaattctttaaacattaatattccctcgttctaaacaaattccgtatcaattta

SEQ ID NO: 20903 - DNA, 146 bp, Gossypium hirsutum
  Clone ID: LIB3146-034-Q1-K1-D8
ctctctttatattaactctaacattttattttaacctaataacaaagcaactatataggggcattgcgtaaattttaaaaacctaataccatctaaatatcttaaaatttaaaaattaaaaaccaaattttatcattacaaatttt

SEQ ID NO: 20904 - DNA, 394 bp, Gossypium hirsutum
  Clone ID: LIB3146-034-Q1-K1-E1
aagaggtgcccccgaggacatagttgagaaaaatgttgaaaggagacaaaagaggatgatagaagaatagggaatctgcagcacgttcacgagcaaggaagcaggcttacactaatgaactggagaacaaagtttcatgtctagaagaggaaaatgagaggctgaggaaacggaaggagctagagaagctgctgccgtccgcacctcctcccgagccaaaatatcagcttcgtagaacatcatcggccccgttctaacaatcccgtagcagttagtgtgaaagttttgcatatacaaaccagcttctggcatctgtttctggtttcaatttaggcataaggttaaagtcaatgcatcttccagaggcagccattgtttcatttgccggtaatgg

SEQ ID NO: 20905 - DNA, 284 bp, Gossypium hirsutum
  Clone ID: LIB3146-034-Q1-K1-E11
cacagaacaagaggctcaacaagtttgcatcaactgtggtgtttgtatggggaagtatttctgcaactcctgcaaactttttgatgatgatacatcgaagagacagtatcattgtgacggttgtgggatctgtaggattggagggcaggagaacttcttccattgccacaagtgtggttgctgctattcaattcttctgaaaaaaagccatccctgtgttgaatgagcgatgcaccatgactgtcccattatgcttgagttcttagtcggatcgagacagaatg

SEQ ID NO: 20906 - DNA, 360 bp, Gossypium hirsutum
  Clone ID: LIB3146-034-Q1-K1-E12
cacagttcaagaagctcaacaagtttgcatctactgtgttttttgtatggggaagtatgggtgcaagggcggcttactttttgatgatgatacaccgaaaagacagtatcattgagacggttgtgggatctgttggattggagggcaggagaacttcttccattgccacaagtgtggttgctgctattcaattcttttgaaaaaaagccagttcctttgtttaatgagcgatgcaccatgactgtcccatatactatgagttcttgctcgaatcgagacagaatattactgttctgccatgcggacatacaattcacacaaattgtttcatggtaatgtagaaccattttccaatatgcc

SEQ ID NO: 20907 - DNA, 317 bp, Gossypium hirsutum
  unsure (1)..(317): unsure at all n locations; Clone ID: LIB3146-034-Q1-K1-E2
aaaaaaacaaaaatcctatttcgtggaggctcctttcatcgggcaaccactaaccttcatgagtttgatggctaatagtgctgatgatgatcggattttatcaactgagattctaattttagaaatccggtatgatgcatcaactgtacggagaaaatgcttcgtgaaagttgtgagaaatcgaatctctggtgcacttctagtatattccaagagctgttgctgaaattccctatattgctaggctctttcagatatgggctagactttanggtattaggattggtcttcaattcatgtaaagggtcttggggtat

SEQ ID NO: 20908 - DNA, 224 bp, Gossypium hirsutum
  Clone ID: LIB3146-034-Q1-K1-E3
cccacgcgtccgctagcgttcgaattggcaagggttttcaagcagaaattcctgactggtgtggtccaatggatattgatgatgataccattcgcgaacccctatacttgtattcttctgaatatacttattacctctattcaaacaagtcatgtaagtttaactcaacagggagctgtcttcaatgccatgactttctaaactgctaaggaggcaagatatga

SEQ ID NO: 20909 - DNA, 286 bp, Gossypium hirsutum
  Clone ID: LIB3146-034-Q1-K1-E4
gacccacgcgtccgtgttcatacaatcatttgttcgaatacacatagcttaatcttgatgcaaaagaatgggtctctcaagtctcccagccccatcagaaggagtgctatgtgtactcttggtaaacacagctttatccatatctatggttaaaggcataattcgatcaatccttcacgtagtcggtatccatctctcctacttcttggcctgctactacttgtcatcatcatcatcaccgccatcctcggatcttattgaaatccctgcggtatcattcgacatc

SEQ ID NO: 20910 - DNA, 392 bp, Gossypium hirsutum
  Clone ID: LIB3146-034-Q1-K1-E5
gtgatatgaccaggcggtctgttatttcgtcttcacagcaatcgtcaaggcttccaactgatcattctttggacataaggtcagcaccagtgctagataatgcaagtcttcaaaacccgaatgttgcagttcatgttccgactttgcctcgaaatgtacagtcatttaggtggaatggaggttctggctctagaactggcaatacatcaagttctaatatatctgggggataggaatgcttgaccccaatgaggaccttcaatcaaaaacattgcttggaacctggtaaaacattctatggttggtccggccccttaattgaaaaaattgggtcggaatccaatgaatccagaagtaaatagtggaaatttaagtggtcctggaaattttgc

SEQ ID NO: 20911 - DNA, 282 bp, Gossypium hirsutum
  Clone ID: LIB3146-034-Q1-K1-E6
gcgaggataaaccacttgataggttatcatttctaacaagctcttcaatcgttggaactgatcattataatgacataaaggcagcaccagtgctagataatgcatgtcttcaaaacccgaatgttgcagttcatgttccgactttgcctcgaaatgtacagacatttaggtggaatggaggttctggctctagaactggcaatacatcaagttctaatatatttggggatagagattctgtaccacatgagggacatttattctaaaccattgctaggaacc

SEQ ID NO: 20912 - DNA, 407 bp, Gossypium hirsutum
  Clone ID: LIB3146-034-Q1-K1-E7
acatttcattacaagccaagaagttcaaaatgtccaaacgaagcggccgaggaacgaagcggtgtacgatgaagaaaccgagttgcagaagagtacatcaccttgcattgatcagattccaagcaatcagcataataatattggagttggtggaaccagtggtttttgtttagcattgtgtctgaaccagaacaatggggttgaattggaacaacagccattgctgcctatgaacttgtgtcataatttcaggttggaaagcgatggtgaactgagtttgaaaccagggttttgatgttgggaagaccagtaccagagcatttgttttggtatgattgtttaattggttttgcttaatatttggccttttgaaaaacttttaaactttgttacttgttttttttttg

SEQ ID NO: 20913 - DNA, 392 bp, Gossypium hirsutum
  unsure (1)..(392): unsure at all n locations; Clone ID: LIB3146-034-Q1-K1-E8
gcgcaaggtcgcaaagacccgaaccaaccgactggcttctccatccagttctgcaacatctcggccgatacggacttattaccttcagttaactccactcctacatacttgggaagaccatggaaactatattcaaggaccattatcatgcaatcctacattagtgatgccataaggccacaagggtggcttgaatggaaccaagattttgccttggatacattatactatgccgagtacatgaataatgggccaggggctagccttagggagcgagttaagtggcctggttaccatgttttaaataactcagctcaagctgttaattntacagtagctcaattcattgaaagagacttgtggttgccgtcaactggtgttaaatacacttc

SEQ ID NO: 20914 - DNA, 402 bp, Gossypium hirsutum
  Clone ID: LIB3146-034-Q1-K1-F1
tggcgatcatgcggtgtatcgatgtccaaccaagcaacgaaatgacggtggatgaattcaaagcatggctccggcgtttcgatgcggatcacgacgggcggatcaaccaggaagagctgaaagaggcactgcatagcctgagagttcggtttggatggtggaaagcacgtcaagggatgaaagaagcggattgcaaccatgatggccaaattgagaacgccaaggagattgagaagctggtgaattatgctcagaaacgcttgcatataaaaatttatcaaagcgattggtgatttgattttgcaaaccactaaatgcaagtgtaacttttaaaaaaatatgggcctatgaataataaaaaatgattttaaaaatggggtcccctggctttttgaattttct

SEQ ID NO: 20915 - DNA, 63 bp, Gossypium hirsutum
  Clone ID: LIB3146-034-Q1-K1-F11
gttagactgattagacctaccctgctggtttcatggatgttgtttccattcctaaaacaaatg

SEQ ID NO: 20916 - DNA, 398 bp, Gossypium hirsutum
  Clone ID: LIB3146-034-Q1-K1-F12
gtgctatttctgctcatatgtggcctggaatggttctgaaatctggtgatatgataactgaaccttggcttcctgagaaagaagattcatcagaggaagagcctggttatcagtttgaatatgaagtgttatctgcaggttcagctgaaccaggggatgacattgttgaagaatggatttctgcaagtccggctaacacattcctggatagagggaaatcagttgatgtgggaaattctggttcagattgtgttcaaggaaacataaccagatgcgaaaaggacgagtcacatacctttcccagaggttctgctttaggggagaaaattgacagaatggaacccaatgctgaagaacctggtcgagcttcagcttcagaagtagatgatggcccccat

SEQ ID NO: 20917 - DNA, 333 bp, Gossypium hirsutum
  Clone ID: LIB3146-034-Q1-K1-F2
gtaaacttgacatctttagcaacggaaatggggagacttgtttcagaaggatatgttatggcagtcttggctcccaacgacgaacccatggcaaagcttactacggatcagttaagcgagccaggggcgccggagcacattatttattatcatatcatccccgagtaccagacggaggagagtatgtacaatgcggttcggaggttcggtaaagtgaaatatgacacactgcggttgccgcataaggtagtggctcacgaggctgatggttcggtgaaatatgggcatggtgagggttcagcttatttgtttgacccggatatatatacggat

SEQ ID NO: 20918 - DNA, 363 bp, Gossypium hirsutum
  Clone ID: LIB3146-034-Q1-K1-F3
cgattcggccaggtatttcagcatctagagtttctgtcaatgttggagaagagcgttgaaggaatagcttcagatcctaaagtgcacactttcgaggaggttgccaaccacaacaaaaccaaagattgttggctaattatttctgggaaggtttatgatgtaactccgttcatggatgatcatcccggaggtgatgaagttttgctgtcagctactggttactaccattgccttgctgctgttttactttttttagctatagttttagttcccggagatattcacagtggctttaaacatggggattgaatggaagagaaatgaattgaaaagctgtgatttttttaaaggaagttgggtttt

SEQ ID NO: 20919 - DNA, 311 bp, Gossypium hirsutum
  Clone ID: LIB3146-034-Q1-K1-F4
atgaattcgaggtgggagacgtttgtgtgtttgagctgatgaatgaaaatggaaacttgtgggaagttgtcattcattgcaagcttttactcgtcgaaattaattaacttgtcaagtatttcaatccaaattgtaattgtttgatgattttgtgtatttattcaatggaactgagagttgctgatgggaggagttggattgttgtgtctgatagaagatgctggagttaacttactaatgcagtacttgtgggaaatatttgttgactttacgcaaataaccacaatgtctttgacttggactatcaagtg

SEQ ID NO: 20920 - DNA, 215 bp, Gossypium hirsutum
  Clone ID: LIB3146-034-Q1-K1-F5
cccacgcgtccggagaagcccatgtttgaactagtctcagcagcccaaacgaggttgccagatagtgatggtgcaattgatggtcaccttcgtgaagttgggcttacatttcaccttcttaaggatgttccggggcttatttcgaagaatatagaaaagagcctggttgaagcattttcaaccattggggatatccgattggaacttcctttttt

SEQ ID NO: 20921 - DNA, 287 bp, Gossypium hirsutum
  Clone ID: LIB3146-034-Q1-K1-F6
gggagaaatgaaaggttctgccattactggtccaattgggaaggagtgtgctgatctgtggccaagaattgcaagtgcagccaatgccattgtttagggatttgaatttttctagagttttttgttcccttgagtcatggctttttgctggatcaagattttgttatgtgttttttagggtttcttgaaaaatatcgtatggatagttttgatttggattttgatgctgggatgtagttaatggatttctcccatgtttaagcttattatttcgtttttcattgagg

SEQ ID NO: 20922 - DNA, 217 bp, Gossypium hirsutum
  Clone ID: LIB3146-034-Q1-K1-F7
ggagggaatcctaaggaaattctaaatgaataagatgagaaactaacaaatctgaagctggaatggggtgaagagatttataatgcactggtaacagctttgaaagaactgaacgagtataatcccagtgggagatatgtaatttctgagctctggaacttcaaggaaaacatgaaagccacacttaaggaagtctttgggtatgttgttaggaaca

SEQ ID NO: 20923 - DNA, 362 bp, Gossypium hirsutum
  Clone ID: LIB3146-034-Q1-K1-F8
cccacgcgtccggttgcttttcccctgcttctatccatgtttgttgttaagtggtacttggtcgagttcagaagattgctttgttctttatttcccaattcttctcttgcaatctgcaaataatcataattctctggtatgaactcaagatttatggtgaatacaattgtgaatcttccatgcatacttaaaaaaataaaaataaatttaaatatatgtattaaaataaataataaaaaaaatgtattttttagtaatctttttattattaattttttttattaattctatttatttactacttttattttattatattttattctcacttttaaattattctcttttctttatttttttct

SEQ ID NO: 20924 - DNA, 217 bp, Gossypium hirsutum
  Clone ID: LIB3146-034-Q1-K1-F9
cacataacaagatgctcaacaagtttgcatctactgttgtgtttgtatggggaagtatttgtgcaagggctgctaactttttgatgatgatacatcgaagagacagtttcattgtgacggttgtgggatctgtaggattggagggcaggataacttcttccattgccacaagtgtggttgctgctattaaattcttttgataaaaagccatccctgt

SEQ ID NO: 20925 - DNA, 377 bp, Gossypium hirsutum
  unsure (1)..(377): unsure at all n locations; Clone ID: LIB3146-034-Q1-K1-G1
ctcctttgagatattgaaaccagctgataataaatcgttaccaagcggttctaagcccctgaagaagcagccaccaaagatggggaaggtttgatgttccatgaatagggattgctagggatgtcattctgctcaaacccaaaacatgatgagctgaattgaaaaaagttccgattacttcattgtacgagtaaacttccataagattgttgcttgcaaacgaagtcgtcggaagagtctgtaaattaactacccattttctcttctgtgcagtaacaaatttgtttttgcatttgacacangtttctaatcactatcagtgtgcaatctatggattgatctgccttgatttgtgttgatatacttagntatcacct

SEQ ID NO: 20926 - DNA, 355 bp, Gossypium hirsutum
  Clone ID: LIB3146-034-Q1-K1-G10
cccacgcgtccgtaagaaacttgctcagaggaagcatttcccttctgtcaactggcttatttcatactcgaagtattcgggggcatcggaaagtttctatgagaaatttgatccagattttattagcatcaggacaaaagcccgagaggttcttcagagagaagatgatctgaatgaaattgtccagcttgtcggaaaggatgctctagctgaaacagacaaaatcacacttgaaactgccaaacttttaagggaagattatcttgctcagaatgcttttactccatatgataagttctgcccattctacaagtccgtctggatgatgcgcaacattgttcatttcaatgctttg

SEQ ID NO: 20927 - DNA, 215 bp, Gossypium hirsutum
  Clone ID: LIB3146-034-Q1-K1-G12
tataaaccacgcactgatactcgcatagatgtcgacttatatttgtacaaagagcttgatgctatatatggacatgttcatcacactctctgtgcctcttgccgatatttacaaggcattctactacattctccacaatatacgtctgagatgcatgaagcatagagatgcttaatgaaatggtgcagctatatatttaggcatccatagctcaa

SEQ ID NO: 20928 - DNA, 392 bp, Gossypium hirsutum
  Clone ID: LIB3146-034-Q1-K1-G2
agctgacaaactccgaaatcaaatccggaatttgcagaatgcaaacaggcatatgctgggagagtccatagggggattgcctatgaaagagcttaagagcttggagagtcgtttagaaaaaggaattagcagaatccgttccaaaaagaatgagctgttgtttgctgaaattgagtatatgcagaaaagggaaattgacttgcataacaataaccaacttcttcgagccaagatagctgagaacgagaggaagcagcagagcatgaatttgatgcccggaggttcaagtgctaacttcgaggccctacattctcaaccatatgactctcggaactacctccaagtcgatgctttacaacccgccaccaattattataacccttaactgcagc

SEQ ID NO: 20929 - DNA, 397 bp, Gossypium hirsutum
  Clone ID: LIB3146-034-Q1-K1-G3
agaatatcgacaaaatctcattggtgaagtgtcctgtgctgataatccatggaactaatgaggacgttgttgactgctctcatgggaagcaactttgggaactgtgccaagaaaaatacgaaccgttatgggtgaaaggaggaaatcactgtgatttggaactgtacccggattatattaggcatctcaagaaattcatctcaacagttgagaagtcaccttctcgaagaaatgcttctcggaaaagtacagatggtatcgaacagtctatgcaaagtactgaatatttcgaggctccgagaagaggtatcgaccgcagggagaaaccaaggaaaagccccgttccccgggacaggccaaggaaaacaccctttccccgggaaaaaccagggaaaac

SEQ ID NO: 20930 - DNA, 395 bp, Gossypium hirsutum
  Clone ID: LIB3146-034-Q1-K1-G4
cgcttatagactcaagatcctctgatgttgtgttcaaccctgctaatgcacagactatatggggaatggacaaactggtttcaatgaaagcatctttgcgaactgtgccacaaaaaatacaaaccggtatggatgaaaggaggaaatcactgtgattaggaactgtacccggattatattacgcatatgaagaaattcatctcaacaggttagaaagcaccttctcgaagaaatgctctttggaaaagtacagatggtatccaacagtctaagcaaactacttaatattgctaggctccaagaagaactatctaccgcatgtagaaaccaaggaaacgcaccgatacccggtacaagccaatgaacagcttctttaccctggaaaaaccaaggaa

SEQ ID NO: 20931 - DNA, 380 bp, Gossypium hirsutum
  Clone ID: LIB3146-034-Q1-K1-G6
cccacgcgtccggccacgcgtgtgcccacacgtgcgcaaaagcatgcctattacagatgggggcctatattgtgtgttacgtttacaccttttaggcttgatgttggcgttctggcttttggaggggtttcccccatacagtgcatgatgattcaaccttattcattctcaaatcatatgggggtatttaggcagctacacggtagtgctaaatggccatgtataaaggtgtactgtgtgagttttgcacatggaagaactgcttcatgctcgtgtttagtagttgccatgtgtttacagctttgatggggtgaagaaagcaaaaggtatcttctgctctgctgctcataataaatgtgctgatgctgtctttttgaagt

SEQ ID NO: 20932 - DNA, 395 bp, Gossypium hirsutum
  Clone ID: LIB3146-034-Q1-K1-G8
cccacgcgtccggttggaaactccgagacacagtgcccaggtcaatgcgcatggccattccaccagcccatctacggaccacagaacccacctttggttgcacccaacaatgatatcggtcttgatgggatggtgatcaacctggcaagcctcttggctgggacagtgaccaacccgtttggaaatgggtactaccaaggtccaaaagaggcaccactggaggctgcatctgcttgtcccggtatttatggtaaaggagcatacccaggctatgctggagaccttccggtggacgccacaactggcgctaactacaacgcacatggtgtgaatgggagaaagtatctgcttccggctttgtttgacccttcaacctcaacttgctctacactggc

SEQ ID NO: 20933 - DNA, 317 bp, Gossypium hirsutum
  unsure (1)..(317): unsure at all n locations; Clone ID: LIB3146-034-Q1-K1-G9
aatcattccggtgaccctgagatcgaagctgctattcaaagaggagaggaccctggattggctttggtgacaaaagcttataactacattcataaatatggacataaatcaaagcttatggcagcagctgttcggaacaagcaggatatatttagtttgctgggggttgactatatcattgcaccattgaaggtattgcagtcactcaaagaatcaattacttctcccgacgagaagtactctnacgttaggagggtgtccncacagtctgctgccagatatgatttcaccgccgaagagctcacaaagtgggatca

SEQ ID NO: 20934 - DNA, 378 bp, Gossypium hirsutum
  Clone ID: LIB3146-034-Q1-K1-H1
ggacgcttcaccatttgacggtggaagctgtcgacgccggcaaaaagaagctttatgaaggcaaagtttgggttaaaccttggatgaattttaaagaattgcaggagtttaaacatgctggtgatgctgatagttccgcttcttttaccgcttgtgatcttggtgccaagaaagatgtccatggaccaatgctgcaagcggtggccacaaatgatcccgtagttcaggatgctgcggatcatgctgtgaagaccatacaacagagatccaatttctttctggcctacgaacttaaagaaatagtttatgccaacgcttgagtattggaaaattttgcaaaactaaacatggtttttaaagggaaaagagggaacaagg

SEQ ID NO: 20935 - DNA, 294 bp, Gossypium hirsutum
  Clone ID: LIB3146-034-Q1-K1-H10
cccacgcgtccgcctatacttaagacctatgtaagcttttcccacatactgtgaatatcggtgataagaatcttttaaagatataagtaaatccaaacatccattataggatactgtctaaaaatatggttactatcttcctcatatagactacaccgatggcattgagcattcatcgccactttcttatgcttaaagttgacgactaggaataaaattccaaaagattctccatactggtattggaacttttggaggggatttataaattccatagtttccttttaaaatttt

SEQ ID NO: 20936 - DNA, 381 bp, Gossypium hirsutum
  unsure (1)..(381): unsure at all n locations; Clone ID: LIB3146-034-Q1-K1-H11
accggtttcaatagaccgatctttgcatactacaaatgaccaattttgatagttcgattttgttgaaggggtaccgagactaacttggacgtgatttttgcctgttaccacacatggatttacatatctatggggacaatggcgcaagtgcacccacggcaattgtagaactttttgtgaaatatgctgtaactaagataacttttgaacttggttttgagtgaaatcttcgttacgtgtctttaaatttttgttggtgttaatgtttacatgttctaattttgatcccacttaattataaatggctaaacaaataaataaaaaaaaatattttttttttaatttattatanaaaattattttatataaattaattttttt

SEQ ID NO: 20937 - DNA, 367 bp, Gossypium hirsutum
  unsure (1)..(367): unsure at all n locations; Clone ID: LIB3146-034-Q1-K1-H12
ctacaatgaaatggaaggtgtcatgtgaagaacatgggttttgtttttaagcatattatgacaacaggtgtttcaaactttttatagcttttgagcatgcatgtacttcccttctagttgcagttgcagtgttgtctgatactgagagtggaagctggattggggaccatgagtgaagacaaagtcagtgagacttaagcttagactaagatttgtatatatgacgttgtaaaattatatatattatcaataatcataatcataatcataatacataatcnttnaatgaataatttctactatgcccgtttggcatgtatgattgcgtattgcaagtggtagcctaaattaatcaaaccttattttg

SEQ ID NO: 20938 - DNA, 369 bp, Gossypium hirsutum
  Clone ID: LIB3146-034-Q1-K1-H2
ggaccctttaccatttgacggtggaagctttttacgccggcaaaaagaagctttatgagggcaaagtttgggttaaaccttggatgaattttaaagaattgcaggagtttaaacatgctggtgatgctgatagttccgcttcttttaccgcttgtgatcttggtgccaagaaagatgtccatggaccaatgctgcaagcggtggccacaaatgatcccgtagttcaggatgctgtggatcatgctgtgaagaccatacaacagagatccaattcccttctgtcctacgaacttaaagaaatagttcatgccaacgcctaagtattggaagaattttgcaaaactcaacatggtttttaatgtgaagaaa

SEQ ID NO: 20939 - DNA, 257 bp, Gossypium hirsutum
  Clone ID: LIB3146-034-Q1-K1-H3
cccacgcgtccgtaaatgataaagaaatcgtttgaaataggtaaaaagaaaagaggattagaaggaggaaaaaaatcaccttctctgattttccattgctttctatattgcgttttttggatgccttatatccccagggtttcataaaaaaaaaaggagcaattccttgctttctgttttattgcccgaaactcccaaaaatcaaaactaaaaaatcccttttctcttctttttctattttctactttgggttggct

SEQ ID NO: 20940 - DNA, 405 bp, Gossypium hirsutum
  Clone ID: LIB3146-034-Q1-K1-H4
gtggctataaagaaggttttacaagacaggatatataagaatcgtgaactgcaattgatgcgtgtgttggatcacccgaatgtgatttccttgaagcattgtttcttttccacgacaacgaaaaatgagcttttccttaacttggttatggaatatgtaccagagagcatgtatagggttttgaaacattacagcagtgctaatcaaagaatgccacttatatatgtgaaattatacacatatcagatattcagggggcttgcatacctccatagtgttgttggagtttgccatagggatctgaagcctcaaaatcttttggttgatcctctgactcaccaggctaagatttgtgattttggaagcgcaaaagtgcttgtcaaaggtgaagctaacatttcatac

SEQ ID NO: 20941 - DNA, 214 bp, Gossypium hirsutum
  Clone ID: LIB3146-034-Q1-K1-H5
gatctgtttgttgagaggtacagaggaaaagatatatctgtcgttgcaagtatagaagcaaggggattcatttttggcccacctatagcattggctattggggcaaagtttgttcctatgaggaaacccaataaattgccgggggaggttttatcggaagagtattctttggagtatggaaaggacacaatggagatgcatgttgatgctttca

SEQ ID NO: 20942 - DNA, 395 bp, Gossypium hirsutum
  Clone ID: LIB3146-034-Q1-K1-H6
cccacgcgtccggttggaaactccgagacacagtgcccaggtcaatgcgcatggccattccaccagcccatctacggaccacataacccacctttggttgcacccaacaatgatatcggtcttgatgggatggtgatcaacctggcaagcctattggctgggacagtgaccaacccgtttggaaatgggtactaccaaggtccaaaagaggcaccactggaggctgcatctgcttgtcccggtatttatggtaaaggatcatacccaggctatgcttgagaccttcctgtggacgccacaactggcgctaactacaacgcacattgtgtgaatgggagaaagtatcttcttccggctttgtttgacccttcaacctcaacttgctctacactggc

SEQ ID NO: 20943 - DNA, 160 bp, Gossypium hirsutum
  Clone ID: LIB3146-034-Q1-K1-H7
cccacgcgtccgatcgacgccggtgtcggctcgtaaggacaacgtgtggaggagcgtgttcaatccaagtagcaaccttgccaccaaaggtattggcgctgaagtttttgacaagccttaacctaactctcctactgtttatgactgggtttacagcggg

SEQ ID NO: 20944 - DNA, 396 bp, Gossypium hirsutum
  Clone ID: LIB3146-034-Q1-K1-H8
gaagaaagaaagaaaattatatgtgaaagtatggcggggaaagaagagaatcgaatatttgtgggaggtttgtcatgggatgtcactgaacgacagcttgagcatgcgtttagtccatttggcaaaatccttgaatctcagatcatgttggaaagagataccgggcgtccacgtggatttggatttatcacatttgctgatcgccggtccatggatgaagctatcagggagatgcatggacgggagctgggggagcgcaccatttcagtgaataaggctcaacccaagatgggtgaagatcttgatcacggttatagaggaggttactcatcaagtggcaggggtcgctatgcacgtggagacaggcctgtagcacaagatgaatgcttcaaatgt

SEQ ID NO: 20945 - DNA, 292 bp, Gossypium hirsutum
  Clone ID: LIB3146-034-Q1-K1-H9
cccacgcgtccgcctcgactaaagacctaggtaagctattcccacatactgtgaatatcgttgttaagaatctaggaaagatataagtaaatccaaacatccattataggatactgtcgaaaaatatggttactatcttccttatattgacgacaccgagggcattgagcatccatcgccactttcttatgcttaaggttgacgagtaggaataaaattccaggagattctccatactggtattgtaacttttgaggggatgtataaattccatagtttcctgtagaaattt

SEQ ID NO: 20946 - DNA, 370 bp, Gossypium hirsutum
  Clone ID: LIB3146-035-P1-K1-A1
cggacgcgtgggtttagaagcaaagcggagtaagctatcggcatcagctgaaccattcaatgccggagcactctatcaccctttaaactcagtttctgttacatgtgtttatgatgtaacagctagtcaaggcatgcttgttgagcctgttgtacctccagttgctgctcgagttccttgcgggccaaggtcgccattgttttacagaaacaataattcttacggtagctttcttagataccaaactcctattttggaacaaaatggatttggatctccgagagttatgaaccctcatgcacctgagttcgttccaagcaaaatttggcatatgactggaactggtgatttgagtggctctgaagaagct

SEQ ID NO: 20947 - DNA, 327 bp, Gossypium hirsutum
  Clone ID: LIB3146-035-P1-K1-A4
tcggcgtatgcaacccattcatcacagctgtgttccaaagatctggtggagccccaggtggggggtcttctgtagatgttgatgattcttatgttctaccttattttattgttttttactttcttttgttttctccctttttttttttcttttttgcattttcttctttttagttcttttttttttttatttctctttctttcatttttttttttaattaattctttttctcttcttcttttttttttttctttttttattctatttttttctttcttgttttctcttttttttatttttttcttttattcccttccatcttttttt

SEQ ID NO: 20948 - DNA, 89 bp, Gossypium hirsutum
  Clone ID: LIB3146-035-P1-K1-A6
catacacacaccttcgcaaaagaagtgattgccgctttttgcttgccgttttgtggggggcacattctctttgccgtgatttgaggcta

SEQ ID NO: 20949 - DNA, 148 bp, Gossypium hirsutum
  Clone ID: LIB3146-035-P1-K1-A8
accaagttcccagccacatgagtaaattgtcttgttgagaaattgagtcatcagagaaaaatagggactgtcggtccaatttctgacattaaaacagagacaaattcacgaccatctgatgtattggaaagtgctcgagctgatattg

SEQ ID NO: 20950 - DNA, 118 bp, Gossypium hirsutum
  unsure (1)..(118): unsure at all n locations; Clone ID: LIB3146-035-P1-K1-B1
acccacgcgtncggccgtagaaaagtctaattgaggacgaggctggtcagccaggaaacaagaccaggatgggggggggtttaccagcggcagccacacccccccctactgcttacac

SEQ ID NO: 20951 - DNA, 309 bp, Gossypium hirsutum
  Clone ID: LIB3146-035-P1-K1-B2
gttagagagagccaaaaaatgggtccaggaacttcaatcgcaaggcaatccgaatatggtaacggcacttgccgggaacaaagctgatttacttgatgcaaggaaggtgacatcagaggaagcaaataagtacgctcaagagaatggtcttttcttcatggaaacttccgcaaagaccgcatccaacgtcaacgatattttccacgaaatagctaaaagattacctcgagcacaaccagcacaaaaccctgccggaatggttcttatggatagacctacagaacggacggcaagctcatcatgttgctt

SEQ ID NO: 20952 - DNA, 60 bp, Gossypium hirsutum
  Clone ID: LIB3146-035-P1-K1-B6
accacgcgtccgaaaaattatcacaagatctaccattgctactgggattccatattggat

SEQ ID NO: 20953 - DNA, 218 bp, Gossypium hirsutum
  Clone ID: LIB3146-035-P1-K1-B7
cccacgcgtccggttttcatccactgcacttcttgcttcttagtatatgtgatagattagaccacaaatgtgcttgcttcttttgctgctgaaagattgaggtgccttcttttgtcatcttatccaggaacgggtttcctttcattttgcaacctaggttgtaattctattgcagttttgttgtcacctactttttgggcgctcctatttctcccatt

SEQ ID NO: 20954 - DNA, 382 bp, Gossypium hirsutum
  Clone ID: LIB3146-035-P1-K1-B8
gtcaaagaagggcaagtaatcgttagggctcggaatttacgaggtgctgcaaattttatccctcccaagtcttttcgatctcggagggtttatttcagcaatgaggaaaatggattactgtttgtccccaagggccaggctcaaaatgcgcaagcacaaatgttctctgaccctaacatggctatggacatgatgaagaaaaacctctctatgattatacctcagactctcacttttgcctgggtcaactttttcttctctggatttgttgcagccaaaatacccttcccattaactcagaggttcagatcgatgttgcagaatggaattgaccttagcacagttgatgtgagctatgttagtagccgctcatgggatttcc

SEQ ID NO: 20955 - DNA, 185 bp, Gossypium hirsutum
  Clone ID: LIB3146-035-P1-K1-C2
cccacgcttccgcccacgcttccgtccactttttcgaaaaattggcaaacagaaccagagaaggggttctctaatatcatttttaacaacataccttctatcttagtcactccaagctcagagagatcactttctagttcctgacagaatgtttgctacttcatctagaatagctgctctaaatc

SEQ ID NO: 20956 - DNA, 363 bp, Gossypium hirsutum
  Clone ID: LIB3146-035-P1-K1-C5
aaatttctttctctttggtcagtattagtagatcattaagatggagaagaaaggttttagttagattgatgctactttttctgggtttttcttatcttcttctttcctgagctgctgttcccactactagaagcctcaaatcaaacaaggaactcccttcttctgtccaagatttacttgctcaggatgtaatggaattgagtgatggagaggaagtgataacggtaggagacagattcaatggggaaaggatgttaatggaaagcactgattattcagggtcaggtgcatacaagaaccatgatcccataacttcaatgagagcttataaaaacattaagacccataaccctatttgtttta

SEQ ID NO: 20957 - DNA, 459 bp, Gossypium hirsutum
  Clone ID: LIB3146-035-P1-K1-C6
gaagaatctcatattacaaccattgttgcaggaacttttggttatttggctccagagtatatggcaagtgggagagcaactgagaagactgatgtctatagttttggggttttggctcctgctttcttccttcttctccttcccttcttttcccttttttcttcttcctttcttctcatctttatttcttcttttcttctccctcttctttttctttatcttctttctttctttttccctctttttcttctttcttttctcctcttcctcccttcccttcttcctcctcccctctctttccctccttctctccctccttttcccttcttccccttctttcaactactttactctcttcttctattcatcctccttcttttcctctttttctcctccccctcttacttttctttctatctcttcatctttcctcattttctcttctcttccttttttatt

SEQ ID NO: 20958 - DNA, 189 bp, Gossypium hirsutum
  Clone ID: LIB3146-035-P1-K1-C7
aattcctgaaccactgttttactggttagactagcttctactctagtcattagaacgagaaggtatcattttgcaatagttctaatctcttatgtatgcttctgagcttgagctccattgtagcagccctttcttatgcttaatggagttttttctatgatatgattatgctgaggaattatatattct

SEQ ID NO: 20959 - DNA, 58 bp, Gossypium hirsutum
  Clone ID: LIB3146-035-P1-K1-D5
gttagttgtcggggatgtttttcgagcccctttccatcctgctcttttgtgtattatg

SEQ ID NO: 20960 - DNA, 255 bp, Gossypium hirsutum
  unsure (1)..(255): unsure at all n locations; Clone ID: LIB3146-035-P1-K1-E1
gncttactcaagacctctccaaggagcctttgtgctattttgttatcaccattggcaaaggaggccgggatcatgcctgggattgctattgccatttccaaaaaatgcaatattaggaacaggcaagctggcaaaaaatgtggaaggtacacctgcccatttgaaagaaaccatgtaggagaaaaattatgagtaatctcagttatttactaataggagagagagcttattaataaagttttgatgctgatttac

SEQ ID NO: 20961 - DNA, 140 bp, Gossypium hirsutum
  Clone ID: LIB3146-035-P1-K1-E5
ttatgttctgactataggcagtaaattcatgtatctggttcgttaaatgcttctttggtattagtgcatctgggggggaggggatttaaatttttaccagacccaatttactgtggaaggtccggagccagggagaacct

SEQ ID NO: 20962 - DNA, 280 bp, Gossypium hirsutum
  Clone ID: LIB3146-035-P1-K1-E6
gccacgcgttcggtagtctgaaggaaacttctcttagtatatgtgtttctagatgagcatgggaacatacagtgggacataatgtcagatcagatttatctgttgagattacagatgaggcagatgatgttgctcccagcagcattccacttgaaatagtgtgtgatacattgtcacatttgcgtacacagggctggccttgtcattgttcagattcagtctgtgttcagcttgttagcctgttaatctgaacttgtatgcatctttacctagttttttt

SEQ ID NO: 20963 - DNA, 227 bp, Gossypium hirsutum
  Clone ID: LIB3146-035-P1-K1-F1
cccacgcgtccgttcatttcttcggcgtacgttgccccagaaaccagagaaagcaaagatatgagtgaaaagagagatatatatggattcggcctgattctgatagaattattaacggggaaaagccctgcggatgctgaatttggagatcagcaccaaagcatggtagagtagggcccgttattgctactcagattgtcatcttgatatgagggttgatcccatga

SEQ ID NO: 20964 - DNA, 431 bp, Gossypium hirsutum
  Clone ID: LIB3146-035-P1-K1-F4
cgccaaagttccaattcccgttggatttgggttccgttaaagatggagagaggaaagaaacgcagaagagaagcagaagagatcgaggctgaaaatagagacgctaatcattctctttccctagagcaaaatctcagctttagcgatactaatgtggcccttcgtatgatgcgagctcagtttcctcaaattgataaggtcgcaattcaaccttttattttacagtcacaattgtatagcagtgtaaaggacagaactcaagtggatagggagctagagtctctaaggagggacaaggtagtgcgcatattcaaactaaatacagggcaagatgatcatggaataatgtttttagaagattatctaaaacagttagagcatgttgtcaaaagaatggaagaaaagaaacaaggtgatgttgatgtttttaa

SEQ ID NO: 20965 - DNA, 182 bp, Gossypium hirsutum
  Clone ID: LIB3146-035-P1-K1-F5
tcggaaaattgatctttggactatgaaggaaatggagctcgaagatcctaaaaggaaaacaatggtgattcgatctcgcctgtaaaatactaggaaaagctaatgggtaaattgatacttcaattataaatatttcgaagatggacttttttttattgtaccttgttaatggttaagctata

SEQ ID NO: 20966 - DNA, 97 bp, Gossypium hirsutum
  Clone ID: LIB3146-035-P1-K1-F6
tccacgcgttctctctatctccgtcacagttttttcctacaagaccttcctcatttcctaaagtggtatctctttccataactcctattgacccctt

SEQ ID NO: 20967 - DNA, 336 bp, Gossypium hirsutum
  Clone ID: LIB3146-035-P1-K1-F8
caatgtcataaggagaagaaaatctgagattaaagaaattcgagaatcttgcaaaaccaggggagataaagcatgacatattgtcaagatttattgagctaagtgaagatccagaaggaaacttaactgacaaaagtcttagagatattgtcctgaattttgtgattgctggccgtgacacaacagctacgactctcacatgggccatatacatgataatgaccaatgctcgtgtagctgtaaagctctactcagaacttaaagcttttgaagaagctcaagcaaaggaggagaggttttcatttctaccatgtgactcgtaagtccttgtttcct

SEQ ID NO: 20968 - DNA, 137 bp, Gossypium hirsutum
  Clone ID: LIB3146-035-P1-K1-G3
tccacgcgtcctcaccaacctgagtgcgatctctcgccaagcgtgttactataatgcccaagaacattcttttggctcgtaagatcactctctatcgctcttaatttccaagtgcgtcgatcacttaactcagaatg

SEQ ID NO: 20969 - DNA, 396 bp, Gossypium hirsutum
  Clone ID: LIB3146-035-P1-K1-G5
gttaggccctgaagcctggaaagatagctagtcttgcaaaatctgttcgtgtacttgctgagatggaagagcctattggtcaagtgttaaagagaacagagcttgcagatggactcatcttggaaaaaacgtcttgccctctaggtgtcctgctgattgtatttgagtctcgacctgatgccctagttcagatagcttcactggccattcgaagagggaatggccttctgctgaaaggaggcaaagaagctaagcggtcaaatgcaatcttgcacaaggtcattacttcggccattccaaaaagcattggaaacatactaattggacttgtggcttcaagagaggatattcctgatttacttaaggctaggtgatgggatagatctttggatcccc

SEQ ID NO: 20970 - DNA, 322 bp, Gossypium hirsutum
  Clone ID: LIB3146-035-P1-K1-G6
ctcagtccctggcagcagtgctcccccaatacaaaaatagtagtttctgttagcagtttgcctgaatctgctgcaattagcatctggctatgggtttgggagttctaccaatattcctggaggacttcctctgaatccgcctacagcacctgcaggcacaaccattggctatgatgatattctgagttctcagtacaaggacagcaatcatttgatgtcgcttcaacagactgagaattcggccatgtgggttcatggccctggctcacgaacaatgtctgctgttcctggaagcaattattacagctttcaggggcaaaac

SEQ ID NO: 20971 - DNA, 214 bp, Gossypium hirsutum
  Clone ID: LIB3146-035-P1-K1-H1
ccacgcgtccgaattatcaccaatccctgtttcaagaaagtgtttcaaagaaaccaaattcaacgctgaagaagtggtttttaaagagtatatccacaccaccaagtgcttaatctccttccatataatctcattatcaaccgtattcgaccttcttcttttattcaacaacacctacttttctttccataaagaacatttcttattatttaat

SEQ ID NO: 20972 - DNA, 387 bp, Gossypium hirsutum
  Clone ID: LIB3146-035-P1-K1-H5
aggtcttaaagagcctccctgatgcagagaaggatccggcagataaacaaagtgaaaccatttcatctcaatgattttcatagtaagtttgatatcgagcttgctgttagtcggttttaagtcaaggcagtttgtttaggccaagaaacaaagaggtaaagtattttacctagttgggaattgcatgtgtttgtttttggccactttcgaattccttgtttagatgcaattgttgtatatgatttaatgttgcagcaaagatgatctgcatctctatttatgaacaaatattgtattttgttaattcaacatcatctaatttgtacttgtcatgcaacttcgaaccttattttaatttttttatttcctttctttttagggcggccg

SEQ ID NO: 20973 - DNA, 56 bp, Gossypium hirsutum
  Clone ID: LIB3146-035-P1-K1-H6
atctgagagctaacccatgcaatacaataacttttaaatagaaattagaaaagcaa

SEQ ID NO: 20974 - DNA, 306 bp, Gossypium hirsutum
  Clone ID: LIB3146-035-P1-K1-H7
agaaaatggagataggaaccgtcatgggcgccgggtttgtagcagtttagccgttacccagttgtaggttctcgctttagggaagagaagtctcattttagtctatgtaatcaatgctacagtgagggaaaagttccccctagctttaaacaggatgaatataaattcaaagagtatgggagagtagccgaagcgatgtaagataagtgcatgtactttactttgcaatcccacaaaatttccgtaactagttgggtttataggtcaattttacttcattcatagttcccattttccatttggtgt

SEQ ID NO: 20975 - DNA, 138 bp, Gossypium hirsutum
  Clone ID: LIB3146-036-P1-K1-A1
tcggacacgcatccgatgtttgaaaaagtgcttttaacacgagggatacactacgattggggatggatgtactgcaaattctgaatatagagccctcttttcgccgaatattcatcagaatggaaaataccataagag

SEQ ID NO: 20976 - DNA, 181 bp, Gossypium hirsutum
  Clone ID: LIB3146-036-P1-K1-A2
aacacgcatccgattgttcgaaacaggcgcttttaacaccgagcgatacctacgattgcaggtggatgtgctgtttataccgttcacagccctccctctcatcaaattactcatcattatgaaaaatactataatattttccctcaccatattcaacttaaccaccatatttcatcctttt

SEQ ID NO: 20977 - DNA, 271 bp, Gossypium hirsutum
  Clone ID: LIB3146-036-P1-K1-A4
cccacgcgtccgatcgtaatgatgaggacagtcgctgtagttgcaatagcaccgagaggagccgtgctcggaatagagacagggaacatggacaggatagggtgaaaacaacagttaaccagatgcttttggatgccaaacaactaatagatttgattcctatgaccaaggaggaactattatcatacgagataaactggaatgtgtatgatcagcatgcattgtatgagagaatgagaccctggatctcaaagaaaattatggagttttt

SEQ ID NO: 20978 - DNA, 267 bp, Gossypium hirsutum
  Clone ID: LIB3146-036-P1-K1-B1
gcttcatgaactaagggaagaacatctggcattttctccaaaacctgatcaaaaagatgaccaaaagcagtatttgaaccagagaagaaagtttgggtttatccacatatctcttccattgccaaagcaaaacacgaagaaaccacaagctgtaaacacaatgtgataccatttggatgcatggtaattattgaacagtggtaattctgtgttcaaatatagtaacatgttttattcagtttgcctcatttgtttgtgttgtcttct

SEQ ID NO: 20979 - DNA, 58 bp, Gossypium hirsutum
  Clone ID: LIB3146-036-P1-K1-B2
gcttaatgaactaagggaagaacatctaatattttcttcaaaacctgatcaaaaagat

SEQ ID NO: 20980 - DNA, 136 bp, Gossypium hirsutum
  Clone ID: LIB3146-036-P1-K1-B3
cccacgcgtccgattgtatctctcagttccctatccgctgccgtagcactacttgtgttggtggttggagaatcaaaccatacccatactacaaattcacaaatctgtcctatcgatctgactagtcttaacttgt

SEQ ID NO: 20981 - DNA, 147 bp, Gossypium hirsutum
  Clone ID: LIB3146-036-P1-K1-B4
gttagctggtcatgttgatgaagtgaatgtgcaacatgagactcttgaagggatttttactgtctgtgtttcgactagcgctaggcttaacatatatcaggttgctagtgtaacctttgacttgctgttactccttgtgttgggatc

SEQ ID NO: 20982 - DNA, 399 bp, Gossypium hirsutum
  Clone ID: LIB3146-036-P1-K1-B6
agacaacaaattcgagaaccttaacttcaatatgttaaacttggactccaagattggagataatgtaagcaaaagctcattccgaaatggtacctacaatataaatgctgtttaccagaaaaataatagcaatagcctgggaaacctggctggcaacaaatatagcggcaataatcatagcagcaaatatgtcaataataacagcagcaccagcaataacaacagcaacgagaacagtgcaaacaatgctgttgacaaacggttcaagacattgcctccagctgagacactcccgagaaatgaggtgcttggaggatacatttttgtttgtaacaatgatacaatgcaggaagatctaaagcggcagctatttggtttaccaccaagatatagggactc

SEQ ID NO: 20983 - DNA, 126 bp, Gossypium hirsutum
  Clone ID: LIB3146-036-P1-K1-B7
acaacacaaactctcaaaccttatctcaattttgcgaaacgcgaactccaagacgggaggtggtgtttaaaaaaactcttatcaaaattatacctacaatataaatgctttttaccacaaaaataa

SEQ ID NO: 20984 - DNA, 57 bp, Gossypium hirsutum
  Clone ID: LIB3146-036-P1-K1-B8
agcccttataatatgcgaaggcattcgatgtgttatcactcggcagacgaatactcc

SEQ ID NO: 20985 - DNA, 257 bp, Gossypium hirsutum
  Clone ID: LIB3146-036-P1-K1-C2
cccacgcgtccggtcgtactcccctgctccgagacgaagaggaaactattcagtttcaccagatagaggacatgaagaccatccaagatccccaagaggtcctccacaaggttgtggcggtgattacaatcccggaccatattcttcaggatatgaaaatgctggtggaaatggctatggcgagaagtctgcatacgaatctgatgaagcaccacttgtctgcacggaggccatcgccacctggtagagcatcaagg

SEQ ID NO: 20986 - DNA, 186 bp, Gossypium hirsutum
  Clone ID: LIB3146-036-P1-K1-C3
gaaattccgggtacgactgccgcgtccgatctacacaaaatttccagatgagaaatcacttagcgtctcccacagggatgctggtgtgagctatggaaaaacagctgggccagattctcaactattagatgaaaattctcttgattctgattttccggaaatgaaatctttgcgtactatgaagaa

SEQ ID NO: 20987 - DNA, 73 bp, Gossypium hirsutum
  unsure (1)..(73): unsure at all n locations; Clone ID: LIB3146-036-P1-K1-C5
acccacgcngtccgcccacgcgtaacgcacacacttgagtatggtggttgaaaacttttcgctggaaaacaca

SEQ ID NO: 20988 - DNA, 296 bp, Gossypium hirsutum
  Clone ID: LIB3146-036-P1-K1-D1
ctgaaagtttgctcacaaataggtttgtgttcatttgatggaactcgagatgtaagtatgggaattgaacgtgttgtgaatgagaatgctggaaaagcctctggtaatgtccatgatgcaatgtgttctgtttgtgagatggcagtcatatgggtgcaaagccaacttaaacagaaccagactcaggagcgtatacttgattacgtcaatgagctctgtgaccgtttgcctagtccaatgtgagaattacttgttgattgttacaccctatcttttattcctagtgtctccttcac

SEQ ID NO: 20989 - DNA, 132 bp, Gossypium hirsutum
  Clone ID: LIB3146-036-P1-K1-D2
acgcggacgcgtgggaaagatctttgtgatcagatgttaatgattcgtgctcttccgtaaacatgtttccatggctcctgaagttgagcacaaaactgtcacgggtcttttgagaatgattgagggtgagag

SEQ ID NO: 20990 - DNA, 409 bp, Gossypium hirsutum
  Clone ID: LIB3146-036-P1-K1-D4
ggcacaccaatgcaaagttgcacaaaaaacaggtgagaattatgagcacaaaataaaatccccaattttgctgatcattagcaatggcaaccaacaccacccaagagcaacatcctgcagctggtaggcaccaagaagtcggccataagagcctttcgcaaagcgatgctctttaccagtatatatgggagactagtgtatatccaagggagcctgaacccatgaaagagctcagagagttgaccgctaagcatacatggaaccttatgactacatcagctgatgaaggacaattcttgaacatgcttattaagctgatcaatgcgaagaataccatggaaattggagtttatactgcttattctttgttagccaccgccctcgctttacccgatgatggaaagatctt

SEQ ID NO: 20991 - DNA, 178 bp, Gossypium hirsutum
  Clone ID: LIB3146-036-P1-K1-D5
cccacacgtacgaacaatgctgcattaattttgtgagaatatacacaaaaagactgggcatgtgtatttttacaacatgaccaacgcccaccaacaccacccacgatcaacaacctccggctagcaggcaccaagaagtcagccataagaccctttcgcaaagtgattctctatacca

SEQ ID NO: 20992 - DNA, 139 bp, Gossypium hirsutum
  Clone ID: LIB3146-036-P1-K1-D7
gccactcttattaaaacatacacttttagtttactcaaaaacatgatctacatcgatgatgtttttatctcatcattaactctcccatccaacaacaatataaatctatataattttatattattcgatccataaatat

SEQ ID NO: 20993 - DNA, 385 bp, Gossypium hirsutum
  Clone ID: LIB3146-036-P1-K1-D8
ataaatggaccgttacagatcgctttcaacgttagtgcgcatcgagaaaatacttggggctgtggttagatgactaatgactatcaacacaacccaaaaccagcagcgtacaactggatggctccaggaacgtcgccataagagcctttacgcatagcgatgctctttaccagaatatattggagactagtgtatatccaatgtagcctgaacccatgaaagagcttagatggttgaccgttaagcatacatggaaccttatgactacatcagctgatgaaggtcaattctcgaacatgcttcttaagctgatcaatgcgaataataccatggaaattggagtttatactgcttattctttgttagccaccgccctccctttacc

SEQ ID NO: 20994 - DNA, 175 bp, Gossypium hirsutum
  Clone ID: LIB3146-036-P1-K1-E1
tcctaccttcaacagggatatcctccggaggggtatcccccacagggatacccaccggttggatatcctccaccagcgggatatcctccacaatggcggatacccacctgcagggtatcttactaatgtagggttccccccttacatttcattctttttcttcactttctttttt

SEQ ID NO: 20995 - DNA, 176 bp, Gossypium hirsutum
  Clone ID: LIB3146-036-P1-K1-E2
atggagatgaacaatataggcatgagcgcaggcatggggatgaacatgggaatggggcaggcaacccacatgcaatcacaaagtgggatgcctggcggttacaaccctatgatgggttccagtgcctactctcaacagccacatggtggtgatggtggctacccgcgcgcttttct

SEQ ID NO: 20996 - DNA, 198 bp, Gossypium hirsutum
  Clone ID: LIB3146-036-P1-K1-E3
acgtcacgcgtacggaatactcatcagattcttgcatggagaggatcctcgaacgggatgagcggtatgtgttatgcatagaggcaacttgctgcaaatgaaaatgaacgaactggtagttggactttgtaacatgcaaaacttaaagtcaggatggaggtgttacaaacaaaccaatcgctttatatgggagaagat

SEQ ID NO: 20997 - DNA, 265 bp, Gossypium hirsutum
  Clone ID: LIB3146-036-P1-K1-E6
cccacgcgtccgcccacgcgtccgcccacgcgtccggtacttttcaacgaaacccaagccggaaatgaagccaatcgagttgaaaacgtcgctagagcaaacgcagaccataagcagagtcacctttgacattctcaaggagcatgggcccctcaccgtcggtgatacttgggaacgagtcaaggtcagttgtttagtagactataatctgtattcattgcgtatctatatttgttgtttccacatctaattaagccaagcccat

SEQ ID NO: 20998 - DNA, 124 bp, Gossypium hirsutum
  Clone ID: LIB3146-036-P1-K1-E7
attgggttgaacatgactggctcttaagattatgataccaccaccatcaaaattgggtgcggtaagaaatgaactagtaggtctgaaagagcattagtgaagttgatacgtgtaatgaatgtgt

SEQ ID NO: 20999 - DNA, 310 bp, Gossypium hirsutum
  Clone ID: LIB3146-036-P1-K1-E8
cacgggttgaacatgagtggcgccgaagacgatgataccaccaccgccaagattgagcgcattaagaaaagaactagtaggtctgaaagagcattagtgaagttgattcgtgcaaggaatgggttgtcggagaacatgctcaacgcaacactggtggtagcggcgctggtcataacagcaatctaccagtcctctttaagcccaccaagaggtctttggcaagtgagtatcgttttaaatttctgttgggtgaagaaacaaggaaaactgaattcttctcatcccgctttattactattccgcttcttct

SEQ ID NO: 21000 - DNA, 410 bp, Gossypium hirsutum
  Clone ID: LIB3146-036-P1-K1-F1
acgcccacgcgtacgcccacgcgtacgaccacgcgtacgagtgagtttgtggatattttgatgcattacaatattccaatggctttggtttcgactcgaccaagaaaaactctagaggctgcaatgagaacaatcggcatcgaagagtgcttcagtgccattgtggcagcagaggacgtatgtcgaggaaaacccgatccagaaatgtttctatacgctgcacaacttctagaattcattgcagagcggtgcattgtattcggaaactttaaccagaccgttgaggcagctcatgaggcacggatgaagtgcgttgctgttgctaacaagcatcttgtctatgagctcaaggctccagacttggtggtaagacggttagacgagctttttattgtcgatttaaagaacct

SEQ ID NO: 21001 - DNA, 411 bp, Gossypium hirsutum
  Clone ID: LIB3146-036-P1-K1-F2
aagccaccgtctacgaggaagcagactgaaacctcggaggaagatgaggaaatgttggagttcattaggacattgcgggagctgtatatcaaggaattggaggacgtgctgtctaggatgtaccatgacgaaaagaggtaaaggatcaaggatgtgtatgtgcaactttatgttcaacggtaagccaagcagtcttgcctagtaagaaaactgcagacaccatacatgtatacacccgatcagttgagggaaacgaacgctcatgtgaggaaaatcatgtagagaaggaatgtagtagtgcgtacgacaatagttcagaagaggacaaccatagagacaaaggatcttctagtaactgttcagacaacatacaattgactggagaagactgctcgttgataccgtcaaaat

SEQ ID NO: 21002 - DNA, 237 bp, Gossypium hirsutum
  Clone ID: LIB3146-036-P1-K1-F3
cagcttaccgcttaattatatatgatactatttaatataatcatcaactagaccaagatttaatcatctttttcctgtctgtttgatttatgtttgttcagtttggtcggagggatgatgttcatgcccctgcttgcgggagcctttaatgagttcatttgtcatggcattttcatgctttattttttacggctttttcttcatttgtagtagtaataactcaacattgatgctaac

SEQ ID NO: 21003 - DNA, 253 bp, Gossypium hirsutum
  Clone ID: LIB3146-036-P1-K1-F4
cccacgcgtccgcccacgcgtacggcttgtaaagaagtgtcgatgctgccgatagcaacggtgtgccgagttcgttgacatggtttcagcgttgatgctttaagcaaaaatataatggatatagtcccttcagctgtctcacaggttttggcttattgcccatcaataatataaacgttaagagaagaaagtcatgaataatctgtatgaaagattggagtataataagtattttgctctttagccctccact

SEQ ID NO: 21004 - DNA, 219 bp, Gossypium hirsutum
  Clone ID: LIB3146-036-P1-K1-F5
ctcatacgtgctgtaatcaatttggttttcaagttcaacctcaacatgccccttcttccctttaaataattgatggcatagaatgtttacaatgatggtgtgttgttcctttctttttatcttcacttgtccttttggttattgctgatgatgattatatacgattgcgagttatcatatccacaagagaaaagaatacatatgaaaacagaactgaag

SEQ ID NO: 21005 - DNA, 406 bp, Gossypium hirsutum
  Clone ID: LIB3146-036-P1-K1-F6
cttggaaatgtgccagttcccaatcaggcttgtagtgagatcgacagtggaaatgcatggagaggacattatgatgatacttcagctgcctcttttaacagataaaaaagtcaaaaacaaattgattggactttacataggctcattggtggatgccttttcattaagaaagatcaatttaatgttcttccaaattcagaggtgttaaaaccactgccatagaattggcagaaggatggatcttgttctaactttagcatccacttttttttgactttgccctttagtcactagtagtttttcaatgaggtaaggtgcaaaagggagctttgaggcaagtttatcatttatgtataatataaccatattctaaaagctgatctgacattatcggcacgatttgtag

SEQ ID NO: 21006 - DNA, 407 bp, Gossypium hirsutum
  Clone ID: LIB3146-036-P1-K1-F7
gtcaattactcttcagtctcagccgatcttaaaccatgggccgagttcgcacaaagacggtgaagaaatcgtcccgtcaggtaatcgagcggtactattctcgaatgaccctcgattttcacaccaacaaaaagattatcgaagaagtagctataatcccatccaagaggctacgtaacaagattgccggcttctcgacccatcttatgaaacgtatccagaaaggaccagttcgcgggatttctcttaagcttcaagatgaagagcgcgagcgtcgcatggattttgtcctcgatgaatcggcacatcaaggtcgaccaaatcgaaggtgataaggaaacactagatatgctttcggttcttggcatgggtgatattcccggccttgataaggttgatccggttgc

SEQ ID NO: 21007 - DNA, 401 bp, Gossypium hirsutum
  unsure (1)..(401): unsure at all n locations; Clone ID: LIB3146-036-P1-K1-G1
cccacgcgtncgnccacgcgtncgnccacgcgtncgctcttagaatgagaacatccccaggcccttattctgacctatcaatatcaatggctgaattggggctcaagaaagaagtaagagagatgctacccgtcattatatacaaggagaccttctctatacgagatactcaatgcgccgtatgccttggggaataccaagcggaggataaacttcaacagatacctgcatgtggtcatacatttcacatggactgcattgaccattggcttgccaaccacaccacttgtccactctgccgtctttctgtcctcacttctgataaattgcctgttattcaagctgcaaatcctcaggtgtcatctaatccagtcaatagtaatggattagctgttcaaaca

SEQ ID NO: 21008 - DNA, 305 bp, Gossypium hirsutum
  Clone ID: LIB3146-036-P1-K1-G2
ttttcctcactgactcacctaattcattgctcgaatgcgacacgttcgaagaggctaaagttcaaccccaaaacgatccgaggtattgataggaagagttcaatgattagagtaaagacagagaggctgccaagttttatatacatggaggccgtgtgtatacgacctgctcaatccgccgtaagcttagttgagttccatgagttggataaacttaaacagatacctgcatgagtgcatacatttcacatggactgcattgaccattggcttgccaaccacaccacttgtccactctgccgtct

SEQ ID NO: 21009 - DNA, 87 bp, Gossypium hirsutum
  Clone ID: LIB3146-036-P1-K1-G3
gtctcgattatcagcataaaagagtgacttatttattgtcctatgaatcctaagaggtctgggggaggggtcagacttaagagatgt

SEQ ID NO: 21010 - DNA, 402 bp, Gossypium hirsutum
  Clone ID: LIB3146-036-P1-K1-G4
gttcagatcagttctcattggaacttttttagagagagagggaaatggagctctcacagcatggtttcctggaggagctattggctccaagaagggacagttggaccactttttcagctggggcgactgagttcctccctagcggctcatggaactttgattcttttgatgagaatccaactttggctacatcaaatctctccttggttgcattctctccaccaccaccacctgatcaaacccccagctttgaatgtcctttcagcgatcaaccctacccttttgttgatggattcacagtgcgggacatggattcttcgtacaccaacgtcaatgtcgtccacccccacacattttctttcccagctactcaacaagacttcccattcatggttgatgatg

SEQ ID NO: 21011 - DNA, 402 bp, Gossypium hirsutum
  Clone ID: LIB3146-036-P1-K1-G5
tggaaaattcggagctgttttcgcatcaattccaggtccaatcattgcagctttatattgtcttttctttggatatgttggttcagggggtctcagcttgcttcaattctgtaacctaaacaacttcaaaataaagtttatattaggtttctctgttttcatgggactatcaataccgcagtacttcaacgagtacacagcaattaacggtttcggtccagttcacaccggcgccagatggttcaatgacatgataaatgtaccgttctcatccgaagcatttgttgcgggttcattggcgatgtttcttgatgtgacgttgcacgggaaagacaatgcgactaagagggaacgtggcatgcacttgtgggagaagttcaaatcatttaaaaaagatgcaag

SEQ ID NO: 21012 - DNA, 340 bp, Gossypium hirsutum
  Clone ID: LIB3146-036-P1-K1-G6
ctcacacaatgtcgcggatttccaatcaggcttgagggagatcgacagcggaaatgcatggggaggacattatgatgatactttaactgcctctcttaacagataaaaaagtgaaaaacaaattgattggactttacataggctcattggcggatgcctttacattaacaaagatcaatgtaatgctcttacaaatacacaggagttaaaaccactggcatagaatacacagaaggatgaatgttgaattacatgtaaaatgcaccgttctcatactaagcattttttgcactattattgtctatgtgaggtgatgtgacaatggacgttattgacaatg

SEQ ID NO: 21013 - DNA, 386 bp, Gossypium hirsutum
  Clone ID: LIB3146-036-P1-K1-G7
gctagttttattaagactcacatatttagccggaggagacctattgatgggtggaaatacatgatagattagatagggcctaatgcaaggaatggcaagggcagtgttttaaggttaccgagtttgtctgatgcatagaggcaaccagttaaggaggagaagttacaattgaaaccttgattggtggttgagacttgacaccttgagaggtcacataatcaactataccccagttgcagaatctgttcattttgagtagttcttacaataagagcaagcagttatggggaagcaggatgctctggttacaaaaggaggtcctaaaggaaaaagagtagatggcattctatttaagcattggaagggagaggaagagaggataatgt

SEQ ID NO: 21014 - DNA, 241 bp, Gossypium hirsutum
  Clone ID: LIB3146-036-P1-K1-G8
aagaaaaagattgagccaaaagaaaatggtcgatcagcttaccgacgatcagatgtatgcggtcaaggaggcctttagcctgttcgacacggacggagatggttgcattactaccaaggagttgggaactgtgatttgaatactggcggaaaaccccattttgggcatattgaaagtattaagaattgacgtacatgctaatggtaatggtgacattattaacactgaatcacttatactg

SEQ ID NO: 21015 - DNA, 420 bp, Gossypium hirsutum
  Clone ID: LIB3146-036-P1-K1-H1
cccacgcgtccggctgtaaggactgcatggtatgattctaaaaaagtcgttgaacacatcatagatggctatacgaagccattgagaactaagggttgggataaagctcttgtagaattcactgcagcaatgcttgcaaaaggcgagtctgaaacgaagcccccattgtcgaaacgactgcacgaaatctcctgccctgttctgattgttacgggtgacaccgatcgaatagttccttcttggaatgccgagagactttcacgagccattcctcattcgaagctcgaagtaattaagaattgcggtcacttgcctcacgaggaaaaggtcgacgagttcgttagaatggtcgagaagtttctgcaacgagctttcggtggtttagtgtaaccatctctacaagtagtaacctgaaatctg

SEQ ID NO: 21016 - DNA, 365 bp, Gossypium hirsutum
  Clone ID: LIB3146-036-P1-K1-H2
cgggcgagagaccgaaaagcttctatcttctaatctcacaatggcatcttacgggaatgtcattaacgtaccaagatacgattccattagcagcaagttcaagggaaaatgaaaaactgctttgttctgtcgaacttgggtatttcatctgtctttcaacagtattattatgcatctgcatatcttaaagagttgtttttcataaaaatgatgcggttgaaaatatgaagttttaagctcttctattttgaacaaaataaattatttgtctctagctagtgagcaaaacatattagttaaaaataatagcttctgcaaacaatggggttcgcatgtttctgctgaattccatgattttggtcaaa

SEQ ID NO: 21017 - DNA, 377 bp, Gossypium hirsutum
  Clone ID: LIB3146-036-P1-K1-H3
cgccttactttagagcaccaacagggtacctccacgtttgccggacaacaaaggccattagctttaccatcaacctcaggaggaggaggacacagcagagaagatcaagaggatgcttcgaatcaaggaagctcaaggaagagatttagaacaaagtttacgcaggaacaaaaggagaagatgctgagtttagctgagagactagggtggcggattcagaaacatgatgaagagattgttcaacagttctgcaacgaaactggggtcaaaaggcatgttttgaaagtttggatgcataataacacgcacacttcttgtaagaaaccctagaaacagattatgagggaactttagatgtgtacattttttagggttga

SEQ ID NO: 21018 - DNA, 388 bp, Gossypium hirsutum
  Clone ID: LIB3146-036-P1-K1-H4
aaaaacgaaatcattatatctgcgggagcattgggaagcccacagctgttgatgctgagtggagtaggaccggttgctcatcttagatctcacaatatcccagtggtgttagaccaacccttggttggccaaggcatgtgtgataaccccatgaacgccgtttttgtcccgtctcctattccggttgaggtttcacttatcgaagtcgttggtatcacacattttgggagctacattgaagctgcaagtggtgaaacctttagtgcttctgttactactacttcaagaaactatggcatgttctcacctaagattggtcagctatctacggtgccacctaaacaaaggaccccagaagccattggcagagctgttgaatacttggata

SEQ ID NO: 21019 - DNA, 394 bp, Gossypium hirsutum
  Clone ID: LIB3146-036-P1-K1-H5
gagagagaagatagaaagattgagcgtgagttacgtcgccgtcgtgctcaagctcaggctggatatgataaggcgaagaagcacgagcaatcatacttcagacgaaaacctggaggcatgcctggtgggtttccaggtggaatgcctgggggttttcctggaggtatgcccggaggtatgcctggaggtatgcctggaggcatgccgactggcatgcctgatggcatgccgggtggcatgcctggtggcataccataagggatgcctggaaatgctgaatattagaagatattgcatgatcccgaattgttggcgagacttagtgagccagaaacaatgcgtgttattcaagacgtgatgtgcactcgtgctagacgtgcaaagcattaaacaa

SEQ ID NO: 21020 - DNA, 398 bp, Gossypium hirsutum
  Clone ID: LIB3146-036-P1-K1-H6
gaatggagcgaggcctaatagagctgcaacttctggttattggaaagccactgggaccgaggagccgattgtaactcaaatggaaatcaaaaggttggggttaaaaaggctctagtgttctatagaggtaagccttccaaagggattaaaacgaattgtatcatgcatgaatatcgcctcatcgacaacaattccacttacaaacctcaaattgttgatcttgccaacaggaaagcttctttacggcttgatgattgtgtcttatgccggatttacaagaagaacaatacccagagacctatggagacagacaaagagtacaccatggagggcatgctggcaacacaactgccaacttctagccatcaaaatctaaacgcttttacattaaaagctac

SEQ ID NO: 21021 - DNA, 106 bp, Gossypium hirsutum
  Clone ID: LIB3146-036-P1-K1-H7
tcgaaaatcaaaaacattaaatatccgttcacttttacaagcccacaaatgcaaatgctgtgtggtttaccatcaacctctcatgtccaatcacacaatgtccaag

SEQ ID NO: 21022 - DNA, 316 bp, Gossypium hirsutum
  Clone ID: LIB3146-036-P1-K1-H8
aatcttctatcaaaggctgcgtcaaactgagctatgatgccctccgtcgccccgggataactgattccccttttggtataaaagatttcgggtactccatatgcaccataacgcacagcaaaagaaccggcattgatctattgtacccctttcaagaacccaggacaaagacaaaagatatggctactgtcttcctttttaagtctgcaccgaggacaccaagcggactttggtacttttttagatcttagattaactagttaatgaatatagttccaggaaattcgccagacccgtctttttattttacctgggt

SEQ ID NO: 21023 - DNA, 414 bp, Gossypium hirsutum
  unsure (1)..(414): unsure at all n locations; Clone ID: LIB3146-037-P1-K1-A1
cttgttcggaaccaatggctttgatagatcccaaggtaatggcttttgatagatcccaagatagagtttcttatgtccgaagtaaacgaagagaaaacatctggagactttagagaaatggactaaggttggcgcatgaagtcatttcttttgttaaaaagaaaatggataaagcttctagatctggagacttgagagatatcaaacttagttttatcgggcattctatcggaaactttataataagaacagcattagcagagagtgctatggaaccttacctgagattcctccatacatttgtgtctctatctggtccacatttgggatatctatacagttcanattctttattcaattctggactgtggcttttggagaagctcanggngacacaatgcattcatcagctca

SEQ ID NO: 21024 - DNA, 290 bp, Gossypium hirsutum
  Clone ID: LIB3146-037-P1-K1-A10
gatcaacaaggttttgtttgcgtgcttctttgccagataataatggtgaatttaaattggagtatacaccatggttggttgttggattgtttcaccctggaaataagttccattgcactcgacacaatgttgcatctgaaaagattgactcactttcacaattgaaagggattgcattgaatactatacggtccaaatcttttagtactattaggggctattgctcatgtgacatttttagtgctatataccctcatggagctttttgattaccttattgactccatttt

SEQ ID NO: 21025 - DNA, 452 bp, Gossypium hirsutum
  Clone ID: LIB3146-037-P1-K1-A11
ctccagtgaatctaaagacctaacagactcgcacatcaaaaccttgcatgactctccactagaccagaaaacaaagaagaaattgacacgctcgagtgctcagccttgtaagatgacgagaaccagcctaagtggaagcattcaggctaaggggattaagcacgagaaaggaaagagcttgaatttccaatattcaacagaagaacttggaggtggactcaaaaattctgcaaaaggtgatagtggaaggaagtcaggtgctcggagatgtctgaaacctgatcctgtataccagaaacaaagagcttgtacaggaggtggtgcttttagaacttcaaacccctctttcagtgttgtgatacacccatcacaatatggttcttgtagtactgtgcacataccggaggaatttggcaagagatatttgaagaaaaacggagaaatgatgctga

SEQ ID NO: 21026 - DNA, 367 bp, Gossypium hirsutum
  Clone ID: LIB3146-037-P1-K1-A12
cccacgcgtccgcccacgcgtccgctttttgttcaactaggcctatgcgcatagggccggctactaacaagaagactggtgctgcacagcaatatccagcagcttcatctcaagggactcagaacgagaatgatccaaataatacaactatatttgttggtaatttggattctaacgtgactgaagaccatttgagagaggtcttcagcccatatggtcagttggtgcatgtgaagattccacaaaacaagcgttgtggatttgttcaatttgctgataggagttgtgccgaagaatctctccgaatattgaacgggactcaggtgggtggacaaagtattcggctttcatggggtcgtagcacatc

SEQ ID NO: 21027 - DNA, 179 bp, Gossypium hirsutum
  Clone ID: LIB3146-037-P1-K1-A2
catttttctcacttatttattctttcatttatttatttggaaaaactcacacaagtttaggaagaagaagaagatgtcgtggcaaacgtatgttgatgatcacctggtgggtgatatcgaaggcaaccattttttttgcggttgtattattggcccaaaacggaggggttgggcttaaa

SEQ ID NO: 21028 - DNA, 412 bp, Gossypium hirsutum
  Clone ID: LIB3146-037-P1-K1-A3
cccacgcgtccgattgtttagaagcaatgacatggttcaagacggtcagttgatgtatggcaatctgtttgaagcgagcttagatgcagtggttcatgcaatggagaaagaagggtttgcagaagttgaagtggtcgtgtcggagacagggtggccaaagggcggaggggaggcagccagcgtggagaatgcattggcttacaacgagaatgtggttaggagagtagtgggaaatgtagggacaccaaggaggcctggggtgggaattgagatttacttgtttgatatgtttgatgagaatagaaaaggaggagatgagtgtgagaggcattttgggatatttggacttgatggtgtcaaggcctatgatcttagatttaattcagaaaataagttggatgtaaccataaat

SEQ ID NO: 21029 - DNA, 233 bp, Gossypium hirsutum
  Clone ID: LIB3146-037-P1-K1-A4
gcagccaccacaaggactgctccaccttctcctctgttttcaagccaaactccccccttccaacttcgatttggacgaagagaagcaaagatgtcgacggcccgcctcttttggtgaagaacgtgcatggtgggtgtgggggtttgctgaacgtgggaggaaacgggtgccgcgacatgggcagttgctgcagcgccgaaaaaactgctggtagggttcagctttttattggt

SEQ ID NO: 21030 - DNA, 414 bp, Gossypium hirsutum
  Clone ID: LIB3146-037-P1-K1-A5
gacaggtttcacatctcaggtttatgagttatctcctgtctttttgcataaggaatggataatggaacaatgggagaagaattactacattacttcagttgctggtgcttgcaatggcagtgcactggttgtaatgtcaaagggtacaccctacacgcaacagtcctacaaagttagtgacgtatttcctttcaaatggattaataagaagtggaaagaaggcttctctgtgacctcaatgaccgctgcaggcagcaaatggggcattgtcatgtcccgtaatgcaggctatcctactcaggttggtgaactcgatttcctttatccaagtgaggggattcatagaagatgggaaaaaggatatcggattaccgcagcagctgctacagaggatcaagctgcattcatacttag

SEQ ID NO: 21031 - DNA, 294 bp, Gossypium hirsutum
  Clone ID: LIB3146-037-P1-K1-A6
acgagcccctcttgataaagtttgtaccatttgatgtgggatatctaccgcatgtttggccagtggaaatggatctcaagccaaacaggtgaagactgtcaccgcttttgtactgatgaccgcagccatctctgtcgctgtggtttcatgggccaatacggcagcttgtgtcctcagtgctgcagtgtgcctcagatgaagcacggagagctcgatggcatcgtgaacgacttttgtgaacccgaaacacttggctcaaccggattgaaccttgatgtgtctatatacatggtg

SEQ ID NO: 21032 - DNA, 430 bp, Gossypium hirsutum
  Clone ID: LIB3146-037-P1-K1-A7
cccacgcgttcgcccacgcgtccgatcccctacttccactgcttagtctgctgaaggtgaatggaaaattgctcactgagggattgcctaataagccactcgaattgcctgtttttcctttagtcatgggtaaacttccctctttataggccttaaattccaccaaaacatttacaaaataaagttatatatataattcccatatcagaactttgcattggtaatgaaggtaatcacctattggctgctgtgaacttggcttgattattttggcttacaggacggaagcttattggaggaagtgatgttggagggatgaaagaaactcaggagatgctagacttctgtgctaagcacaatatcactgcagatatcgagctgattcggatagaggaaatcaatacggccatggaaaggcttgctaaatctg

SEQ ID NO: 21033 - DNA, 421 bp, Gossypium hirsutum
  Clone ID: LIB3146-037-P1-K1-A8
cccacgcgtccggacccacgcgtccgggctaattggtcttgtatgctattttacggggtattttaagggcttttaatgacctggccaagcaagaaccaaaacgtggagggataagggctacactttttgtctatgataaccattcatttcttttaatttctttctttcctttccttctttactttagaaatttgcttgtcttgtaatgtctttgattcctatttgtttatgattttcttggcagccatggaatggctggagaatatggcatttatctcaaatgtcataagcctggtaatttacttttatgcctacatgaacttcagcctaaccaaatcagcaaccacccttacaaatttcatgggtctttatttttagtagcactctttggagggttcatctctggcacctatttgtcaag

SEQ ID NO: 21034 - DNA, 293 bp, Gossypium hirsutum
  unsure (1)..(293): unsure at all n locations; Clone ID: LIB3146-037-P1-K1-A9
cccacgcgtccgggagggtccgntaatggaagcaactgtgctgagcttgcaaagcaggaagatatcgacgggtttctcgtaggtgnnnttttcttgaaggggccggaatttgctacaggaggcaaccccnnnncatccaaaanngnngccggccaaaatatatatgaggcggatggaaggaaggaattaagggcccaaataaagaagctatttgagggtggagctcatgtgacatatttagtgttatatacccccatggaggtttttgattacttattgaggtccattttccc

SEQ ID NO: 21035 - DNA, 362 bp, Gossypium hirsutum
  Clone ID: LIB3146-037-P1-K1-B1
ggcggcgaagatggaaacggaagtttgaaactgtttggggtgtggttgaaaagcgcgggaaaaaagcggccccgcgaggagaaaattgtgtacggtgggccacacgctaaagagatgaagaccgttgattttcgccacgtggttttgatgatgaagagcggcaaggtttgcaactgagccggtccttatcgacagcaaggaagttgatttcgtacaaatataactaggattaaataaaaagtttttttgttttttggataaaatatttaatatatgggtggaagtgttttcttaactttagaagcgtggttaaaaattgtcaaatgtatttaattaatatttaaaaataaaaatatataatt

SEQ ID NO: 21036 - DNA, 411 bp, Gossypium hirsutum
  Clone ID: LIB3146-037-P1-K1-B10
gcctgggcttatggaccgacgggtcgacaagcaacaaaagttaaatcgattgcaggatgatgatttgtctaatatagggaccaaggttaaaacctgaagtgaaatgggttgaagattgtagaagattacattgatcggagaaagcccttatatttgttagcttgatgagtgctttggaatgactgttgcagttcaaaatttgtctacatataaaatatagtttggtgtttagtgagtaggaaatatagtttttgaaaccatataacatcttttatgcctatcatttacttgtgtgaatttcttctccaaaatctgtgtcatatatatcattctttaccctctttttacattgtatttttatcacactgctttagtattgcagtaaatagtgggttgatctgagtctgatgt

SEQ ID NO: 21037 - DNA, 437 bp, Gossypium hirsutum
  Clone ID: LIB3146-037-P1-K1-B11
cccacgcgtccgggcttactggtgctgcatattttggctacactaatgtttgttccctctgtggtgtcttggttgcaggtatcggatttggccaattgtaatgcctttccctttttgagttttcacaaaaatgcatccatttaaatttcttttatcatcttgtgggacctattttgcgattgcagagaatagggatgcatcagagcttcccaaggttcctagattcgttcctttgcatttgtttgattcttcacggtatctttagttcggagtcattgttaaattctgaagtgccccttccacgcatcatgggtaaggaagtgagactgaatttgatctacctaactgccggaatttactcttatctctctggtatggaactggcaccctataaagtattgtacgccatgggtgccatcgggatcattttctttgca

SEQ ID NO: 21038 - DNA, 446 bp, Gossypium hirsutum
  unsure (1)..(446): unsure at all n locations; Clone ID: LIB3146-037-P1-K1-B12
caaatctgctacttgctttctgctgcactgccaaaaatttatcgaattggttcgggtaggagcacttgaagaggctgttaagtatggaagaattgaattggcaaatttttttcggttggctggatttgatgatttagtgcaggactgtgctgctctgctggcatatgaacatccacaggagtcctgtgtgggataccttctagaagagtcgcaacgtgatcttgtggcagacacagttaatgcgatgatattgtcaacaaatccgaacacgcaagatatggaagggtgcttacagtcgtatcttgagagattactgaggcagctaacagcttgctgtttggagagnaaggtcgcaaatggggaacaggggtgaagcatttcttttacgtcgtgttcttaacagctgatgtgatgatgttngactaattncattccaatttacaaga

SEQ ID NO: 21039 - DNA, 338 bp, Gossypium hirsutum
  unsure (1)..(338): unsure at all n locations; Clone ID: LIB3146-037-P1-K1-B2
gcctaatgtagccttttgcatttacagatggcatgtatgataataaataaatgggcatacgtcctaaatgaaaatgcttccttaatatagtgatgtaaggggaagtataaagcaataaaattgggcttttacttttaaaaaaaaaaaaaaaaaaaaaaaaaaaaaaaaaaaaaaaaaaaaaaaaaaaaaaaaaaaaaaaaaaaaaaaaaaaaaaaaaaaaaaaaaaaaaaaaanaaaaaaaaaaaaaaaaaaanggggggccccctccggaactaaaaatgcccccctggaaaaaaaaatttttgggggacccccccccgggggggggggtggttacc

SEQ ID NO: 21040 - DNA, 89 bp, Gossypium hirsutum
  Clone ID: LIB3146-037-P1-K1-B3
acgaagttatacttatttaataaagacagctactattgatgttatgctctgcttggagaaacggcataaccaaggactgccgtctatat

SEQ ID NO: 21041 - DNA, 244 bp, Gossypium hirsutum
  Clone ID: LIB3146-037-P1-K1-B4
cattcatctcctcttttcttttgtgatttttaagcaaaacccagaaatggcaacaagcaaagctgaagggaaaaggagactgaaggaaatggcggaggaggaagaagaagaagaagaagaggacgaggataatagtactactggtgacgatgacaagaagaaaaaaggcaaaagagggtccaggaccgtggtcggaggcttctgtcttcccgcctgtcaggtcgagaactgcactgccgacatg

SEQ ID NO: 21042 - DNA, 53 bp, Gossypium hirsutum
  Clone ID: LIB3146-037-P1-K1-B5
gcgcccacgcgttcgtccacgcgtacggccacgcgtgcggttctagatcgcga

SEQ ID NO: 21043 - DNA, 415 bp, Gossypium hirsutum
  Clone ID: LIB3146-037-P1-K1-B6
cccacgcgtccgcccacgcgtccgcccacgcgtccgccctgacaaagcaaccccaaagactattatgagaacaatgggagtaaaaggccttaccctctatcacttaaaatcacaccttcagaaataccggctggggaaacaatcttgcaaggaatcaactgataattctaaggatgcttcttgtgttgcagagagtctggacactggttcgtctacaacatcatcatcgaaactggtagcgcaagatttgaatgatggctaccaggttactgaagctcttagagtacagatggaagtgcaacgaagactacatgaacaattagaggtacagcgtcatcttcaacttcggattgaagcacaaagcaaatacctacagacgatactcgagaaagccttgtaagctttgagcgatcat

SEQ ID NO: 21044 - DNA, 424 bp, Gossypium hirsutum
  unsure (1)..(424): unsure at all n locations; Clone ID: LIB3146-037-P1-K1-B7
attcttactattcttaatggactttacattgttttaagcccttcctgtaaagagacttggactggtttgtctactaaagctcttaaagggatttggccttatttcaagattactgctgcttctgctgttatgctttgcttggagatatggtataaccaaggactggtgcttatatctggtcttcttcctaatgcagcaattgcactagactccatttctatttgcatgaactactggaactgggatatcaactttgttttaggctttagtgcaacagccagcgtgcgagtgcgtaatgagctaggggcagggcatcccaagctgaccaaattttcagtcatagtagtgaatgctaccagcattttcattagtacaggtttcactgccatngttatcatatgtcgatccctatttatcaaagctt

SEQ ID NO: 21045 - DNA, 438 bp, Gossypium hirsutum
  unsure (1)..(438): unsure at all n locations; Clone ID: LIB3146-037-P1-K1-B8
ccgtccggnnaccgatcacctgtgtagaaatgcattctccaatggnaaaatactttagtaaacagtctgatcagtgttggtattagaaaaagaaccaagtgtgtcacacagcattgatagaagatcaccacagcaacagtctgaaagttttgttcatcatttagcttctcctactcctccaagaaatccattagcttcaatgtcattgcagaataaatatgtgttgcagtcagatcctcttagtcatccttttccaactgacaatattgacaaatcacctgggggaagtgcatctgctgttgaaagtatcaaaaaacaatctagtcaggttgatacagaaaaggaacggaatgtgtctctactcttaaggtctccaatattagaatcaaatcaaaccacgactgctaatgcaaatactgagctcgatgggggagattt

SEQ ID NO: 21046 - DNA, 164 bp, Gossypium hirsutum
  Clone ID: LIB3146-037-P1-K1-B9
ttcacgcgtccgtccacgcgtccgtaaaaagaaaggtatctaactctttgtgaaaatttcacgtttgtacaaaaatatcatgcgtttcttctcctaatcaatcaaatcttggtctggggttctctttactttttccgggttaaaggaataaagtctatatatct

SEQ ID NO: 21047 - DNA, 349 bp, Gossypium hirsutum
  Clone ID: LIB3146-037-P1-K1-C1
aggggcggcgcgcgtacgtatgatcataccatgggcatggtgatataaaacctgttaatgagttgattactagctcgggggcggtgaagataggggatttcagtgtcagccacttatttgagttttatttaatttttgtagaatgacaatgatgagcttcgtcgttctgccgtgactcctgtggttaccgaacctgagtgttgtctagggtctaaatattacggaaaatatgcttacacgtgggcgtgaggagttacctaggactgaatggtacttttaatatattcatttctcgttgagacacttcatgatacatatgagaagatcgttaatagccctttaatcctgc

SEQ ID NO: 21048 - DNA, 419 bp, Gossypium hirsutum
  unsure (1)..(419): unsure at all n locations; Clone ID: LIB3146-037-P1-K1-C11
cccacgcgtccggtgttttctcagtatttgtaaactgaagcagtgaatctccagtgagcaaaagagctacactttgttttagcgagagtaaggacaactcgagctgactgagaaatggccatatatgggaatttacgtgtcgatgccactcttgcatctcaccaccaacacccttttcgaacctatattcgctcttcaaaggtagagtgtgtgggtttcatgaatggaggatcaaggttttctgaaattacaccaaaatggaatggagtgacaataaatagtcgaagcattggcagcaaaaataaaagatcagttgggatcatgggagattataagttctctccaaatgctgtccaacgagagggtgagagcttnctcttacacgccataaacatgagcttcttcgagcgacttcactt

SEQ ID NO: 21049 - DNA, 319 bp, Gossypium hirsutum
  Clone ID: LIB3146-037-P1-K1-C12
atgggttccattgacacgccgacaattacagagaacggatcgacccagtctcaagccgccgatccttccggcggcgaccacaagcctacggcctcagctaacggagcgcaagtggcggtgtcggcggagcctgaatgaactaaaaagaggcggtcgagtatgctaccgctggaggggggtacttgagggatgcgccgctgaagggacgacagatatgatcctggcaaagttatcgaacgccgaaagatgccctacgctgtgccctatgatcacgaatactacgctgattacaccaaatttaatatgaggcttggggaat

SEQ ID NO: 21050 - DNA, 218 bp, Gossypium hirsutum
  Clone ID: LIB3146-037-P1-K1-C2
cgggaatgaacggccggaccgacgcacgcgtactcacctactattttttttagatgcttttacgctggaaaccactaatgaaccaagtcacggtggtggataaaagaaaatccaagaatttgccacagcataaatagaagatcaccacatcgacagggttaaagttacttttatcgtttatctcctgctactaatccgagaaatccattcacttcaat

SEQ ID NO: 21051 - DNA, 403 bp, Gossypium hirsutum
  Clone ID: LIB3146-037-P1-K1-C3
aaaaaatggagatactatacttcacctagagtccattttgaacgcatggccttgtgttctgttccttagtgattttaatgtaatcacacatcatgatttccagaatgagagttttgtttcatttcttcttctaagtatttcattgttggcatgattcagttgaaagagcaatctaaagctaatggtgctcagaatggggcttcatactatgttcctacccaagatcttaaatcagaatagacgctcatcaacagagcaacttgttggagcagcttcttcagcatacctctcgcacgtgacgactcatggaaatctgatttcaacttgacatcattgttagtgtacatttcttaagtgattcagatgaagagtaacacgaccatttgaactgtgatttgaggtg

SEQ ID NO: 21052 - DNA, 290 bp, Gossypium hirsutum
  Clone ID: LIB3146-037-P1-K1-C4
caaaaaacagcgtaggctacaatccaagttcaagattcgaagatgtcgggaagaggaaagggaggcaagggactgggcaagggaggagcaaagcgccatcgtaaggttctccgtgataatatccagggtatcacaaaaccggcaattcggcgtttggctcgtagaggaggcgtcaaacgtatcagcggtttaatctacgaggaaacccgtggggttttgaagatcttcttggagaacgtgattcgtgatgcagtaacctacaccgaacatgcgaggaggaagactgtgac

SEQ ID NO: 21053 - DNA, 392 bp, Gossypium hirsutum
  unsure (1)..(392): unsure at all n locations; Clone ID: LIB3146-037-P1-K1-C5
aacaaacaatatggttattctttagggaccttatcaaaggaatatgtcttgctattgtacttggtccaccaattgtttctgctattattgtcatagtacagaatggaggtccatatctggctatctatctttgggcatttatgtttgtcctttctcttgtaatgatgacaatttaccctgttctgatagctccactttttaataagttcacccctcttcctgaaggagagctcagacttaagattgagaaacttgcttcctccctcaaatttcctttgaagaaactatttgttggtgatggatccacangatcaagtcatagcaatgcctatatgtatggtttctttaagaacaagcgtattgtcctttatgacacattgattcagcagtgc

SEQ ID NO: 21054 - DNA, 383 bp, Gossypium hirsutum
  Clone ID: LIB3146-037-P1-K1-C7
cttttggccaaaaactctccactgcttggtgaaccgaatctgggattcctccaatcaggtaaaagctttctcttctcttaagggcttcatttgctataacatgagcgtagacattctttgccttaggaataaaatgaaagtcgatctcttggaatctgtcttttttgctttgtatgtctctgataattgctccaatgaccgatttgtctgtatcaatactttggcatttcttaatgatagttttcgaatctcccactacttctattttgtttaaccccaataaaatccctaattttattgcctgtaatattgcatatacttctgccgtgaacggagttgctatctcggagtgcatgactgccttcggtgcgaggatctccccc

SEQ ID NO: 21055 - DNA, 425 bp, Gossypium hirsutum
  Clone ID: LIB3146-037-P1-K1-C8
gttagggccatcaagaagaagatttcgggcaaaaacgctgtcatccaatggttgagcctcgatttgttggaagcttgtaccaccaattgcgagaaggtagcttccgaggtggcttccgagaaagttttggaagagatgatgaagatgattgagaatcccaacacggatcacgggaatagaggaagggctttgcagttgattcgtgcttggggacaatctcaggatcttgcttacctccctgtgtttcaccaaacttatgagagcttgaaagaaagtagtacacatgtaccagtaggtaacgggaaatcaggccctttgcagtattccttggagtcttgtatgagattgcctccctctgaagattatcctgacaatgagacagaattgcatgccagtgattttgcctacaactattggaatttttc

SEQ ID NO: 21056 - DNA, 426 bp, Gossypium hirsutum
  Clone ID: LIB3146-037-P1-K1-C9
ggcgtcgtctgtctgaccaactcttgctggtctgctctgaaaccttcgtcgttttccgtgagttggaattcaaatttctccaagcggagggtcatcaaagcttttttcttcgatcccaatcaagtgcccatccttaatcaagctgttaaggagccagtagccttcatgggtgggatgtttgctgggattttaaggcttgacttgaatgaagagccattaaaggaatgggttgctagaactgtggaagcctctaacatcagtgaggatgatatttctgaaggactccaggaggaagaagacacccctgaacaaattgagattgattgaaatctaatccctgttttgcaaagttgttccataatactcgaaccttactcttttctttcctatatctatggcattatagtgtatccgacttgcatcaat

SEQ ID NO: 21057 - DNA, 356 bp, Gossypium hirsutum
  Clone ID: LIB3146-037-P1-K1-D1
gaaagaaaagaatcaactgagtagtttattatgttgggatttgaccaattattacaaaaatttatgcaaatgaaaagaagaatattgaaatctcaagacagacagtcctcttctgtgtagaaaaaaaactagcaatacatactatgagatatggcaggagttgttcacttaaagaaaacctgttggatatatgcattgctgacctttgattccacttttagttactcttggacaacaaatgatggatatctttccagggtttatgggagcaaccgctgccggatttatcttcacaccagaataccgacaaatatgatattcacgtttggtgttagactgtatgagctgatttgatc

SEQ ID NO: 21058 - DNA, 387 bp, Gossypium hirsutum
  Clone ID: LIB3146-037-P1-K1-D10
cgaatggtcaacgaatccgatctacctcaccttaactacctacgctgcgtaatacgtgaaacattccgcatgcacccggccggaccgtttttaatcccacacgagtcccttcgggccacgaccatcaacggcttttacatcccggctaagacacgtgtcttcatcaacacccatgggttgggccgaaacactaaattatgggacgatgttgaatcgttcaggcccgagaggcattggctggctgatggcgctcgagtcgagatcagccacggagctgatttcaaaatcctgcctttcagcgccgggaaaaggaaatgtcccggcgcgccacttggagtgacactggtgctcatggctttggctcggctctttcattgctttgattgg

SEQ ID NO: 21059 - DNA, 406 bp, Gossypium hirsutum
  Clone ID: LIB3146-037-P1-K1-D11
gaaaaagaacgcagtcttttgatctctgccccaaagcaaaaagttgtcatcttttacaatcacaactactggttatttattttcatggctcaaggagattctaacttccagcaagacatggctaaagaggaagaagaacagaggctgaaatacttggagttcgtgcaagtagccgccgttcacgccgctttgtgcttcaccaacctttacctttacgctaaggaaagatcggggccgttgaaacctagcgtcgagaccgttgagggaacgggtaagagtgtggttggaccggtttatgataaataccatgatgtccctgttgaattccttaaattcgttgattccaaggtgggtgaatcagtgaccaagcttgatcgtcgagtcccttcagtcatcaaacaagtct

SEQ ID NO: 21060 - DNA, 400 bp, Gossypium hirsutum
  Clone ID: LIB3146-037-P1-K1-D12
cccacgcgtacggccacgcgtccggccactcgttctatacttcctacattatatgaaaactctgattccccaaaattaggtttatctcaacccctaaaagatgccggccaccgcagggagggttctaatgcccgcgaacaaccgggtgcatagtagcgccgccttgcaaacccacgggatttggcaaagtgcaatcgggtatgacccttatgctcctaataaagatgattcaaaaaattcatcgagtcagatgactgccgctgctgaacccgatggtgaaaacgcatacgctagctttcaagggctcctagcccttgcccggatcacgggttcgaatgcagatgaggctcgtggagcttgtaagaagtgtgggcgtgttggtcaccttacttttcagtgc

SEQ ID NO: 21061 - DNA, 273 bp, Gossypium hirsutum
  Clone ID: LIB3146-037-P1-K1-D2
tgacgcctataaacagacgaagacagttgatccaaaacagttggtggaatactataagcagcgtttcatggctcagaagtgatggaactgctgacatcttaagatatatacataatatatatatgtatgtatgaaaataagcttggtgtttgttgatgagtgtttcttgtttgttttcttcagtgatatactctatgatagtatgtacttgtgccagtttgaagtatctctagcatgtaatagcatttggaattttacatgaataaatttgaa

SEQ ID NO: 21062 - DNA, 268 bp, Gossypium hirsutum
  Clone ID: LIB3146-037-P1-K1-D3
ccaatttgtatggcaacataagtatttttttgggggggggggggattttggctcatattgagtgggttggttcccaaatttaaactccaaaatgtgacgacagcttaagctccgtcccctagtcccaccttctatgccacaatcttcgtgccgacttagcttgcttccctcattgctattgcatttgagcttgttttttaaaactctgctgactaatgagacctataatatagtttataattcctctctattttctacttatgactac

SEQ ID NO: 21063 - DNA, 226 bp, Gossypium hirsutum
  Clone ID: LIB3146-037-P1-K1-D4
gtactactgaaatgatcaatttcttaaaagcaggccctgcaccaagcggatccgtggaagtattttcacccggtgttcaaaatttggaagttgacactgttatcgaacaacggaaagaggttgcactttcacagacactttttagtgcaatattatcactcttggttggaatgattgtctgggaagctgaagatccttgcatgcctcttgtggtggctctctttac

SEQ ID NO: 21064 - DNA, 407 bp, Gossypium hirsutum
  unsure (1)..(407): unsure at all n locations; Clone ID: LIB3146-037-P1-K1-D5
tcgtccatctcgtgcgaccacgcgtccgatcccctacttacactgcttagtctgctgacggtgaatggaaaattggtcactgtgggattgcctaataagccactcgaattgcctgtttttcctttagtcatgggtaaacttccctctttataggccttaaattccaccaaaacatttacaaaataaagttatatatataattcccatatcagaactttgcattggtaatgaaggtaatcacctattggctgctgtgaacttggcttgattattttggcttacaggacggaagcttattggaggaagtgatgttggagggatgaaagaaactcaggagatgctagacttctgtgctaagcacaatatcactgcagatatcgagctgattcngatagaggaaatcaata

SEQ ID NO: 21065 - DNA, 365 bp, Gossypium hirsutum
  Clone ID: LIB3146-037-P1-K1-D6
gcctgcgctactcgtacgaccacgcgttcgaaatcctgaacatttgcagtcaaaaacgttggatccatgtgaaaaaggatcaagttctgaagatcaaaccactaaatcgccagaatggatttcaccaaaaggatgtccaaatcaaagcattgaaaccaagaaagtttgtgctgattgtggtacctctaaaacccctatttgcagaggtggcccatctggtcccaagtctctatgtaatgcatgtgggatcagaagcaggaaaaagagaagagcaattctgggattaaacaaaggagaagacaagaaatcaaagaaagggaatatcaatggaaacagctacaacagaaaaagtagttcaagcaaca

SEQ ID NO: 21066 - DNA, 434 bp, Gossypium hirsutum
  unsure (1)..(434): unsure at all n locations; Clone ID: LIB3146-037-P1-K1-D7
acgaatttccattggctgctcttctgctagtttctacaaaggtttcgtcatatgatcaagaggagaagcttgagataccagtcaaggcacctccagccccggttcagaccccaactccagcaccctcagccgaggttcttagtcctccatatgaaccaccagctccaccaccagtcaaggttcctagtcctccatatgaaccaccagtcatggctcctagtctcccatatgaaccgacagctcctacaccaccaactcagccacccactccaccatatatacctcaaaatcctacaccagcacctncagccacaactccaccgncatacaagccaccaagtcgaacatttccaccagttataacanaaaaggattgcatacctttatgtggaccaagatgcanattacgctcaaggactaagctatgcttgaga

SEQ ID NO: 21067 - DNA, 275 bp, Gossypium hirsutum
  Clone ID: LIB3146-037-P1-K1-D8
cccacgcgttcttcaactcttgcaatcccctacttccactgattactctgctgaaggtggggggaaatttggccactgtcgaattgcctaataagccactctactatcccattcttattttagtcactggaaaacttgcctgtatataagactcacattccaccaattacattgactgattaacgaaatatatttacctgccatatcacatctctgcatttactatcatggttatcacaacatcttatgctgtttacttcccttgtttgttttgg

SEQ ID NO: 21068 - DNA, 393 bp, Gossypium hirsutum
  Clone ID: LIB3146-037-P1-K1-D9
ctctcttgtttctctcatttcatttgtttaagaatgtctttcatggcggctgcaaaggtttttgcgtgtccttttgtctttgttgccctcttcagcatggttgcttctgatcctgatcttctccaagatctctgcgtagctaataaagctgctgggataaaggttaatggatttccatgcaaggacgaatccaatgttaccgaagctgattttttctttagcggattagccaatccaggagtcatcaacaactctgctgtatcagcggcaacacgagccactgtcgagaaactcccaaggctcatacaccctcggcgtctcgcttgctcggatcgactatgcaccatgtggtcttaaccctcctcacactcacccacgagccaccgcgatcat

SEQ ID NO: 21069 - DNA, 317 bp, Gossypium hirsutum
  Clone ID: LIB3146-037-P1-K1-E1
atcacctggtacacttacaggttctgtttgtgccaacgatgttgatttgatcgctcaggttgccggtgcggactggaatggggagagtgtggtttatgctcatagatcaggagagctggtacggttacctaaaggtgcttcagtgccgtaaacacttaaggttctcgagtatgaactattacacttgtgtcccgacaaggaaattttccacaccatttcatttgcaccaataggccttcttgacatgttaaacaacagcggcgccagtgagatagttgaagtacaaacgacatccgatgagaaactgcagctctttg

SEQ ID NO: 21070 - DNA, 443 bp, Gossypium hirsutum
  unsure (1)..(443): unsure at all n locations; Clone ID: LIB3146-037-P1-K1-E10
ggcctcccagaggttgcaaactactggaaacaagtcattaagattaatgactaccagaaaactcggtttgtgaaccggattgtttcctcaatgtttaacacagtttcagggaagaagattgccattctcggatttgctttcaagaaagataccggtgacactcgggagaccccagggatcgatgtatgcaaagggctgttgggcgacaaggctcttctgagcatatatgaccctcaagtcaatgaggagcagattcagagggatcttgcaatgaaaaagttcgattgggaccatccggttcatcttcagccgatgagccctacttcgatcaagcaagttaatgttgtctgggatgcctatgcagcaacgaaggatgctcatggngtttgcattctgacagagtgggatgagttcaaaaccctcgattaccagaagatttacga

SEQ ID NO: 21071 - DNA, 409 bp, Gossypium hirsutum
  Clone ID: LIB3146-037-P1-K1-E11
cggacgcgtgggcggacgcgaggaggccgtcatttactcctgttcgcgacgaacatagtctggaacaccacccaacagatcgaccatagtccatagcaaaaaagacgacactgttcactagtccaccgactaaaaacccagggctatgctggaaaatgggattactgtctttctcagaggtacgacatggcagacaacaaatttacacagccacttatttatgctggagattagttaaagtagggatataattccaagagattctccatactgtaattctgactttttaaggaagatgtaaatgccatagtttcctgtaaaaagctctaatctcagtctgtataagattatgactaggacccgaattagcctcatgtaatagtttataggcacttctgattgagaaatc

SEQ ID NO: 21072 - DNA, 356 bp, Gossypium hirsutum
  Clone ID: LIB3146-037-P1-K1-E2
cggacgcgtgggatctttacctattgtaggcagggtaaggtgaagactgcggtccgaattttggattgtgttcgtgcttcgggcgattggcatcccgacgtagtctcgtataccagtcttatatggggactttgtaattgggttggtatagaagaagccatctgttatcttaataagatgataaatgaagggatatgtcccaatgttgcgacatggcatgttttcgtccagtgtttgtttaacagcttaggtcatttgggaccgattcgagtcttggatgatattctaggtaacggatgagaacacgtccggctgggattcttttcaggccaaggtcgtaacaatgcaaaagatgc

SEQ ID NO: 21073 - DNA, 390 bp, Gossypium hirsutum
  Clone ID: LIB3146-037-P1-K1-E3
gtggggctcgcaatctggattttgtcaaaagcctcggagcagatgaggttcttgactacaaaactcccgatggtgcagctctaaaaagcccttcgggtcgcaaatatgatgcagtgatccactgtgcaatgggcattccttggtctacctttgaacctaatctaagttcaaacgggaaggtaatcgatataaccccgggtcctagtgctctgctaacttttgctatgaaaaagcttaccttctcaaagaagaacctggtaccactgctattgtcacctaagaaggagaaccttgaatatctcgttaacttagtgaaagataagaagcttaagacggtaattgattcaaagcatcccttaagtaaggctgaagaagcatgggctaagagca

SEQ ID NO: 21074 - DNA, 370 bp, Gossypium hirsutum
  Clone ID: LIB3146-037-P1-K1-E4
tgcaattgccgaagaaaaatctatcactgtaatatactactttatttttcacttacgaacgtgtttcggcatatagaagaaaaattatgctattgatacccttcgaacatctccacgcttctttatttagcagtgaaaatggattataagaatcaactactttgttttaaaaaaaaaaaaaaaaaaaaaaaaaaaaaaaaaaaaaaaaaaaaaaaaaaaaaaaaaaatacaatatgttaaataaacaaaaaaaaaccaaaaggggaccacttttcaagtccaaaatacttaaaaaggggggccccttttaaagaaccaaagttttctaaccttgtgcatgcccataaaaagttttttttttggggccccc

SEQ ID NO: 21075 - DNA, 392 bp, Gossypium hirsutum
  Clone ID: LIB3146-037-P1-K1-E6
acggttcctagtacattaaagatggagaaggaatgcaatccattcctccggacatcaaatgcagaaatccggaaagcattaaaaattccggtgacagcgaatgaggcagaagccttgggtatcatacgcagagcaaaggataatttctaggattacttacatacatagatacatatatgatacttcattcctgtttgtgtatagctgaagtcatggttgctattccatttctgaaatgatcaaacagcaccaatgtttactacttccatgtccatatgcttcattttttccccttaatttttccaagttttttgaaaattaaatctgttaatcaaatctctacttttttgctttttggtaaaaaaaaaataaaaccccttttttattaccaa

SEQ ID NO: 21076 - DNA, 411 bp, Gossypium hirsutum
  unsure (1)..(411): unsure at all n locations; Clone ID: LIB3146-037-P1-K1-E7
cccacgcgtccgctgaacccaaggaggacatgcagcagcagccacagccacagccacagcctgttaaggaagaagagatggagaatgaagatgaagcaggtgcagagaagaagagtgtgatcatccctcttcctcaaaaagttgcagcagcagaaacaccaccatcagttacagagaaaagtccaaacaacagagattccgtgcttgctcgagttgagacagaaaaaagactagctttagttaaagcatgggaggaaaatgagaaggcaaaaatagacaacaaggcatataagaagatatctgctattggatcatgggagaataccaagaaatctgctgtagaagcacagctaaagagcattgnaggaaaactggaaaagaagaaggaagaatatgcagagagaatgaaaa

SEQ ID NO: 21077 - DNA, 232 bp, Gossypium hirsutum
  Clone ID: LIB3146-037-P1-K1-E8
aaattatactggatatactacgttattttcacttccaacggggggggatatgaaaaaaaattatgctattgatacccttcgaacatctccacgcttctttatttagcagtgaaaatggattataagaatcaactactttgttttaaaaaaaaaaaataaaaataaaatacatctaataaataaaccaaaaaaaaaatttcaataccacaatttttaaaaaaaaaacaaatcc

SEQ ID NO: 21078 - DNA, 438 bp, Gossypium hirsutum
  Clone ID: LIB3146-037-P1-K1-E9
caaaagtttgcgtaagttagttttttattttagctaaaattttattagcttttattagtttcttttttgtataaagtttggtcttctaaaaattttcctgtctcaagctcaataggtagtcaataagcactaaaactgatttttgatagttttcttcttctatttcagtattttcaacagctacgaaccatggttttgaggtcatatttcgactggcaaactgatgtgccaatgaatgaaagaaaaacagttgaagctgagagtgagactcagcttgctgctgcagatggtcttgaatgctactggaatgcatttgagctgccttatacttttcctgcttcttaccttgaccctcaaaactaaacttcattacttccattatattccattccacctgaagtcatcccatatgaaactttgagctcctacccatgccct

SEQ ID NO: 21079 - DNA, 374 bp, Gossypium hirsutum
  Clone ID: LIB3146-037-P1-K1-F1
gaaccaactgggtactggagtaccataacagccataaagcgtaacagaagagcagacactgaccactattacttctcttgaaaacccaggacattctcggaagacatggatacttccttcaaccgccgagcagtatcgaggacatctatcattggatataaccctcctgtatctaagattagcaaaattgggtataaagtcccatgatatcctgcagactgtaaatgtaatttttgagggcatctgtaagctccagagttttttgtagaattcttttacctcggtctgtattaaataatcattacggtctcgactagcatcttgtaatagtttataggcactacggaccgaaaattctcccgagaagtcccctt

SEQ ID NO: 21080 - DNA, 448 bp, Gossypium hirsutum
  Clone ID: LIB3146-037-P1-K1-F10
ccactttggaagtcgatgctgtgattggagctgatggcgctaactctcgtgttgctaaagccattaatgctggcgattatgattacgccattgcatttcaggagagaatcaaaatccctgatgacaaaatggtttactacgagaatcttgctgaaatgtacgtaggagatgatgtttcaccggatttctatggttgggtttttcccaaatgcgatcatgttgcagttggaaccgggacagtgactcacaagaatgatatcaagaagttccagctagccactagaaacagagcaaaggacaagatccttggaggtaaaattatacgagttgaggcacacccaatccccgagcatccccgtccacgcaggttatccgggagggtagccttagttggggatgcagctggatatgtgacgaaatgctcaggtgaaggtatctactttgcagc

SEQ ID NO: 21081 - DNA, 451 bp, Gossypium hirsutum
  Clone ID: LIB3146-037-P1-K1-F12
cccacgcgtccgattgctaagttcattgaagagaaacagaagaatcttcctgggaatttcaagaagcttcttcttgtccatttgaagaagcttgtggctgctgggaagttggtcaaagttaaggcttcgtataaacttccatcggctagatcttcgaagacggctactgctgcttctgctcctgcaaaaaagaaaacggctactactaagtcgaagtctaagcctgcctcaaagcctaaggaagggaagagtacaaaagctactcctaaagcgaaggccaagacaaaaactacttcgaaggccaagagtaagccggcggctaagccaaaggctacttctaaggcgaaggctgctccagccaagactaaggcagtggcttctgtgaagccgaagactactgcagctacaaagccaaaagctgcagccaagcctaaggacaagccggttaagg

SEQ ID NO: 21082 - DNA, 331 bp, Gossypium hirsutum
  Clone ID: LIB3146-037-P1-K1-F2
gctgttcaatgaatatggaacacgcccaatgtcgctgagcatatgttgaacgagaccacaggtgtcatcaacacacacaattatttggcaatgcatggagagattgctattcgaattctccgacttgcagcgaaaattatgtgctctacctcgaaccgttatatctccacaaacatttagggggaaacttgctccgcttgtactacagctcagctgactcatgctgtacaaatgttaaccttgtcaaagatgaacctggaaccactgctattgtcacctaataaggagaaccttgtatatgtggacaacttagtgaaagataagatgctta

SEQ ID NO: 21083 - DNA, 380 bp, Gossypium hirsutum
  Clone ID: LIB3146-037-P1-K1-F4
gttttccttctaagccaaacgaaatctaatcatttttgaaaaatggcaccaaaagctgaaaaaaagccagccgagaagaagcctgcggaggagaagaaagccgtagctgagaaagccccggcagagaagaagcctaaggctgggaaaaagcttcccaaggaaggcggagcggctgccggagacaagaagaagaagagagttaagaagagcgtcgagacctacaagatctacatcttcaaggtcctgaagcaagttcaccctgacatcgggatctctagcaaagctatggggatcatgaacagtttcatcaatgatatcttcgagaagcttgctcaagaagcctctaggctcgcgaggtacaacaggaaacccaccatcac

SEQ ID NO: 21084 - DNA, 330 bp, Gossypium hirsutum
  Clone ID: LIB3146-037-P1-K1-F5
taaaaataataaaaggaagggattttttaaaaatttttaaattaagaaaaatttctagaaaaaaaaaaatccttccttttttcctttgatttccccttatgagatcgtaaaatattcgagaatccctttttttttttcctgtaaaatttatatatctaattatcgctttgtctttgattttatttggggttgttttgagttaattaatatggggagtgaagttttacgacctcaggattgtttgatcgaacggattcggttaccttcgacggcgtgtcctcgccggagatacggaaaacggagctttaatcctagttattatcataacta

SEQ ID NO: 21085 - DNA, 343 bp, Gossypium hirsutum
  Clone ID: LIB3146-037-P1-K1-F6
ttttgatacttgaacactataaagataatatgcaagtatgtcaattatagcttctgtaattgcaatatcatttcagatttttattttgggttaaaaaaaaaaaaaaaaaaaaaaaaaaaaaaaaaaaaaaaaaaaaaaaaaaaaaaaaaaaaaaaaaaaaaaaaaaaaaaaaaaaaaaaaaaaaaaaaaaaaaaaaaaaaaaaaaaaaaaaaaaaaaaaaaaaaaaaaaaaaaaaaaaaaaaaagggggggcccttttaaaaaaaaaaaatttatgtccccggggtttcaaaaaaaaaattttttttaaggggccccaaaaaaaaaaaaaagggccggggttt

SEQ ID NO: 21086 - DNA, 324 bp, Gossypium hirsutum
  unsure (1)..(324): unsure at all n locations; Clone ID: LIB3146-037-P1-K1-F7
ggaaggaanggccggggcgacccacgcgttcaaaatttatgaaaaccctaattctacctttgttctttatcaaagagcaagtctaacaatgagggccaagtctgacccagcacaagctcgtcgctcacctttgatcgaaagaaaatgcagaagccggtgctatatagccgcggaatgggatctatgcttcaaatattgcggcatatgttgcgatgagtgtaaatgtgttccttccaatacttttgggaacaaacactatgttccttgctacagagacaaggtgaattactagggcaaacccaaatgcccttgaaaatgaaatat

SEQ ID NO: 21087 - DNA, 426 bp, Gossypium hirsutum
  Clone ID: LIB3146-037-P1-K1-F8
ccacgcgtccggattaattgaggctgcattaactttggtaatttccatgtgcttgcctatggtaaaaattttagtttcccttttagtggaatttgggtcagttcagttttacatgcagatcaatcaggagcgtgaaggacaacagattgactgcgtcctgctgaagaatgtcttggatatctttgtggaaattagtgactacaaaggggctaactattatgaagattttgagcggatcatgcttacagaaatctctggttactattctcgattagcttcagagtggcttctgtatgactcatcagctgaatatgttcaaaaggttttctggtgcttgaatcgggagaagcaaagagctcgacagtacctacatcctgacactgaagtaagatagtgcaggttgtcagatatcatttgctagatcaa

SEQ ID NO: 21088 - DNA, 357 bp, Gossypium hirsutum
  Clone ID: LIB3146-037-P1-K1-F9
ggcgacgtgggcggttcgctgcccgcgacgtcgcgagaagtccactgaaccttatcatttagaggaaggtgaagaatattgatgtgcttatgcaaaatcatctattttgaagatcggttcaccgtgtgagggtatgcccaccctcttttcctatatccttcctatcgttctttatttgtgaggtttgcgaaattatgcatgtaataggcctaggatcttttcatgctattaatggaataaatttagagttgtgtttgcatgtcatttttgttagaaatgcttgtcttttacttttgaaagatgcttcataagaacatgaatagcctaataagctatcctatttttcatgtttaaaaa

SEQ ID NO: 21089 - DNA, 380 bp, Gossypium hirsutum
  Clone ID: LIB3146-037-P1-K1-G1
ggaaaaaaaaatgaagctcttgtttctaactttgctgctttgttctcttcttctatgttcttcagtttttgaaccaacaatggctcagcctcgttcacctttttgtgaagggaaatgcaaagggaggtgcaataaagcggcggtttgggatcgatgcttcaaatattgcggcatatgttgcgaggagtgtaaatgtgttccttccggtacttttgggaacaaacacgagtgtccttgctacagagacaaggtgaataacaagggcaaacccaaatgcccttgaaaatgaaatatattcgagttcgggatttcatcaagcttaaagatcgaggacgaagaggctatatatatatatgcatgctgatggggtaataataaaa

SEQ ID NO: 21090 - DNA, 448 bp, Gossypium hirsutum
  Clone ID: LIB3146-037-P1-K1-G10
gtcagaaatgatcagccccggtttgagacttgctaccagattgccttggccatcaaggacgaagtggaggatcttgagaaggccggtatcaatgttatccaaattgacgaggctgctttgagagaggggttgcctcttagaaagtcggagcacgccttctacttgaaatgggctgtccactccttcagaatcaccaactgtggtgtacaggacactacccagatccacactcatatgtgctactccaacttcaatgacatcatccactcaattatcgacatggatgctgatgtgataaccatcgagaactcacgttcagatgaaaagctcctttctgtattccgtgaaggagtgaagtatggtgctggaatcggccctggtgtctatgacatccactctcccagaataccatcaaccgaagagattgctgaccgaattaacaagatgc

SEQ ID NO: 21091 - DNA, 413 bp, Gossypium hirsutum
  Clone ID: LIB3146-037-P1-K1-G11
cccacgcgtccgcaagaaatcatggtaagtctcaaatcacttgtatctctcagttcccgatgcgctgccgtagcactacttgttttggtggtttcagtggcagtgcagacccatactacaaatgcacaaagctgcccgaccgagctgacgagcctgaacgtgtgcgcacctttcgtggtgcccggtgcagctgtggctaaccctagcattgactgctgtaacgcactccaatcggtgcaccatgattgcctttgcagcactctaaggatcgcttctcgactcccttctcaatgcattctcccaccacttcacttgtgcttgaaagaaaagcagtggtgctgcatgcttaattgtgtaggaaaatctaaatacgccatggaatatggataccgccctgtttttttctttctttt

SEQ ID NO: 21092 - DNA, 403 bp, Gossypium hirsutum
  Clone ID: LIB3146-037-P1-K1-G12
gaagcacttgagaggggagacgttcgagtttcagatgagtaatgcgcggacatgggtgagtgcggcgctgacgaatgaggacacgtgtcttgatgggttcgaaggagttgacggcaaggttaaatctaatgtgaagaggaagatcacgaatgtggctaaagttaccagtaatgctctgtacatgatcaataggctcaatgaaagtcgtggtaggcaccgttgaatctttgatgatgatgatgatgaataatggatggttgtgatttatctagcttattatggttcttaaatatagtttttattttgattttggttgcaagctgtatatgtaatgttttctatttatatattaagcataaggtgatatgcgtttttttcttgtaaaacaaaaaaatataaatat

SEQ ID NO: 21093 - DNA, 365 bp, Gossypium hirsutum
  Clone ID: LIB3146-037-P1-K1-G2
gcgaaaaagccgaaggagggagcgaggaaagagatgacgcgaggaaaacaaaagatcgaagcgcagaggcgaaacgctgagaagaatcaaaagccaaagggttctcagctggaggccagagctgtagccctcaaagtcagctgccctatctgcaaggtgcaattagcaaatgaaaaacaacttggtgatcattatggctctaaacatccaaaggaaaaccctcctgctgtgtcaagttgattgctttcttcgcatgtaaaagaaggaaaagaacaaattatcttttcctgtgtgattctagatattatatgttaaccgtctgtaaaaaaaaaataatttaaaccaatgaaaatgactcttttatc

SEQ ID NO: 21094 - DNA, 299 bp, Gossypium hirsutum
  Clone ID: LIB3146-037-P1-K1-G4
ggccgacgccacgcgtccagggcacttctctcgaactggtctaagatctatatctcatataagaatgtctcgtctttaggaggagttatttatggatctacaaataccacactaaacgatatgttatgtgaaagataatttgccgcttcaaactttaaaaggccattcaaattaaaaaaattttttatgcctcactgtatacagtgaatattatttatgctgctactaaacaaatgaagtgaacttgtaccacatggaaatatcgaaacctttcacatggcatatatttttttcacaag

SEQ ID NO: 21095 - DNA, 397 bp, Gossypium hirsutum
  Clone ID: LIB3146-037-P1-K1-G5
ggccggccgacgcgtgcgtgaaaaaaaaatgaagctctcgattctaactttgttgttgtgctcacttattttatgtactggggcggtgtgaaccaacaatggctcaccctccttcacctttttgataagggaaatgcaaaaggagttgcaataaacacggcagtttggtatcgatgcttcaaatattgcggcatatgttgcgaggagtgtaaatgtgttccttccggtacttttgggaacaaacacgagtgtccttgctacagagacaaggtgaataacaagggcaaacccaaatgcccctgaaaatgaaatatattctagttcgggatttcattaagcttaaagattcgtggccaaaaaggctatatttatatattcatgcttgaggggttaatat

SEQ ID NO: 21096 - DNA, 428 bp, Gossypium hirsutum
  Clone ID: LIB3146-037-P1-K1-G6
cccacgcgtccgcggacgcgtgggcaagaaagcagtctcatatgtgaaattcttgtctgaaaatgaacttgcttctgcatctacagatagcacactaaggttatgggatgtgaaggagaatttgccgcttcgaacttttaaaggccattcaaatgagaagaatttcgtaggcctcactgtaaacagtgaatatattgcatgcggcagcgaaacaaatgaagtgtacgtgtaccacaaggaaatatcgaaaccggtaacatggcatagatttggttcacaagagatggaggatgcagatgaagatgggggtggatcgcacttcataagtgcggtgtgttggaagagcgatagccctaccatgctaactgctaacagtcagggaaccataaaagtgctagtccttgcggcttgacaaaatcgaagttcaa

SEQ ID NO: 21097 - DNA, 383 bp, Gossypium hirsutum
  Clone ID: LIB3146-037-P1-K1-G8
ggcacctgcccctggctaaggcctgatggtaaaacccaggttactgttgagtactacaatgacaggggtgccatggttcccgttcgtgttcacactgtcctcatttccacccaacatgacgaaactgttacaaatgatgaaattgctgctgacctcaaagagcatgttatcaagcctgtcatccctgaaaagtacctagatgagaaaacaatcttccaccttaacccatctggccgctttgtcattggtggtcctcacggtgatgcaggtctcactggtcgtaagatcattattgacacctatggtggttggggagcccatggtggtggtgcttttttttgaatggaccctccatgtttgtacagtagtttcgttttcatttc

SEQ ID NO: 21098 - DNA, 76 bp, Gossypium hirsutum
  Clone ID: LIB3146-037-P1-K1-G9
cccacgcgtccgatgcaatttgatctgagataatgtaattatgattcatttttcaatatatattagctattattcc

SEQ ID NO: 21099 - DNA, 422 bp, Gossypium hirsutum
  unsure (1)..(422): unsure at all n locations; Clone ID: LIB3146-037-P1-K1-H1
cccacgcgtccgcttagggaaagggaagataatggtttttaagtacaaacttaccctagctttgttttcttttgtaaattcattaatggtggctaaaactttgggagtatttagcccctttctgattgaactatggtaaatagtttcttcttttgtgattttaatatgcatttagcttttttctaacatttcatcatgaaaaaggagctccattaatggatatggagctcgcaagcattttgcatgcaaaccctaggagatatttgggttccttagggttcttctcttctaatgtaccaaccatggttaggaccttctctctctaccctctcttgaaccttgaaacttgntattntatatatatgggtttggattataagtagggacttatatatatatattcattctccatccaagggttg

SEQ ID NO: 21100 - DNA, 425 bp, Gossypium hirsutum
  Clone ID: LIB3146-037-P1-K1-H11
gcccgtaccaagcagacagcccgtaagtcgactggtgggaaggctccaaggaagcaacttgctaccaaggctgcccgtaaatctgccccaaccaccggtggtgtgaagaagcctcatcgctaccgtcctggaactgttgctcttcgtgaaattcgaaagtaccaaaagagtactgagcttcttatcaggaaattgcctttccagaggcttgttcgtgaaattgcccaggacttcaagactgatttgcgtttccagagccatgctgttctagctctccaggaagctgcagaggcataccttgtgggtctttttgaagacaccaacctttgtgcgatccacgccaagcgtgtcacaattatgcccaaggacatccaagtggctcgtatgatcagaggagagcgtgcttaattccatgtgtgtggatc

SEQ ID NO: 21101 - DNA, 100 bp, Gossypium hirsutum
  Clone ID: LIB3146-037-P1-K1-H12
gttctaatcgcgagcgccgcccttttttttttttttttgcggcagaaagaaaatgtagcatacattagttgtcaatatggattaaaagctaatgctgatg

SEQ ID NO: 21102 - DNA, 210 bp, Gossypium hirsutum
  Clone ID: LIB3146-037-P1-K1-H2
acccacgcgtccggctaaacattgtttgcctttcatttctttctctattcctcgttgcttcctcggcaggctcgtgggtttttgagtaatcgaagatcaaaaaggctggggctgccttttgctacgctgtttagtcgactgtctgccaagaaagagacgccaattcttatggtcggttttgacgccgccggtacgcctaccattctgtac

SEQ ID NO: 21103 - DNA, 416 bp, Gossypium hirsutum
  unsure (1)..(416): unsure at all n locations; Clone ID: LIB3146-037-P1-K1-H3
cccacgcgtccgcccacgcgtccggaggaggcaatgtgaagtggagggcattgagattgggtgacaggcaactattcatggggtagcgaagctgtcacccgcaagacccgtattcttgatgtggtatataatgcctcaaacaatgagcttgtcaggacacagaccctcgtaaagagtgctattgttcaagtggatgctgctccctttaagcaatggtaccttcaacactatggtgttgatattgggaggaagaagaagacagcagctaagaaggaagctactgaggacggagaagttgctgccgaggaaactaagaagagtaaccatgtgctaaggaagcttgagaagcgccagaaggaacgtacacttgatgctcacatngaagaacaatttggctctggtagattgttgcatgc

SEQ ID NO: 21104 - DNA, 349 bp, Gossypium hirsutum
  Clone ID: LIB3146-037-P1-K1-H4
gcgtccacgcgttcggtattatgtgtcaacgtaaccttttacaaagacttaaactcttgctttaggggcgaaaggtaagaggaaaaagtaaccaaaaaacaaaaaatacaatgccgttctttgttggttttatttgctgacggtgcttggttgacttcttgtcagagcgggtgtgcttgcgctcgggtaccggtggggcgtgaaagcccaacggaggtgctcaaggggtcgtaccgaggctatggctgcagcgttccttgctgctagggttctgcccttgtattgaaccttgggccacttaagttaattaggtgttgggccactagatttgggctagagggactgtttt

SEQ ID NO: 21105 - DNA, 399 bp, Gossypium hirsutum
  Clone ID: LIB3146-037-P1-K1-H5
gaagaggatggtgagtgggaagcccccaaaattgataacccgaagtgtgagacagcccctggttgtggtgaatggaagaggccaatgaagatgaatccagcttacaagggaaaatggtctgctccactaattgataaccccaattacaagggtatttggaagcctcaagagattccaaaccccgactactttgagcttgataagcctgactttgagcctattgctgctgttggtattgagatttggacaatgcaagatggcatattgtttgacaatattttgattgccaaaaatgacaaggttgctgagtcatacagggagaccacatggaagcctaagtttgaggttgagaaagaaaaacagcaggctgtggatgagtccactgattcagatggattt

SEQ ID NO: 21106 - DNA, 408 bp, Gossypium hirsutum
  Clone ID: LIB3146-037-P1-K1-H6
cccacgcgtccggtattctctctcaacgtaaccttttacaaagactcaaactctggctttatagccgaaaggaaagaggaaaaattaacgaaaaaacaaaaaatacaatgtttttcttttttggttttctttgctggtggtgcttgtttgtctccttgtaggtgcgggtgtgctggcgctcgggtacgggtggtgcgtgaaggccgtaccgaggtgcgcagggggtcgtacggaggctagggctgcggcgttccttgctgctaggggtctgccctggttttgaaccttgggccacttaagttaattaggtattgggccactagatttgggctagagggactgttttaggcttgtaataggacattaactaaatggacttttattggactggtaatgtatttttattta

SEQ ID NO: 21107 - DNA, 326 bp, Gossypium hirsutum
  unsure (1)..(326): unsure at all n locations; Clone ID: LIB3146-037-P1-K1-H7
catttttctcacttatttattctttcatttatttatttgtaaaaactcacacaagtttaggaggaggaagaagatgtcgtggcaaacgtatgttgatgatcacctgttgtgtgatatctaaggcaaccatctctctgccgctgctatcatcggccaagacggcagcgtttgggctcagagctccaattttcctcagtttaagcttgaagaaatcaanggcatcatgaatgacttttctgaacccggatcacttgccccaaccggattgtaccttggcgtcactaaatacatggtgattcaaggtgaaccaggagctgttattccag

SEQ ID NO: 21108 - DNA, 386 bp, Gossypium hirsutum
  Clone ID: LIB3146-037-P1-K1-H8
cccacgcgtccgcccacgcgtccgctcttcaagacatccccagctgtacccagtgtgaatgcgactcctcttcgcttcttcaaacggccattccctcccccctctcctgcaaagcatatcaagtcattgctggcaagaaggcatggctcaattaagcctaacgaggcctcaatccctgaaggaagtgagtgtgaggttggtttgaataagagttttgggttttcgaagcattttacgcttcattatgagcttggtgaggaagtggggcgtggacattttggatatacttgctcccctaaggccaagaaaggaagcctcaaaggcaatgacccccctgccaaagttatttcttagtccaagatgaccacctgaattgccctatagga

SEQ ID NO: 21109 - DNA, 130 bp, Gossypium hirsutum
  Clone ID: LIB3146-037-P1-K1-H9
tatgattcttctttcttgatgttttgtctaataacaagccatactttgcctacgaaaaccattgagtaggtaaattgttcttatctccacattgttctaccaaatatacttttgcctattaagattttat

SEQ ID NO: 21110 - DNA, 407 bp, Gossypium hirsutum
  Clone ID: LIB3146-038-P1-K1-A10
aacaggctttggtggctgtcgacaagggcactcccatcaaccaagatcttctcagcaacttcttgtcagacccagtgcatggtgccatcgaagtctgtgctcaattgaggccgacggttgacatttcagtgacccccgatgctgattttgtgcgaccggagttgcgtcaatctggcaattgagtcggtagaatctcagaactggaatgagcaactatatttatagtgtgtttgagccagaacttgctcgtcatgtatgtagtgatgtagtttttgcaatgtcttggggctggctgtctttttatgtttcatttttaaatgttttatataattgaaggaccaaaaccatcagctgttttgagataatgagacttaataatgcatatctagcttggttttgggtagttg

SEQ ID NO: 21111 - DNA, 253 bp, Gossypium hirsutum
  Clone ID: LIB3146-038-P1-K1-A11
accacgcgttcgcccacgcgtacgggcctgcccatgttaccgtatagcctgctatgagactatcaatgagaatataaaagctgcctaagcactctgcgggtacatggacgagaggtttggtccttgttgaggggaataagcgcgatgaaacaagctgagcgaaatgaacacctttggatcatgtgtgatggcgtgcctcaagaaatcatagaggtgttaattctgcaggaattgatctctgatttccaagaat

SEQ ID NO: 21112 - DNA, 425 bp, Gossypium hirsutum
  Clone ID: LIB3146-038-P1-K1-A12
cattcatcaaagtccaaagtcccgaaatatctgtatatttcaacatgcctaaaaccttctcaaaattatcttcctctactttcttctttcactttactctgctcttcttctctgcaacctctagcggttccttctccaacattttgtctcccaaaaagttcggtctcaagcgagagaagctcacccatcttcacttctacttccacgacatagttagctcacgaaacccaaccgctatccctgtcgccagtgccgcctcgaccaacaaatcccatactggctttggcgttgtcatgatggccgatgaccctttgacggccgcacccgaccccaactccaagctcgtgggaaaagcgcaagggatttacgcatcagcagcgcaagacgaagttggtttattaatggtaatgaacctggctttcatg

SEQ ID NO: 21113 - DNA, 336 bp, Gossypium hirsutum
  Clone ID: LIB3146-038-P1-K1-A2
caagaccagctaattgacaattctcagcaaccacaaagctcaaaaaacgataccaatgttgttgggctggctcttggtcctccacaatcatctatcatagggttccaaaatattggttcttcaatgcagccatcaaatcttaatcctttcaacgattggacgaagaaccacgataagggagttgaggactttttatcagaggaagagattcgcgtaagaagtaatgaaatgctcgagaatgaagaaatgcagcaccttctccgtctttcaatatgggaggtaatgcttccattaatatgacagaagacagtgggtacgggttccccaaattacata

SEQ ID NO: 21114 - DNA, 92 bp, Gossypium hirsutum
  Clone ID: LIB3146-038-P1-K1-A3
cgtctggttctatgctgcagcatactggttaaaaatcgtctatgccaagatcattcttattggtcagtagaaaaagagaggggagctccaga

SEQ ID NO: 21115 - DNA, 296 bp, Gossypium hirsutum
  Clone ID: LIB3146-038-P1-K1-A4
cacaattagaacagggaggaagattgttagactatagagattgccaagatcatactcattggtcgatagaaaaagagagcggtgagcaagatggagaaaccgaatcagtcgaaactaccagcggcaatacaactgcaacaggtggccaacctcagggaccgagtgagaccaatgtaaaagaggaggatgactcagttgatggtaccatgggcgagagtccgcaaaaccgagtagatagcaaaggttctgatgttgatgctgaaaagccaagttcatgtcctgataaagcttatcgg

SEQ ID NO: 21116 - DNA, 413 bp, Gossypium hirsutum
  unsure (1)..(413): unsure at all n locations; Clone ID: LIB3146-038-P1-K1-A5
atctggttctctgctccaacttccttcttaaaaatcgtctctccctcgtaccagggaatccctcataactgtcacagaggggagctccattttactccctaatttaaccgtctgtaaactcaaaagggcttcagtaacaaatgaagactaaacattctggtgtaaaactgtcttcgtcgccatgagtcgtccgcccctgccccagaccagcaggccggatgccgacttaaaattcctgctatcaaaggctgcgtcgaactgaatcgtcactctggttcctccctcttgatacctgtaactgctgctcggtttaaggtacttgtntcatcctcaacccttcgagtcagctatgtagtgttaaacttgagagataactcctacctgttctgtttctgtcatgatgaattattcct

SEQ ID NO: 21117 - DNA, 226 bp, Gossypium hirsutum
  Clone ID: LIB3146-038-P1-K1-A6
gaaaagaaatgatgctgtgttgcctgtaaatatttgcgctcctgcactgtaggatttgtttttagaagaagtcaagaatattgtggttgcttttaatgaatggttaccatatatttgaattctcagctataccaaattatcgaccaaaactacttgggtccagatctgttttttaagttaccgacttatgaaaatcgattgaatgaaaatccatatttatttgtat

SEQ ID NO: 21118 - DNA, 398 bp, Gossypium hirsutum
  Clone ID: LIB3146-038-P1-K1-A7
cacaattagaacagggaggaagattgttagacgatagagattgccaagatcatactcattgctcgatagaaaaagagagcggggagcaagatggagaaaccgaatcagtcgaaactaccagtggcaatacaactgcaacaggtggccaacctcagggaccgagtgagaccaatgtaaaagaggaggatgactcagttgatggtaccatgggcgagagtccgcaaaaccgagtagatagcaaaggttctgatgttgttgcttgaaagccaagttcatgtcctgataaagctaatcggaaaaaaatggaaggtatattgggacacccgactgcataggaaaatttgtcaagcaagtggaccaacttggtaatcgatcaagctatccccggtctcgaatac

SEQ ID NO: 21119 - DNA, 325 bp, Gossypium hirsutum
  Clone ID: LIB3146-038-P1-K1-A8
acggaagacttatgaagcggcgcttgataaagggttgactatttttgcgccgtccgatgaagcttttaaagccgacggtgtacctgatctgagtaagttgaccaatgccgatcaagtttcgctgttagaataccatgcctcgccggattataaaccaaaggggactttaaagacgacgaaagatccgattactacattggctactagaggtgccgggaagttcgatttgacggtcaccggcgccggtgatttcgtcacgctttatactggaatcagtccatctagagtcgctgaagcagtttttgacttcccaccggtcgtgata

SEQ ID NO: 21120 - DNA, 436 bp, Gossypium hirsutum
  Clone ID: LIB3146-038-P1-K1-A9
cggacgcgtgggtgatgcctttgttgaaactagcggagccctaaacactgttgctacatccctgatgaaggttgcaaatgacatacgcttactgggaagtggcccccgatgtggccttggtgagctcattcttcctgaaaacgagccaggcagcagtataatgcctgggaaggtaaaccctacccagtgtgaggctatcactatggtctgtgcccaggtaatgggtaaccatgttgctatcacagtgggcggatccaatggccactttgaattgaatgtgttcaagccaatgattgctaatgcactcctgcattcattaagattgctgggtgacgcatctgcttcattagagaagaactgcgtgaggggaattcaagccaatagggaaagaatttctaaattactgcatgagtctctaatgcttgtcacatctttg

SEQ ID NO: 21121 - DNA, 360 bp, Gossypium hirsutum
  Clone ID: LIB3146-038-P1-K1-B1
cccacgcgtccgttttcattgggcactctttcaaactaaccaaaacgaggccgccggattttggtttcagcagcttgtatttagaaggatggtgagggtcagcattttgaatgatgcactgaagagcatgtacaatgcagaaaagaggggcaaacggcaggtcatgatcaggccatcctcaaaagtgatcatcaagttccttttggtcatgcagaagcacggtttgtttcaacattcaatctaatctctacccttatatttgttccatcgatatgctaacattgggattgcaggttacattggagagtatgagtacgttgatgatcacagatctggtaaaattgtagttgaactgaacag

SEQ ID NO: 21122 - DNA, 314 bp, Gossypium hirsutum
  Clone ID: LIB3146-038-P1-K1-B10
acgtccacgcgttcggtttatggtataagatcaaggacaagatccacggcgagggaggtgatgaagatggtcaatagggaccaatgttaaaacctgaggtgaaaagtgttgtggattgggccatattagatgatatagtggagagcggtgctagtttgttgatatatgaacatctacaggagtcctgtgtgggataccttctagaagagtcgcaacgtgttcttgtggtatacgcattttatgcgttgatatttgcaacaaattcgaacacgcaagatatggaagggtgcttacagtcgtatcttgagagatta

SEQ ID NO: 21123 - DNA, 288 bp, Gossypium hirsutum
  Clone ID: LIB3146-038-P1-K1-B11
accacgcgtacggatatttcttgattctctgggagggggtgacaggagattaccgccttacattattaaacttgtaaccagatgcattgggtctattatcactgttcgcgtgaggagaagaaaaccatgccttattgaactgaacatacgccgtcgacaatgcgtcctgatttaagaccctacttttttgatatgacacttttgggacagaaaatcatattgtggcagaaacatatttctgcgttggatgatgtataatgtgcgatatgagtactaatactacttgtc

SEQ ID NO: 21124 - DNA, 229 bp, Gossypium hirsutum
  Clone ID: LIB3146-038-P1-K1-B12
ctcaagggtgcggccacgcctgggtttaaggcttagcgtctgtagggttatagtatctcggatcgttgcatctgaggccttacacatcgaagcatatttaactcagcgcatccggatttccttgatagagagcagcgtggatgaacagtgctggcgagcagttgtcgatcatatagaagcacgatccggttgatgacgctaaatatgatcgcattggagatgcgatata

SEQ ID NO: 21125 - DNA, 394 bp, Gossypium hirsutum
  Clone ID: LIB3146-038-P1-K1-B2
cacagttactggggatattgtatttgtcctccaacagaaagatcatccaaaatttaaacggaagggtgatgacttatttgtagaacatacgttgacacttactgaggcactttgtggcttccagtttatactgacccacctagatggcaggcaacttctcattaagacccatcctggtgaagtggttaagcctgatcaattcaaggccataaatgatgaagggatgcctatgtatcaaaggccattcatgaggggtaaactatacattcactttactgtcgattttcccgactccttggcccccgagcagtgcaaggcactcgaggctgtgctacctccgaggacctcagtccagctgacagacatggagctggatgagtgtgaggaaaccact

SEQ ID NO: 21126 - DNA, 433 bp, Gossypium hirsutum
  unsure (1)..(433): unsure at all n locations; Clone ID: LIB3146-038-P1-K1-B3
tttcctccaacaggagttatgattcggctgtttaaagtaaaggaaaagcagagagaacttgctgaaaatgcaaatgggggagctcctaccaaaaagcaaagtccaggagagttgcgtttgcacaaagatatttctgagcttaacttacccaaatcttgtgctataacatttccaaatggaaaggataacctgatgaattttgaggtttcaattcgacccgatgaaggatattatttctgtggcacatttttattctcctttcaagtttctcccgtctatccgcatgaggcacccaaagttaagtgcaagaccaaggtctaccatccaaatattgatttggaaggaaatgtttgccttaacatcttacgtgaagattggaaaccggtgctcaatataaacactataatctatggnttatatcatcttttcacgg

SEQ ID NO: 21127 - DNA, 394 bp, Gossypium hirsutum
  Clone ID: LIB3146-038-P1-K1-B4
ctactattctccattaattataagtgagttggatatgtggcctgtgaattggctctttaaaggtaattacgtcgatatgaaatctgttatgtatgttggatctgttatgaagtttatacttgtagtccccaatttgcagattcctggctcaaatatattattttcagagtcactgcaactcacactgatcatatggaaaataaactacctaataaatatttctctatgatgacaactttccctgttttgaaagctgaaggtgcttgcacagagtgctattttatagtatgaaaacatagtaaatgatatgtggtttagctttagcttgagtatctaacaaggagtggtgcaagttcgtggattgccttgtgctcacaattttcatgtagagtgc

SEQ ID NO: 21128 - DNA, 382 bp, Gossypium hirsutum
  Clone ID: LIB3146-038-P1-K1-B5
ctttgaggtttttcaattgtatcctacaatcttgacaggttggctttttgtgatgaataaaggtgagctgagttgttcatttattactttgttttacttttaggcttttatatcgaaatcttattcagaatgagttttatccactgaattaactctgttttaccccttcttatgactagatttagatactgcgaaaggctctataacagtggagctcttcaaggacagttctcttgcagttgttgatcaattccttgatttatggtggtcagatgttgcttggagcatgcagcatcagtggccaagacattcttggtgtccgattgtgtggttgtggaaataaaggaacccgagcccgtgcctgctgggaaccccatggata

SEQ ID NO: 21129 - DNA, 414 bp, Gossypium hirsutum
  Clone ID: LIB3146-038-P1-K1-B6
cgggactggaaggccggaccgacccacgcgttcgtaaagaaggatgcttattacattatctattttgagctacttgaagcttgtattatatgagagagggaccaaattttgaggtgcaaatttgagatttattgagcattgcattaggaccacacatgcactggtctattttaaatatttaattgtggctgaagctagctgaagatggaatatgaataggatcacctcgaaacatggtttaccacggtgaacctgatgattggaaattgaaagttgggatgttctacttctacacacagcagttagtttgaaggtatgtttccttctgactacctttatgctattaatgcaagggtctgaaaaattatattgtaattttaatccaagtgggaatatatcgaacaatatttgctt

SEQ ID NO: 21130 - DNA, 346 bp, Gossypium hirsutum
  Clone ID: LIB3146-038-P1-K1-B7
gtgatcacatttattcaccttgtatctaaccaccgtttgaatttttatatacgtcaacaaagttctcattatcttaggtgattacaccacctaatgcataaagattgtaccgatatgctcaatgaacatgaatggcagcttctgattcacatgttcccttgatagcttggatgtagaagaccattcgatgccacaccaattacgcatgcagcatatcatagccagcattatgacattgatatgtattgggaagtcctcaacagcttttcactgtaaaatgaaaagatatgcttgaagtgtgtgactgggtgcaccacatgacctatgttgacagtcaaatatctct

SEQ ID NO: 21131 - DNA, 380 bp, Gossypium hirsutum
  Clone ID: LIB3146-038-P1-K1-B8
tcgtccacgcgttcgggctatggcatccatcaatgagaaacctcttattatggttctatcgaaccctacctcgcaagctgaatgtacagcagatgaagcatatacatggagtgagggtcgtgcaatctttgccagtggaagcccatttgacccctttgaatacgatggcaaagtctttgttcccgcccaggcaaacaatgcttacattctccctggattcggtttgggagtgataacgtctggtgcaattcgagtacatgacgatatgctattgacagtctcggtagctttggcacgcacaagtgacagtggaacacttcaaaaagggactaatttacccaccattctgcgatattagaaagatttcagccaacattgct

SEQ ID NO: 21132 - DNA, 380 bp, Gossypium hirsutum
  Clone ID: LIB3146-038-P1-K1-B9
gaaaaaaaaatgaagctcttgtttctaactttgctgctttgttctcttcttctatgtgcttcgagcttttgaaccaacaatggctcagcctcattcacctttttgtgaagggaaatgcaaagggaggtgcactaaagcggcggtttgggatcgatgcttcaaatattgcggcatatgttgcgaggagtgtgaatgagaaccttccgccacttgcgggaacatacacgagagttcttgctacagacacaaggtgagttacaagggctaacccaaatgcccttgaaaatgaaatttcttcctgttcgggattgcatcaagcttaaagatcgaggacgaagaggctatatatagatatgcatgctgatggtgttttataaaac

SEQ ID NO: 21133 - DNA, 395 bp, Gossypium hirsutum
  Clone ID: LIB3146-038-P1-K1-C1
cccacgcgtccgcccacgcgtccgatcaactcgcaactgatttggctgaggctgcaggcgctcatgttcagttaattattgattccaagttcattgagaaattgcaccaagacatacccggaaagggagtaaaaagacagttggagatcctatttaatgtatatgctttaagtctgttacacaaacatcttggtgactttgtcacctccggctgcattaccccaaagcaaggtgcactagcaaatgaacagctgagattattgtactcccaggtccgtccaaatgctattgcacttgttgatgcattcaactacactgaccattaccttggctccgttcttggtcgctatgatggaaatgtgtatccaaaactctatgaggaagcatggaaagat

SEQ ID NO: 21134 - DNA, 436 bp, Gossypium hirsutum
  Clone ID: LIB3146-038-P1-K1-C11
atgggttccattgacacgccgacaattacagagaacggttcgacccagtctcaagccgccgctccttccggcggcgaccacaagcctccggcctcagctaacggagcgcaagtggaggtgtcgccggagcctgaaggaacgaaaaagaggcggtcgagtatgctaccgctggaggtgggtactcgcgtgatgtgccgctggagggacggcaaatatcatcctgtcaaagttatcgaacgccgtaagatgccctacgctgtgccctatgattacgaatactacgttcattacaccgaatttaataggaggcttgatgaatgggtgaagcttgaacagcttgatcttgattctgtcgaaactgttgtcgacgaaaaggttgaagacaaggtaacaagcttaaaaatgacacgccaccagaagcggaagattgatgaga

SEQ ID NO: 21135 - DNA, 446 bp, Gossypium hirsutum
  Clone ID: LIB3146-038-P1-K1-C12
cgatgggaaggcagggcctggtgctttgtttgtgaaggttagcatggatggtgctccgtatttgaggaaagtagacttgaaaaactacactaaatatcaggagctgtcttctgcacttgagaagatgttcagctgttttaccataggtcagtatggatctcatggaacctcgggcagggagctgctgagcgaaagcaagctcaaggatctacttcatggatcagaatatgttcttacttacgaggataaagatggtgactggatgcttgtgggtgatgttccatgggagatgttcactgacacctgcaaaaggttgaggatcatgaaaagctctgatgccattggactcgctccgagggccatggaaaaatgcaggaaccggaactagctaccatcatacatgatcttttcccacacacccgagattattatttctgaaagagatg

SEQ ID NO: 21136 - DNA, 346 bp, Gossypium hirsutum
  Clone ID: LIB3146-038-P1-K1-C2
cgccagaattttcaatacttacggacctcgtatgtgcatcgatgatggtcgtgttgttagcaactttgttgctcaggctttaaggaaggagcctttgactgtgtatggtgatgggaagcagacaaggagtttccaatatgtttctgatctggtggagggtctcatgcgtttaatggaaggagaacatgttggaccttttaatcttggaaacccgggcgaattcaccatgcttgagcttgctgaggtggtacaagaaacaatagacccaaatgcgaagatagagttcaggccgaacacagaagatgacccacacaagaggaagcctgatatcttaagagccaaagag

SEQ ID NO: 21137 - DNA, 404 bp, Gossypium hirsutum
  Clone ID: LIB3146-038-P1-K1-C3
cgccgattctaccaccaccatgaccacctattgtgaacccaccaacgcctgctatcgtgaagccaccttcaccgggaacaccgtgtcctacaccaccacctccggcacaacaaacatgccccatagacactctcaagctaggtgcatgtgtggacgtgttgggtggcttagtacacatcggcataggtagcagcgccaaagacacttgctgccctgtactacaagggctggtggatttagacgctgccatttgtctctgtactacgatcaaagccaaccttttgaatatcaatattataatccccatagctcttcaggtcctcatcgactgtggcaaaactgcaccttcagggttccaatgtccagcacaatgatgaaaaacataaaaaccccatgtttttttt

SEQ ID NO: 21138 - DNA, 402 bp, Gossypium hirsutum
  unsure (1)..(402): unsure at all n locations; Clone ID: LIB3146-038-P1-K1-C4
cggacgcgtgggtaaatattcacgataaagtaccgacagttccggggatattcgccaatgaaaagcttcaatttcaaaagtatttggaagagacggtatcttttccatggagttacgcacatgtcggcgttgaactgacattggatcacacccatagcccgtttctgaaacccgcaagcgacctcggttgtgcacacaatctcgaggctcatttacacttgcttgacggataccatggcaagagggacattgcgcttgttaacaaggacagcaacttcttgaagaaagagtacggngtgccaccgcactggcgccaggacgagaacaaagggatggtaaaaaacaacgacggccgttgggttttgccggagcgggcgagagtggaggctgatccacatgaca

SEQ ID NO: 21139 - DNA, 303 bp, Gossypium hirsutum
  Clone ID: LIB3146-038-P1-K1-C5
ggtggcttctcttctttatatgaaagcaactaaaaacagaggaaacgtcattagaaaaggggaaagaatcctccaagtccctgtgctctttgtatttttggaatttaatctctctatttttcatattttaaaatttaggtctaattgttaacgcactcaaattcttctgttcaatttgccgccatgatatttttttttgtaaaaaattacttaagtaaccatataccaaaaaaactgttgtaataaacttaaatttagcaaaaaagttttaactgtgttcaaaaaaaaaaaaaatattaaaaa

SEQ ID NO: 21140 - DNA, 224 bp, Gossypium hirsutum
  Clone ID: LIB3146-038-P1-K1-C6
gcgcggacgcgtggatagtgcatatacaaggccggcgatgactgtggtcatgatgaatgggatgttcaagtgatagctgttttaggagacatctttacagctgtcggacttaatctctcatgattgcgctatgctgacattgcaacacacccatagagaggtattgtagccgctgtgcctactacacgtgtgcacacgctatatgggcgaaacaactcatggtg

SEQ ID NO: 21141 - DNA, 440 bp, Gossypium hirsutum
  Clone ID: LIB3146-038-P1-K1-C7
atttgttgaggatcctcgtgatgctgaagatgcaattcgtggtcgagatggttataaatttaatgggaatcgtctaagagttgaacttgctcatggtgggcgaagaccttcttcatctgtggatcgttatagtagttacagtggtagcagtagtcgtgggccttccaggcgctctgattatcgtgttttggtgactggtttaccttcttctgcttcatggcaaaacctaaaggcatgatagggattgtagattacacaaactatgatgatatgaaatatgttataaggaagcttgatgactctgagtttcgaaatccatttagccaggcttacatacgggtggagtatgattcaagatatgattctaggcgcagctactttagaagtcctagtcgtagcccatatagtcgaaaccctaatctagaattgaatctatcaat

SEQ ID NO: 21142 - DNA, 391 bp, Gossypium hirsutum
  Clone ID: LIB3146-038-P1-K1-C8
ggacccttaagggtgctttttatggcaactataaaccacgcactgatattcccatggttgtcgacaaatatttgaacaaggagctggggctggatatggacaagttcatcacacactctgtgccttttgccgatattaacaaggcattcgactacatgctccagggtataggtctgagatgcatgattcatttggatgcttaaggaaatgttgctgctgtatatttgcccatccaaggatcaaaactctaatgttttgtcctactatgtgttatattatgtgcctacttaagctacctttcccggttatcaagagtgcctatatagaactctctctctctcaaaaaaaaaaaaaaagagaaaagagttctttatatggagttttatattat

SEQ ID NO: 21143 - DNA, 254 bp, Gossypium hirsutum
  Clone ID: LIB3146-038-P1-K1-C9
gaatgaagggccgaccgacgcgtgcgggcgtccactgtctgaccaactcttgctggtctgctctgaaaccttcgtcgttttccgtgagtgggaattcaaatttctccaagcggagggtcatcaaaacttttttcttcgatcccaatcaagtgcccatccttaatcaagctgttaaggagccagtagccttcaagggtgggatgtttgctgggaatttaagggttgatttggaagaagagccatttaagggatgg

SEQ ID NO: 21144 - DNA, 388 bp, Gossypium hirsutum
  Clone ID: LIB3146-038-P1-K1-D1
atgcgatctgccttaccaagcggctatgaatgatgcacacagagtatgagggacttaaagctcgtctcagctctcctaaattcatagagaacgctctcaaggatgtcgactgcggtgttcatgaaaaagcacgcatgtatcagaaccgaagattaatttaaccaaaaaccgattggctctactggaatcaactgttatgctgtcccaataggctccatattggtcatattttcagtcttagcaaagctacacttcgtgttgggatgatctgcattgtttactcatttatgtcactataaactccatttcaactgatctgcacattcaaccattcgaggactctgtagtttctggtgttagaagcatattatacccaaacttccgcact

SEQ ID NO: 21145 - DNA, 320 bp, Gossypium hirsutum
  unsure (1)..(320): unsure at all n locations; Clone ID: LIB3146-038-P1-K1-D10
ntaatggtcaacgactgctaccgacctcgccttaactaccatgatccctacataagaagagaggtgtggcatgcacccggccggaccgtttttaatcccacacgagtcccttcgggccacgaccgtcaacggtgcccacatacaacctggtacacgtgtcttcatcaacacccatgggttggaccggaacactagattatgggactgatgttgaatcgttcaggcccgagaggcattggctggctgatggcgctcgagtcgagatcagccacggagctgatttcaaaatcctgcctttcagcgccgggaaaaggaaatgt

SEQ ID NO: 21146 - DNA, 326 bp, Gossypium hirsutum
  Clone ID: LIB3146-038-P1-K1-D11
caatggcggatgccgaattggttcaggcttatatgcacaacaaactcaaattaagtttcagacgatgtcacaaatccgacatgaggaacaaccgcagcatcagaattctaggaaacaaaggcggcgctggtcgcctgagctccatagacgatttgttgagggactgcaacagctgggaggctctcaagtggccactcctaagcagattagagaactgatgcaagttgatggtcttaccaatgatgaagtgagaagccattagcagaaatacagactttatatccgaaggcttccaattttttcttccgggcatgggaatgagctgt

SEQ ID NO: 21147 - DNA, 324 bp, Gossypium hirsutum
  Clone ID: LIB3146-038-P1-K1-D12
ggttgcaaactactggaaacaagtcattaagattaatgactaccagaagggtgggtttgtgaaccggattgttttcttcatgtttaacacaatttcagggaagaagattgccattctcggatttgctttcaagaaagataccggtgacactcgggagaccccaaggatcgatgtatgcaaagggctgttgggcgacaaggctctttttagcatatatgaccctcaagtcaatgaggagcagattcagagggatcttgcaatgaaaaagttcgattgggaccattcggtttatctttagccggatagccctactttgatcaagca

SEQ ID NO: 21148 - DNA, 445 bp, Gossypium hirsutum
  Clone ID: LIB3146-038-P1-K1-D2
agggaggaaaatctaagtcagatactaagagtgccaagctatccgtgaaatccaaagctggaaagaaatcggggaaggctgccaaggatccaaacaagccaaagaggcctgctagtgccttcttcgttttcatggaggagttccgtgagcaatacaagaaggatcaccctaaaaacaaatccgttgccgctgtcggcaaagctggtggagataaatggaagagcttgtctgaagctgaaaaagcaccttatgtagccaaggcagaaaagcgaaaggtcgagtatgaaaagaacatgaaggcctacaataagagacaggctgagggtcctaaagacgaagatgttgagtctgacaaatcagtgtctgaggtgaatgatgaggatgatgatgaagaaggcagcggagacgaagaagatgatgagtaggaaggtccgtggtggatagc

SEQ ID NO: 21149 - DNA, 280 bp, Gossypium hirsutum
  Clone ID: LIB3146-038-P1-K1-D3
ggtggcttctcttctttatatgaaagcaactaaaaacagaggaaacgtcattagaaaaggttaaagaatcctccaagtccctgtgctctttgtatttttggaatttaatctctctatttttcatattttaaaatttaggtctaattgttaacgcactcaaattcttctgttcaatttgccgccatgatatttttttttgtaaaaaattacttaagtaaccatataccaaaaaaactgttgtaataaacttaaatttagcaaaaaagttttaactgtgttc

SEQ ID NO: 21150 - DNA, 292 bp, Gossypium hirsutum
  Clone ID: LIB3146-038-P1-K1-D4
ctaggaaattccatgatatcttccaagctgtaatttttatctttgaaggaagatctagtagccatagttttctgtaaaagtccttatagtcggcttgtaaagcataagctctaggatcatcttcagtactttgtaatagtttataggcgctacgtattgtgtactcacccgacgcttcagcactccagacttggaaatcttcgtgtggtctttctgccagcaggataccgagaatcatctcggtaacatcctccgaaaagttatacattatcaactcctttttccatgttct

SEQ ID NO: 21151 - DNA, 382 bp, Gossypium hirsutum
  Clone ID: LIB3146-038-P1-K1-D5
tcggccttaccaagcggctatcaaagatgcacacagagtatgagggacttaaagctcgtctcaactctcctaaattcatagagaacgctctcaaggatgtcgactgccgtgttcatgaaaaagcacgctgtatcagaacacaagattaatttaaccaaaaaccgattggctctactggaatcaactgttatgctgtcccaataggctccatattggtcatattttcagtcttagcaaagctacacttcgtgttgggatgatctgcattgtttactcatttatgtcactataaactccatttcaactgatctgcacattcaaccattcgaggactctgtagttttctgttgttagaagcatattatacccagacttccgcact

SEQ ID NO: 21152 - DNA, 186 bp, Gossypium hirsutum
  Clone ID: LIB3146-038-P1-K1-D6
cgggaaggaacggccggaccgacgcgtgcgctaggaaattgcatgatatcttccaaggggatactaacatattcgtgacgagacatagacggctgtgcttcgataacaaaggacgtatggcaagatggataagcgtatgctttcagaggatctagctttatcatggcgagtatcgcgagcaataca

SEQ ID NO: 21153 - DNA, 195 bp, Gossypium hirsutum
  Clone ID: LIB3146-038-P1-K1-D9
cgaatggtcaacgaatcctatctacctcaccttaactacctacgctgcgtaatacgtgaagggatttcgcatgcacccggccggaccgttcagaatggcagacgaggaccttggggccacgaccatcaacggcttttacatcccggctaagacacgtgtcttcatcaacacccatgggcagggccgtaacactaa

SEQ ID NO: 21154 - DNA, 433 bp, Gossypium hirsutum
  Clone ID: LIB3146-038-P1-K1-E1
cccacgcgtccgcccacgcgtccgcccacgcgtccgagaaatcatggtaagtctcaaatcacttgtatctctcagttcccgatccgctgccgtagcactacttgtgttggtggtttcagtggcagtgcagacccatactacaaatgcacaaagctgcccgaccgagctgacgagcctgaacgtgtgcgcacctttcgtggtgcccggtgcagctgtggctaaccctagcattgactgctgtaacgcactccaatcggtgcaccatgattgcctttgcagcactctaaggatcgcttctcgactcccttctcaatgcaatctcccaccactcacttgtgcttgaaacaaaagcaatggtgctgcctgcttaatgggtaggaaaatataataacgccatggaatatcgatacctccctgtttttttctttctttt

SEQ ID NO: 21155 - DNA, 438 bp, Gossypium hirsutum
  Clone ID: LIB3146-038-P1-K1-E10
ggcctcccagaggttgcaaactactggaaacaagtcattaagattaatgactaccagaaaggggcggtttgtgaaccggattgtttcctcaatgtttaacacagtttcagggaagaagattgccattctcggatttgctttcaagaaagataccggtgacactcgggagaccccagggatcgatgtatgcaaagggctgttgggcgacaaggctcttctgagcatatatgaccctcaagtcaatgaggagcagattcagagggatcttgcaatgaaaaagttcgattgggaccattctgttcattttaagccgatgagtcttactttgatcaagcaagttaatttttttttgatgcccatgcagcaacgaatgatgcttatgggggtttgatttttacagagtgggatgttgttaaaacccttttttccagatgattt

SEQ ID NO: 21156 - DNA, 127 bp, Gossypium hirsutum
  Clone ID: LIB3146-038-P1-K1-E11
tcgggcctcccagaggttgcaaactactggaaacaagtcattaagagtaatgactaccagggagagtcggtttgtgaaccggattgtttcctcaatgtttaacaccgtctctggtaactagatcgcc

SEQ ID NO: 21157 - DNA, 404 bp, Gossypium hirsutum
  Clone ID: LIB3146-038-P1-K1-E12
ggttcgggttcaagtactgggtcaggatctgggcaaaccatgttgacagatggatcatggttagctggtttggcaatgggagattcaccaagaacaataccatctcccacttttctagtaccatttgcactcatggcatcaacagctttgtgtttcttgttttcattagttcacttgtagcccatccctatccttttgtattatggcttttgttaaatgtgaattctttacagatttgcagctttgatgggtaaaaatggggttttggcctttgtttgaggaaaaaaaagctgacagattcttggtccagattgtaaaccatcatcagcttcaagattccccaatgttatataaacatttaaaactgttgtttctctaacattctgggatttagagatattttg

SEQ ID NO: 21158 - DNA, 435 bp, Gossypium hirsutum
  unsure (1)..(435): unsure at all n locations; Clone ID: LIB3146-038-P1-K1-E2
cggacgcgtgggttatactttacaattttcttccgccaccttaatatattgtcaagggtattgttgagatctaggagtgagagaagatttcaacagtataatctaaaatgaatttctttggactcaattccaggaaggactaaaagcaacccaggaaagaagaagaatcttcttgggacctcttaaagacgtcaacatagtcctaacttagaggggcaaccaaaccttcgcgctgctgaatggaggaaagatacggccacaataaggtatcaaaactatcgatgctcggaatatttaaaaaggtatcatctatgccattcttcgttacattctttattattattattattaatataatgccagaattatttataatccttactcaactcttaaatngaagtataaatgcatttcagtatattcaaactcacgtgc

SEQ ID NO: 21159 - DNA, 368 bp, Gossypium hirsutum
  Clone ID: LIB3146-038-P1-K1-E3
cccacgcgtccgctaaaagggaaacaaacaaatatacgcgcgtacagatcaccggatggcgagcggtgacgtggaggccgtggattttgaaccggaggacgatgacctcatggacgaggacgccgccggcgatgcctcccctcaagctcccttgcctaagctcaagtccgccatcactggcgccgcttccacctctctttctgctcataagaagaccaagggtcgtggcttccgtgaggacgatgctgaccgccactcccgtctcgcctcccgcgacttcgagtccctcggcactgacggcggccccggtccccagagatctattgaaggatggattattttggtcagtggtgtacatgaggaagcac

SEQ ID NO: 21160 - DNA, 364 bp, Gossypium hirsutum
  Clone ID: LIB3146-038-P1-K1-E4
ctttgtaggaaagcatcaagaatggaggcattgaggatggaagtattttgggtgatgttgattgtgttggttgccgtatttaaggtccaaaatgtggcggcagctgaagctccggcccctagtcccacctccgatgccacaatcttcgtgccgtcggtgcttgcttcccttgttgctcttgcatttgagcttgttttttaaaatgctggtgttttatgagacctataatattttttaaaattcttttctattttctacttatgactacagttcagtgtattcatatttttgctattgttgcagtttcaatatgtaattgttgtgatttgtttcctagtgacctaataaataatttgtttctttt

SEQ ID NO: 21161 - DNA, 63 bp, Gossypium hirsutum
  unsure (1)..(63): unsure at all n locations; Clone ID: LIB3146-038-P1-K1-E5
tcgggaatgaacgggncgaccgacgcatgcgtccacgcgtccgttcaaatgttaacgaacgct

SEQ ID NO: 21162 - DNA, 429 bp, Gossypium hirsutum
  Clone ID: LIB3146-038-P1-K1-E6
cggacgcgtgggttcaacttcgctgattcagtagactttgagaatattagacctcctgtaatggaaggcttagatacattaatcatggtatgtggcttcttacttttaccttcttaaactctatgttccatatgcttagtgtctggaatttcttatcattttgcttgatttattcaaagaaagaaaaaatcttcaaagtcaagtagccttgaaggcaatggtatgactttcttgttgtaacctttgatgattagtttactccgatttcactatcatatgttatttttacaagttgggggcttgcaagtagttcttcaaatcaaacatcacctgcatctcaatggttttcttcaaaatcatcaaagaagaacaaatatctttgtcctttgtgacttcaattatagatggcttaaagagattgtaccttca

SEQ ID NO: 21163 - DNA, 340 bp, Gossypium hirsutum
  Clone ID: LIB3146-038-P1-K1-E7
ggaaatggaaagtgactggatatccctgaccgatgagctcaggatggatctggaatctaaccgctgccgtgccgaaaaagtagagatggaactgaaattagagaagaagtgcaccgcggagttagatgatgctcttagcagagctgttctcggtacatgctagaatggcagaacactatgctgatcttcaagaaaaatacaatgatctgggaccgaagcaccgggcgatactggaaggcatagcagagataaagaaggcagtagcataggcaggaagcaaaggtcatggtgcacgttttgccaaaggcctggaggctgagctctcagctattagagtgga

SEQ ID NO: 21164 - DNA, 215 bp, Gossypium hirsutum
  Clone ID: LIB3146-038-P1-K1-E8
tcgccatttctgcaagagtagtggacttgattaccgtcacattcttcatcaactgcggcaggggaacatgattgatcaccatcctaaaagatgacgtgagactcacactccactctcaacgtgaactggaccacccacagtaaaggcaaagaaactacatatgttcctgattgagcttgacctagattctctcgtgatgagtatagtcataggta

SEQ ID NO: 21165 - DNA, 420 bp, Gossypium hirsutum
  Clone ID: LIB3146-038-P1-K1-E9
gaaacaactccatctggaatgtttgctagaggatcttattcagctagaagtaagtttgtggacgatgacaacaagtgctacttggagatcaactacactttcgatatccgtaaagaatggcaatcgtagactacatacgaaggaatcattgtcagcgaattggtttgctttgtgtccattgtttgtcaagtctcctttaggtgtgaccatagttcattcatttactttgttcttattttgccacccatatcctgtgtgagagtgagactaagaatggtctacacaatgaagagagtttagtcgaatagctttctgttttgctccgagtccgagttgcagttagacattcatttctttaggaatggattaataaaaaaaagttaaagcttttgctttttaaccttccttcacgggaaccac

SEQ ID NO: 21166 - DNA, 401 bp, Gossypium hirsutum
  Clone ID: LIB3146-038-P1-K1-F1
cggacgcgtgggctgcaataaagggtcacctatctttggtgcccatagacatgaagcctcaaccaattattcttgcctatattgatctcaatcttgagactttggctgcggcaagaatgttgacatcaactggccctggtcaaactcattggggtgattctggagccaacaatccagcacctgccacaaattctgctgatgcccagctaaaacaagaactcgcagcaatatttaagaaaattggtgacaagcagacatgcacaattggtctctatgagctttatcgcatcactcagctataccctaaggttgatatatttgctcagctccaaaatgctagtgaggcatttcggacttatattagagacggcttagctcagatggagaagaatgctgcagca

SEQ ID NO: 21167 - DNA, 318 bp, Gossypium hirsutum
  unsure (1)..(318): unsure at all n locations; Clone ID: LIB3146-038-P1-K1-F10
aattnnaggtcgacccaggcgtacgcccacgcgtacgattgctaagttcattgaacagattcagaataaccttcctgcagaatatagaggaggcgtgctcttgtccatttgaagaaccttgcatctgctgagaaaattaccaatgttgatgacccaatgtaaactctacatcgaatcgagcttcaaagaccgttactgatgattttgctcctgcaaaatataaaacggtttctactaagtgcaacctaagcctgcctcaacccctacagaagctcacaggactgatgctactcctatcgcgatggccactacaaacac

SEQ ID NO: 21168 - DNA, 442 bp, Gossypium hirsutum
  Clone ID: LIB3146-038-P1-K1-F11
tgacgacattgataatcggattattactgaagttttgggttctgaaaggcatggtcaggttcgatttcaaggatcttttgttaatccaacccaatattttggatccagctcgtatcaatacatgccttcggggagtcagactcaagttgaagttcagaggttaagagaccagatagctcagatgcaagtgagcacagttgagcaaattactcaacttaaagcggaggtagtatcgagagaagctgaggttcgaagaaaatatgaagatctccagctacaacttaaagcagatgcagtagcgagggaagtagaggcaatagcgagagaagcaaaggcagcagcgagggaagcagagcagaaagcacgacgcacttcaactacaacttcagaatatgatgaatatgtttcaacagtcgcaaaatccgccatcttaaactattgg

SEQ ID NO: 21169 - DNA, 366 bp, Gossypium hirsutum
  Clone ID: LIB3146-038-P1-K1-F12
cccacgcgtccgggacttggcagcatgttcgatccgtgcgttggagagctgcgttgatggggttatacttttaggtttggttgtggtgttttggcttttatatttagctcttttttagtaccatttttactcataatatcactcagctttgtgttaataggtttgattagtttactttgtgtcaattcatatcctttagtattaaggctactgctaaatagtgaattatttacatatttagagatttgatgtgtaataatgtagttacgatcttcgtttgaggaaatactatttttctgttgattggtgcagagtgttaaccattattagttttatgattactcattgttaaataaacatttaaaa

SEQ ID NO: 21170 - DNA, 412 bp, Gossypium hirsutum
  unsure (1)..(412): unsure at all n locations; Clone ID: LIB3146-038-P1-K1-F3
cccacgcgtccgcccacgcgtccgctaaagcagaaacaaaggctaaaatgtctgcaacatctgcttgatctcttatcctcccatctctcaaacccaaaaccatatctttaccaaacccaactcccatttcactgtcccccttctctctttcccaccgcctccatgcaaagcctctcttttcttccgctcttcaaagtttcacgcttttaacaaaaaagtcttcttcttttccttctaattttgttagaaacgtttccgtttcatctgagtacggtcaggaagagggtttatttggtagtgatgatgaagaggctactagtttctcccctgactttgaaacttttgtgggcaatctttcttttagtgtggacagtgctcagctngcccgnnttgtttggaagtgctggaaatg

SEQ ID NO: 21171 - DNA, 346 bp, Gossypium hirsutum
  Clone ID: LIB3146-038-P1-K1-F4
aaaaaaattaaaaaaaaaaaaaaaaaaaaatttatatatattaaatttaaaaaaaaaaaaataggaataattaaaaaaaaaaaaaaaaaaaaaaatttttaatttttttttatcttttttttttcttttttttttttccttttttttttttaatttttcttaatttatttattttctttttttcaatcttttttattttttaatttttactttttcttatattttttctttttttttttttccttttcttaatttctcttttttgtaatctgttttttacatttttttctcttttttattaattttttgtagtttttatattctttatttgtatttgtattatttt

SEQ ID NO: 21172 - DNA, 304 bp, Gossypium hirsutum
  Clone ID: LIB3146-038-P1-K1-F5
gcacgccagggctgacctagagggtcaactgtattagacgcgcataagcatggagcagagcctgggatttctgattcttcaccaaagtcctagatgacatagactttgcctccaatcttgaggtggaaaagagtgccaattgcagtgccaatgaaactaaagatgttgctgatagagcttcagctaaattctcttgtgatgggcatagtcataggtaggctcaactagtcagtatgtatctcatatgtattatttactttacttttgattctaaattgatatggttactttactatttacgaca

SEQ ID NO: 21173 - DNA, 275 bp, Gossypium hirsutum
  Clone ID: LIB3146-038-P1-K1-F8
acccggaatgacaggctcgaccgacgcatgcgtaacgccaactaggaaggaagccgtataattcctgtgcatcttaaagtgaaatgctagaatgcggtttaaagtgactggcttggggagaccgggattgcagccatgcatgtacatattgagtacatgtttacagatatagaggaaacagaggctgatgaaatgctactaccgtaaaaacggataatggaaccgtcaaaatcagaagacagtatctggttatgttacaccgctggatactttca

SEQ ID NO: 21174 - DNA, 202 bp, Gossypium hirsutum
  Clone ID: LIB3146-038-P1-K1-F9
ttttctctgtcgaagaatccccaaattgaaactcaacttcctctgctttcaagaaacgggggaggcttgttcttgtccattccacaaaccttgtcacttctgttaagttgttcaaagttaaagcttcttttacactcccatcttctctatcttctaagtctgctactgctgcttctgctcctgcataatagaacatgtattc

SEQ ID NO: 21175 - DNA, 173 bp, Gossypium hirsutum
  Clone ID: LIB3146-038-P1-K1-G1
atttttattagaaaaacggaaacaaaaaggaaatctctttgatttcctgagatcaagttatacgatacttgatccagaaggaaattgcaaacttgattgaagatcttgtgagcttgttcatcgtcattaactacaaacaagccagcagcatcggtaaaagtgttctaactgcc

SEQ ID NO: 21176 - DNA, 165 bp, Gossypium hirsutum
  Clone ID: LIB3146-038-P1-K1-G11
ggcatgggatgttggtaaaatggatccttatcctcatgaaaaggattggctataagggctgggctctaaagtaccattatctaaccattgttctaccaaagcactgctcgagctgctaccgctgctagagcggatctacttttactggactaaaaacaaaataaa

SEQ ID NO: 21177 - DNA, 418 bp, Gossypium hirsutum
  Clone ID: LIB3146-038-P1-K1-G12
acgcccacgcgtccggttgccgaggatggcaaagtgaagcaattccgtgttattttgttaccgggggaaaagcttgctgatacaaatgccgcaggtgatgcctttgttggaggctttctttcacaattggttcaagggaagtccatagaggattgcgtaagggctggttgctatgcatccaacgttatcatccaaaggtctggatgcacatacccagaaaagcctgaatttaaataaagctattccactttcctgaactcctcttcactgttgttttcaagtttctgattgtaaagaaccctcttgctaattgaatattgttattatttatactatatgccggtgtaatttcgatgcctgcatattgaaatggcatatgagaataacattttaatgttattcaaaaaaaaaacaaaag

SEQ ID NO: 21178 - DNA, 557 bp, Gossypium hirsutum
  unsure (1)..(557): unsure at all n locations; Clone ID: LIB3146-038-P1-K1-G2
ntcggacccgacgcgnttccggaacggccatatctaggaaggggaagccnnggatgagttngtngtttcctttggacccagtgccanntgctagaaaggtgtgattanngatgacnntggcttnngtggagacctgnnagaagtnntagcctatgctatgaangnnatgaggnnagatctatctatactnnngaggtggaacccaatnntttgcggagaattgatatngnngatgaacnnatgaganngtgaagnnaaaagagnnnacctgcangnnaaatggtcaccccaatagcnntggttttaattggaacctnnttggatgttanntcccttctggctggagggtgttactttaccgnnatgatganntggtcttgggattttcttgatgaaatgatttnngacggattagttttaatcttcaatggtggctcaaatcaaaacttggagtanctgagggaagaaggttcaatctcagcttccatgttcacanncgtatgaacggnggtaccaaaagggcttgtggggggaagaagaaatcatgtttttgattc

SEQ ID NO: 21179 - DNA, 380 bp, Gossypium hirsutum
  Clone ID: LIB3146-038-P1-K1-G3
cccacgcgtccgcccacgcgtccgacacaattatgtggaaccatcaccatattgtgttctatgttgatgaagtgccaatccgagtacatctgtgtccaaggagaaaaccagcaaaagggctggaaaggggaaggacaaagctaaagagcaaaaactgaagccaagtgatcatgaactaagggatacaatttgtaaaattcttaaggaagtggacttcaatacggctacattcactgacattctgaagcttcttgctcaacatttcaatactgacctcaccccgaggaagtcatcaatcaagctcataatccaggaagaacttaccaaactagctgatgaggccgatgacgaagacgacgaaggagatgccgagaaagatg

SEQ ID NO: 21180 - DNA, 441 bp, Gossypium hirsutum
  unsure (1)..(441): unsure at all n locations; Clone ID: LIB3146-038-P1-K1-G4
cttttcattgaaataaaaacaataactgatgcaaacacaaagagcaatcttcacgtgtcttgctttgttgcgtactgtttttgttctttgatcgtctttgttttgattcttagacggtgttgctttttaaatatatagggattcacaagagagcaaaagagaagcttgattttgtgtgtagagaataatggaaggaaataaaaaagtggggtcttcttcttcttcttcttcttcttcttctttagcttcagagctatttggttcaaaagacccaccttcttcttctactgggatttttggctctatttttgctcctccatctaaggtattaggtagggagtcactgcgtcatgaccttattaccaaaaggtacgattcacccaaagagccatggaacacaacanagccaggtccctatggtaattcttccaaaggacatga

SEQ ID NO: 21181 - DNA, 341 bp, Gossypium hirsutum
  Clone ID: LIB3146-038-P1-K1-G6
gaacgccaactaagaaagaagccggatgagttggtttcctttgacagtgccaatgttaaaaggggggtagcataatgggcttgtggagactgagaatttacccttgcttgaaagaaaggagatcatctatactgagggggaccaattttgcggagatgatttggatgaacatgagagtgaagaaaagagacctgcagaaatggtcacaatagctggttttattgaacctttggatgttatcccttctgctggaggtgttactaccgatgatgatggtcttgattttcttgatgatgatttgacggattagttttatcttcaatgtggctcatcaaaacttg

SEQ ID NO: 21182 - DNA, 100 bp, Gossypium hirsutum
  Clone ID: LIB3146-038-P1-K1-G7
gacgcgcgcggctaagcattatgtctgatcttgacatccagagttttcgaccattacgcaactgtgctgtagggggagcaaaagacactgcggctgcatc

SEQ ID NO: 21183 - DNA, 321 bp, Gossypium hirsutum
  Clone ID: LIB3146-038-P1-K1-G8
ccacgcgtacgtttttagctatctctagatttaaggtttttagtttaaggaaaataataagtactactctggggggttttttaacatataaattcaacacaatcaactttcttttgattcttagacggtgttgctttttaaatatatagggattcacaagagagcaaaagagaagcttgattttgtgtgtagagaataatggaaggaaataaaaaagggggggcttcttcttcttcttcttactacttcttcttaagcttcaaagctatttggttaaaaaaaccaacttttttcttctattggaatttttggctttatttt

SEQ ID NO: 21184 - DNA, 428 bp, Gossypium hirsutum
  Clone ID: LIB3146-038-P1-K1-G9
cagaaatcctagtgctgatattgttctttccgacttccacaaagcatggggaagaagatctcgcattctttccctctaagcaatgttttgatggtggggcctgtgatggttccatcaaccttgtttcccatggccgggccgccatccaacgttccagccaactccaaccccagctgttttcgtcgaattcttgatatttggtatataaacctgagctatttgtttggttagttgaactaggctttgatctccattgctgtaaaattaaagaactttgaattacttagggtatctttcagtttatgatgtaaacaagcgcacggaatttagaacgttttgataccttctgagcaagagaataggctagagctctttctctcttgaaggtccttcttgcttcatttgcagctttgttttaacatcttcta

SEQ ID NO: 21185 - DNA, 262 bp, Gossypium hirsutum
  unsure (1)..(262): unsure at all n locations; Clone ID: LIB3146-038-P1-K1-H1
gctaagtttcatgtctgatcttgacatccagattcctactgcctttgatccgtttgctgatgcagatgctgaagacgctggtgctggtgccaaggaatacgttcacattcgtattcagcagcggaacggtaggaaaagcctgaccactgttcagggattgaagaaagaatttagctataacaaaattctcaaggacctgaagaaagaattttgttgcaatggcaccgttgtccaggacctanaattaggaaaggttattcat

SEQ ID NO: 21186 - DNA, 95 bp, Gossypium hirsutum
  Clone ID: LIB3146-038-P1-K1-H10
tcggatgactagcgcagcatatcttatacaggcagaaggaacaattcaaagatgtcgcatgcattagttgtcaataaaaatcaaaagcaaaatca

SEQ ID NO: 21187 - DNA, 357 bp, Gossypium hirsutum
  Clone ID: LIB3146-038-P1-K1-H12
cccagatcttattgggccacttgcctgtgtttagttcaaactctatttacagttcttactggcaatatttacatcaatgatgtcaaacctcatacatgctgctgcagtaaataaaccaaatatttaggctgccccaaatgattatgaacatattgattgattctgaacaaactgatttttgggttgccccttagaggacgctgcttaaccttatacattttgcctcacaacacttcttccacggatgaagcatactatgataggctgacctttttaaggctcctacctcatgtaaatacctctaagataatattacttcaatttttatacaagattcttgttccgtaaaaatataaa

SEQ ID NO: 21188 - DNA, 99 bp, Gossypium hirsutum
  Clone ID: LIB3146-038-P1-K1-H2
ggtttttgctatctctagatttaaggtttgataggaaaggaaaatatttaggtttatattgggagggaatttaaatgtttagtttataaatttaatgtt

SEQ ID NO: 21189 - DNA, 381 bp, Gossypium hirsutum
  Clone ID: LIB3146-038-P1-K1-H3
attatgctttggacatgggggtaattaaaaagtctgactatgatcgtatcaacaagctggtcccagtttgtgaaatggcaataaagctttgcggcactgatggtacaatctcttgcatggcttcatattttgtctgcaataacatattcaatggcatcatggcacttgctggcgatacaaattactatgacgttagaaagaaatgtgaagggagcctttgctatgacttctcaaacatggagtcatttctgaacaagaaatctgttagggatgcccttggtgttgggaacatagatttcgtgtcctgcagccctactgtgtatcaggccatgctggttgactggatgaggaatctcgaattggcattcctgttctcctcga

SEQ ID NO: 21190 - DNA, 442 bp, Gossypium hirsutum
  Clone ID: LIB3146-038-P1-K1-H4
tcaccgatttgcgcttttcgtcgctgtctcagtcggtgctaacatctcctgtggccatgtgaatcccgccgttacattgggtgctttcgttggcgggaacattactcttttacgtggtatcctttattggattgctcaactccttggctcaaccgtcgcttgcctgttacttaagttcgccactagtggcctgggagtaccagctttcggactatcatccgtcgtggaagcattatacgcggtcgttttcgaggacgtaatgactttttgactgatgcacaccgtatacgccacagtcgtcgatcctaaacgaggcaacttgggagtgatcgcaccgttggcgatcggtttaatcgtgggagccaatattttagctgggggggcattcgacggagcctttttgaacccaaccgtttaattggaccagcccttgttagctggt

SEQ ID NO: 21191 - DNA, 99 bp, Gossypium hirsutum
  unsure (1)..(99): unsure at all n locations; Clone ID: LIB3146-038-P1-K1-H6
cgccacgcgnccnctacaagcttgggaaggctggcaatgaatcacatgctccgagtactgtctaagacaggactgacaacgatattacaccaattggtg

SEQ ID NO: 21192 - DNA, 252 bp, Gossypium hirsutum
  Clone ID: LIB3146-038-P1-K1-H7
attatgctttggacatgcaggtcataaaaaccactgactatgatcgactaaaccaagcgtgggcgggctggctaaagggccatcaagctatgcggcactgatggtacaatctcttgcatggcttcatattttgtctgcaattacatcttcaacggcatgacggcactcgctggcgatacaaattactatgacgttagaaagagatgtgaagggagcctttgctatgacttctcacacatggagtcatttctg

SEQ ID NO: 21193 - DNA, 453 bp, Gossypium hirsutum
  unsure (1)..(453): unsure at all n locations; Clone ID: LIB3146-038-P1-K1-H8
cggaanacccgggctcacggatttgcgcttttcgtcgctgtctcagtcggtgctaacatctccggtggccatgtgaatcccgccgttacattcggtgctttcgttggcgggaacattactcttttacgtggtatcctttattggattgctcaactccttggctcaaccgtcgcttgcctgttacttaagttcgccactagtggcctgggagtaccagctttcggactatcatccggcgtgggagcattaaacgcgttcgttttcgagatcgtgatgactttcggactggtgtacaccgtttacgccacagccgtcgatcctaaacgaggcaacttgggagtgatcgcaccgttggcgatcggtttaatcgtgggagccaatattttagctggtggggcattcgacggagccctaatgaacccagtcgtttcatttggaccaggcttggttagc

SEQ ID NO: 21194 - DNA, 274 bp, Gossypium hirsutum
  Clone ID: LIB3146-039-Q1-K1-A1
gataaggcttctctttacttgacagcaattgaggatgcagagtacaaagatgacaagatcgaattttggaataatgtttacgggtttgacatgagttgcatcaaaaagcaagctatgatggaacctcttgtggacacagttgaccagaatcaaattgtgacgaatagccaccttctcaagacaatggatatattcaaaatggctccgggtgatgcttctttcactgcatcttttaaagcttgtgcacaacgtgatgattacatccatgcttttg

SEQ ID NO: 21195 - DNA, 404 bp, Gossypium hirsutum
  Clone ID: LIB3146-039-Q1-K1-A10
cccacgcgtccgaaacaatgtctgactccatcattacgaagaatatccttttcatcttatctagttgtttctatgcgaggggatgagttgcatgattagtttctataaagcatcagggaagttctgttttgttgatcttgtggttgtttggtggaggtttttaagaatttcacttttgcaataagcaaaatattatttgatggtactttaatattttaatatatgcatataacactgcagtataagctagatggatctccctctttaaaaagaccatagaaatcttggttgtttttgcacatttcattatatgccaacaagattggaaaaggtgatcaaattgtgatacactcacttttccttgtaggtttgatggttagaggatgcttatggtgattgggact

SEQ ID NO: 21196 - DNA, 213 bp, Gossypium hirsutum
  Clone ID: LIB3146-039-Q1-K1-A11
cggacgcgtgggttgaagctctatatgcatcccagcatgcaatatttttctttgccagggtgccacaaatttggaagaacttttctaacaaaagcactggggagctcagtttcttaacatgcttaatgaatgttgctggctcgcttgtgagagtatttaccagcctccaggaaaaagcaccaacaatggttcttttgggctctgtacttggga

SEQ ID NO: 21197 - DNA, 366 bp, Gossypium hirsutum
  Clone ID: LIB3146-039-Q1-K1-A12
cccacgcgtccgagagtgttgaagtattgaagctgtctggtgttttgtttgttttttgaaatctgatgtctccgccgcttcttggcgtggaggaagggggtcagaacaatgtgactttactgggttcttctggctctattgatagtgtgtgccagaataatgctgaattgaaggagcgcaattacatgggcttgtctgattgttcttctattgattgctctgttgtcacccttggttccgacgatagcaacgtaagtttgaatctgaaggcaacagagctcaagcttgggcttcctggatcacagtctcctgaaagaaatcctgagctttgcttgttaagctctgctcaacttgatgagaaacccc

SEQ ID NO: 21198 - DNA, 448 bp, Gossypium hirsutum
  Clone ID: LIB3146-039-Q1-K1-A3
cgccctacggaccgggcactgaacgggctgggacccacgcgtccgcggaattgtagtgtggagtgggaacgatgatcagtgtcatgatgctaggtggagccatggggctaccggggtaatttctgttactagtaatctggttcccggtttgatgcacgaactcatgttcaatgggaaaaacgcttcacttaatgcgaagctcttacctttgattcaatggctctttgaggaacctaaccccattggtcttaacacagcccttgcacaactcggggttgtgaggccggtttttaagttaccgtatgtacctcttccgctggaaaagagggtcatatttgttgaactggtcaatgaaatcgggcgagagaactttgctggagaaaaagatgttcaggtacttgatgacaacgatttcatcttggttggtcgatattagtttttttttttt

SEQ ID NO: 21199 - DNA, 412 bp, Gossypium hirsutum
  unsure (1)..(412): unsure at all n locations; Clone ID: LIB3146-039-Q1-K1-A4
ttccgcggccccgtggggccaggttcctccaactcccttggaatcaaagaatattagggtttctaaaatttcacaatcttttttctttttccctctgcgagccaagntacaatatataatctagattttaatgatattggcaaattgcttaccggagggatatggaattaggttggggaaatttaggagacccataaactccttggttccaagggaggcggtggaacccgcgccttcgccacggcggacgcgtggttccgcttgggccttttggcccggtacatggaggcgttgttggcttaaccatattatggtgtatgccaacatgattgagatgggggatcaaattgtgatacactcactgacccttgtaggtttgatggttagaggatgctaatggtgattgggactg

SEQ ID NO: 21200 - DNA, 413 bp, Gossypium hirsutum
  Clone ID: LIB3146-039-Q1-K1-A5
aagagaccccgtggctgaaacctcctattccttccgactagcaatatatttctttgcccgggtgccaacacattgggagggcggttgctaacaaggccctggcgagctcacgttcttaacatgcttaatgaatgttgctggctcgcttgtgagagtatttaccagcctccaggaaaaagcaccaacaatggttcttttgggctctgtacttgggattgcaacaaatggcgcagtcctgagtcaaattattctctattggaattcacaagtgccgaaggagaagaaagcagagtaaattgataccatgtcagagtcagaagtaggaggaggttaagattggtgcagttggtgatcatcggatgtatgtattaccaagcaaatatcatcaacttatagttgacactatgaattgg

SEQ ID NO: 21201 - DNA, 320 bp, Gossypium hirsutum
  Clone ID: LIB3146-039-Q1-K1-A6
gacaaaaaaaaatcttttatagagtgaacctaaattcaatttactgggcgggggttttacaaaacggtgaactgggaaaacacgggggggacccaaattaaaccccttttaaaacaccccccttttgccagatggggttttattgaaaagacccccacccattgccctttccaacagtttccacaccctgaatggggaaagagactcgccctttaccggtgcattatatgcgccgggtgtgctgtttacacgcaccgtgaaaactataaattgccccgccctaaagcccccccccattggtgttttgcctttttttttaa

SEQ ID NO: 21202 - DNA, 212 bp, Gossypium hirsutum
  Clone ID: LIB3146-039-Q1-K1-A7
gagttaaaattacaccggcctcaacgttactcggatttggatggaatattgatgtgttttaacacggtatgttcaattttcttaaatatttacttgcatttgggaaaatatctatttatgtatatcttgtactcaatacttattcgtacatcaggtgttattggaggtttttggcgaatatgagtaaaaaactatgtacatgatgcctgctg

SEQ ID NO: 21203 - DNA, 481 bp, Gossypium hirsutum
  unsure (1)..(481): unsure at all n locations; Clone ID: LIB3146-039-Q1-K1-A8
cgtcgcgatnatggatgcttctcaagcatnnggtgacgatgctttgctggctncattagttgnnaacttgtctacgcgnagtgtatgcatttatgttgnnttttaacattttaacggtagataatnnngttgtgttttattcgtattttacattatanntgtgnnntaataaatnntattgtagtggaaacgagcaactaagttatgaagaatatgaagggttgttcttatcnncacttacaatgtatatagggcaattacatttgtttcaagacataatattccattctaccgtaagaagggattgtacanaaaaaaaatttttttaactctgaaaaaaagaggaattaatttttttgaaacttggtaaataaaaattcgggccagaaaaatctttttttggaaaaaaaaaaatttttcaggttctttgattgacaaaaaaaaatggggcggccgttttaaagaatcaaagttttttttt

SEQ ID NO: 21204 - DNA, 391 bp, Gossypium hirsutum
  Clone ID: LIB3146-039-Q1-K1-A9
caaatgttgacaccgatgagaatgaggtccagtcttcagatggaaagctgatgctcctgcagaattcaccgtttttcaagaatggcaatgtaggaaacctactggccctagtgaaatatgacgagggactaaagagtgaattatgcaaacatggtgagcgtgttggaaaattggaaaattgtctgaagactcttaattgctggaagacggacatcgagctctatatgtctgagttgcaagattctctggaacctgatttagtgaacgatctggactgtttgtccacgaaagaagaaataacaaagctgatcgagggaagaggtcattctgcagcttctactcttctctgcagtattgctcaaggacattggatggatgtcatgcaagatgt

SEQ ID NO: 21205 - DNA, 403 bp, Gossypium hirsutum
  Clone ID: LIB3146-039-Q1-K1-B1
aatacgctcaatgtggactggcgaatggatgcattcactgatttggacctaagtggtgcatatttgattacctagatgcagaatatacataatggcgaaaaaaatcggggttgaggggagaaacaaacaattgagttgccgttggagcatggactttcaattatgttggatataggggcctttgaagtaaagggaaacaggggaaatgggcttgaaatctacatgtttgtaaactggatagctgaacaagcattgattggcacactgattcagttgcgcgagatatccatatacttaacgtctgttcctttcatgtaaagcatttgcaagtcaaaactcgaaaacagcagaacaagccgcgggaccccgctttgcaggcttaaggagtcatgcattttttaat

SEQ ID NO: 21206 - DNA, 409 bp, Gossypium hirsutum
  unsure (1)..(409): unsure at all n locations; Clone ID: LIB3146-039-Q1-K1-B11
ccattgcactctccctctttcttggcctcaagggtgatcccgtcccatgcgatcgttgtgctggaaattgaggtacaaaatgtgtcttttgcgaagatggtaagatgaagcaagaaacgggcttgatcgattgtcgggtgtgtaaaggtgcanngtagatttagtaaaagatcagaactcaggcttagcttcattggttcttcgtactcaacctatccttaaaaggtgacatcctagcaggtttggcactccaatcccagcattggaacactttctccttcctatacctatgatctcctttgcaccaaaaaaaccgaaggatgctttattgattgtttaattttacttgatacatgacctagaccttatttatgctaccattacagtggctgtttctcaatagactttg

SEQ ID NO: 21207 - DNA, 301 bp, Gossypium hirsutum
  Clone ID: LIB3146-039-Q1-K1-B12
tatgaattttgatataaatataaaatattttaccgtttcctaattgtgtaaagtattttatatttatatgaaatactttacacaattaggaaacggtaaaatacatgaacacaagaaaatacaaattgctagttctatcggagaagatcaacatggcttattattggatttagatggtgaagatggcatggcttttaccgtttcctaattgtgtaaagtattttatatttatatgaattttgatataataacacattacaacccagaaaatacaaaaattaatcacctagaataaaaatat

SEQ ID NO: 21208 - DNA, 297 bp, Gossypium hirsutum
  Clone ID: LIB3146-039-Q1-K1-B2
atcgaatcatggtccaaagtcatacccaacttagaccctcccaagacaccatcttcttttatgacccctcgccccggcaccccttttggtattccttctaaactcaccggtaactttggtcttccttatgcatctgagcttttcgcttaagagggtggcatggtaataggttcagcaaccactgggcaaatgggtattttggctggacattgtcctacaattgctgaacttgaacctgggatcttgtcggtgcatgaaagaaatgatgtcacaaaatattttcttagccaggggttt

SEQ ID NO: 21209 - DNA, 78 bp, Gossypium hirsutum
  Clone ID: LIB3146-039-Q1-K1-B3
ccgaaaaaaaaaaaaaaaaaaaaaaaaaaaaaataatatataaaaaaaaaaaaaaaaaaaaaaaaggggggattttta

SEQ ID NO: 21210 - DNA, 262 bp, Gossypium hirsutum
  Clone ID: LIB3146-039-Q1-K1-B4
aaatgggcctaaaaaatcgttgcaaaaagttctttaaaaaaagaattccttgaggagttggggggaatctcttaagggggaactagaaaatgtgaataaagagcattctaagctgaaggagaaggaagcggaaactgagtccattgctgggaatctgcatgtcaagcttcggaaaagtaaatcagagcttgaaactttcctttcggaggaatccaaaacaagaggtgcctgtgcagaaatgttatcaaccctccaacagcta

SEQ ID NO: 21211 - DNA, 402 bp, Gossypium hirsutum
  unsure (1)..(402): unsure at all n locations; Clone ID: LIB3146-039-Q1-K1-B5
ccaacgcgtccgcggacgcgtggggggaactataaagcacatgctgataatcactatgatcccaatgcattgccggtgattcaggggattaattacagagacatcatggcggataatgtgtcgattgctgccaagttggaagggattgaaggggatcctttcaactaaatttggataatccatggtacgattggaatggccagttaaggctaagaaggtgccatggacttgcacagacgtcgaggggatctcgagtggagtaagtcctcggccatgtgaccaactaccagatcaagggccggagaaaatcacggcttgtgacttccctgcagagnccttgtccattgatagagtggtgctcaaaagttgtacctataggatgaaatacacgtgactgatggt

SEQ ID NO: 21212 - DNA, 350 bp, Gossypium hirsutum
  Clone ID: LIB3146-039-Q1-K1-B6
acccttccggaagaagacccgcaggaatcaacatcaaaagaacaaactttgactgaagttccattgagtcttgagaatgaagctgccattgaagagctgcaccaagctgaagaggaaaatgttaatggaaatggagaggaagaaagggaagaaccaacaaaagctgaagaggatgaaaaagaagattcgacaggggaagggggaggagaaggtgagacaagccaagaaagatccgaacttgaatacccgggaaccgacctggaaaacgagtcaaaggagagtgagagtcaagataagttattgccagattgtttactattaatgatgtgcgaaccaaagctgtcaatgga

SEQ ID NO: 21213 - DNA, 213 bp, Gossypium hirsutum
  Clone ID: LIB3146-039-Q1-K1-B8
gacaaagaagggatcccaccagaccagcatttgcttatctttgctggtaaacagctggaggatggccgtacccttgctgactacaacattcagaaagaatccacactccatttggtccttcgattgaggggtggtatgcaaatttttgtcaagaccctcaccggaaagaccatcacattggaggtggagagttctgatacgattgacaatgtc

SEQ ID NO: 21214 - DNA, 403 bp, Gossypium hirsutum
  Clone ID: LIB3146-039-Q1-K1-C1
cggacgcgtgggggctttatagccgaaaagaaattaaaagagaaaaatacaaataatttcctattggctgccattctcgctgctgttttttgtttcctttcgcaggtacaggtgcgtggcttgtgtacgaggctgtactggcgtacaagggttgttgacgtggaggcacgagcggcgttggggctgtacggcggctgagagctgtggcgcaaagagagagaaccctaatggtctaaagttgtaattttttgggcctatcgggcctgtatttgggtcttgggtctttaatcatgtaacttggactgttataagacttgggttttatatttatttattttgtatttattttgggtttcaaaggggccgagcaaattggcctgtttacaacattgatagcaataaa

SEQ ID NO: 21215 - DNA, 410 bp, Gossypium hirsutum
  Clone ID: LIB3146-039-Q1-K1-C10
cccacgcgtccgcccacgcgtccgcccacgcgtccggtcgagtccaccactgaaggtgttgaaccagggcccaaacctgtaataatatccgaggcgcttgccaagtttttgggtactggaggaagagaaatgctagcaaccgaggcagaaaatcgtgtttgggagtacataaaggttaatcgtttggaggatccgtcgaattcaatggtggtactgtgtgatgccaatcttcgtgaacttcttggatgcgaaagcatatcggtgatgggcgtacgggagacgctactacgacatcatttatttaagcagtcttaagatctctgatatatgtctgctagtattaactggtagaacaaatagtgacgacccttttctctttagtacgcggttcttttgttatgtaggttctt

SEQ ID NO: 21216 - DNA, 278 bp, Gossypium hirsutum
  Clone ID: LIB3146-039-Q1-K1-C11
ctcagtttgtgattgacaacaaggtgctccctcatctctatcaacttcttgtacaaaatcacaaaaaaagtatcaagaaagaagcctgctggacaatctccaatataacagctgggaataaagctcaaatacaggcaggtattggggccaatattattcttcctcttggacaccttcttcaacttgcggaggttggcattaagaagggggctgcatgggccatctcgaatgccaactctggaggatctcatgagcagattcaattccttgtgagccaa

SEQ ID NO: 21217 - DNA, 397 bp, Gossypium hirsutum
  Clone ID: LIB3146-039-Q1-K1-C2
gcggtcacacacttgaggcaccaattaatcctttgatgtgcacaaagaatggcttctcttgtttgctgcctgcaggattttggttcttttggttccattacttgcttcctgctaaaacattgacttcccttttcacattaatacttttcttttcttttctttttccttttcccccaaagcagatagtggaagtagttttcaggactataatgttgattgtttttcattagacatcttgtagtattgagtagtagagttggttccattagttccagttttcactttcccccacttttgtggaaccaaaatttccattagtgagcaaattggattgacatgatgttgttgcattggttggtttctgcatggtccattacttgtaaaacccatatgcttt

SEQ ID NO: 21218 - DNA, 377 bp, Gossypium hirsutum
  Clone ID: LIB3146-039-Q1-K1-C3
cccacgcgtccgatggaagcagtcccggaacttctttccgaatatcggacaccgaaatcttcttgcatactggtgttgagactacatgggatgcttatgatgctaatgatcccagtagcagaggaagaagtcgttcatcctcaattgattacgattctggtgatgaaaacaggaaatcatcagtcaatataaaaccaagttcgaagaataaggcagcacagagattgaaaagtgttctcctttggcctcatatgaaagggaaaaaaccgaaaagattgaagaaatcaattgaaggttgctctgaagaaactccaatcccacttagacaaagattttcaaagccttcatcatcacttcctaacaacaagagaacacta

SEQ ID NO: 21219 - DNA, 430 bp, Gossypium hirsutum
  Clone ID: LIB3146-039-Q1-K1-C4
tggaccaagccgtcggaaccaattcaaccttttttttccttcgttatttccaattctgaaactcaaatctcaaaacgattttagaaagaaaaaaccccccaaaaaaatcaaagccttttttaactttccttcaatgaaacgaaggaccccagattctcaggcaaccgtctccgaccagaaattgaagaaaatcaaagaagatgaagaacctgaggatacaaaatctgggttgatgaatttagatgaaaatcttttgtacgaaagttttcaaacacgtcgatgcaaggactttggctagggcttcttgtgtaagccgtctatggcgccaaaccgccaaagacgagcggctttgggagctgatctgcaccaggcactgggctaacatcggttgtggaacccaacagcttagatctgtcgttttgcctctcgg

SEQ ID NO: 21220 - DNA, 338 bp, Gossypium hirsutum
  unsure (1)..(338): unsure at all n locations; Clone ID: LIB3146-039-Q1-K1-C5
tccaaatgtggcgttgctgtggcttaatcttttgatcataagcctgagagagcagatgagggggagagaattgaagccggcggcggatgggtgataaaatggaatggacatcgcgtgcttggagtactcgccacttcaagatccataggcgatgggtgcctcaaaccatttgttacatccacaccagaagtgacggtaagcgagcttaccaatggagatgaattcctgatactggcgagtgatgggctgtgggatgtggtatctaatgaagtggcttgtggagtantgaggcgatgtttgaacagccaaatgacgaagaggaaatcatcgcttcagtt

SEQ ID NO: 21221 - DNA, 256 bp, Gossypium hirsutum
  Clone ID: LIB3146-039-Q1-K1-C6
agccttccggccaattgccgcctccaaggaccaggccaagaataatcgttgtctgtatttacaaaacaaagtgattactaagaaggctgtgctgtgctgaacttagcattagcgggaaatgctcttggcacaactaaggtagttctgttctaacgctcgcattcttgcgtgtttgaaaaaaaaattcgacagtggaagaggaagaagaaggtgagacttgccaagaaagatccgggcttgcattctaggggaccca

SEQ ID NO: 21222 - DNA, 297 bp, Gossypium hirsutum
  Clone ID: LIB3146-039-Q1-K1-C7
gtttatgattatgcttgtactatgcatatgaaatggctcgatcaggttggaagctagtcggagatccatcacactatccatcaaatttatcggtagattttgatgctctggtcgtggttataatggcatgtataggtgggcgtttgtctaatgtttagtcaataatatctgtatgtaatgttgctttgaatttgtgaaacttatgatatttgatgccttgatgattggtgtgcttttggcactttgatgtttaaaggttgatgattataagatcaaatcaatgcatgttttatggcc

SEQ ID NO: 21223 - DNA, 347 bp, Gossypium hirsutum
  Clone ID: LIB3146-039-Q1-K1-C8
ctagactggctaaggatccccttatccaagcagctgtaatgttacatccttcatttgtgaatgtggatgatatcaaaagtgtgaaggtgcccattgcgatattgggagctgagcaggaccatatatctcccccagagcttttaaaacagtttgatgagatcttaaaagcgagtgaggttgatagctttgtgaagatatttcctaaagttggccatggatggtcagtcagatacgatgtcaatgatccgacagctatgtcgagtgctaacgaagctcaacaagatatgctggcgtggttcgcaaagtacgttaagtgagaaacttattcgatggtgatggagtttatg

SEQ ID NO: 21224 - DNA, 398 bp, Gossypium hirsutum
  Clone ID: LIB3146-039-Q1-K1-D1
aaaatttgaaattcatattctcaaatagagcacgatagaatgtaagaacaaaggaaatttatcttctgtttatttgtttgtttattatcccaagttcaagagatgtttgagtttattatctgataaggtaaggcatatttaagtcgctgaactaacatggtaacttttggattattatctgatatattggattattattctaacttcgaccaactttagtaagtcgcttgaactaacatagtagctcgaagataatgcgtggacttcaacactaagttgactgatttagcaaggtttgttgttatatgatcatagcatcgaccttcataatatggctaagctctccttagggctgttgtcaagctatctaccggctgcttttgttttgcatgtattat

SEQ ID NO: 21225 - DNA, 397 bp, Gossypium hirsutum
  Clone ID: LIB3146-039-Q1-K1-D11
atcatactggtaaacaatattcatctccggaagaaatgaagaaggttgctctagaaagatacaacaaaatgaaaggtaatgccccagagagattggtatcaggatctgatgactttaccatgttcctatgggaacctgctgtcagcaaacaccacaaagttcggatgactggtcatcaacagcttgtaaaccatgtttatttctcacctgatgggcaatgggtggctagtgcgtcatttgataaatcagtcaagctatggaatggtactactggagaatttgttgctgcattccgaggtcatgttgggcctgtttatcaaatcaacttgtctgcagatagcaagcttcttttaagtggaagcaaagattccacctttaaggtttgggatattcgaac

SEQ ID NO: 21226 - DNA, 401 bp, Gossypium hirsutum
  Clone ID: LIB3146-039-Q1-K1-D12
atcatactggtaaacaatattcatctttttaagaaatgaagaaggttgctctagaaaggggaacttaatgaaaggtaatgccccagatagattggtatcaggatctgatgactttaccatgttcctatgggaacctgctgtcagcaaacaccacaaagttcggatgactggtcatcaacagcttgtaaaccatgtttatttctcacctgatgggcaatgggtggctagtgcgtcatttgataaatcagtcaagctatggaatggtactactggagaatttgttgctgcattccgaggtcatgttgggcctgtttatcaaatcagctggtctgcagatagcatgctttttttaagtggaagcaaagatttcaccttgaaggtttgggatattcgtacaaaaa

SEQ ID NO: 21227 - DNA, 393 bp, Gossypium hirsutum
  Clone ID: LIB3146-039-Q1-K1-D2
aacaccaactaatatcatatccaaactgtcattacttgttctgcattttccccgcctacgaatcatctggtctcggagcttacatgcaactgctgatatatttgcttctcttaaggcaaatcaggatgaacccgatgagacaaaggcaatgagagttggtgtaccctcagaagagggtatcatagaaaatgatgttagagctgaaaactacaatacatcagctgttgagtttttgagacgactcccaggagtaacagattccaactacaggactataatggatggatgtcaaagcttggctgaacttgcacttcttcctatagagaagctagctgaactaatgggtggtcgaaaagctgcccagacattaagagatttcctcgatgctaagta

SEQ ID NO: 21228 - DNA, 379 bp, Gossypium hirsutum
  Clone ID: LIB3146-039-Q1-K1-D3
acccttccggttttttttaaaagggttttttttagggaagttccggcgagggcaagagctgaggctgagggcaattgcgaggaaagggatagggaaagatcacgccaaatggtcacctgctgcgacagtgacttttatgtatgaacctgagattcatattaatgaggatttgatggaaagcttgacgcttgaagaaaagctaaactttggtgagagcagtccaactaaagtctttgacattgacccaaatacccaacaagttgtggtggttgatccaaaggcgtatacctatgacgatgaagtgctaaagaaagctgaagctatgggaaagccaggtcttgtggagatatatgccaaagaagacagtttcatctttaca

SEQ ID NO: 21229 - DNA, 392 bp, Gossypium hirsutum
  Clone ID: LIB3146-039-Q1-K1-D5
gtgacaatggtgtgtcgaacatcgaaggtggttgctatgccaagtgtattgatctttcaagggagaaggagcctgatatctggaatgccattaagtttggaactgtgttggaaaatgttgttttcgatgaacatacgagagaggtggattatggtgacaaatcagttacagagaatactcgtgcggcctatccgatcgaatacattccaaatgctaagataccatgcgtcggtcctcatcctaagaatgtcattcttttggcatgtgatgcctttggtgtccttccacctgtgagcaagctgagcctggctcaaaccatgtaccatttcattagcggttacactgctctggtggctggcacggaagatggtattaaggagccaacagcaacg

SEQ ID NO: 21230 - DNA, 409 bp, Gossypium hirsutum
  Clone ID: LIB3146-039-Q1-K1-D6
ggaggatccacaggtggtttacatggctagtgtgggatcatttcctttcaactcttttctttctggagtgctttcttgtgttgggactgctgtccttgctgtttgtcttcgcattcaggtgaacaaggaaaacaaggaattcacggatctaccacctgagagagcttttgcagattttgttctttgcaacttggtgctccatttggtgatcatgaatttccttggataaaatcataatttccaggttttgccggactgcgtgttttctcagtttccggccgtgattcataattttagcatgaaatgaagttcttagatcatcattatgagcttgagcatacatccagaactgtagtaggaatttgatattttatctttggctaaagagtttcaagataacttgatgaga

SEQ ID NO: 21231 - DNA, 313 bp, Gossypium hirsutum
  Clone ID: LIB3146-039-Q1-K1-D7
cggacgcgtgggccgacgcgtgggcagatgatcctgggagattgtcgatgctcgtaacgaacgccttaagcgtgcaatggatctcttcatgaagcacgagtatctgccagaagatcttcagaaaatgcagacaccatttaggagctatcttcaagatatgcttgctcttgtgaagaaggagagagcagagcgagaagcattgggagctttgcctctgtatcagcgaaccattccttaagggttttcatgccgtatctcataggcattgctggtgaaaattgcgttcgattatctgtatgggcgtatggtattt

SEQ ID NO: 21232 - DNA, 253 bp, Gossypium hirsutum
  Clone ID: LIB3146-039-Q1-K1-D8
caaccgaattcgaggagtctgttgcacaggcattctttgatttggagaataccaaccaggacctgaaaagtgacctcaaaaatctttacattaattcagcactgtgagagtgtgttgttgggatacagtaactgtaaagttacttctgtatttatcaaccatatgactatattacttattcacttgcagccaaatcgatgtttcttggagccgcaaagctgctgttattcatgttccctacaaattgaggaaa

SEQ ID NO: 21233 - DNA, 352 bp, Gossypium hirsutum
  Clone ID: LIB3146-039-Q1-K1-D9
ggaaactagaatgtagcacgaaagctttgaaggactgcagaaatgtgagcagcaataccattttctatgtgatggaatacatgagggaagagttgaaaagaggaggaggagaagaatgggggcttgcctttcaatcagggcgggaactactggggaaggcctcttgcgtatcagcctgaaactacatgacatgcatatggggaagttgttgctttgttttctaatctttataatgccggcggccacttgagaacatctcatcgctatctctctctctatatatatatatatatatattcatatatcgcgcttgttttagttgacatgacatggaaaatgacattgagctcgt

SEQ ID NO: 21234 - DNA, 295 bp, Gossypium hirsutum
  Clone ID: LIB3146-039-Q1-K1-E10
aacaaacgtgaccactatgaggattagcttatttatgagatgcacaaagtccccaaactgacaaagtgatgaggcatatgggattgctcatatgatgcagaaacattctaacaaaacgccttttacaggacaacgaatcttttaggggaagaacctgtacttgttatgaaacccaaacacgcttttgaggatgccaagacccatccaaatgagcgggatacttcaaatttgtagtacacagacggcaaggaacatccacactttactatcgtcgtgccagattaccaaaattggg

SEQ ID NO: 21235 - DNA, 407 bp, Gossypium hirsutum
  Clone ID: LIB3146-039-Q1-K1-E11
cccacgcgtccgcccacgcgtccgctcgtctctgggtctcgtaagttggtgaatagtgttgtaattagtgccaatggctcggattgggacctctgcagctcacattgtgttggcaatatttgctgtggccatgtttgttgtgtccgggaccatggcacaggatattgctccttctcctgcaatggctaccggagcaggctctgctttgccggtttccgctgtcttcttatgctcttccatgttggtctctttaattgctctcttggtgcattgaattcaaagcttttcaagactttatgacattggctacccttaatttcactctcactggtgatgaggggagtagcctctaatcttctccgagataatatttgggtgttatcaattttcaatttctctaaagtttt

SEQ ID NO: 21236 - DNA, 283 bp, Gossypium hirsutum
  Clone ID: LIB3146-039-Q1-K1-E12
cccacacgtcctcccactcatccgctctgctattaggcctcgaaagtagatcaataggccgcgaatttttagccaatagctcggattgtcacctcctaaactaacattgtgttggcaatatttgctgaggccatctatgttgttttccgaaaccattgcacaggatattgctccctctcctgcattggctaccgaagcaagctctgtcttgccgttttccgctgtcttcttatgctcttccatgttgtactctataattcctctcttgttccattgaattcaa

SEQ ID NO: 21237 - DNA, 156 bp, Gossypium hirsutum
  Clone ID: LIB3146-039-Q1-K1-E2
cggacgcgtgggcggacgcgtgggcggacgcgtgggcggacgcgtgggcggacgcgtgggtcttgacttgtcattacgtattgagtggtccagaatttgaagtcttttaagttaatacatttgtccaagagttgcattaatggatgtttgacattg

SEQ ID NO: 21238 - DNA, 369 bp, Gossypium hirsutum
  Clone ID: LIB3146-039-Q1-K1-E3
atcacagagaaaagttcacaaagaacccaaagttgttaacttttttgataacccaaaacacaaaaatgggtgcttctgaatcagttcctcaaaaatcaatccatgaatttacagtcaaggattacaaaaaccaagatgttgaccttagtatgtacaaaggaaaagctcttcttgttgttaatgttgcctctaaatgtggactcactgattcaaattatacccagttgactgatctttacaacaaatacaaggaccaaggactggagattttggcattcccatgcaatcagtttttgagccaagaacctggtaccagtcaagatgcacaagaatttgcttgtacaagatacaaggctgaataccctattt

SEQ ID NO: 21239 - DNA, 339 bp, Gossypium hirsutum
  Clone ID: LIB3146-039-Q1-K1-E4
agccttccgaggaccccgggccatgaactaagtaaagttgcaatgattacccccttgggtaggcttcctgggacttgattttagttgaatgagttcaattttagcatgtgacgtaatataaaagtgaaatgtcatatataacacacaaaatagtccggaagctttcatgtcaattggagttgtggtgttgtagttgtaagcgtgttcgattgcattggaagtattgattcctccttttgaggttgagattgatgacttaatgtaatgatggatcatggggtcgtaaaagtactaacacctgtgagcaagctgagcctggcttaaaccaatgtcaatatg

SEQ ID NO: 21240 - DNA, 390 bp, Gossypium hirsutum
  unsure (1)..(390): unsure at all n locations; Clone ID: LIB3146-039-Q1-K1-E5
ccccccttccgggacacccttggccggacccttggggttctagttcttaaccgaccnncctcgatctaaaacgggctttttcttttcatgaaaatgcttcattgaatgtggtagcttatggtcatattagccatttttcatctcaccaattctttgttcaagcactttacggataatctaaccagtatactacacccgcctaaatgatcgtttgatgaccatcaactaacaactccatcttattgcctcaagtgttcaagatttaacgttttgctactgtttacaaccacctttttcaatcaacattctttccatctctaccaaagattctagtgcctaatctttgcatttacgctaatttaagaattttatcttgcgggtcgtattata

SEQ ID NO: 21241 - DNA, 259 bp, Gossypium hirsutum
  unsure (1)..(259): unsure at all n locations; Clone ID: LIB3146-039-Q1-K1-E6
cttccgaaaggtggtcttattataattgttagggcttttaaccacgttacaatctgctggatcatcgggcgactagcgatccgaaattcattatgaacagaccttctcccaaaacttagtcgcatcgtcagaatatgattttaggactagctcccgcntcgcgcacagtctaatgtcatcatgctcaaagaccaagctacatgaattccacatagtttattaaagctaaacagaaagagacatttatgccttttcctga

SEQ ID NO: 21242 - DNA, 393 bp, Gossypium hirsutum
  unsure (1)..(393): unsure at all n locations; Clone ID: LIB3146-039-Q1-K1-E7
cccacgcgtccgcccacgcgtccgccacgcgtccgctgaagaggaagtcaaacctactatatctacaagaccaaggggcccatgagccatgtgtaccaaggttacaaatggttggaagacttgtgcagaagaacagaacttggaaattggtgatgtttgcatctttgagatgataaattcaaagggccatgaattgttagactgtagctatctgaaaggccctagactagaggatcaaacataggtttgccataaaaaccttgtttatctttgttgaaacgtagttaaactcaccattaataaaagggtctgctgtggaatttccttttcgtccnaaaaaaaaaaaaaaccttataataacaaatttaaattattttaaaaaaaattactttt

SEQ ID NO: 21243 - DNA, 344 bp, Gossypium hirsutum
  Clone ID: LIB3146-039-Q1-K1-E8
caaagagctagaagagttagttgatcaatcttggaggatggaaatgggtggatttctgagggaagagcagctagtgatttagtttagaatattgctcaggttattgacatttctcactttgaggtttgatagtcctctctttcttcaagttttcagactaaattcaggtattgctgtagctcaatgatggatttctttggggtacattgcatgtggatcagattatctcaagaaagaatttggatgagacttaaaaataatcataagcatttcttcagaagactagagaaaccaagtgaacaactttattatgacacccataaagataatatagatttcttcta

SEQ ID NO: 21244 - DNA, 53 bp, Gossypium hirsutum
  Clone ID: LIB3146-039-Q1-K1-E9
cacctaccaggtattggtcatggtggtgccaccattggtgtatatggtggtgt

SEQ ID NO: 21245 - DNA, 202 bp, Gossypium hirsutum
  Clone ID: LIB3146-039-Q1-K1-F1
cttccgcggacccttgggggctgaaattgcagttgccattgtttggggggctgcccatggactgctgtccgtatgtgctcctctgcaaactggctgtacttgggcttctggattcactggtacaggaactcctatggagaatggtgaagcttcggctgcaaagatggaaagaaaaatgtatgctggtcaagaaccattcatg

SEQ ID NO: 21246 - DNA, 394 bp, Gossypium hirsutum
  Clone ID: LIB3146-039-Q1-K1-F10
cccacgcgtccgaacgaattaaaaaaaaagaaagaggaaaattcgagagaaaaagagtgaaccaccttcaaaaaaaatatttgctttctttgattgcttggtattcgcgttctctctgtgcgcgtcgattacaaggttaaaatctggctttatatccgaaaagagagaggaaaaataaatcaaaatacaacattttctttgtttgtatttgttgctgttttccttgtctgtttgcaggtgtgcgtggcgcgtggaggtgtatggtgtacggaggcgctggaggcttgtacggcgctggaggctgctgcggcgctgagcgaacggggcttgggttttgagtgcttaatgttgttgggcttgttgggcccggtaactttgggccaggtcttaggtt

SEQ ID NO: 21247 - DNA, 309 bp, Gossypium hirsutum
  Clone ID: LIB3146-039-Q1-K1-F11
cggacgcgtgggattggtgtcacttctggtgcctccacaccagataaggctgtggaagatgccctcgtcaaggtgtttgacataaaacgggaggaggccttgcaagtagcataaaagtatgtatgtatatatgtatgtaggtttacacaggtgggtcagccattggtgctcgtttggtactgatagtataatgttgtcaatgtatagtttaagtgaaggactctttaatctttaagatctgcgcgtacttgaaatcagacaatgttgagtaattatgtatcatgaaatggtttttatttttggcttttt

SEQ ID NO: 21248 - DNA, 149 bp, Gossypium hirsutum
  Clone ID: LIB3146-039-Q1-K1-F12
tgtcactcgttttatttccccaagctgctacttttggtaaataaactacagccatatgccccttattattgttattattattattattattttgttttggtttgaaagatgctgtagttgcgtagcttaagaggagatcttcacctttg

SEQ ID NO: 21249 - DNA, 405 bp, Gossypium hirsutum
  Clone ID: LIB3146-039-Q1-K1-F2
cccacgcgtccggattattccatcctctctacgatttgcttacaatattagggaaataaaattaaaaggaaaaataaataaacacccagttctaaaatttcatctttttttttttatcttggaaaatctctgagtggaggagaaaaagagtgagggaaagatgtttttgatggggttaagcatgcagtcgttgatggatttgatgctcgctgggatttctctgatgattgggttggggatttttgctttcattgcttcaattctttgctctgctgctttcttgcaccatgctaaatatgtcgcttgattttaatatttcaatgcacaggtgccaaaagtggtaaaagaagttgccatttcgttggtcaaacgtttcatgttgcagtaattgcagtactagatggg

SEQ ID NO: 21250 - DNA, 396 bp, Gossypium hirsutum
  Clone ID: LIB3146-039-Q1-K1-F3
cggacgcgtggggcgcggtaaagtaccatacggagcttaaggaagctgacgatctactcatgcattatcgatcggaaccgagctgttacccgtcgaaagcttacttacgcggaaatgaaaagtgcaggcttgcgttaacggggtttcccgatgagttttacgatactgagtgggatttgataatgatcgatgctcctcgtggatacttcccggaggcaccagggaggatggcggcgatattctcggcggctgtgatggcgaggaacaggaaaggaccgggtgtgacgcacgtgttcttgcacgatgttaatcggcgagtggagaaagttttcgccgaggaatttttgtgccggaagtacttggtgaacagcgaggggagactttggcatttcgaga

SEQ ID NO: 21251 - DNA, 342 bp, Gossypium hirsutum
  Clone ID: LIB3146-039-Q1-K1-F4
cagaactgggttcttgatagacggtgggaagtgaaccgtgtgggtttcagttgatccaaccaaactattttatggttactacaataaaacattgcttctcattaataggtcaaccatcattggaccaataggtgggtgttttgatgggaataggtttaagtcatcaccatcttggccaggatggtggtcacaaaactgggttcttgatagacgggggtgaggcttttgtgtttttcaaagtctgtcgtctgtgaaagtaattataaactttgaatggggtcttgtgttcccattatttatggcaatcaactcaggagttttaaggtctgtcctgggcttttc

SEQ ID NO: 21252 - DNA, 402 bp, Gossypium hirsutum
  Clone ID: LIB3146-039-Q1-K1-F5
accaaaagtaatgatacagaaaagaaggttgttcctgtagcatttactattctaaaaagttttcaatgaagaaaatgaagggtaactatattattaactaccatcagtgcaagcttcaaacaaagtgcagctgcgagacttcattttgtaagcaactaaccccatcatttgctcaagaataggcttaccatcagttgagaaaaagccagggtaaggtaaagctgtatcgactaattgacgctgttacagcccattttgcccgggcttaaggcccaactacccaccaaacaacccattaacccaaacccatttctaccagcccaaataaacaaaaaatagagaaagaaagaaaacctaatcggtcctgactactggcggccgttctttgaccaccgacgcacg

SEQ ID NO: 21253 - DNA, 416 bp, Gossypium hirsutum
  Clone ID: LIB3146-039-Q1-K1-F6
ccaacccgtccgcagaattcttgctagaccttctacatccatgcaaacttcgggatcattggctgccccaagttccgaatccgtctatgaagagacctcgacatcaacctcattcgcatcttcaaccacgttgtctagcaacactcccgttgcaggcacattagaagataatcatgctcaaaaaccaagctacatgaattccacagagtctattaaagcttaacagaagaagacattcaagttttctcctgataatgtgcggaggagacatgtggttgatgatgatttacaatattttcataagaaactgatgacactttcttgcgaggacgacacaaagagcagtgctgattcttataatccatcattatatttctccagaaaggtgtacggaccgagacaaatgggtgggaggc

SEQ ID NO: 21254 - DNA, 406 bp, Gossypium hirsutum
  unsure (1)..(406): unsure at all n locations; Clone ID: LIB3146-039-Q1-K1-F7
gcagaagctgctgttgctgctgctcaagcagcggctaaagttgttcgattggctggttatggacgccactctatggaagaaagagctgcaactcttatacagtcgtattacagaggctacctggtaaaacctctcaatctatgaaggcactattgtaagacggggttaagtaaaaaatcactgcatatactttcgttttcaaacgagtttgattctgtaggctcggagagctttgcgagctttgaagggattggtgagattacaggcactagtgagaggctataatgtgcggaagcaagcacaaaacacaatgcggtgcatgcaagcattggtacgggtgcaggcaagcgttcgagctcgtangttgcaactaactcaagagaagcttcaaaagagagtggatgat

SEQ ID NO: 21255 - DNA, 394 bp, Gossypium hirsutum
  Clone ID: LIB3146-039-Q1-K1-F9
gtttggaaaccccacagccctttacctccactaagcttgagaataccgccctctgtcactcctagaggaagtgctcttaagaaaggtttacctccaggtcctataagggaaatgcctcttatgacaaagaaggtaaagaaagctaaatctgtgaaaaaggttcggaaagtagtaaagggcatgcatcctctagtcaaacgcaccaagaagttgaaatcaaagtccccctagcagactatgctttatcatgggaaaaaaaggttttgcatgcatagtcattaaaattcttctaaatttggttgttttttctcttgtttttgactggttagactttccatcacacaagttctttgactttatagacttttggtctttgaatactcgactgtgatga

SEQ ID NO: 21256 - DNA, 409 bp, Gossypium hirsutum
  Clone ID: LIB3146-039-Q1-K1-G1
cccacccgtccgggagttcaagcgacacgtggatttgataggacggctcaggcacccaaacttggtcccacttagagcttatttccaagccaaagaggaacgcttgctcgtatatgactatttccccaatggaagcctcttctctcttattcacggaacaagaacttgtggtggtggaaagcctcttcactggacatcatgtctgaaaatagccgaggacttggctactggactgctttatattcaccaaaatccaggcttaactcatggaaatctcaaatcatctaatgtgttgttaggtcctgattttgaatcttgcctcactgattacggtctcactatattccgagacccagattcagtcgaagaacctggtgctgctacatttttctacagggcacctgagtgc

SEQ ID NO: 21257 - DNA, 243 bp, Gossypium hirsutum
  Clone ID: LIB3146-039-Q1-K1-G10
cccacgcgtccgcccacgcgtccgaaaccttgcatcagtcctcaagaatgttctatcaggggcttttttaacctgatttttcattctgcataacaaagctgctcatcatttaaaatataaattctattctttctacaaccttccagcactccctttttttaacattatcatccatcattttaattgaacttcttttatctacttaagcttttattttatttcatatcattaacattaactcct

SEQ ID NO: 21258 - DNA, 403 bp, Gossypium hirsutum
  Clone ID: LIB3146-039-Q1-K1-G11
accggttctcattcgactggtctgtaaataatacctctgttagtccagacgggaagttgcttgcagtccttggagacagtaccgactgcctaattgccgatgctcagtctggcaaagtcactggcaccctagaaggacatttggactattcttttgcttcagcttggcaccctgatgggaacattcttgctactgggaatcaggacacaacttgcagattgtgggatgtaagaaaaccagcccagtccctagctgtattgaagggaagaatgggagcaattagagctctcaagttcacatcagatggtcgatttcttgccatggctgagccagctgacttcgttcatgtcttcgacaccaagtccgggtatgtgaagtgccaggaaattgacttttttggtga

SEQ ID NO: 21259 - DNA, 146 bp, Gossypium hirsutum
  Clone ID: LIB3146-039-Q1-K1-G2
aagccaattccaaaagggtgggagaatcttggaaagggccttcccaaaaccttttttttgagaagttattaaaccaaggttggtttttttaaggccttttttaataggacctactggacctccataccatgatggccttttggttt

SEQ ID NO: 21260 - DNA, 425 bp, Gossypium hirsutum
  Clone ID: LIB3146-039-Q1-K1-G3
gaccaagccgtccgccaacgcgtccgatcatggtaagtctcaaatcacttgtatctctcagttcccgatccgctgccgtagcactacttgttttggtggtttcagtggcagtgcagacccatactacaaatgcacaaagctgcccgaccgagctgacgagcctgaacgtgtgcgcacctttcgtggtgcccggtgcagctgtggctaaccctagcattgactgctgtaacgcactccaatcggtgcaccatgattgcctttgcagcactctaaggatcgcttctcgactcccttctcaatgcaatctcccaccactcacttgtgcttgaaagaaaagcagtggtgctgcatgcttaattgggtaggaaaatctaataacgccatggaatatggataccgccctgtttttttctttcttttttaat

SEQ ID NO: 21261 - DNA, 411 bp, Gossypium hirsutum
  Clone ID: LIB3146-039-Q1-K1-G4
gggagagctggaaagtttgttgtattacatcttcgctttgacaaagacatggctgctcattcagcttgtgattttggtggaggcaaagctgagaaactggccctagctaaatatcgccaagttttatggcagggaagggttttaaactctcaattcactgatcatgagctgagaaatcaagggcggtgcccattgactccggaggaaattggattgctgctaactgctttgggcttcaacaataatactcacctctatcttgcttcacacaaagtttatggaggagaggcaaggatctcaacattgcgtgctatgtttcccctcatggaagataagaagagccttgcttcagcgattgagctcgctgaggttgaaggtaaggcttctttgatggctgctgttgattattat

SEQ ID NO: 21262 - DNA, 92 bp, Gossypium hirsutum
  Clone ID: LIB3146-039-Q1-K1-G5
gaaaactgcccttgtaatataccaattgatgcctctaaagttataaactttaaatcaccctactcatctataaataaggcggacccattgac

SEQ ID NO: 21263 - DNA, 417 bp, Gossypium hirsutum
  Clone ID: LIB3146-039-Q1-K1-G6
gaattgtattcatcgaagagattttcagtgcaaagcgatatatatagctatggagtcttcctcctggagttgattagcggacgtgaagcaatttgtagagatccatcaaacttggaaacaacattaataatgcaggccaaggattcgaaagatatcagcagttttgtcgataaaaccttgggaggtaaatcaatgcgtggggcaaaacaagtagtagatttggcattgcagtgtgtgaacataagaccaagaagaccattgatgagaagcatcattgaagagcttgaacgaatccaagagacagagattggtggtttgccgtttgaagcacgcgaggagattggagatgtaacattggggagcgagctctttaggtgacctctgctcgcccgggtataataatcattcttttattaa

SEQ ID NO: 21264 - DNA, 250 bp, Gossypium hirsutum
  Clone ID: LIB3146-039-Q1-K1-G7
cccacgcgtccgcccacgcgtccgcccacgcgtccgagagcatcgataatgatgaaccttatggcgaggcaaggatgacaaaagcacaacctagtaggattcagttatagaaacctaatggtaatggaggacatcgcttttatttagaagatatgtttgtatgtatgttttaggttttggatccatattttatggtcggtttgacaaatgaacttgaatttggttttgttttaagagtgtgggtttctgt

SEQ ID NO: 21265 - DNA, 271 bp, Gossypium hirsutum
  Clone ID: LIB3146-039-Q1-K1-G8
cccacgcgtccgcccacgcgtccggacccacgcgtccgcccacgcgtccgctgcgaagaaagcttcgtgagcatccacttttctttggcataacaatggggctgctagctgaggttataaattctaggctttttacaaccgtccgggactcccttgggttaacatatgatgtatcatttgagttgaacttgtttgatcgacttaagcttggatggtatgtcatatctgtaacatcaactccaagcaaggtatataaatctgttgatgcttg

SEQ ID NO: 21266 - DNA, 330 bp, Gossypium hirsutum
  Clone ID: LIB3146-039-Q1-K1-G9
cccacgcgtccgcccacgcgtccggttctctaacggagtttccatttaggatgtaatgtaagttgttgagagatgttctaaagctcgtgctggcttgcaagagcgtcatatcaggcatgtatctgtgactcagttatctttgggagctttcatctcgtgtcccatcacagccaggtatcttaggagaaagctttaaaccccatagctatttagataatttaatcagatgattgtctcgtgacaataggaggaatttgtagaatactctgttgaggtttttccaaaaagttttgaatgacttatggtcaggagctaaaagttcttcccttg

SEQ ID NO: 21267 - DNA, 343 bp, Gossypium hirsutum
  Clone ID: LIB3146-039-Q1-K1-H1
ccaacgcgtccggtatgaggagggagattgttttatcaacgtcacgcatcataatagtggatgagctgactcttgtgggaccatcaataccattgctctagatactggatgaaatgaacaaacagaactctggcactgaaaaacaccttcaagagctaagaactgcatatgcaactctagaccctgagggatttgttgaactttatggcgacaaatatatagagaatgtgagaatgtgtaaactcccaaaaagacccaaacttcaaacacgaacgaaataccacacacaatgctaaccactggtaatgctgcctcgtgacttccgagataccctatgcaaaag

SEQ ID NO: 21268 - DNA, 313 bp, Gossypium hirsutum
  Clone ID: LIB3146-039-Q1-K1-H10
cccacgcgtccggttgcttttgcactgaaagatagcaaggatctgccatggttggccaagtacttatgattctacaagcctgcaattatatttcaattcttaaacatatagctacaggttttgaaccaattttcattataagatcctccttatatttaaatcacagtccttgcaatgttttagcttatgatctttggaagaggagattggtccaatttgaggcattgttacttttcattatgaaaaatgctgatatgaactgaaacatttttctaattgttatttatatatacattctgaaaatggtttggac

SEQ ID NO: 21269 - DNA, 209 bp, Gossypium hirsutum
  unsure (1)..(209): unsure at all n locations; Clone ID: LIB3146-039-Q1-K1-H11
ggaanggcggggcgacccacgccttcatatattcttaaaaattcttttgcacttttttttatcacggaactcccatgantagccgggggcttattataaaacaaaccttcaattaaaaatcaattcttaaacatataactacacatttttaaccaattttcattataagatccctcccataattaaatcacataattttccatccttta

SEQ ID NO: 21270 - DNA, 54 bp, Gossypium hirsutum
  Clone ID: LIB3146-039-Q1-K1-H12
tcgtccacgcgttcgacgttctcagcgacccgcttaagcgtcagatctatgatc

SEQ ID NO: 21271 - DNA, 397 bp, Gossypium hirsutum
  Clone ID: LIB3146-039-Q1-K1-H2
cttgaaactactcccaaaaattccactaacaaaaccagttcgtgtgtgagacaatgaagggtaaggcaaccaagaacccaatcttcgccttcaccacatggatccgacgacaaccaccgaagatgaaagcgtttttagcgactatctcagggatggcagctcttttgttcttgagaatggtggtggaagatcacaacaatctttttgttgctgctgaggctgttcatgctttgggtacttttgtccttatttacaagcttaccaaagagaaagcttgtgctggtacatccttttttttctttgattgatgttcttttggatgtttatgcataatcagtgatattttgtagctataaatgcctcttgctgtaagaaaaaaaatagaatctttgacctt

SEQ ID NO: 21272 - DNA, 406 bp, Gossypium hirsutum
  Clone ID: LIB3146-039-Q1-K1-H3
gttccaaccgccaccacccccttcaaatacagcttccttcgaccctgcatggacattaccctttggacctcaacatgatcaagatgatgatcaacatcatcaagtccaagttttcaacaatgaagcagctcaaaactttgtaagtgacaagcttatgaatccacctttcgacaatccgttaatgggtcctccaacagtgccgaaactctgtgaaatccttgaagggaacatggtgtgcaacattccacaaacatcatcggtttcattagaaaacaatatcgacccactagtctccaggctatcctcatgtttccccccaatacctgctggttcaaactatgcacatgacatgcaagtgggggcaagccaaatggagtacattgataacatcatcacatcaataccc

SEQ ID NO: 21273 - DNA, 418 bp, Gossypium hirsutum
  Clone ID: LIB3146-039-Q1-K1-H4
cccacgcgtccgctggtctcaacaaagcaggtaaattcccaacccttgtcactcaccaggaatccctagagtcgaaggtgaatgaaacaaaggcaatggttaagttccagctgaaaaaggttctatgcatgggagttgctgttgggaatgttgcaatggaggagaagcagatcttccaaaatgtgcaaatgagcgtcaatttccttgtttctttgttgaagaaaaattggcaaaatgtgaggtgcctctacttgaagagcaccatgggtccttcaaacaggatcttttgagtttatgttttaccttctgttatgtacggactgaaagtagtagtggggatttaatactaaaagcggtttttttcttctcttttacttagaatattcaagtttatgttatgttctggtgttccctaaaa

SEQ ID NO: 21274 - DNA, 413 bp, Gossypium hirsutum
  Clone ID: LIB3146-039-Q1-K1-H5
gccctcattgccgagggaacgtacttcgctgggaggttgtggaagaggccacaaagtatctaaattcgaagaagagaacttgttctagggaatcttgctcctactctggaagttaccaggaattgcgtcggcatgccaggagagtccatccgacaatacgaccttcagatattgacccatccagagaacgagcctggcgccgccttgagcaccaaagagaatacggtgacattgtaagtgctattagatctgccatgcctggtgcccttgtggttggagactatgttattgagaatggagataggttggcagctcgaagggagaatagcaccggtgaagcgagttcaccatggtggactactttctttctgtttcagattggttcagtcgacaatgttggtgaatcaagagcc

SEQ ID NO: 21275 - DNA, 198 bp, Gossypium hirsutum
  Clone ID: LIB3146-039-Q1-K1-H6
tccatgcatcagtcacttaggtcctatcgtcaatctcctatgagcttcagccgaagctcggtagaccttaggaacgcatcttctcaaagatctcgtgctttcatctggtttcgccggcatcattgaattacccttctatatcgcctcttaatgcaagatacatcttcccatattttccaagcccaagcaacgcattac

SEQ ID NO: 21276 - DNA, 303 bp, Gossypium hirsutum
  Clone ID: LIB3146-039-Q1-K1-H7
cccacgcgtccggtgaaagtccagcaccgaaaacagatgcagttccacttacgatgaaaaaccctgcatcctcagtggcttcgtcaaatccaaaaccaactgagactgacactgttcccaagagtagaggctgcacttcaaactgtgaatctagttcgggtttcaatactggtctggcgaccaatggtactgctgcagatgaatctcatacggattatgatgtcaatggagagggtttaagagaagctattaagaatggtgatacagctgcagtcaaaaggcttctaagtgagggtgtacatg

SEQ ID NO: 21277 - DNA, 397 bp, Gossypium hirsutum
  Clone ID: LIB3146-039-Q1-K1-H8
cggacgcgtgggagctgatcaaagattcaggatattcgcgaaaatatggtcgattgtttcaactctttctccacatcgaaggcagcttgtactactgacaagctttcggtgctgcatattaaccctcgtcggcaaatagttccatgaaattctctatactgtaaccttgattttatttggtagatttaggagccagagttttttttgtaaaaattcctgtagtcagtttgtaaagcgtaagctctaggaatttcatcaaaagtttgtaatagtttataggtactgcggaccggaaactagcctctccaagtaaggaaatcatgatgaggttatgcgtgctaaaaggtatcccggatattttccagcatctttcctctggaaaaggttatggtttatt

SEQ ID NO: 21278 - DNA, 398 bp, Gossypium hirsutum
  Clone ID: LIB3146-039-Q1-K1-H9
aacaggagcaaaaagttcattagaccaataagttcaagtaaaagcacattagcacttgctgttgcaatgagtggttcagagactgatagtttttcaagcgctggtgaggattcttcttcaacttccagtcctaggttattactacctccattacacccacaaacgaaaatggtttctttgtataataacagtattagtattaccccttcttcatcaccgtcgagtggtggccggaatttctctaactggcggtctttttcattggctgatgtacgtgaatataactgactgttatagttttacatggagtttgatatactttttatgattggctcctccttgttaatctttatttgatggaaaaaaaagagagagagaagaaattgttggccttcaca

SEQ ID NO: 21279 - DNA, 145 bp, Gossypium hirsutum
  Clone ID: LIB3146-040-Q1-K1-A10
ggtggagctcggccgtaactggctattgtaaatggacttagagacagagggctctccttctgtgagaatgtacctggtgcattatcaaaggatggaatggtcctggcttttgggaaacaatactttgtctccatggaggagatcg

SEQ ID NO: 21280 - DNA, 126 bp, Gossypium hirsutum
  Clone ID: LIB3146-040-Q1-K1-A11
gtttgttctaggcctccattgcctattttttttggacgtagagacagtcaccagtggtggggtaattttaaacctggtgcatcattaaaggataggattgacctcgtatttttcacacataacttt

SEQ ID NO: 21281 - DNA, 197 bp, Gossypium hirsutum
  Clone ID: LIB3146-040-Q1-K1-A12
caaaccaccagtgtatgaacctccaaaaaaacctccaatgtacgaacctaagccaccaaaagcaccggtttatacaccttcaaagaaagagaaacctgaacccaaaccaccaatgtatgaaccttcaaaaaaaccttcaatgtatgaacctaaaccaccgaagccaccggtttatacaccttccaaggaaggaaaac

SEQ ID NO: 21282 - DNA, 156 bp, Gossypium hirsutum
  Clone ID: LIB3146-040-Q1-K1-A2
gagtgatgtgaaaattttactgcgaaattttattttcggtttcgatttttttctccaaattgtattttaaggggtggatgcccgatcaaaggtgaaaaaaagagctttaggaaaggaaagcggcggtcccaaaaagaagaccggttttttttttgg

SEQ ID NO: 21283 - DNA, 334 bp, Gossypium hirsutum
  Clone ID: LIB3146-040-Q1-K1-A3
ccaacccttccgccaacccttccgggataatgttaaactcccccaatggttttttaagattggggaaattttaaggattattttaattctttccggccttaaacccaaataaaaaggaaaccccctaaaccctttaaaggtcaagaacaagaattttctgaaaggggggttgaatttgctagaaaagggattgcaaagagggttgctaatatgttaaacggtgaacaaattggggggaggaagaggtcatcgttctattatgacatttggaatatcaaatacttgagttaattcaaatgggatgatcttactgaagaaattgcttacaagagtg

SEQ ID NO: 21284 - DNA, 386 bp, Gossypium hirsutum
  Clone ID: LIB3146-040-Q1-K1-A4
cggacgcgtgggcggacgcgtggggcaaaatagtggtggcagagatactaaaagtactgaaagaagctgaatggaagccatctctgcattggaaatccatgccaactgaattttctgaggactcgccttatgatattgttggcgctgatgggaaaaccacgttgaatgcgtccgaatggacttttcaccgagagattcaatgggattagagttcagagttctgtttaagataatgatctccaaatcccatggaaattaaaggaagacagagttcaatagataaacaagatttgtaggaaggactgaactacaaccatttgagtcctagttgcttcttgcaaagctatcaagagtttaattccatttaatgcaatatatatacatat

SEQ ID NO: 21285 - DNA, 407 bp, Gossypium hirsutum
  Clone ID: LIB3146-040-Q1-K1-A5
ccgaatgatcccaaaagttactcggtttttatccaccgggacgaggtgaaaaatggggcgagcattcaaagcgtgcttcaacgttacagtagagaagaagtgaagaaaatgagggagaaagtgattgaattcattcccaagataatttatgcaaagcctgagaatggtttggagagtattaaggatgcatttgatgtcgccattgatggagtgttgaagagaaataaggagcatgagcagcctggttacaagtggaaatgatggttttaatggaaattggaagctcggggtgaaaaaaattagaaatgcagagaatatacagaaatttatatttattactttttaatttttaaaggatgggataggggcatgactcccccctgacactgttaactttttgtatataa

SEQ ID NO: 21286 - DNA, 307 bp, Gossypium hirsutum
  Clone ID: LIB3146-040-Q1-K1-A7
gagagatatcaaacttagtttgatcgggcattctatcggaaactttataataagaacagcattagcagagagtgctatggaaccttacctgagattcctccatacatttgtgtctctatctggtccacatttgggatatctatacagttcaaattctttattcaattctggactgtggcttttggagaagctcaaggggacacaatgcattcatcagctcacttttgctgacgaccgtgatattcgtaacacattattccacaaactttgcgaggtattgagaacaaagttgcaaaatggtcttgag

SEQ ID NO: 21287 - DNA, 299 bp, Gossypium hirsutum
  Clone ID: LIB3146-040-Q1-K1-A9
gtttgttgcaggtgtgcatggcgtggaggagttatttgctgagcatggcacgagtggaagaatcggctaaaggctgtggtggcttgagtttctagggtttcttcccaaaattccctaagtattttgggcttggggtattttggggtatttagggctttttgggttaagtttaataatttgagcctgttaattttggttgctgggctatgtaagaaatggacattggattattattggtggtttattttatttttggttttagttttggtgtaagcccgggcacaaattgggtcttacac

SEQ ID NO: 21288 - DNA, 405 bp, Gossypium hirsutum
  unsure (1)..(405): unsure at all n locations; Clone ID: LIB3146-040-Q1-K1-B1
gcgtactaccccattcttcttaagggctattcaatgaggaagacttaatcttgttatggagggcacaaggctttctagtaagaagcacaagataaacaaggcattgaagaagtaggtcacaagtactttagagatttagtgtcaaggtcccttttgcaaataatgatttggctcaatcagttgctggataactatgcttcaagatcgagggtaatcaacaaatttcaaagcacgctggctactgatcttattttgctaattgttatgatggcatcacaaggtttgtgggctcttttaaagggcaacgtttaaggagcttttgccattgacactatgaaatgatcataagatgtgctttgttgacacatttgatatggttaangatgttttcttttagagggtatc

SEQ ID NO: 21289 - DNA, 140 bp, Gossypium hirsutum
  Clone ID: LIB3146-040-Q1-K1-B10
atttgttcaaaaatgttctattaagatttgctgattaacaaatgttccactgtagttaggacaattttttttaaaataacttagttcaattccactccttcttctactggcaaaagttttcaactttattctgaacaata

SEQ ID NO: 21290 - DNA, 250 bp, Gossypium hirsutum
  Clone ID: LIB3146-040-Q1-K1-B4
gaccaagccgtccgccaacccgtccgacacaatagtttgtaactatgatgggagggagcttcccaaggttttgggtcagaattcggttgatagagtgttgttggatgccccttgtagtggtacaggagttattaccaaagatccattcgttaaaacctctaaaagtttagatgacatacaaaaatgtgcccatttgcagaagcaattgatacttgctgctattgatattgttgatgcaaattccaaaact

SEQ ID NO: 21291 - DNA, 312 bp, Gossypium hirsutum
  Clone ID: LIB3146-040-Q1-K1-B5
gtcccgccaaaccataccacgcaataatcagtaacttttattgatgggagcttgacaaggttttgggtcggaattttgttaatagaatgttgttggataccccttgtagtggtacaggagttataaccaaagatccatccgttaaaacctctaaaagtttagatgacatacaaaaatgtgcccatttgcagaagcaattgatacttgctgctattgatatggttgaagcaaaattcaaaactggcaaatacatcgtttactcaacatgctccatgatggttccagaaaatgaagctgtcattgactattcac

SEQ ID NO: 21292 - DNA, 90 bp, Gossypium hirsutum
  Clone ID: LIB3146-040-Q1-K1-B6
aaaaaaaaaacaataaaatattatacaactttttttctcgcaaaattgccagagaaccggggcggcatttttaatacattgtttcctctg

SEQ ID NO: 21293 - DNA, 333 bp, Gossypium hirsutum
  Clone ID: LIB3146-040-Q1-K1-B7
gtaatgcaatttgtatttctaacatttattttcgtggcactcagcacaatggctaaggggggcttttttatcaagcatgactttcacaaaaggtgcgcttaggctgcaagaattagggtaaaatacccacatagaattccagtgattgtggagaagactaaaggaaacgacatccctaacattgacaagaagaaatacttactaccatctgacttgacagtgcgtcagtctgtctatgttatcctaaaaagaataaaatttaatgctgaaaagactatctttttattttttttacaggcaactccctccaacaggagcaattatttcaaccat

SEQ ID NO: 21294 - DNA, 372 bp, Gossypium hirsutum
  unsure (1)..(372): unsure at all n locations; Clone ID: LIB3146-040-Q1-K1-B8
taataattagggcaaaaatttttgaacttccgggaaaaaaaaatgcgtcgggagatctcgattttggtacagcctcggtgccttcttctcttcatttctctctcaattctcctcattttcgctttctcaggagccaaacgggaggaagagaagatcgtagaagaagagcatgaaatcactcacagagtatacttggatgtggatattgatggccagcgtgtaggtagaatagttattggattgtatggcgaagttgtaccaaaaactgttgaaaatttcagggctttgtctacaggagagaagggccagggttctaangggaaagcacttcattataagggaaccccattccatcgcataatatctggattc

SEQ ID NO: 21295 - DNA, 261 bp, Gossypium hirsutum
  unsure (1)..(261): unsure at all n locations; Clone ID: LIB3146-040-Q1-K1-B9
atttgttcaaaaatgtgcaataaagaagtgcttagaacaaatgttccactgtagttaggacaatttgtagagttgaacttagttcaggtccactctttcttctactggcaaaagttttcagttgtagtctgaagaatataaattttgtttaattttggtttatctccgtagttgcaatttaagttataggctttgatggcctttgaattttgcttccnaaaaaaaaaaaaaataatagaaataagatagaaaaaataaacc

SEQ ID NO: 21296 - DNA, 421 bp, Gossypium hirsutum
  Clone ID: LIB3146-040-Q1-K1-C1
cggacgcgtggggttaaaaatttctccttttctttagcttgaagtgcttttggctgataattgatctttttaacctggttaaacgttctttcctctgctattggttttttggagctgtatacccttttttttcacattttcgctttcaaagctctttcctgttctttgctcctctttcgcaggcacagttactttggagttgatgcctggaaagcttacatatctcacaaggaaagtagcacaagtatgtttaaatggaatctggactatataggaggctctcctatccctcacagtccttgaagaagttttgatgcaatcgatcgtaatgtgtctgttaatcgtcagttaaggagcttcttctaatatcaaaattcagatgtgatgtgaagatggttacaacataaaaaataaatgctaa

SEQ ID NO: 21297 - DNA, 271 bp, Gossypium hirsutum
  Clone ID: LIB3146-040-Q1-K1-C10
cggacgcgtgggtgaagatacaaagaaatcttttagggccgatatattgatcagtaggggggtacattcactggtggagtatgagactattgaggctgctgaaaaagctgtggctactttgaacgatgaacatgactggagaaatgtcatgcatgttaaccatattgagcgaaagggttagcgcggacatgctaaagcaagcttggatgggacctgtttatgaaaaaaacatcaatggtcttgtatctatacaaacaagaaccgattttaa

SEQ ID NO: 21298 - DNA, 263 bp, Gossypium hirsutum
  Clone ID: LIB3146-040-Q1-K1-C11
cttgtcttcataattatcctgcatatgttgcatgaagttgtgaagattgaagggtatttgcaggcaaccttatctgttttgtcttctatatctcggttaaagttttaagactgtttgagatgtttgtctagtactattagatattatgttggggatttgtggtttgatctgtgtaagcagttatcttaacatcctaaatgtttgaaattgaaacttttgttcttcttatatggtctataatatgcgagatagattgtttcctt

SEQ ID NO: 21299 - DNA, 208 bp, Gossypium hirsutum
  Clone ID: LIB3146-040-Q1-K1-C12
atgaaatacaattcttctttcttcgtctttgctgcttttgtctgctctcctttgcagttgcgagtacggggctgttcgttggcccttggcgtgaggtgtacggggtggtgctggcgtgtgtacgggagcgtgcgttgcggggctgtgttctgtcatttggtggcacatgggaaagaaccgtatggttattgtaacgcctcatggttgg

SEQ ID NO: 21300 - DNA, 383 bp, Gossypium hirsutum
  Clone ID: LIB3146-040-Q1-K1-C2
cgtccgcaggacatgaatttccaagaatgatggttttttttagctaaactaactcaagcttatttgggggcggtttaaaccggaactgacgtgcctatatctgctactggtttttcagagctcaataccctcttgtttcacattttaccttacaaagctctttcctgttctttgctcctctttcgcacgcacagttactttggagttgatgcctggaaagcttacatatctcacaaggaaagtagcacaagtatgtttaaatggaatctggactatataggaggctcttctatccctcacagtccttgaagaagttttgatgcaatcgatcgtaatgtgtctgttaatcgtcagttaaggagcttcttctaatatcaaaattc

SEQ ID NO: 21301 - DNA, 111 bp, Gossypium hirsutum
  Clone ID: LIB3146-040-Q1-K1-C5
ccttccccggaaaataaccgccggcttaatccccggggggttcggccctcccgttgggaacccacccgcggggccattgggccaattccaacttaccgaccccttccccta

SEQ ID NO: 21302 - DNA, 219 bp, Gossypium hirsutum
  Clone ID: LIB3146-040-Q1-K1-C6
cttccggggttggaaccattgcccttccgttaactaagggtttggaaacggttaggcaaactggattgcgtcgttacagctacgccgaggatcgtgatttatatgttgccggcgatctctatgagaacgatgttgttacccctgccatgattgttgttcctcgtaaaaagaaaaaagtaggagagtcgcatgttaaaaaaggcaaaaagcaaaagtggg

SEQ ID NO: 21303 - DNA, 428 bp, Gossypium hirsutum
  Clone ID: LIB3146-040-Q1-K1-C7
taccgtccggattcccggcagacgataaacaaagttagtgcattagcatgaggatggcatcttacttagagcttgagcacgggggggcacactgggtggcttggttacagctacgccgaggatcgtgatttatatgttgccggcgatctctatgagaacgatgttgttacccctgccatgattgttgttcctcgtaaaaagaaaaaagtaggagagtcgcatgttaaagaaggcaaaaagcaaaggtgggaggcgagcgaggagaaagcagcagcagcaacaagccccattgttatggccaagccaactccaaaacccgttgatgaagacctttacaaaatctcccctgacctcctttacccaaaacccaaaaagaaaaaagggttggggttactttcaagctgcttggttccaagttggttatcgtg

SEQ ID NO: 21304 - DNA, 378 bp, Gossypium hirsutum
  Clone ID: LIB3146-040-Q1-K1-C8
cccactcgtacaatcacaatgcgacttattattattccgaaacgggatcgaacactggggggcttttttacagctactccctagatcgaaatttatatgttgccggcgatctctatgagaacgatgttgttacccctgccatgattgttgttcctcgtaaaaagaaaaaagtttgagagtcgcatgttaaagaaggcaaaaagcaaatgtgggaggctagcgaagagaaagcatcaacagcaacaagccccattgttatggccaaaccaacttcaaaacccgttgatgaagacctttacaaaatcttccctgaccttctttacccaaaacccaaaaagaaaaaagggttggggttactttcaagctgcttggttccaa

SEQ ID NO: 21305 - DNA, 421 bp, Gossypium hirsutum
  Clone ID: LIB3146-040-Q1-K1-C9
cggacgcgtgggtgaagagacaaagaaaactggtagggccgatatattgatcagtagtaagttacacgcactggtggagtatgagactattgaggctgctgaaaaagctgtggctactttgaacgatgaacatgactggagaaatggcatgcatgttaagcttcttgagcgaaagggtaagcatggacagcgaaagcaagcttggaggggacctgctcatgaaaaaaacatcaatgctcaggtatctgatcaaacaggaaccgaggagaaaaatgcttcaagtgagtatcatgaagatatacctgatgatgaggatggggagcatttgtccaaagagaaaaacgggtttcaacctagaaacagacgacgagggaggagacagaaaaatcgtggtaccaacggacacggccatggaactaca

SEQ ID NO: 21306 - DNA, 427 bp, Gossypium hirsutum
  Clone ID: LIB3146-040-Q1-K1-D1
ggcaccaccaattgagactccaaccaagtcctctggctctcaccacgcttcacattcttctttgaatgaaaggattctttcatcgatgagcagaaggtctgttgctgctcacccatggcatgatcttgagattggacctggagctccaatggttttcaactgtgtgattgaaatcccaaaaggtagcaaggtgaaatatgaacttgacaagaaaactggtctgatcaaggttgatcgtgtgctttactcatcagttgtgtatcctcacaactacggattcatccctcgcactctttgtgaagacaatgatcccatggatgtcttgatcattatgcaggaaccagttattccaggatgctttcttcgcgctaaagctataggtctgatgcctatgattgatcagggtgagaaagatgacaagattatt

SEQ ID NO: 21307 - DNA, 391 bp, Gossypium hirsutum
  Clone ID: LIB3146-040-Q1-K1-D10
cccacgcgtccgcccacgcgtccgtgatcgtttagttcctgagaaggtttctactctcaagtaatataagatgaatattgttgcttgtggatagcggcataccatatcaagctctgttactggttgaatatactactatggctttatctagttttttctactataattattgttactgtattttcccttctcttctcattttatcttattttttaatgtattattttttttcttttttttttatttctatttatattatttaaaattttttttttttattttctttcaaatttgaattttttcattatcttccttattttataatattttgtctcttatattatcatcttttaatttatttataacacatctgttttattattttcctctt

SEQ ID NO: 21308 - DNA, 313 bp, Gossypium hirsutum
  Clone ID: LIB3146-040-Q1-K1-D11
cccacgcgtccgcccacgcgtccgcccacgcgtccgctccactactcgatgaacgatattcggaacctccccaaccagttgctatattggtgtggattactgattttgaagccaaaatctcccctccctcacctcgaacaatcaaacctgaagcagatcttgcttgttgttgatcgaaagctacatcaaagaagactgacacacttgttcttctttcttcagttctcggaccaccatttcctgccaaattacccaaagcctacaacaaaaaagtcggcactgttcatttgaccctcgacaaaaacccatgaca

SEQ ID NO: 21309 - DNA, 389 bp, Gossypium hirsutum
  unsure (1)..(389): unsure at all n locations; Clone ID: LIB3146-040-Q1-K1-D12
aaccagtggaacgctggatattatggatacagccaaggatatggttacggctatggcgcggccccacaagaccccaacatgtactatggagggtatcctgggtacggaaattatcaacagccgcagcaacagcaacaagtcggatatagctaagtgctgatattaactgtctttcgtcgctgctgttctctctttaccagtattatgaacttgtgctacttgatttctcctttgtttcgctatagggggatataaacttaaagctgtgttattcacttgttaaatagcatatgcactgtataaaccttcttttattacaaaaattttgtacttaanaataaatatttattttattatttaatatataaatttttattattttttttatt

SEQ ID NO: 21310 - DNA, 326 bp, Gossypium hirsutum
  Clone ID: LIB3146-040-Q1-K1-D2
ccaccaattgagactccaaccaagttctttttctctcaccacgcttcacatcctggttggaatgtatttgatactttcatcgaccaacaaaaggtctgttgctgctcacccatggcatgatcttgagattggacctggatcttcaattgtttttcaacctgttgattgaaatcctcaaatgtatcaaggttaaatttgaaccttacaagaaaactggatcttatcaagtgttatcgcttttcttttactcaatatatgtttatccttacaactacagtattcatccttccactctttttttaaacctttaaccttttgattttttt

SEQ ID NO: 21311 - DNA, 414 bp, Gossypium hirsutum
  Clone ID: LIB3146-040-Q1-K1-D3
tgcagttggaaactggagcagggacaatgatagaaacaaaatccttcttggtataggtggtggtcactacgtacctaggcatatggatattgttcagaaagatggtgtttgggtaggccatatgctgcctgggtattctctgttgatggaagatcctagagaagcaaaatcactaacaaattcagctgttgttggtggaacttggagggaaacaatcagagttgcatttgagaccaccaaattggctttccctggaggagaagttctagcacatctagatcacaagatttttaaggggtggcaaagaaatgcaattataaggttcttcacagaacagaacataaagattggcaaaccgagtgacttctgtccttgttaatagctgtctatcgcttgttctgtaactatacatta

SEQ ID NO: 21312 - DNA, 249 bp, Gossypium hirsutum
  Clone ID: LIB3146-040-Q1-K1-D4
cccacccgtccggtgaagacggggtagaaatacggaccatttatgtagcttatccaaatcgagagtacaaagaaatggctctcctcacctttaatccacttacctgtctctcttcttctccggtacgttcttgctcaacgtcgttgcccatcgttgttttaccaatattcaggttgcgggtgaatagaatcgatgaccattgttcaaaatgttcaattggcacacagtttgtcctcagcaagaaaagat

SEQ ID NO: 21313 - DNA, 59 bp, Gossypium hirsutum
  Clone ID: LIB3146-040-Q1-K1-D5
ttaacacggtgcaactgaatagccccaaggaggcagaaaatgcatgtccttaaaatgat

SEQ ID NO: 21314 - DNA, 137 bp, Gossypium hirsutum
  Clone ID: LIB3146-040-Q1-K1-D7
ttcctttgttcttgcttacaaccaaacatttgtctttttttcatttccttcaaatcggccgtgttttttttaaaatatacttcacccaaccaaatttaatcttatctttacattctttattattatcctttaattat

SEQ ID NO: 21315 - DNA, 376 bp, Gossypium hirsutum
  Clone ID: LIB3146-040-Q1-K1-D9
agtaagtctccaaatcctttaccattatatttcctaatccacttcctgatcactactggtggtatcttttataaaagaaaatcctcccaaaataaacattcttgcttctttcaagctacagtccccctatcattctattaacccaatcaattacttcaaaagtcattaatcttaacatttcaaacaacaaatctattattactgaagattacttattgaatggtactttgtcaactgctttttaaaaaatataattatttgccacaaataaaaaacctattacctttcttaaaatttttaaaattttgatgtattaaaatcatccaattcttttttcctcctcctttaatacctcttctttcaaatacaaaaattt

SEQ ID NO: 21316 - DNA, 391 bp, Gossypium hirsutum
  Clone ID: LIB3146-040-Q1-K1-E1
cccacgcgtccgcccacgcgtccgaagtgataagtggtatgggacgagatgttaccgttttgatctatcttgatgttagaaaagctttggaaagtaagcatgcttgcttctttcaagtttcagtccggtgatgattctatgaaccgaagcaataactgcaaaaggcatgaagctttacatttcagacaacaaagcgatattgactgagggttttgatggggtggtacgtgtcaagtgctttgagaaaatagaatcatggccagatagaaaacctatacctttctcaaatgtttaaaattggatgatgaaatgatcagttttttttctctcttttatacctgtgtgatgacaaatttgtattggatcttatgaaattcattttgtttgatat

SEQ ID NO: 21317 - DNA, 258 bp, Gossypium hirsutum
  Clone ID: LIB3146-040-Q1-K1-E10
ctattaaataatttttttttttacttttttcttttttttttttttatttttttctttttttttttctttcatttctatttctttttctattttttttatatttttttttctttttttttatctttcatttattattttttactttctttatatttattttttttttatatttttttttttatatttttttcttttttttttattattaattatattatttttttatatttttttcatttttttttattttatctattt

SEQ ID NO: 21318 - DNA, 320 bp, Gossypium hirsutum
  Clone ID: LIB3146-040-Q1-K1-E12
ttttatttctatttagaactctttccccctcacgtgttttaaaaaaagatgtactatttgagcttggatattcgtttcttgaaaagtgttggggaacaggtagaatttcttctcagaggacacaattgctgttttcaggtttccaagtgttacgcaaacaatgacctttttttttcttttttgaactttttcttaaattgacagatgttttatggtgactatttcttatatgaatcagaatgtttttaatttaattttatgcgagacaaaacttttccacggtgttggtacattttcttgggttcttgtgaatttttaaa

SEQ ID NO: 21319 - DNA, 385 bp, Gossypium hirsutum
  Clone ID: LIB3146-040-Q1-K1-E2
agccttccgtgggcttgaaccttgaaaggtggaaggtgtccttgctgtttttcgggcatttggtgacaggctcttgaagcagtatgttgttgctgatccagaaattcaggaggaaaaaattgacagctcacttgagttccttattcttgcaagtgatggactgtgggatgttgtttcaaacgaggaggctgtggcaatggtaaagccaatacaggatcctgagcaggcagccaagcggcttatgcaggaggcatgccagagaggcagtgcagataatatcacctgtgttgtcgtccgtttcttggctaatcaaggtggttcctcacatactgttcctgcataatccatccattctcagcatggttttaggctttggttcttctag

SEQ ID NO: 21320 - DNA, 116 bp, Gossypium hirsutum
  Clone ID: LIB3146-040-Q1-K1-E3
ccaacccttccgccaacccttccgaacaaaaaagacagatccgttttatcatcccgagatggaaatccgaaagcaccacaagtggagtggaggaggtgattttgggttccgttaag

SEQ ID NO: 21321 - DNA, 433 bp, Gossypium hirsutum
  unsure (1)..(433): unsure at all n locations; Clone ID: LIB3146-040-Q1-K1-F1
tgcacgtacncgtcccggatttcccggccaaaagataaaaaagtttatgtcattggtgaggatggcatcttaaaggagcttgagcttgcgggattccaataccttggtgggccggaggacggtggaaagaagatagaactgaagccagggtttttaatggagcatgataaagatgttggggctgttgttgttggatttgatcgatacttcaactactacaaagtccagtatgggacactttgtatccgtgaaaatcctggttgtcttttcattgctacaaatcgtgatgctgtcactcatctcacagatgctcaggaatgggcaggtggcggttctatggttggtgccatctgtggatctactcaacgtgagccacttgttgtgggaaaagccctcacttttatgatggactacctcgcaaacaaaattggca

SEQ ID NO: 21322 - DNA, 428 bp, Gossypium hirsutum
  Clone ID: LIB3146-040-Q1-K1-F11
ccggaagttagcgatgccattgccctactcgaagcagcatcattcaaagcttgtttgctacataaccaaagagttaatggatacagagaacccacctcaagtcctgcctaacggctatgtctacagctctaaggctctcaaagaaatggctgagaaaaacaatggtaaaattacatgtccgagaaccggtctggtctgcaattattctgacctggttaaggcctatatctcataaactacactatcaacactgcaaaggtaaaaaagaaaactcttcctggcctgtttcctcttaatgttagtgctaaattttatgcatcatctgtagatatttctcttttgctttcgaaattttcggaacttctcattgtaatcttcttgcacctttaactcgttcacctcatgtaaataatgcatccttttttttt

SEQ ID NO: 21323 - DNA, 225 bp, Gossypium hirsutum
  unsure (1)..(225): unsure at all n locations; Clone ID: LIB3146-040-Q1-K1-F12
ccttaagttagctattccattgccctactttattcaacatcattcaaagcttgtttgctagantatttttataaaataaattttatacccataacccactctaagttcttcctaacagctatttctacagcactaatgctcttaaataaattgcttatataaacaatggtaaaattacatttcccagaaccttttctgtcttcaattattctttaccaagttaaa

SEQ ID NO: 21324 - DNA, 119 bp, Gossypium hirsutum
  Clone ID: LIB3146-040-Q1-K1-F2
aggtcaaaatttcttgaccacacggaattccaatgccatgggggggtttttgtcggaggaaagaacatagaactgaagccagggtttttaatggggcatgataaatatgttggggctgt

SEQ ID NO: 21325 - DNA, 310 bp, Gossypium hirsutum
  Clone ID: LIB3146-040-Q1-K1-F4
acccttccgcgaacacttgggcaaaaaaatcccaaccttcatattttaaagattacacatacgaagaaagatggagctcttatgacatccgagactggagaaactatagagaaactcaaagagaagaaggcacaatatgaagcgattgcttcctctgatagttctattaatcctgagaacattgataacagaattatcactgaagttttgggtcctgaaaggtacggtcgggttcgatttcaaagatctagtgttaccccgacccaatattttggattcggctcccaacaatacatgcctttcggaagtc

SEQ ID NO: 21326 - DNA, 256 bp, Gossypium hirsutum
  Clone ID: LIB3146-040-Q1-K1-F5
cttcggccaacttcattaaagtggggggggtcctaaaactaaatatttggaaagcaagccgatagggggagatccaaagaagccaattctgtaactctcttgagactattatattcaaaacaaggggattgaaagccttcctcaggcttatcagagttttgaggctgagttatcaaaattgccttgagaacttgtagaatggaaatgtaagggaaagaggttgtgtgttggactaccaaaggggagaaatgggggt

SEQ ID NO: 21327 - DNA, 294 bp, Gossypium hirsutum
  Clone ID: LIB3146-040-Q1-K1-F6
cccaactgcatgaagttgtggaggatctgaatactaaatatgtggaagtcaagctgataggagaggatcaaaagaagcaaattctgaaactctctggagactatgatattcaaaacaaggagattgaaagcattcgtcaggctaatcagagttttgaggctgagttatcaaaattgcatgaagaacttgaagaatggaaatgtatggaagagagtttgtgtgttgaactacaaaagggaagaaatgaggttgaactttgggagactcaagctactgcattgtttgatgagctac

SEQ ID NO: 21328 - DNA, 254 bp, Gossypium hirsutum
  Clone ID: LIB3146-040-Q1-K1-F7
cgacccacgcgtccgcccaactgcatgaatttcttgaggatcttatgactacatacgtgaaacccaagctgaggggggacgttcaaaagaagcaaatacttaaaccctctgccaactattatattcaaaaccagtaaatagaaagcatgcctgctgtctaatcataatattcgaggcttcatctatctacaaatgcacacaaataccacacataattttttcttctaaaaaaactagactgtttgttttttttt

SEQ ID NO: 21329 - DNA, 211 bp, Gossypium hirsutum
  Clone ID: LIB3146-040-Q1-K1-G1
ctaatgttttgtcctactatgtgttatattatgtgcctacttaagctacctttcccggttatcaagagtgcctatatagaactctctctctctcaaaaaaaaaaaaaagagaaaagagttctttatatggagttttatattatatgctgagagaataaattatcttgtaaaagcttgctttgttaatgaaataaatttctattactatgat

SEQ ID NO: 21330 - DNA, 162 bp, Gossypium hirsutum
  Clone ID: LIB3146-040-Q1-K1-G10
cccacgcgtccgttagatatgacacttttctattaaagcaaaaacccaaaatcagggggggtgaatgttctaccaatttttgctcctgccctatccaaaaatatgtttgccaaaattcggtaactctgacagctccctcccatattaccttttacttcaata

SEQ ID NO: 21331 - DNA, 344 bp, Gossypium hirsutum
  Clone ID: LIB3146-040-Q1-K1-G11
cacatttctaaccttgaccgtcccgagagccgccggtacgtgcagatgttatacgctcttaaacaccccaagctggctgaatcggttcctctggcaaaggaggagtaaaacaaaggaagaggcgggttttccctggaggatttttacgagttctttataataataataattataataatcatagtgattatctttcgttgccttcatattgatcgccggacaagaaaaagcctctttagcatctgtgttcctatgtgtgctgttttatttttacgggcatttgtaggacatggagggggtactacgcccttggattccaacaaaagattcggattttgttttcc

SEQ ID NO: 21332 - DNA, 209 bp, Gossypium hirsutum
  Clone ID: LIB3146-040-Q1-K1-G2
gcttttaggcatgccattttattacatctggacttatccaaaaaaggagctctttttataggggggaaaaaaaaaaattggaaatttggaaacccccggcaaacaaaaaccagaccaattccggcgacaaacaatcccaattatttttttttttctcttaaattaacttccctttaaggcttcccttttattaccaccggacctatccc

SEQ ID NO: 21333 - DNA, 152 bp, Gossypium hirsutum
  Clone ID: LIB3146-040-Q1-K1-G3
cgccttcccggtcagggcaaaagtttgggttaaacactttgtcaccataactttttagcgttaaccgagagcgctcgtttcgcgagagaatcagaggagaaccccgaatttctggcgagaatggaccggttttttaatgcggctttcgaatt

SEQ ID NO: 21334 - DNA, 345 bp, Gossypium hirsutum
  Clone ID: LIB3146-040-Q1-K1-G4
cccacgcgtccgcccacgcgttcgagcatttttatcttactcctcttagcaggagccgcaggactcaccgtctggctcatatacacgccccacaaaccccgtttcatccctgtgtaaacaaaacagaaaacaccccacccctacgcccatgttaccagacatacggtatgccagtttatgacagctggggcggctgctgccggtatagctactgttacacgagccgcggtgaatgttttagcgacgagaacccaaatgtgggcttaatcatgtaaggtaacgcgagcgcatcgtcaaattcacgaactcatgacatcactagcaataatgtctttacatggttct

SEQ ID NO: 21335 - DNA, 258 bp, Gossypium hirsutum
  Clone ID: LIB3146-040-Q1-K1-G5
ccaacacgtccacccactcattcaaccatttttattctacaactcttaacaggaaccggagggggcaccttttgactcataaaccgaccacacacacccatttttatccataattaaacaaaacataaaacaccccacccatactcatcatgataccaaaaatacggcatccaattcaaaaactgaactatcagctccatccattctagctactattacacatatcctcgaagaatgttttaacgactagaacccaaa

SEQ ID NO: 21336 - DNA, 338 bp, Gossypium hirsutum
  Clone ID: LIB3146-040-Q1-K1-G6
gcatttgatctgatgcatgaagggggttgcctccgatgcgtgcttaagatgaatgaatgaggctaatatgggtgaactaaaggggtgatctgtgaagaactacgtgcctatcttctacaaccgggtttgtacttccactgccaacttaggagtgtaaagtagagtctgttggaacaaactttttctatgaagcctagtagtttaaccttgtgaaaaatgtttggtttatgatgttaaaagagaaccagcgatggaggtgtgtgcatgaatgaatgaatgaatgaataaaataattaagctccaaatcatctgaattatggagatgatgagtattggac

SEQ ID NO: 21337 - DNA, 316 bp, Gossypium hirsutum
  Clone ID: LIB3146-040-Q1-K1-G7
cggacgcgtgggttgggaaagagttgttcgaaaaagaacaagaggaccttctttccgacctgaaagacattccaaagaaggcttgtgatcgtcgaataaatgagtttgtgaagctgctagagctgccaagatacatgcttatatcatcgctcaccttaagaaggaaatgcctgctatgattgggaaagcaaaaactcaacagagactgatcgataatttggaaggcgaatttggaaaggttcaaagagatcatcacctaccaccaggggattttccaaatgtggaacattttaaggagattttgtctggttacaac

SEQ ID NO: 21338 - DNA, 261 bp, Gossypium hirsutum
  Clone ID: LIB3146-040-Q1-K1-G8
cccacgcgtccgcaagagatgacactccttctttaatgttaaaacccaaaatcagatcagtgaatgtcccacttctttctgtgtttgccctatcccatgatatgtttcccagaattcggttatcctgccagctacccttccttttttcttcaccttcttctcatagccatatgctattcattgatgcagctcttcttgattgtgcccttaatgataagtcccaggctgtttcagcgatttccacccctaatgtcatttttg

SEQ ID NO: 21339 - DNA, 182 bp, Gossypium hirsutum
  Clone ID: LIB3146-040-Q1-K1-G9
cccactcttccgtttgataagacactcttctattaatgctaaaacccctaatcatagggcgatatgttatacaaattaatgtctttgacccatcccataatatgtttcccaaacttctataattcctccaactcccccttcttttatcttccacttcttgacataaacacctgctattcatt

SEQ ID NO: 21340 - DNA, 225 bp, Gossypium hirsutum
  unsure (1)..(225): unsure at all n locations; Clone ID: LIB3146-040-Q1-K1-H1
gacatatcctagctgttgttgataacaaaaccaagaatacttctaaggatcctaaaactccattgactgaacacaagaagcaaagatatcaatttttaaagtctgatggaaaaggatgattcgaaatgcgggcagactgcagtggtggagaggaaaaccgtattagtcccgaaaagtgagaccatagttcatgccaattgttacgnaatgttaaaaacattttga

SEQ ID NO: 21341 - DNA, 268 bp, Gossypium hirsutum
  Clone ID: LIB3146-040-Q1-K1-H10
cccacgcgtccgctagatcaaggtctcctcgttcccgctctgcatcaaggtctcgctctttgtcaagatctccttcaaggtccaggtctcctttgccttctcgtcaaaaaggaaggagcaagagtcccaaaagacccaatgttagcaagagtccaagtgggagcaagagcaagagccagagcaggagcaagagtgtattccggtcttgatctgaaacttctcttgtggcttttcactggtgagatgctattgccgggtgtattaagag

SEQ ID NO: 21342 - DNA, 344 bp, Gossypium hirsutum
  Clone ID: LIB3146-040-Q1-K1-H11
cccacgcgtccgccttattatgaccaacttacagccatctacgcaaaagatcgagccacggggaatgctcaaacaaccgctgatattattgaagaaatagatgccgatgatgtagctactgcaaatactcatgaagaaagaaactattacaatggatgtgaagctgatatttctttggatgagatgaatctctaagctacacaaccgcaaccatctagaaactacgatgattccacattttcaaagaagaaaaaaatgattttctgatgcaagtgaataaaattcttctacttcattaactgatgctgccacattattgggggaaaacatatgaactattagct

SEQ ID NO: 21343 - DNA, 226 bp, Gossypium hirsutum
  Clone ID: LIB3146-040-Q1-K1-H12
tttaatgctatatatggttcacccgattgtggcatttaacactatggaagggaatatatgagaccaagctccatacctataccaaacagaaaccactgttttataaacatggacacaaaaaaaagcctgaaaaatatctttaatcaaatcttgtggaggacaatgatcaccttctcattcttaaatgaaccttcagttctttgaccgtccttaaaacaattaccaa

SEQ ID NO: 21344 - DNA, 355 bp, Gossypium hirsutum
  Clone ID: LIB3146-040-Q1-K1-H3
atttgtccaggtttgctcatttcacatacagatgcccgcttgtagactaattctcgtcctacgaaaagggttcaaagattaaatcatatgcacagcccatcgtgctcctccccattcctgggttcaaacttcaaacactgattcattcaaattttgtgtccttgatgttaaattagttgagtggttgcaaataataactaaggttttcataaaccgtctattgcagttgttgtgctcattgttaattaaatacacagtagattagttgaaacttgaggcactgataaaaagtatgtaagaaacttcatgtaaagataccaagagccttgaatttgattaaatatccatgtgtttt

SEQ ID NO: 21345 - DNA, 85 bp, Gossypium hirsutum
  Clone ID: LIB3146-040-Q1-K1-H4
ctgaacgggaaattgtccgtgacatgaaggagaagcttgcttatgttgccccggactattagccggaactggggactgcgaaaag

SEQ ID NO: 21346 - DNA, 366 bp, Gossypium hirsutum
  Clone ID: LIB3146-040-Q1-K1-H5
ggattcccggccggacgccgtgcgctgaacgggaaattgtccgtgacatgaatgataatcttgcttatgttgccctggactatgagcggtaactggagactgcgaagagcacctcatctgttgagaagaactatgagttgcctgacggacaagtcattactattggagctgagagattccgttgcccggaagtcctcttccagccatctttcatcgggatggaagctgctggaatccatgaaactacctacaactctatcatgaagtgtgatgtggatatcaggaaggatctctacggtaacattgtgctcagtgggggttcaaccatgttccctggtattgcagaccgcatgagcaaggagatca

SEQ ID NO: 21347 - DNA, 128 bp, Gossypium hirsutum
  Clone ID: LIB3146-040-Q1-K1-H8
ctgaaaagcaaattaggccaaaagaaagccgttctaagaaacgatgtcgtcttcgtcgtcgttcaggaagtcctcgtgcctttcacggagattctcgggatcgagatcattggccaaaacggcagcgc

SEQ ID NO: 21348 - DNA, 418 bp, Gossypium hirsutum
  Clone ID: LIB3146-040-Q1-K1-H9
cccacgcgtccgggaaaacagaggaagagcatcttaatgctatatatggttcaccagatagttgcaatcagcagtatggaagggaatatatgagatcaagctccatgcctataccaaatagaaaccagggtttcatagacatggacacagaaaaaagcctggaaaatatcgtaaagcaaagtgggtggtggacaaggagcacttgggcattcttgaatgaacctccagttcttgaccgacctacaaacaattaccaaccacagttccatgttgccagcctcgctacttcaaagtttaacaagaattctggaatcagtgccaattagtgtttttaactcctaatggtatcttatgtgggtgtatttatctacttaatctggttatatagaacataatattactgagataatattctggt

SEQ ID NO: 21349 - DNA, 420 bp, Gossypium hirsutum
  Clone ID: LIB3146-041-Q1-K1-A10
cccacgcgtccgcccacgcgtccgcgacggtggcacctccaacaacttttgaaccgtcgttgaccctgggtctatttggtgatcagggttaccaagttaccaagaagtcggatgtcaataaaagtggttatcttcatcaccatgaggaacctggcgccggtgatttatatcgtcgtcaagcttctcctcatagtgctgtttcttcgttttctagtggtagagtcaagagagaaagagaggttagcagcgaggaattagaggtagagaagaattcgtctagagttagtgatgaagacgaagacggtgttaatgcaaggaagaaactcaggctcaccaaagaacaatctgctcttctcgaggaaagcttcaaacagcatagcactctcaatcctaagcaaaagcaagctttagcaaagcaat

SEQ ID NO: 21350 - DNA, 381 bp, Gossypium hirsutum
  unsure (1)..(381): unsure at all n locations; Clone ID: LIB3146-041-Q1-K1-A11
cccacgcgtccgcccacgcgtccgttcactaagaaaagattcatggactcagtatatataggcttattgttatgtgcatacttacaagtttttattttcttttgttcaggaatcgctacctaggatattattttgatttatcataaaaaagtatagctgaaggtaacttgtgaagcaagtgatctgtgaattctgcacatttccctcattaatacgtttctgctaaaataaggttatttaaagctaactggagtgcttttatttttcttttggagatcaatatatttagagttaagagatcacaagggattttgtgttaaggcttgagcttttagttacttggtttagggttcattntttggtatctgtgtgacatgtaaa

SEQ ID NO: 21351 - DNA, 200 bp, Gossypium hirsutum
  Clone ID: LIB3146-041-Q1-K1-A12
tgcgttcggtacataatcccaaaaacttttccagcatgtgggtataattttattttcggacgatctaggctccatagtattttgtacaaagatttctacccaggatgttatttttatatactacgaaccatactttgtaatagtttataggctcttcaaactgatgataagcctctataaacccctaattaaaacggttt

SEQ ID NO: 21352 - DNA, 306 bp, Gossypium hirsutum
  Clone ID: LIB3146-041-Q1-K1-A2
cggacgcgtgggcggacccgtgggccgacgcgtggggtagaagcattggatgttaaaaaaacaggagaagagatgatgaaactacagaaacaagaagcacttcaattgcttaaaaagaaagagaaaactgatcatatcattaaaaaaacccaagagaaacgtcaacaaaagaagcagcagaattcagatcctaataaacctaaaaagcctgcatcttctttccttttgttcagcaaagaagccaggaaaactctggtacaagaacgacaaggaatcaacaactctacacttaatgccctgatttca

SEQ ID NO: 21353 - DNA, 187 bp, Gossypium hirsutum
  Clone ID: LIB3146-041-Q1-K1-A4
gtttattttgatttttatgttagaatttcaagggtaaaggtatgttaaacaacttttggtaagcgggtttaagccaaaatgagtaaaatggcttaatccggaaaaaatattattggtcataactatgtgttagagggagaatttgatggtgtcattaaaggggaaagttatccgcctgtcctaaaac

SEQ ID NO: 21354 - DNA, 290 bp, Gossypium hirsutum
  Clone ID: LIB3146-041-Q1-K1-A5
cggacgcgtgggttccaattaaaaaaaaattatatataaaaaaaaaaaaaaaaaataaaaaaagagagggtttaaacaaaaaaaaaataaaaaaaaattaaaaggtaaaaaatggttatttgtaataaatatggggctgcccttcgcatttagaattattcccccccttccaataaatttttgctttgataggaaatcttaccaccccctgtgatttgtaaaaaaacaaaatgtccgttttggattaaatagccaatgtaaaaagcaccacccatcggaaaaaataaaaa

SEQ ID NO: 21355 - DNA, 326 bp, Gossypium hirsutum
  Clone ID: LIB3146-041-Q1-K1-A6
ctaaaatacgccgatccccgttcgtcttccgatcatatggggctgcttgaccagttgtgggatgataccgttgcgggtccccgacccgataatggtctcggcaagctccgaaagcactccactttcactttccggcctaactctgccaaggaatcggatggcgggagtgtaagatcgtacggtgatgaagcgccggaggaagcgacgagagtgacacgtagtattatgatcgtaaaaccgcctggttaccagagcggatcgcctccggtttcgccggccggatcgacccctccggtatctcctttttccggaggcagagaatcata

SEQ ID NO: 21356 - DNA, 312 bp, Gossypium hirsutum
  unsure (1)..(312): unsure at all n locations; Clone ID: LIB3146-041-Q1-K1-A7
gaaaatcctttgcatagaagagaagagaagaggtggagaaagatggtgatggtgatggtgatggcacctttttctaattattttctagctttcctttcttgttacggttttgtaaagatgagttaagatgtaatatataagtgctggtgagcaggtgaaacctcatccagtcaatgttgtatttgaacttatttggttctttcaatgaagaaaatcgtgctatatgccatgttttttttgncnggntaccagagcggatcgcctccggtttcgccggccggatcgacccctccggtatctcctttttccgga

SEQ ID NO: 21357 - DNA, 350 bp, Gossypium hirsutum
  Clone ID: LIB3146-041-Q1-K1-A8
caggatcctgagagcaaggtggcttgcgagacctgcagcaagacaaacatggtgatggtgtttggtgagatcactaccaaagccgacgtagactacgagaagattgtgcgtgacacctgccgtggcatcggtttcacatctgacgatgtgggtctggatgccgacaactgcaaagtgctggttaacatagagcaacaaagccctgatattgcccaaggtgtccatggccatctcagtaagcgtcccgaggaaatcggtgctggtgaccagggccatatgtttggttacgccacagatgaaacccctgaactgatgcctttgacccatgttttggcaaccaggcttggtgc

SEQ ID NO: 21358 - DNA, 363 bp, Gossypium hirsutum
  Clone ID: LIB3146-041-Q1-K1-A9
cccacgcgtccgcccacgcgtccgaaggacttccactcttactgtcttctttggaaccagcgccaagttgtatttctagtggatgagacaccaataagagtgcacaccaacatggaacacaaaggaattccttttcccaaagaccaagccatgggtgtttatagctcaatctggaatgctgatgattgggccacacagggtggcctagtcaagactgattggagccatgcaccatttgttgcctcctacaaaggcttcgaaatcgacgcatgcgagtgcccggtttccgtgacagtagatgagatcgccaagaaatgcagcagcagtgctgagaagaggttctggtgggacgagccgacaatg

SEQ ID NO: 21359 - DNA, 284 bp, Gossypium hirsutum
  Clone ID: LIB3146-041-Q1-K1-B1
actagttctagatcgcgagggccgccctttttttttttttttggtacaaacaacacttgatcatctctaaagatatacagcattgcacacattccccttggtatgggttagatcttgcgaatttgtcagattgggtttcattacactagctaaaatgactactgtccagtcacgggggctgacaaaagaaaaggatagctgagctgtaaagatccacctgaatatacctcaaaagaaagcagctttcatggggcggactttgctattatcaagcataaaaaggg

SEQ ID NO: 21360 - DNA, 394 bp, Gossypium hirsutum
  Clone ID: LIB3146-041-Q1-K1-B10
aggagtttgattttagtcagttaaatcgatcacttctgcaggatcgaaggccttctgatagggagaagcttgaggcagaattcaaacaaaaaattgatgctctagtgtcggaaattgaaagaactgctcccaatttgaaggctcttgaccaatataagactcttcaagagaaggaaagagatgtaactgaagagtttgaattagccagaaaagaggagaagcaagtagctgatgaatacaattcagttaagcagaagagatatgagttgttcatggatgctttcaaccacatttctagtaatatcgataggatttacaaacagctaacaaagagtggtacgcatccattgggtgggacagcatatttgaactttaaaaatgaggatgatccttt

SEQ ID NO: 21361 - DNA, 409 bp, Gossypium hirsutum
  Clone ID: LIB3146-041-Q1-K1-B12
cggacgcgtgggtggacaacataccaaaccctctcttggacagaatggaggtcattgctattgctggttacatcgctgatgagaaaatgcacattgctagagattaccttgagaaaactgcacaagaaacatgcggtgtcaaacctgaacaggttgaggtaactgatgcagctcttcttggcttaatagaaaattactgccgagaagcaggagttaggaaccttcaaaagcacatagagaagatctatcgtaagattgctcttcgacttgtgagagaaggatcatccaatgaatttgtcattagtggagaggtagtccaacctgctgaagccaaagcagaagttgatgaaactgatcagcatgcagctccaaatgagactgctactgaatcctcagttcagacaagtga

SEQ ID NO: 21362 - DNA, 234 bp, Gossypium hirsutum
  Clone ID: LIB3146-041-Q1-K1-B2
aaaaggaaagggtcatgatcgttcatcattcataataatcttctcatacacacaaacgaacaaatggagaaaatagaaaaagagtgaagtggagacaaagctattagggctggtccatttgttggagcacttgcagcacctatatatcatcagtacatccttagagcagcagctatcaaagctttgggatccttacgcagcaaccccaccaactaaaaaaaatcaacccaaata

SEQ ID NO: 21363 - DNA, 422 bp, Gossypium hirsutum
  Clone ID: LIB3146-041-Q1-K1-B3
cccacgcgtccgctattaccacttgtataaccctttataccctttggtaaaacctcgtgcaaattgtacaaatttacataaattccaggacgaaaaccgaacggaggaagaaagagaatggatgggggagaagtatttgcttcacttctttgagtatgaaactgagaaggaaaaaaagaagtatacaatatggggtttaactgctggggttctgataagagctgcttcattagtttaccagcaacctcctgcttttttggaacaaaatcccaagttcaagttccctaaaatcgttgacagaaataccgtcatgcggtaaatgaaagtatgcgtagtcggttgaatcataagtgaagtgacaaaagatgtatgttcgagtttttagttgatattagtctcgagatcgatttctagacaatctt

SEQ ID NO: 21364 - DNA, 339 bp, Gossypium hirsutum
  Clone ID: LIB3146-041-Q1-K1-B4
cggacgcgtgggcggacgcgtgggcagagaaccaagtgatcgaaccatcggaagtaaggacagagagtgatccttggcaagattgaagtgtcaaaatttaaataaaaattttcctgtattatctgattgctattaacaaaagaatccagaaggaaagaagagttgtgggttcggttggggaagatgaggaggttagtgataatggctgttcctatggtggattaaagtcacttatacgtgatgattttaaattttaaagcattcaagtaaagttgtcttttgagttgctgtttttcttcacttggatgataatggtggcttaaatttcgaggagttttg

SEQ ID NO: 21365 - DNA, 223 bp, Gossypium hirsutum
  Clone ID: LIB3146-041-Q1-K1-B5
atttgcttcacaagaaaggtattttcatgtaagcaattgctgaatgacacatttgtactcgttattcctattttagcttccttttccagcgtgccaaaaaaaaaaaaaaaaaaaaaaaaaaaaaaaaaaaaaaaaaaaaaaaaaaaaaaaaaaaaaaaaaaaaaaaaaaaaaaaaaaaaaaaaaaaaaaaaaaaaaggggcggggggggggggggataaaaag

SEQ ID NO: 21366 - DNA, 426 bp, Gossypium hirsutum
  Clone ID: LIB3146-041-Q1-K1-B6
gctcgggtactctcatcttcagccgcagccatggtacttccccccccccccccgggtgaacgtacctaagacgaagaagacctactgcaagagcaaggagtgcaggaagcacactttgcacaaggttacacagtacaagaagtgacaaagccggatgacaaggccgaaggagatgcaaagcctgaggagcatggcatcggatcttcagagaaaaaggaggctgaaccgagcacgtgaaatcattttagctgaaacccgaaatgctgttaactatagttatgggtgatattttgctctttccctgtcatggatgggggagaggggatcaaagcctgatgtgtttttaactgcgtgagattaaaaaatttgcggaaaagatatgtgttgttgtgttaggtggaaaaacaatgttagctctttgacatg

SEQ ID NO: 21367 - DNA, 273 bp, Gossypium hirsutum
  Clone ID: LIB3146-041-Q1-K1-B7
cccacgcgtccgagcaaccaaacaaaaccttccattgtcttctagaactatccaagcacactggtattaatcaatggctcgtacaaagcaaacagccaggaaatcaaccggtggaaaagctccacgtaagcaattggcgaccaaagccgcgaggaaatcagctccagccaccggaggagtgaagaagcctcaccgtttcaggccaagaacagtggcgttgagagaaatcaggaagtaccagaagagtaccgagcttttgatccgtaaactttc

SEQ ID NO: 21368 - DNA, 320 bp, Gossypium hirsutum
  Clone ID: LIB3146-041-Q1-K1-B8
gttttctccatgacactggaaggcagaagtttctcgattcatcaaactttcaggttttattgaagcccattgtttctcagcttgtcattgagcctccaacttccgttgaagagcaaaccgatgtaccgtctctgaaggaagtagatgacttgctggttgtttgcataggtcagatggctgttactgctggaactgacctgctgtggaagcccctgaaccacgaggtattgatgcaaacacggagtgagaagatgcgtgctcgagtgttggggttgagaatagttagggaatttctggagaaattaaaagaaagatatttg

SEQ ID NO: 21369 - DNA, 414 bp, Gossypium hirsutum
  Clone ID: LIB3146-041-Q1-K1-B9
cgcctctcttcttcccaaaattctctctagatttcttccttaacatttatccccaaatcaagtcaagcatccattcacccttcatcttcatctccttaaatacagtaaaggttgcttctctttggctctttggacttatgcaaaaggctttccctataggttggagataaagtgcaaaagggtcaggtgttttgcatcattgaagcaatgaagttgatgaatgaaatagaaatgaaaaatcattgtttcaataagctgatcaatcaggaaccatagtcgagatccttgtagaagatggcaaagcagtcatcgttgcctctgtttgtgattgaaccttgaaataagactgtcgagtagcaaaataaaaggtgggaaggataggcaagcaagcaagtttgagttggtgggattttt

SEQ ID NO: 21370 - DNA, 398 bp, Gossypium hirsutum
  Clone ID: LIB3146-041-Q1-K1-C1
ctccgttgctttatatatttatttcgtctgtgattcagcaatcccaaagtttctttttttttcaaaaaaaagaaagaaaaaaatagtctttttttttcgtactcttttattttataacataaatattgttataaatattgttaatagcctctggtgtgaaaagaaaaaaagtttgtgacgctgagatgggcccacgaaagctaagataaaattggaaatgccctttctctcatactactctttcgatacataatctaatggtttgaaaaaaaaaagaaatcaaaaaaaatatcatatcgaattcgaagtgccatgctattattacttactaattcatatttcatatggcgaaagcatagtcttcttttttctttccatcaaataaaaaaaactcattg

SEQ ID NO: 21371 - DNA, 416 bp, Gossypium hirsutum
  Clone ID: LIB3146-041-Q1-K1-C10
gcaaacccctataacaaaggagtggttgataacttcaaggagatattttgctccagtattccatcatccaagaacaacttcagggaaaaggtgcccagggaacctgtgctaccaacacgaccaggtggttttatgagtccaaatatggggaaggctgtggacgacatagaaatgggtaggaagacagtgtggggtgatattggtgctggtactgatcattgtgaagggcaactcataagtgaccgagtaaatgttaaggagggtgaattaggagatttatctccagatattagaagtacagtagatgacacaggtgaccgttctggtatacatcccaggcggtctagttggggtagaaaaagtggtcgatgggaaatgtcacctgaagttcttgctttggcagctagagtggggga

SEQ ID NO: 21372 - DNA, 423 bp, Gossypium hirsutum
  Clone ID: LIB3146-041-Q1-K1-C11
cccacgcgtccggccacataatacgacggcaaggacacattcaggcgtaaacagtgaactccacacgtctccctggcattcgccggtgccgtacttgttcggcgggttagctgccatgttgggtcttatagcgtttgcgcttctcgtccttgcatgttcttattggaaactattgggttacaacgagaacgacggtgaagggggaacggagagagacttagaagccggagaaggtaaaggtgaagctggtcggccggctatggaaccaaaggttcttgttataatggcgggagaaaaaaagccgacgttcttggccaccccaattggttttaacgggtcgtattatttcggtgacaatagtgaaaagcgatgttgctgtagtgatcaaaagggagaggaaggcaagcaagatgagaaagaggt

SEQ ID NO: 21373 - DNA, 420 bp, Gossypium hirsutum
  unsure (1)..(420): unsure at all n locations; Clone ID: LIB3146-041-Q1-K1-C12
ctctcattggtcaattgatgaatccaggcatcaaaatgaatcacttgcgcatacaaacatgataggaagagatttgggtccgaatcttactgacgatattgaactgttgggattcggaaatgcagattcagaggagagattaagtgatatatctgatggtgatctatcaatgggggctacagatactgatggctcaatctgtagtgccgtggagtttactcttttcccggaagtttcaaaacctcctgataaaccagagaaggttgagaaagcaagcaaatctgaaaaatctgatgatattgggaagtctatcgccccatcactcccgtctaagcttccaaagctatctcagaaagtgttgcaaacaaaacctactgctcgattgtcactgtcccggagcacctncaagatcccatcgag

SEQ ID NO: 21374 - DNA, 421 bp, Gossypium hirsutum
  Clone ID: LIB3146-041-Q1-K1-C3
gttcaggcatggcttttaataagctgaccgacggcggtgcaacaactccggctggtctcgttgccgcctctctagctcacggatttgcgcttttcgtcgctgtatccgtcggcgctaacatctccggtggccatgtcaatcccgccgttacattcggtgctttcgttggcgggaacattactcttttacgtggtatcctttattggattgctcaactccttggctcaaccgtcgcttgcctgttacttaagttcgccactagtggcctgggagtaccagctttcggactatcatccggcgtgggagcattaaacgcgttcgttttcgagatcgtgatgactttcggactggtctacaccgtctacgccacagccgtcgatcctaaaagaggcaacttgggagtgatcgcaccgttggcgat

SEQ ID NO: 21375 - DNA, 234 bp, Gossypium hirsutum
  Clone ID: LIB3146-041-Q1-K1-C4
gcagagtgtagatcaagtcaaataatgatggatgagaggaaagaacaatgtaaatcaaaagcttcaaaatctgggaaaaatcaaagcttgggttatgataaaacagagcaaattttctcaactgggattcttgcaatttagtccttttttccttttttgctctgtaaataaatatttatagaaaaatactatacaattttatgagggttaataattgaattttcccccaatctt

SEQ ID NO: 21376 - DNA, 425 bp, Gossypium hirsutum
  Clone ID: LIB3146-041-Q1-K1-C5
gatggagaagattcatcgattaaaactctgtagtggatgggaattttttaattttcaattatgtcggtggttgtgtgttcgatgtgaagatatatgagtttgatgcttgtgagaagagcataccttatgtggtgtcggaagatgaagaatcagagtcagaatcagaatcagaagatgatgatagtaatagcgatgatgctatgaacgatgaaggagctgactctacggaggttgaggatgaggagatccatccagaagattatgttcaacatttgaatccttattttgtggtgaagaccacaaagtcttcacagaggacgaacgaactgtgtattccaactggtatagccaaagattttggagtgagtttagaagacggggagaaaattacatttgttgacccatacaaccggaaaagcattggg

SEQ ID NO: 21377 - DNA, 427 bp, Gossypium hirsutum
  Clone ID: LIB3146-041-Q1-K1-C6
tcttgcttccttgcgtatgcttcgggtatatttgagaacttatgcacttgagcaaatggtccaagctgcaagctcctctgctggacttcggaccatcaagcgggttgagcaaaccttacaagatcttggggttaatttaaagccaaaggttccaacaaaggccgtttgtgctgagcatcttgaattaagaaaagaaattctaacgttgctaaatctccagaaacagttgcaatacaaggaggcagaaggttcatctttccgtgatggttcctatggtgatatgccaggcactgcaaagcgatcacaacgtgctgctgatcaggaccgcacatttgtccccgacaccattagttttggagtaattccaggtgatagggttgtcaaaagggagcaaaaacgaaagggacctgggagaacatctgagact

SEQ ID NO: 21378 - DNA, 287 bp, Gossypium hirsutum
  unsure (1)..(287): unsure at all n locations; Clone ID: LIB3146-041-Q1-K1-C7
cccacgcgtccgcccacgcgtccgcccacgcgtccgaatggatcttccagagaagttacttcctcgcatttcaagccgaatgggtattcaaagactctgttttggtccctacaattatcagcagctacaggaaattatatcaagtcgtttgaaaggaatcgatgcgtttgaaaagcaagcagtagaatttgcttcaagaaaggtagcagccatttcaggggatgcacgccgtgccctagagatatgcangcgtgcagctgaaattgcagattataatatgaagaatc

SEQ ID NO: 21379 - DNA, 406 bp, Gossypium hirsutum
  Clone ID: LIB3146-041-Q1-K1-C8
cccacgcgtccgcccacgcgtccggacattttgaggaggaatgaatatgatctggagaagtctgttgatgatctttgtggggtggctgaatgggatccgatacttgaggagctgcaggaaatgggtttctgtgatgctgaaacgaacaagaagctgctgaagaagaacaacggaagcatcaagggagttgtcatggatctgttaacaggagaaggtgcttaaattattaattatggatgatggctcgtggtttctaggcattttattatatataaataaatgagtgtgcgcatctaaaccatgtctttatgaagcagctgccttttaatttcttgtcttctgaagtatgcgggggctaaagaaacgagctgtaaacgttttgctgtttatttgaactatgaagcct

SEQ ID NO: 21380 - DNA, 385 bp, Gossypium hirsutum
  Clone ID: LIB3146-041-Q1-K1-C9
aattaagtaatgttttgttgttttcattttcagatcattaatgatcgtgagactggaagatcccgaggctttggattcgttactttccgtgacgagaaagctatgagggacgcgatcgaaggaatgaacggtcaaaatcttgatggaaggaacatcaccgtcaacgaagcccaatcgcgcagaagtggaggcggtggcggaggatttggaggaggaaacggtggttacagccgcggtggaggcggcggcggatatggtggtcgccaaggaggatatggtggcggacgccgtgaaggtggatacggaaatggtggaaggtatggtggtggtgggtaccgaggtggacgccgtgaaggaggatatggtgacggcggatctcgttact

SEQ ID NO: 21381 - DNA, 420 bp, Gossypium hirsutum
  Clone ID: LIB3146-041-Q1-K1-D10
cggacgcgtggggccaacgatcggtgtggaggttcaccctttggacttcttcactaactgtgggaaaatccgattctactgctgggatactgctggacaggaaaagtttggtggtcttcgagatggttactatatccatgggcaatgtgctataattatgtttgacgttactgcccgtttgacatacaagaatgttcctacctggcaccgtgatctttgcagggtgtgcgagaatattcctattgttctatgtggtaacaaggttgatgttaagaacaggcaggttaaggcaaagcaggttacattccacaggaagaagaatctgcaatactatgaaatctcagccaagagcaactacaattttgagaagcctttcttgtaccttgcccggaagcttgcaggtgatcctaatcttcactt

SEQ ID NO: 21382 - DNA, 393 bp, Gossypium hirsutum
  Clone ID: LIB3146-041-Q1-K1-D11
ctggaattaccattctcccgctattttctcaagccacaccaaaagccaatttacccgaagaggatatcaaggctctcacaaagaggacacaagatggaggcactgaagttgtggaagccaaggccggaaagggttcagcaacattatcaatggcctatgctggagccatttgctgatgcttgccttaagggactgaatggcgttcctgatgtagtggagtgctcatttgtgcagtcaactgtcactgaactccctttctttgcttccaaggtgaggctcggaaagaatggtgtggaggaagttttggggttaggccctctctctgagtacgagaaagaagggttggagagcctcaaaccagaacttaaatcatctattgagaagggaatcaag

SEQ ID NO: 21383 - DNA, 421 bp, Gossypium hirsutum
  Clone ID: LIB3146-041-Q1-K1-D12
tagaggtgatgctatagcaagcttgagaaaagaatgggagggtgtgaagctgatggaggaagtcgtacctttctttcagtcggtgaggttgtcacgggaagctacaacaacagaggactgtgtagctgaggtggcaaatgttgttaaagagcagctagaatcgaaagatcccatgtttgctcgtgcagctaaagccatggtggattgggtaaagctgtggaaatcagttggatctagcacatcctcaccgggggcataggattaagacatggttataatttgtgtgtttttgctttttggtttgctagaattatttctatcatacactcttccatgatggtgatattacgtggaatatctgtttgtaattgagctgcaacctgaaatggtttgcttgctagtgatattacgtggcaaaact

SEQ ID NO: 21384 - DNA, 346 bp, Gossypium hirsutum
  Clone ID: LIB3146-041-Q1-K1-D2
gcatcatcccaatcaactatctgaagaaatggtcttacgcatgagagatattttcattttcttagcagattcatccaagctttcttcttcatcgtcttcttcttcggtgtcacccgcttcacctcactgcccccttgccaattttttggcatcatcctcggactcacccgttgtaacttcctttgtaagtagtccctcaggaggtggtgcatatgacccttatggaatctctgacaaagttgactggacatttagtattgggacctatagtaaagcgattgaagtctcgtggttgtctgttgggaagaaagaacttgaatatgccgctatggctctaaaaagattc

SEQ ID NO: 21385 - DNA, 398 bp, Gossypium hirsutum
  Clone ID: LIB3146-041-Q1-K1-D3
cccggttctataccgaccggatcaaccagttggtttacggttcatgactttaaacccgggaacagttccccgaatgtaccattcaaccgccaacttgttacccgatgggcgggttttaattgcaggtagtaacccacattatttttacaaattcggtgctgaatttccgacggaattaaggctggaaacattttcacctgagtatttatccccggatcgagccaatgttcgaccggtaatcgagggaattcccgagacggtacgttatggcgaggcgttcgatgtatttgtgtcggtttcactaccggtcgtgggaatcatcgaggtcaatttcgggaacgcaccttttgctacacattcgttttcacaaggtcagagattagttaaaattaacgtta

SEQ ID NO: 21386 - DNA, 417 bp, Gossypium hirsutum
  Clone ID: LIB3146-041-Q1-K1-D4
gttctttactgagggacccaaaccctgatgatccattggtgccggagattgctcacatgtacaaaaccgacaagaacaagtacgagacaactgcaaggagctggacccagaagtacgccatgggctaacgagcattgttgtgtgcaaggggaaacccccccccttttttttttcttttttcgtatattctggtttttaaaaaagggctatgcatgatgaatgtttgttctgtcatttgaatcctaaaatgacttaaaaggaggtcaacaacctggcttgagtttgaaaaaagaagaagcaattgttgctttttctaatgttgaatgaatgcataaacgtgaactttggaacaagaaaatttgtgtcctaactctgaaaatgttaacaattctccttaatcatagttatatatttgat

SEQ ID NO: 21387 - DNA, 425 bp, Gossypium hirsutum
  Clone ID: LIB3146-041-Q1-K1-D6
cccacgcgtccgaaaaaagccacccaagggccagctcatttctttctttcttatttatttagttggattttttgcaccctattcatggttctgctcctgatattgctggacaggacaaggcaaacccgcttgcaacaattctcagtgctgcaatgcttttgaagtatggcctaggggaagcaaatgctgcaaacagaattgagaacgcagttctggatactcttaataggggtttccgaacaggcgacatatactccactggaaataaactagtcggctgcaaggagatgggagaggaagtactgaaatcagttgactcaccagttccaactgctatatgaataaaaaacagctgagtaccaaaacaggaggcctccatctgggttagccattgttttctcttcttttctgagttctcaaagctc

SEQ ID NO: 21388 - DNA, 377 bp, Gossypium hirsutum
  Clone ID: LIB3146-041-Q1-K1-D8
gtttaatccatttggctcaccctccaagcatcaatctccacggggttcttggtcaaatccttttcgatgcatgtgttccgaagaacgttgaaggctgggatctaaagtcatcagactcctcacgcaaacacccatatacttctcggcggaattcccatttcaatccaatcaaatgcattcgaagatccaggctataaacatattctgcttttccagcttgaagaaggaatgctttgaagtggggcatagagcacaatgaaactcctaaaaggataaaaaaaagaagggggcaatgtgtgatttattaaatttctgttttgtggaacaataaaaggttaattctatgttttgagctgttagacccgtgttctaacctt

SEQ ID NO: 21389 - DNA, 304 bp, Gossypium hirsutum
  Clone ID: LIB3146-041-Q1-K1-D9
ctttgacgccattaataataataataatagtaatagtaataactcagacatggcattgatattattgcagaatagtagtagagaagaagggaataagttgaacgagttcttgaattcgagttcagattgtgatattggaatatgcttatttgctaagtgaaggggaagaaaatgaagagattacgatgatgatgaagaggcttttattgcttattattatatcgtttgatgcataatgaagacatatttttgtaaaaagaaaaatagttgtgaaatgagtgaagttctctccatttcttgctcg

SEQ ID NO: 21390 - DNA, 343 bp, Gossypium hirsutum
  unsure (1)..(343): unsure at all n locations; Clone ID: LIB3146-041-Q1-K1-E1
gctgatttgagcagcagcagctaaagcagatcccanaatgaagtttaatatcgcaaatccgactactggttgccagaagaagctcgagatcgatgacgaccagaagcttcgggcatttttcgacaagcggatctcgcaggaggttgctggagatgctttaggcgaggaattcaagggctatgttttcaagatcatgggaggttgcgacaagcaaggattcccgatgaagcagggtgttctgactcctggtcgtgttcggctcttgcttcatagaggtaccccatgcttccgtggatatggaagacgtaatggtgagcgtagaaggaagtctgttcgtggatgc

SEQ ID NO: 21391 - DNA, 343 bp, Gossypium hirsutum
  Clone ID: LIB3146-041-Q1-K1-E10
cccacgcgtccgggttcaaatgctatgggacttttccatgagtttgttaatgacaaggatgttaggttgattggtgtagaggctgctggttttggtgtggacagtggcaagcatgctgttacttttaccaaaggagaagagggagttttgcatggagctatgtcctacttattacaagatgaagatgggcaaataatcgaaccccattccattagtgcaggcttggattatcctggggttggaccagaacacagttttctgaaagacgtaaggcgagctgagtaccacagtgtcacacatgaataagcattggtagctttcaagaaattatctcgactggagg

SEQ ID NO: 21392 - DNA, 349 bp, Gossypium hirsutum
  Clone ID: LIB3146-041-Q1-K1-E11
aatcaaaggaagatggacttggaaccacgggtgaagggctcgagtggggtgtcctgtttggtttcggaccagggctcactgttgagaccgtggtgcttcatagtatctctgcttaaacaaggttctaatgttcatgttggctagcccaggctgcactaccatttgctttgcatttttatttattttattttcctttttattactgaaatttgtgatttgtatggttatttgaaagagagtaaagctctcacatatggtgtttaacgcctgtagaatttatgtaccaccttatattttatggtaataataaattgccttttttttaggtgaaaaaaatgaagggcaactg

SEQ ID NO: 21393 - DNA, 302 bp, Gossypium hirsutum
  Clone ID: LIB3146-041-Q1-K1-E12
cccacgcgtccgcccacgcgtccgggaagaatctgcaagcacgagggtcggatcttgtggttcggattgggaagccggagtgtgttttggttgagttagctaaagctatcggggccgacgctgtctatgctcatagagaagtttctcatgatgaggttaaggctgaggaaaagattgagtcggccatgaaagaagagggtgttgaagttaagtacttttggggaagtactttgttccatgttgatgatttgccgtttaaattggaagatatgccttccaattatggtggatttagggataaa

SEQ ID NO: 21394 - DNA, 245 bp, Gossypium hirsutum
  Clone ID: LIB3146-041-Q1-K1-E2
cggacgcgtgggcggacgcgtgggtggccaacggaccaacgtcggttttgaaaaaaaaggcctgagttgacacatggattttaaaacatcatctttttcctggaaatgcgatttccatgttacaacattagggatcaaaattaaaggtacaaaaaattccaaatactactagcaatctaatagtacttgtagttgtttctttgtcatgtttagaaagtttttattttaaaaggtgtgattatgag

SEQ ID NO: 21395 - DNA, 403 bp, Gossypium hirsutum
  Clone ID: LIB3146-041-Q1-K1-E3
gcttctgtaacttttccaaccatctctacttttccctttttttccattgattgcagaggagacctagatatttaagatctttatgtagtgcacaaatcaccggcgaagtactttttggatgaaatgtatagtggaaattaattgcggaggaccacaacacttggtagtgagaaagaacgagagcgagtgtatgatactatcttccacttgccatggagatgtgaagtgcttatagatgttggattctttgtttgctttgatgcgtttctgtccttgttaactatcatgccaacaaggattctgattaagctttggaggttcctgactgcaagttcaagaggctttctgcagcagagctgtgttattttttgctgctttcttgttctagcatgtggagtcattc

SEQ ID NO: 21396 - DNA, 424 bp, Gossypium hirsutum
  Clone ID: LIB3146-041-Q1-K1-E4
ctttttcttttttttctttatattttctcttccactaatactaataacccccaaagctaaaacctttgagcttctctttcatggcgtcctcaagggaaggtcactacagaggtgtaaggaagagaccgtggggaagatacgcagctgaaatacgtgatccatggaagaaaacaagggtttggttaggtacattcgacacacccgaagaagctgcactcgcttacgacggagcagctaggtccctccgtggtgccaaagctaaaaccaacttccccacaccgtcttcctcttcttctccgccgccggctctttctcttgatcttaatctcgcttctcataatccccatcgttgggctttagcttcacctcatcaccatcaccgttttgccgccgtcggtgatttccttcaagctggtggtattaa

SEQ ID NO: 21397 - DNA, 425 bp, Gossypium hirsutum
  Clone ID: LIB3146-041-Q1-K1-E6
agttttcatcaaagaaactcagttcgcattttttttttcaaattattattagttgtttaaagcttgggatacaatggagttagctctgaacatttcgtctccgctaatatttcccacaaattcaacaccaaaattgaaaaaaattaacaaaatttcttatggtttcggatccaatggatcctacccgacctctaaaatctgcgctgtttgttccaatggctctggttcatcatcatcttcttctcatggggctgaggctagggcagtgggagatgcacacagacgaagaagcagtctcgaatcactattttgttatgacaaacctatccccgaggagcgaattgaagaaccggttggggtatcgttggctgaaaaattagttggagataacccccgttgcactgattgtcaggccaaaggtgctg

SEQ ID NO: 21398 - DNA, 401 bp, Gossypium hirsutum
  Clone ID: LIB3146-041-Q1-K1-E7
cccacgcgtccgcacagaagtggtagggatttggtcaacatggctaagaagcgaacgaatgttatacctatcattgaagatgctaggcatcctgctaaatacaggatgctagttggcatggtggatgtgatattttctgatgttgcgcagcctgatcaggcaagaattctggctttgaatgcatcatatttcctgaaggctggaggtcattttgttatttcaatcaaggcaaactgcattgactcaacggtccctgctgaggctgtattccagagtgaagttaagaaattgcaacaggagcagttcaagcctttcgaacaagtcactctcgaaccatttgagcgtgaccatgcatgtgttgttggcggctaccgcatgccaaagaaacagaaagctggtgc

SEQ ID NO: 21399 - DNA, 422 bp, Gossypium hirsutum
  Clone ID: LIB3146-041-Q1-K1-E8
acctagtatgccagtatggtggagatggtactattggatttgtccagtatcttggaccttgtatggattgcttgtttcacaatttggagatataaacgaattgcttgaagatggaaacaatgagacagtgaagcagcacttgagaaattattatggtttcaggcatgattacctgggatttgttgctgctgtgattattagtttcgcagttctctttggaacaatctttgctgtggccataaagatgttaaatttccagagacgatagaatttttttgttttattcttataaaatcaatgctatttgaattttatgcatttattacaaggtccaaattctgtcattgtaataaaaggttttttcttgtatgcaactatgaaccaatgtacacctttttagatataaaaagtttatggtttga

SEQ ID NO: 21400 - DNA, 411 bp, Gossypium hirsutum
  Clone ID: LIB3146-041-Q1-K1-E9
cccacgcgtccgggaaccctgggtagggagctgctgagcgaaagcaagctgaacgatcttctgcatggatcagaatatgttctcacttatgaggataaagatggtgattggatgcttgtgggtgatgtcccatgggagatgtttactgatacctgcaaaaggctgaggatcatgaaaagctctgatgctattggactcgctccgagggccatggaaaaatgcaggaaccggaactagctaccatcatacatgatcttttcccacacaccgaagattattatttctgaaagagatgacatgatgctggagtgggtaggagatcatcatgtaagcctgtttttgttctactgaaaaaagtcgtatccagtgcgtaaggctactgctataagcaagaactagaaattcccattg

SEQ ID NO: 21401 - DNA, 418 bp, Gossypium hirsutum
  Clone ID: LIB3146-041-Q1-K1-F1
ctaaccctaaccctacttgccggttcgaatctcccattcaccatcatcccttttagccattctccccatttcatactgtgattataattatgccatgcgaagcttcatttcttgcatattgtgccagatccacacgaagaatctgaatatttatcattgtattttatgatcgggttaaattcgtggattttgatcggcgggttcatctcagtgggcatctgattgggtggtgacgatgtcaaacttatatggcgattataatcaaaggattgattatgtattcaaagtggttttgattggggattcagcagttgggaaatctcagctgcttgctcgtttcgccaggaacgaattcagtgtggattcaaaagccacaattggtgttgaattccagactaaaacccttgtaattgataac

SEQ ID NO: 21402 - DNA, 420 bp, Gossypium hirsutum
  Clone ID: LIB3146-041-Q1-K1-F10
aaggacttatttttgtggttgatagcaacgatcgtgatcgtgtggttgaagctagagatgagttgcacaggatgttgaatgaggatgagctgagggatgctgtgctgctagtattcgcaaacaagcaagatcttccaaatgctatgaatgctgctgagattactgacaagcttggccttcattcactccgccagcgccattggtatatccagagcacatgtgctacttccggtgaaggactgtacgaggggctggactggctctcaaacaacattgcaaacaaggcataggtgtgacatgactgagttggcagtcttacaacccttttggattttatgaatgtctgcccccgttttatgtgttattttttatggtttttcacgtttgttgcaaacactgccatttgttacttatagttta

SEQ ID NO: 21403 - DNA, 332 bp, Gossypium hirsutum
  Clone ID: LIB3146-041-Q1-K1-F12
cggagatacggccggatgcggtggagaaagtggcgatagtgagtagtggattgtcttatgcagatgaacagagggatcaacagttgagaacaattggatggcatccgtcggagattttggttccgaagaaaccagatgatttgaggttattggtgaatttatcaacgtttaagcaaagtactctcaattgggtccctgattttttgcttcgacagttcataacggtatgtttgatgttccttagagttaaaattatggtctattttgattttagtccctctactatgctaaaatttaaatttaagtcatttcattttaatttgacattattt

SEQ ID NO: 21404 - DNA, 418 bp, Gossypium hirsutum
  Clone ID: LIB3146-041-Q1-K1-F2
gtttgccatttgccttaatcatcttcctctttctttaaaacttcttcctatttaatttctgactaaacttgcgctgaattccatggctactgcagaggttgtaacagctcaaactgcaatccatgaggagaaacctgaagaagtggtcaaggttgaagaaattgcaacagaagaggtagtggctgttgctcctgcaacagaacctgttgctgaagaaccaaaggaagcagtgcctgaagcagcatccgaagaaccccaggctccagaaactgaagccacagttgaaactgaatcaaaagaggtggttgaagagcccaaggctgtgactgaggagccagaagttgagaaaaaagaagaagagactcctgaagaaacagtagcagagccagttgcggaggagtccaaggagactactgag

SEQ ID NO: 21405 - DNA, 325 bp, Gossypium hirsutum
  Clone ID: LIB3146-041-Q1-K1-F3
gctttggctaatattcaggcagctcagaggcgtcctggttcagatccagtttcacaggctaaaccacatgctttaacaggtttgagacctaacagcacagtgcaggcggacatagatgaatacgacgatttgtggggttctatagcaccagctactccacaatttgcttatagaccattgaatgtgaacacagctggagcacatgatgatgatgatccctgggcagatattgctggtgccgctacaacaaccaatgttaaagcttcatcatcatgtagaggctgaggaaatagagcaggtgctgccatattgggtgcacagagga

SEQ ID NO: 21406 - DNA, 394 bp, Gossypium hirsutum
  Clone ID: LIB3146-041-Q1-K1-F5
gaccgctttaacttgtataggatcgaacaagaacttgggactgaaattaagcaaatccctccacatatcgaccaggctatttactgccggtgatttttgtgggatgtttccttagcctactatggtaacaacggttaatgatgctggtctttcaaggtctcggtccctagtcatgggtgtgcattctaaaaactcaggtgttgttataagacttttagtttgtgctgtttatgcattaacgttagccaggattgtaggaaagaagtttagataagtcctgctttcctttcttttatatttcttttattaacaaatggtttcctgtcgcctacttcgatgctattccaatcatccgaacatcgtggaatggttttaaagttgtaccttgtgcaag

SEQ ID NO: 21407 - DNA, 423 bp, Gossypium hirsutum
  Clone ID: LIB3146-041-Q1-K1-F6
ggtaaattcactgctttcagagtcctatgagtcatggttgcaacagcgacgtgacttcttgcagcgtggaatatatcatgcctacatgcagcatactcatggccggtcaacagctaagatagaatcagcaagtagcagcaaaagtcccacctccacctcagaaaccggtggtgatgagctgctgtcaattgttcgacccatgctggtgtatacaggcttgattgagcagttgcagcaaatattcaaggttaagaaatcatcaagtttggcagccaccaaaggcaaatctgaaggaacctcaaccggaaccgaaggagaagggttggaaggttgggaggtggtgatgaaagagaggttgttgaatgtgaaggaaatgatagggttctccaaagagttgctctcatggctcgatgacatgacttc

SEQ ID NO: 21408 - DNA, 239 bp, Gossypium hirsutum
  Clone ID: LIB3146-041-Q1-K1-F7
aaaaaaaaaaaaaaaaaaaaaaaaaatttttttaataaaaaaaaaaaaaaaaaaaaaaaagggaaaaggttaaaaatattatggattcaaaaataataatcatgggcttgcgacattataagttattttttagttgaagctaatttcatttcctctgtccaccttatttactccgttttgatggggtgaattctttgggtttcccatttcattcgcctacaagcaaaaacccttttttt

SEQ ID NO: 21409 - DNA, 251 bp, Gossypium hirsutum
  Clone ID: LIB3146-041-Q1-K1-F8
ggattatttatgctctctacgctattgtttttgtggatcgtgatgagtacttcgacgagtacaggcgtccactttattactctgcttagttctcttttatgatctctctctttttctgtaaagtggtgatcctgaaactgtttgcatttgtttttaattgaactcgatattgatgtgcttctactctttaattgatcttgacattgtgcgattgtaaatttgtaatgtttctttgatcttgtttggatttc

SEQ ID NO: 21410 - DNA, 427 bp, Gossypium hirsutum
  Clone ID: LIB3146-041-Q1-K1-F9
caaggcttaaggagcacatgcaatattgtatgaaccatccagaagaaatgagtaagctctcgaagttaaaagctcaaatcactgaggtgaaggggattatgatggataacattgagaaggttttggatcgcggggagaagattgaacttctagtggacaaaactgagaacttacaattccaggctgatagcttccagaggcaagggcggcaactgcggcggaggatgtggctgcagaatctgcaaatgaaactgatggtagggggagctattcttgtgttgattatccttttgtgggtttttgcgtgtggaggtttcaaatgttaacgttgataaccattgcattgcattgcctatgttttcttttatatatacaaaaaataataattctacatttgtttagatgtacaaaatataattatgctctt

SEQ ID NO: 21411 - DNA, 81 bp, Gossypium hirsutum
  unsure (1)..(81): unsure at all n locations; Clone ID: LIB3146-041-Q1-K1-G1
naaaaaaaaaaaaaaaaataaataaaaaattttttttaaaaaaaaaaaaaaaaaaaaaaaaaggaggggaaaaaaaaataa

SEQ ID NO: 21412 - DNA, 372 bp, Gossypium hirsutum
  Clone ID: LIB3146-041-Q1-K1-G10
gaatcttttggattccataaggtcttgcaaggtcaagaaatttttctaagctctctgtatagaagaggctcaactatggaagagactcgaggaaatgacggtgctggtctccctaatgttgggcaaatgtcgggaactagaagtggatggtcttcctcgatgcagggatataatacacatagtcctgtacaaccatctgcgcaagtttcctcaccatcttctgtgttgatgttccaacaagcaagcaatccagttccgaacttcaatcctactcgtaacttcaaccaggaaatggagcggggagtgagttcttttcgtgtgcctgaaacttatggggccaagttactgtcatcgtcaatcagcgaacatgat

SEQ ID NO: 21413 - DNA, 413 bp, Gossypium hirsutum
  Clone ID: LIB3146-041-Q1-K1-G11
gttacaacaaggcaacaggttttggtggcacggggatttacttgaagctgcctggtcttacacaaacccggatagtaaattcatacctagattacactgggattgtggctgaagacccagtgcaacttcatatctctagcagttttttcctcggtgatgcatttatcctcttgaaatcaataaatggggtagcaaatggagtgactatagtggataacatgttcagtggatctaataagggggttgatatagttcagttagagggtcctttcacacaaattgatcaggttgtagttgataggaatagtgccaaggggatgaacattaaagcaacagttgcgagagggtctgttgaaaggaatagcagctcctggacggttgatttaatcctgttcttttatttcctaacctga

SEQ ID NO: 21414 - DNA, 426 bp, Gossypium hirsutum
  unsure (1)..(426): unsure at all n locations; Clone ID: LIB3146-041-Q1-K1-G12
acggaacccaagcagaatatgaagccaatcgagttgaaaacgtcgccagagcaaatgcagaccataaccaagtcgatgatacttgggaacgagtcaaggaggttggattgagaggccttaccagcaagaggcacatgaagatcgtgctgagatggatgagagagagacaaaagattaggctaatatgcaacgttgtggggcctcacaaacaatttctgtatacaacttggttcagtaaaccaagcattagccacacaagagctgtccataattcctcaacttctacacctagtttttctgtcgatacttctagtccaaagttgtcttcaggttaggttgtagcacgcttgtgctggctgcaataccatcgattgcagaacatgtacttgtttttgcaacagtgtaatataattgtntctgtttcat

SEQ ID NO: 21415 - DNA, 419 bp, Gossypium hirsutum
  Clone ID: LIB3146-041-Q1-K1-G2
cgatggttttgagaaaagccttctgctttttaagcaaaagaaggaattgtacccaattttgcaaggggtcttggatgtgaattcaacaggcccaatcccggacctggaaaaacagcgactttttgctctggattctccaacacttgactatgctgtagtccaatgccaggctctgttttggcacccacgagggagttgcacaacagattgagaagtcatgcgagcacttggtgattaccttggtgttaaggtccatgcttgtgttggtggaacaagtgttcgtgaggatcagcgcattcttcaaagtggtgttcatgttgttgttggtactcctggtcgtgtctttgacatgttgagaaggcagtcacttcgtccagattatatcaagatgtttgtcttggatgaggctgatgagatgc

SEQ ID NO: 21416 - DNA, 430 bp, Gossypium hirsutum
  Clone ID: LIB3146-041-Q1-K1-G3
gacatattgtcgggttttgtcctgtcaagcattgtaaaaccaatacctgctgtcactgaatttacagcccagctgcagattcttgagttgcttgagaatgctatttttacagctggctataaggctgtcttgcatgttcattccgttgttgaggaatgcgagatagttgaactattacagcaaattgatccaaaaacaaggaaacccatgaaaaagaaagttctttttgtgaagaatggtgctgttgttgtatgtcgtgttcaagttaacaactcaatttgtgttgagaagttctcagattttcctcaacttgggatgttcactcttcgtacagaaggaaaaaccattgcagtgggaaaagtcactgatcttcctgttgcttaaaacaattttgttcttagaggcgagaatataaaggtacaaactcgta

SEQ ID NO: 21417 - DNA, 434 bp, Gossypium hirsutum
  Clone ID: LIB3146-041-Q1-K1-G5
ctttgctttagagaaaacaacactggaaagcccatccatggctgcctgtggaaccattaaacacatctttgaaaacccattacctgaaaaccctactttgcttgaatccctttcttcttcttcttcatggaagcctgggattaaaccccttgaccaaaaaccttctttcactgaattctttggtgaacttcatttccaggaaaatttaagtatttcccactcttcttctactacctcttcctttcctacattgaaggtctccaggagtattggtgtttattcccatggaaatggtgaaaacagttctaattgccataagaagagtgatagcttctcgttgaaccctgagagcctccagctgtgtactgaagagcttggatttgagagctcctatggtgttgaagaggtgaacaatgagatgaaccaagactggg

SEQ ID NO: 21418 - DNA, 418 bp, Gossypium hirsutum
  Clone ID: LIB3146-041-Q1-K1-G6
gttttttgtaaatgtgtgtaaccgattacaagattagaatctggctttatagccgaaaagaaagaggaaaataaatcaaaatacaatatgtgtttttttgtttgtatttgctgctgtgtttgtctgtttcttttgcaggtacggttgtgcgctcgggtacggggccgtgtgctggcgttcggggcgtgggcgtggcgccaggaggccgtacggaggcgtggaggctgggactgctgcggcgcaaacaagctgctagggttctgccctaatttttgagtcttgggtcacttgggcttatcgtatttgggctcgggtttatttgtaaatgggttgatttgggcttgtatagggtcatgtattaattttgggttttggactgtaaaaaggatatttaatggactgtggttatttatttatt

SEQ ID NO: 21419 - DNA, 351 bp, Gossypium hirsutum
  Clone ID: LIB3146-041-Q1-K1-G7
gcttagacaaggatacactcatgccttcttgatgacgttcgaaaagaaagaagattacactgcatttaccagccatcccagtcacattgaattctccgccacttttgttactgccattgacaagttcgtggtgcttgatttcccttcggttcttgcaaaatctccggcttgatctgcaagaaagaaaaaagctacccaggaatttaagtgttttgagtatttgttatgtttaatctctctgttgtttgcatctctatgttttctgcttatgtgttatggctttctgccattgctatcaattccccaataatcacaatttgtattattgatatgcaaaaattcacatgcccc

SEQ ID NO: 21420 - DNA, 418 bp, Gossypium hirsutum
  unsure (1)..(418): unsure at all n locations; Clone ID: LIB3146-041-Q1-K1-G8
cccacgcgtccggttttggagtggatttagctggttggttggtatgacactcatcattgctttgctatctgagtatgtggtgggcacaattgaggctgcatcagaaacatggggcatttccattagcttcatcagcataattttgatacccattgttgggaatgcagctgaacatgctggagctatcattttcgcctttaaaaacaaactggacatatctttgggtgttgctttgggttctgcaactcaaatctccatgtttgctgttccattatgtgttgtggttgggtggattatgagaatcaaaatggaccttgatttcaatcttctcgaaactggttgtcttgctttaacaatacctngttgttgcctttacgctacaggatggaacttcacattacatgaaaggagtggtact

SEQ ID NO: 21421 - DNA, 426 bp, Gossypium hirsutum
  Clone ID: LIB3146-041-Q1-K1-G9
ggcctgttggtcaaagagccacagcataggttggcgtacaagcgaggagcaacagagattaagcaacatcctttctttgaaggtgtaaactgggctttaatccgttgtgcaagtccaccggagattccaaaaccggttgagatagaacggattcgaacccctacctcatcagctggtgataaaccttctgttcctgctactaaggatcagagtaactatcttgaattcgatttcttttaattattttctgaaccatttttctttttcttatttcgagggaatgtaagagttcatgatgatgtgcaaattagagtttctagaaatgataatgatcatatatgcttgattgtcttaattttcaaatttgtattttgcataagtgaaaacatcatttgattttgcatattgaaaggctatgggcttggt

SEQ ID NO: 21422 - DNA, 200 bp, Gossypium hirsutum
  unsure (1)..(200): unsure at all n locations; Clone ID: LIB3146-041-Q1-K1-H1
taaagcatttgatgatgatgacactgggtggtgctgatgatgtcgatatgccatctttggaggaagagggcaatgaagaaagcaagatggaagaggtcgactgaacagctaataaatacgtaaacactataaaaatctngtcattagtacatatacctacaaagctcgtcgctgagtgtcgggttctggtgggtgtctag

SEQ ID NO: 21423 - DNA, 364 bp, Gossypium hirsutum
  Clone ID: LIB3146-041-Q1-K1-H10
cccacgcgtccgcggacgcgtggggccggctatgactccggttaagtccacaccaagctttgctgtttctacacgaggatataccatgtctttgtttggtttgcttggagctgtggcactctttgtttaggtcacatcaatgttctctataaattttaaatctttagattacgctatttattttgtgtattaattttttttagtgtccaattttctctctctagtggttcattattagttttttttagatttaaattggattttcagctctttggtagcattttgacttgcatgattgaataaagagagagtttatgattcttgtttttgttcgtactctaataattagtgttaattatttctt

SEQ ID NO: 21424 - DNA, 327 bp, Gossypium hirsutum
  Clone ID: LIB3146-041-Q1-K1-H11
cccacgcgtccgctttgatcttcctgccttgattttctcatctgatctgagttttaacaagatgattgatttcactattgggaatttgagatcaagaaatagaaaggatctgttacgatctgtcacaattaggggcggtttagggttctacgtccatcttttagaaacaattgaagcatacaagggttttcagatcacattggttgaggacttttaatcgtctctctaagaaatggttctggacggaattgtatcatctccccttcgaaggtcagcatcaacgaggaggcaatcctcgagagatgaattcggtagctggtcgacact

SEQ ID NO: 21425 - DNA, 216 bp, Gossypium hirsutum
  Clone ID: LIB3146-041-Q1-K1-H12
gtggtcctttccccccgtttccttgatgcaggatttcagctttgtgaaaaggcataactggatgatttatttcactattgcgaatttgcgatcaagatatctaatggttctgttacgatctgtcacatttaggggcagctgagggttctacgtacatcttttaaaatcaatttaaacatacatgggttttcagatcacactttttagaagactttt

SEQ ID NO: 21426 - DNA, 391 bp, Gossypium hirsutum
  Clone ID: LIB3146-041-Q1-K1-H2
ggagagcagtccctaggaacaattaaaaagaaccgaaaaaaaaaacacagattaagacagaagcatggccagccagctcgtaggaacaaagagagcttgtgtcgtgggtggcagcggattcgttgcctcattgctggtcaagttgttgctcgagaagggttacgccgttaacactacagtcagggaccctgacaaccagaagaagatctctcaccttgtaacactacaagagttgggagacttgaagatctttcaggcggatttaactgatgaagggagctttgatgcccctattgctggttgtgaccttgtcttccatgttgcgacacccgttaactttgcttctgaagatccagagaatgacatgatcaaaccagcgactcaaggagtg

SEQ ID NO: 21427 - DNA, 322 bp, Gossypium hirsutum
  unsure (1)..(322): unsure at all n locations; Clone ID: LIB3146-041-Q1-K1-H3
ctggaattgctttgaatgaaaactttgttaagcttgtgacttggtatgaacaacgaatggggttacaggttcccgtgttatcgacttgatccgacacatgtctaaggcttaagtgagtgagtgattgtgcttggtgtatccaagctntagcaattttaatttagaagagatgttatgagagaataaacgaattgtacggagcatatttttgtgtgaagaagggttgtttcagttttattacccaagtacttgaatgtttcaagtttcattgcagttgtttttctactttaatgcatacgtggtgattattggttctctactt

SEQ ID NO: 21428 - DNA, 405 bp, Gossypium hirsutum
  Clone ID: LIB3146-041-Q1-K1-H4
cccacgcgtccggcaagcccaaactgcgattacaaacttctgtgggggaaaacatggcgggagcagctgaaccacaaaaacgccagagcgggagaccgttcccaccatcggcgagaggtccgcctcctcctcctcgccctcgctttgaacctgttgatcgcgaaaagacttgtcctctattgcttcgcgttttcactaagattggtggtcatcattctaaagaagattttgcagtgagaggcaaggaacccaaggatgaggttcagatttatacatggaaggatgctacgcttcgtgagttgactgatctggtgaaagaggtagctccagcagcaaggagaagagatgcaaggctgtcctttgcatttgtatatcctgacaagaatggacgttttgtggtgagag

SEQ ID NO: 21429 - DNA, 204 bp, Gossypium hirsutum
  Clone ID: LIB3146-041-Q1-K1-H5
gtcagacgttcggttctagaatacgcaagggccgaccttttttttatttaaactgcttccgagggccgtcatgaaatttgcgaaattcatagatagtcccaccgacagaaaatatctgaagtgtgtgtaacaagtctctttacttccaaaccctaaaattctatagcgccaggaaataacgccgcttgattattttcattcaac

SEQ ID NO: 21430 - DNA, 432 bp, Gossypium hirsutum
  Clone ID: LIB3146-041-Q1-K1-H6
cggacgcgtggggtgtctttgcagagtatcgggtagtcctttcaatcctcagccatggcggaacagacggagaaagcatttctcaaacaacccaaggtgtttttaagctctaaaaaaaatgggaaaggaaagagacctggaaagggcgggaatcgcttctggaaaagcattgggttaggctttaagacacccagagaggccattgaaggaacatatattgataagaaatgcccatttactggcactgtttctattagaggccgtatccttgccggtacttgccatagtgcaaaaatggtaaggactattatcgtccgaaggaactaccttcactacatcaagaaataccaaagatacgagaaaaggcacagcaatatcccagctcatatatccccctgctttcgtgttaaagaaggagatcatgttataatc

SEQ ID NO: 21431 - DNA, 425 bp, Gossypium hirsutum
  Clone ID: LIB3146-041-Q1-K1-H7
atattttcttgttttagtgaagatacaaacaaggtgggaagaatacaagtcattgcttttcagtcatcagatgggaaacagaatcatgttacaggaccaattgctttatcaccactgaatagaagctcagttatcgatcttgagtcatctctaagctcttctgaaaatccattgttgacatctggatctgcagaagtagatagtcacatgcaagacactagtgattccagaccggctcaaggatctgccaaggtgcaatttatgattattgaagttaaaatttgtcatatggcttgttaacgtatcagggctcttaaacgagcgaaagtgaggagataagtaatgctttagatgatggaatggaacatttttgtatattatgctgcacaaattttaagttccataaacaaagtgcttttttagat

SEQ ID NO: 21432 - DNA, 411 bp, Gossypium hirsutum
  Clone ID: LIB3146-041-Q1-K1-H8
gtaggtgtctggctgacctgtgtggtgcattgcattgtgaccttgtcatggattcttcactccacaagactaagtgcaatcctgctgctgctgcgaggaatgaacatctttgggagagtcttgctgatagttggtttccggttagcaaaggtcctgtaacaggccgtcttcatgaattcttcttgccgcaattctgggatgcccacacttgcagcggaggtccaaaaccctttcctaaagggcaaaagaagcgaacaaggtttccttacatttctctatccattttgactttggtgcttctggccgttttctacttcttcatttacttggaccaaaaggggattaaaagtgggtcacaagaagctaaacgaatctcactaaatggtcgtaagaaaaaaatcgtttaaacat

SEQ ID NO: 21433 - DNA, 318 bp, Gossypium hirsutum
  Clone ID: LIB3146-041-Q1-K1-H9
catccgggtcctccacttacagcccggttacttgcgaatcaaaacagtgctcttctcttgaagtttccgcttgccgtagcgggaaatgcctataccaagtctcgtacggtgatggatcttacacggtgggtgatttcgttaccgagacagtgtcgtttggaaactccggtaacatgaatggagtggctttgggttgtggccatgataatgaaagcttgtttgttggagcggcggggttgcttggactcgggggtggacccttgtctttaacatcccaaattaaagcgacatcgttctcttactgcttagtggatcgtg

SEQ ID NO: 21434 - DNA, 357 bp, Gossypium hirsutum
  Clone ID: LIB3146-042-Q1-K1-A1
atcttcaaaagcagttgtttggtcaattgggtcaaagccaaaatcagagaagaaggcaaattcggggacttgggtacaagtttacagtaacggggatgtgtacgagggtgaatttcacaaggggaaatgttcagggagtggggtttattattaccatatgaaagggaggtatgaaggggattgggttgatgggagatatgatggttatggtgtggaaacatgggcaaaagggagccgatatcgcggtcaatataggcagggattaaggcatggaattggggtgtataggttttatactggtgatgtttatgctggtgaatggtctaatgggcagtgccattgatgtggagttcatgc

SEQ ID NO: 21435 - DNA, 217 bp, Gossypium hirsutum
  Clone ID: LIB3146-042-Q1-K1-A2
gtcaattcaatgatttgagacctgggaatgtaacgatagagtatgaggggcattcatctggtgttgcatatgggacagcgtttactattcatttctggcttggacgaaggccaagtaaagacgtggaatatagtgtttatgcgccgccgttcacgacgcattccatttcaatgaatcaaaggttgctgaaactgaagtgccggcacaaaacaaggga

SEQ ID NO: 21436 - DNA, 345 bp, Gossypium hirsutum
  unsure (1)..(345): unsure at all n locations; Clone ID: LIB3146-042-Q1-K1-A3
cggacgcgtgggcttgaactcagtttttggtaccagttattttgtaaaatagttgggagtcgtggcattgttataaagaacaagcaatgttcattgtaatgttgttagcgaggcccattgccaagttgggatatggtaaagatgatcatgtgtgtctgtcttcattgtacgtcaatgctgtacatatgcatcttgaacttgaactatataagtgtgtttcgccagtctgtctgcaaattgaacctgcaatttgttctgaacattccaaattacccaatcattagggaaagaattgaaaagcttatggcttacattgtttctcnnnccgnnagggaaagagaaaac

SEQ ID NO: 21437 - DNA, 366 bp, Gossypium hirsutum
  Clone ID: LIB3146-042-Q1-K1-A4
ctttgtctcaatttcactgaattttcttaccgacttctctgcattttccctcttctctcccttcacattggaggaactgaaccaaaagccaagaagcagtaggattgaacaaaggaatagaaaatatgcactctttcgggcacagattaaatggtctcttaaccttttccgtgacgatactggcaataatgtgtgctatcgcgtctctctcggacaaccttaatactccttctcccacggcagaaatcaagattatgaacataaactggttccagaagcagccgcagggtaatgacgaggtcagcctgacaatgaatatatcggctgatttgcagtcattgttcacatggaaacacaaaacagctt

SEQ ID NO: 21438 - DNA, 346 bp, Gossypium hirsutum
  Clone ID: LIB3146-042-Q1-K1-A5
ggtgacctctctaaggcaggctttgaaaatagcagtttggaggaaagacagagagctgaaaagaaaaacagggaggaaaagggacataaattcacgcctaaatggtttggctttcgccaacgaagttgctgctacaccttggggtgacttggaagtttatcaatacaacggcaggtttcccaacaacggacttgcataaattgctttagtagcaatgaagaaaatgacatttagtccacttaattccacccatggcaggatgaaaaattggctgctaacttaaagcacatttttgcgcttgcttttgaacactctgatatattctttttctatgcctcttacactt

SEQ ID NO: 21439 - DNA, 223 bp, Gossypium hirsutum
  Clone ID: LIB3146-042-Q1-K1-A6
cgcccaacccagaagcgatggttcccaatttttgtgccaataaatcgactttcctctccggcaccaatctcttcttgttgacgaagccccattatcgaaagcccactgctcaaaaatgcttaaaacctccctttgccaagtcaatcgaccacatccccaagcaattcatagaacaaaatctcaaagatggattgatggaaaattataaaaatgttcctggata

SEQ ID NO: 21440 - DNA, 398 bp, Gossypium hirsutum
  Clone ID: LIB3146-042-Q1-K1-A7
gctgagtttaagcatatcaataagcggaggaaaagaaacttaccaggattcccctagtaacggcgagcgaaccgggaaaagcccagcttgagaatcggtcgccatcggcgtccgaattgtagtctggagaagcgtcctcagcgacggaccgggcccaagtcccctggaaaggggcgccggagagggtgagagccccgtcgtgcccggaccctgtcgcaccaagaggcgctttctacgagtcgggttgtttgggaatgcagccctaatcgggcggtaaattccgtccaaggctaaatacgggcgaaagaccgatagcgaacaagtaccgggagggaaagagaaaactaattggggggactggattatgagggcctgtattttcttattggcattcttta

SEQ ID NO: 21441 - DNA, 321 bp, Gossypium hirsutum
  unsure (1)..(321): unsure at all n locations; Clone ID: LIB3146-042-Q1-K1-A8
cccacgcgtccggcatatcctcaagccagactcgacgcttgctactgcaagcaatgcagaggatggtgagccaggacctgttgctgcaattcggttgccaatgcttcgaatttgcaattttaaagggggaactcctgagcaagtccagacatacttttccatattggtatgtgttcttccgaatgaccaacgaagatcgtggtgcaacccagaactagaaatagtaaggtggntgccgatcangtgggccgtgcaatctctcatgccgcagttctcgaagaatctcactcatganggataactagccgagcaaatcgggcg

SEQ ID NO: 21442 - DNA, 472 bp, Gossypium hirsutum
  unsure (1)..(472): unsure at all n locations; Clone ID: LIB3146-042-Q1-K1-B1
cgnntccgcagaatggggagggangtcttgaacannagtgaggataccaagaaaattcaatgccgnngttctcnnacaccagttgcgactttgggnngtgaggnnattcaacnntgtggacccannagaagctatacnaattnnngtccagagnccannggtaatnncaatcccanttacatannaatcaagnnttttcggggcccaatcacangnnattttgtacatnnnttgatgtcnnacaaaccnnntagcagcttcttaaaatctaaatgcttgtctaattaccattgcnntacatttactgcctgtannaagtggtatnnngtatggtatggtattggtatgggtaatggtattgcaaagtannactaacttcttcttacttcaagaagtaacaaataaggccttctttcaacttgtaaatttaactttaagggttttttccctttttttttttataaacacaaaa

SEQ ID NO: 21443 - DNA, 385 bp, Gossypium hirsutum
  Clone ID: LIB3146-042-Q1-K1-B2
cggacgcgtgggttctaggggcattagtaagtgggaagactgtagatctcctcggtcgtaaaggcaccatgtgggttttgtacatattctacatagtgggatggcttgcaatagcatttgcaaaggttccttggttgcttgatgtaagaagattattgctgggattcagcaatggaattgctggttatttgttgccagtatatcttgctgagataacaccgaaaaaccttaggggaagatttactgctggagtacagatgatggctatcttaggcctttcaacgatgtatatagttggtcctttcatcaattggcgcatcttggctctaatcggtataattccgagtcttgtacaactccctcttctaatctacattccagagtc

SEQ ID NO: 21444 - DNA, 299 bp, Gossypium hirsutum
  Clone ID: LIB3146-042-Q1-K1-B3
cccacgcgtccgcccacgcgtccgggttgttgttgtgcagttgtaaatttctacaatcttgtacaagttggtcttgttttagacaagggtgttactctttttacaagtgatactacaaccatcttgcatctcttaaatcttgtataaaaacaaaacttctgtcccaaaacaatacacaattaaggctctctctcttttttctttttctttttaatctgtttgaaatttacctaaaggttgattcaactatgaagaggtcacttggcagctcagatttttgggtgctttgatgtctatct

SEQ ID NO: 21445 - DNA, 395 bp, Gossypium hirsutum
  Clone ID: LIB3146-042-Q1-K1-B4
ccacgcgtccgctcgtctgcaagatcggtgccgtcggtggtggtcgcgtttccatgcgtagaaccgtcaaaagtgctccaaccagcatctggtatggccctgaccgcccaaagtacttgggtccattctctgaccaaatcccatcatacctgaccggtgaattccctggggactacgggtgggatactgctggattatcagctgacccagagacatttgccaagaaccgtgagcttgaggtgatccactgtaggtgggctatgcttggtgcccttggctgtgttttccctgaaattctttcaaagaatggtgtcaagttcggagaggcggtttggttcaaggctggttcccaaatcttctccgagggtggccttgactatctcggcaacccaaac

SEQ ID NO: 21446 - DNA, 226 bp, Gossypium hirsutum
  Clone ID: LIB3146-042-Q1-K1-B5
ggctctaacaccttgcagatttccctacgatgaatgtaccagaacactagacgagtattagatatggatgtgacatcttgaattatttgttataaatataactaaatattgatgttgtatgtggctctgataccttgtagatctacctacgatgtatgtcttggaacactagacggagtattatatatatgtaaatggaagtcatggtgtttgacacaaatgtcca

SEQ ID NO: 21447 - DNA, 390 bp, Gossypium hirsutum
  Clone ID: LIB3146-042-Q1-K1-B6
cccacgcgtccgcccacgcgtccggtgaacaacatggtgttgtttgaccaggctacttatgataagcttttatctgaggctcctaaatataagctcatcactccctcaattttgtctgatcgtatgaggattaatggatcccttgctaggaaggctataagggaattgatggcaagaggatcgattcgtttggtgtctgcccattcaagccagcagatttacactagggcaaccaacacctagatgttttgttatagttttgcttaaattagttctatgtagtatttgcctttcttgactttctgtgaacgatttttccttttgctaaagacctccatctataatgtgtgagctacagtttcttggtggtctggtttaatggataatttt

SEQ ID NO: 21448 - DNA, 392 bp, Gossypium hirsutum
  Clone ID: LIB3146-042-Q1-K1-B7
cggacgcgtgggtttgaacaaggagctggttctggatatggacaagttcatcacacactctgtgccttttgccgatattaacaaggcattcgactacatgctccagggtataggtctgagatgcatgattcatttggatgcttaaggaaatgttgctgctgtatatttgcccatccaaggatcaaaactctaatgttttgtcctactatgtgttatattatgtgcctacttaagctacctttcccggttatcaagagtgcctatatagaactctctctctctcaaaaaaaaaaaaaagagaaaagagttctttatatggaagtttatattatatgctgagagaataaattatcttgtaaaagcttgcttttgtaatgaaataaatttctatt

SEQ ID NO: 21449 - DNA, 398 bp, Gossypium hirsutum
  Clone ID: LIB3146-042-Q1-K1-C1
ctgtagccgccgcctgcgtctctctcttcatctctctgaaccaaaaagtctttagcttttcgcttcgagagagaccatgttggtttaccaggatctcatctccggtgacgagcttctttctgactcattcccctacaaggaaatcgagaatgggatgctgtgggaagttgagggaaagtgggttgtgcaaggagctgtcgatgttgacattggtgccaatccttcagccgaaggtgctgatgaggatgaaggtgttgatgaccaagctgggaagggtggtgacattggtgacactttcaggcttcaggagccaccccctttcgacaagaagcagtttggcgtgttcatcaagaagttcatcaagaacttgacacccaaactggatgccgaaaagcaag

SEQ ID NO: 21450 - DNA, 390 bp, Gossypium hirsutum
  Clone ID: LIB3146-042-Q1-K1-C2
ggtaaccgctgtcggtggtcaatctccggcagcctcacctactaaagctccgccggccgcggctactcctgctactgctcccgctactgcccctgttagcaaacctaaatcaccggctccaactgctgcccctaccacttccccaccaacttcttcaccaccggctgcggttccggagaagtctgcggcggttccagccccatctaaatctgctacggcttcttctcctccggctgctgctccggtgagttctccacctgctccagtacctgtgagctctcctccagccaaatcgcctcccgttgctgcaccgacgactccaccagagagctcggcctctcctccggctcctgttgctgcaccaactactgctgaggttccggccccagc

SEQ ID NO: 21451 - DNA, 403 bp, Gossypium hirsutum
  Clone ID: LIB3146-042-Q1-K1-C3
cccacgcgtccgagaaaatatctcaaatctcctcctcctcctcggaaatcttagtatcatcaccatggcctcaaatcccaaggtcttctttgacatgactatcggtggtcagcccgctggtcggattgtgatggagcttttcgcagattgcactcctcgcactgctgagaacttccgtgccctctgtaccggcgagaaaggcgtcggccgcagcggtaagcccctccactacaaaggctcctctttccatcgtgtgatccctaactttatgtgccaaggaggtgacttcaccgccggaaacgggaccggaggggaatccatctacggatcccaggtcgcttaccagaacttcatcaagaagcacactggtcccggtattcttttaatggcttacgcttgtccc

SEQ ID NO: 21452 - DNA, 366 bp, Gossypium hirsutum
  unsure (1)..(366): unsure at all n locations; Clone ID: LIB3146-042-Q1-K1-C4
agcttatgcaagtgatgatgacgaaaatggtatgggagattttttgaacgaaatggcagtgatgatgagccagactaaatctaataagaatggagaggagagctttgaggaattacaggaattgtttgaagaaatgttccaagtggacattgattcgttcgggtctaatggtcagccaaccacgtcctgttcttcttcatcttcgtttgcatcgtacggtgaaagttctggctccaacaaacggaattccgctgatatgagctctggtgagactatgccggagagtggttctagtttcaatgtacaatttcacggcttctgcgtgggagtggaacacangacagatatgaggcaacagagaggagc

SEQ ID NO: 21453 - DNA, 256 bp, Gossypium hirsutum
  Clone ID: LIB3146-042-Q1-K1-C5
gtaaaagcgaaaccctagccactctctgctcaactcgccaatgggggcttataagtacgtgtcggagctatggaggaagaagcagtcggatgtgatgaggtttttacagagggtgaggtgctgggaataccgccagcatccgtcaattgttagggtcaaccatcctactcgccctgacaaggcacgccgcttgggttataaggccaaacaaggttatgtggtttaccgtgtccgtgttaggaagggtggtcgcaag

SEQ ID NO: 21454 - DNA, 390 bp, Gossypium hirsutum
  Clone ID: LIB3146-042-Q1-K1-C6
cccacgcgtccggatgagcattaacgagatactgagggaactaaacatgaagtttgaagcagccagtggtgcaaccatggtgataacagactggaggcggttgggtctagtggaagacatagattttggatggaaaggatgtgtgaacatgataccattgccgtggaacatgtttgggtacgtggatttggtgtttttattgcctccttgcaaactggaccaatcaatgaaaggcggagctagggtgttggtttccctacctagggctgctattgccaaattcagggaagaaatggatgctctcaagcatggtgacgatgctgctggccattagttgaacttgtctaccgatgtatgcatatgttgttttaacattttaagtagataatg

SEQ ID NO: 21455 - DNA, 303 bp, Gossypium hirsutum
  Clone ID: LIB3146-042-Q1-K1-C7
cccacgcgtccgccgcaacgccgtcttccttggccgataaaaccgatagcaaatccagtggaatcaagcttggtccccacttcgtcggttccacggcggcgctactggttgctacagcggccgtgtttttccttgtattcccagctggatttgcttcaatagtttaggggttttgcatgggatttcgagatttggaggtttatttattgttgaagtccatttgtttttaaacggtctcagaaaaaagatggactgagttgacaattatgatgatattgtcgttattttacctttttcttattt

SEQ ID NO: 21456 - DNA, 244 bp, Gossypium hirsutum
  Clone ID: LIB3146-042-Q1-K1-C8
ctccgatatcagaattatctgtgataatcctattgacaattgaatcgtatgttttagcattgcaaaaatttaggcttttttgttttgttggtaaaagtaaatttggtttggttgattagtgtaatagcatgagacaaaacttatttagtaaactagcactaatagtttgtaataacatattgaaatggttcattgtttggtaggtaaaaatattgagtaaatagaactgaagtattaatttatg

SEQ ID NO: 21457 - DNA, 385 bp, Gossypium hirsutum
  Clone ID: LIB3146-042-Q1-K1-D1
atcccgtaacaggctcttgatatttgcacgtctcagtcagtaataagaagcttataattcatctatggcagccgacggtaacaagagaaagaggcccaacatattggtgacgggcacgcctggaactggcaagacgacgacctcttctgctttggcggaggccaccaatctgcgccacatcaatattggtgatttggtcaaagagaagaacttgcacgacggctgggacgatgatctccagtgccacattatcaatgaagacctcgtgtgtgatgagcttgaggatgtgatggaagaaggtggaaacattgtagattatcatggttgggatttctttcccgaaagaagggttgatctttgtgtagtacttcaaactgacaacacc

SEQ ID NO: 21458 - DNA, 354 bp, Gossypium hirsutum
  Clone ID: LIB3146-042-Q1-K1-D3
cccacgcgtccggcgggttccgaaaattccagcattactgatagggtgttggatagggttttttctaatgctgggactggttttgtatctgttgttgttggtagctttgctaggaatctggttttggggttttactcaagtgttggagaagtggagggtttgagtgggaataatgggtcatctgatgtacccaaatggattaatgtgctttatgatgataagtctaaagagctaattgcttgttggcattaaagattaataagcacaagttgtgcagtctatcttgacaagacaatggacattaatacttattatgaaatttttgctgggatgaccaatcccaagccataaaaa

SEQ ID NO: 21459 - DNA, 400 bp, Gossypium hirsutum
  Clone ID: LIB3146-042-Q1-K1-D4
cccacgcgtccgcttcaaaggatgatatcactcgtctacacagctctatctggggccccatcgtctagctatctgaatgtttctcgatggtacaaacacatcgatgcccttttgaggatctcaggtgtttctgaagaaggctgtggtgtgactgttgagggatttgctcccgctgaggctgtggccactcctccaactgcagattcaaaggctgcagctgctgaagatgacgacgatgatgatgtagacttgtttggtgaagagactgaggaggaaaagaaggcagctgaagaacgtgcagctgcagttaaggcctcttccaagaagaaagaatccggaaagtcctcggtattattggatattaagccatgggacgatgagacagacatgaaaaagcttg

SEQ ID NO: 21460 - DNA, 390 bp, Gossypium hirsutum
  Clone ID: LIB3146-042-Q1-K1-D5
gaaattaatagagccaattttgagagaacatgtgttgaaagcaaggcctctgctcatggaaggtctaattcgaattttgttggaaaacaggacagggcaactggggcagcattaacttctagaagatagcttgtgcatttacctcaattgtgagttgtcttgtttgttttgatgaactgatactagtttgttattatagcatatttgatttcatggatgtttataatatcatcgctcaaccaaaacaagttttcaagagatttatcgatctcattttggtccagcaggatacaccgaatctcgatgttgagtggtggatcatgcattaagctgatttcaataattttgggatatgaatttataggttgattggatcttttgatcttgggc

SEQ ID NO: 21461 - DNA, 397 bp, Gossypium hirsutum
  Clone ID: LIB3146-042-Q1-K1-D6
atttaagtctgtgaaggaaaaggagttcaacgaattgaaggatggtgaggtgaaaacattgaagtccgtggaggagctaaagtttgccaaagatgtggaggaaatgaaatcaaaactgaccgaccttgaatctaagctaggcgaggctgaagctactatatcaaaactgaccgaggagaggaggttaagcactcaagagcgaaagaccttagaagaagagctggcgttattgaggaaaaaggcaaatataaaaggagctaaagtgggataccctctgttatttgtttggatggtagcactcatctgtgtctacatcggatacttgttggcaccattgacaaagagcaaggcatccatgtcagatctttaccagcaaatgcaataatcaaatacgaga

SEQ ID NO: 21462 - DNA, 291 bp, Gossypium hirsutum
  Clone ID: LIB3146-042-Q1-K1-D7
cccacgcgtccggctctaactgcggtaaatgttgccctaaggataagtcaatcaagaggtttcttgtgaggaacatcgtggagcaagctgctgtcagggatgtccaggaagcctgcgtctatgacacgtacactctgcccaagctgtatgtgaagatgcaatactgtgtttcatgtgcgatccattcccacgttgtgagggtccgatcccgcactgacaggaggaaacgtgacccgcctcagcgcttcattagacgccaggatgatatgccaaagcccggtcaacctggtc

SEQ ID NO: 21463 - DNA, 393 bp, Gossypium hirsutum
  Clone ID: LIB3146-042-Q1-K1-D8
cggacgcgtgggttttgttgctacccaggatgctgatctccgaaagaaactacagaaggtacctaatgttcctttaatatttggcctacgaaatgcccttttccttgagcaaccatctaagtctcagcgtgattttgtcaaatcttctgaagaaaaacgccttcatttgactgagaaggaatataaggcattagagaagaggacgactagtgtttcagcaaatgcggatgaagaagattcaggtgatgaagaaggtttgggtcatcacaatccagggttgcaggcacatgataccaggaattattcagggaaggaaagagatgtaaaggatagagttcgatttaaaagaaagaaagctaagggtccaaatccgctttcagttaagaagaaaaa

SEQ ID NO: 21464 - DNA, 244 bp, Gossypium hirsutum
  Clone ID: LIB3146-042-Q1-K1-E1
gtttaacccttccaaagaccagaaatctgttaagtttcagttgcctgaggatgatttagatggaagtgatgatgattttgatgatgagttcgatgatgaatttgatgatgagttcgatgatgagtttgatgatgattttgatgatgaggaatttggtcatggacatggccatgggaaagggaatcatcaaatgcaaaacaagatggtagctatggggggaaaagggccaaatggcatgattaat

SEQ ID NO: 21465 - DNA, 396 bp, Gossypium hirsutum
  unsure (1)..(396): unsure at all n locations; Clone ID: LIB3146-042-Q1-K1-E2
ggaagagaagggtatggctagggacattcgagacagctgaggctgctgcaagggcatatgaccaagctgctattttgatgaacggccaaaatgcaaagaccaatttccccaaggctgctcaccctggtgaacaaaatgctcgtggtggtggtggtggcggtgatgatgatgatgatgatgatcggtctccattgccccctaaggccttggccgagcttttgaatgctaagctgaggaagtgttgcaaagaccaatctccttctttgacttgcctcaggctcgataccgataatgctcatataggtgtgtggcaaaagcgtgcanggaatcgatcgagttccaattgggtcatgagggttgagcttgngaatagaaaggtgataccccgcgtccgga

SEQ ID NO: 21466 - DNA, 462 bp, Gossypium hirsutum
  unsure (1)..(462): unsure at all n locations; Clone ID: LIB3146-042-Q1-K1-E3
cgnntccgcagaaaccacagtttcaaaccctgggaaatttccattttgggtcgattccaagcnnntctcatcaatggggtcgtgctcagttgagaaaattcggtaaccaccaatctcataccccgaaccccacnnaaaacctnntcctcatcaccannactacatcctcttgggggagctnggcttccgcctggtnnatcttcctcatnncctctcccttacgcttggttcccgtcccttgtnngtggattcttccttatcctttcctccacgtcgtcaccattaacccgccggcgtctcgggtttgctcccgtcgccactttccgggtccaaccaaggtctaccgcagcttacatgggtagtgatgggggtgacaatcgatattccagggcttgggttcggggcttatattgacccgaacttctgacttcttggggtacttgaagtcctacgtgagggaag

SEQ ID NO: 21467 - DNA, 391 bp, Gossypium hirsutum
  Clone ID: LIB3146-042-Q1-K1-E4
ctggaattggctgggaacgctgcacgtgacaacaagaaaaacaggatcatcccaaggcacgttctacttgccgtgaggaacgacgaagaattagggaagcttctcgccggcgtaacaatcgctcacggtggtgtgttgccgaacatcaacccagttcttttgccgaagaagactgaaaaggccgccggcaaagaacccaaatctccatcaaaggccaccaagtctcctaagaaagcttaatttgttttaaaaaagactagatccacagggctttatttttcttagttgtatgtccttttggggggattgttttcatagtgtaggggaagaatgctgtaagcaaattggaggaattggtagaatgttatcatgatgtatgttactttaatgg

SEQ ID NO: 21468 - DNA, 250 bp, Gossypium hirsutum
  unsure (1)..(250): unsure at all n locations; Clone ID: LIB3146-042-Q1-K1-E5
cccacgcgtccgcttgaattcccgcactgccatgccatatggatgtcctgaaactgagtataactaggtggtttcatttttagtagggacttgtttattaagtggtttgcattaatgtgaaatgtatatgttttgtaagtttacattgttacgtatctttatatgtagtttgagttgttgatgctaatgcatccaataacttgttttcatctctcctacacgangncaccatagccgccgacgtctcggg

SEQ ID NO: 21469 - DNA, 329 bp, Gossypium hirsutum
  Clone ID: LIB3146-042-Q1-K1-E6
atcagaataagcccgtgctttctgaaccttctcagatggaattatcacctcctgcttctttgaatcctgctatagtttctactagtgacctagataatttggactcgcaggaaccatccgagggaccatctaagcaaaccacaccgcgttgccctgtatctgagctagaatctcaagcaaactgtaaggaggcagatcaacctagcccagtctcagttatagaagctccttttacggatgatttatcatctggttctgaatgcttcgagagtattagtgctgatctccatgagcttcggatgcaacttcgacaattaaagctagaatct

SEQ ID NO: 21470 - DNA, 366 bp, Gossypium hirsutum
  Clone ID: LIB3146-042-Q1-K1-E7
ttgtacgcgtgggcggacgcgtgggcggacgcgtgggcggacgcgtgggcggacgcgtggggccgttcgatctcctgggttcacgcttggactgttcgtgatgggataatcacccaagtgagggagtattttaacacttctcttaccgttactcgccttagagactctccaccgtcagcttgcagttcttcgacggcggggattgcgccagtggattgcccttaaggttgggagaggtgtcttttcaaccgggtggggaaatcgggtccaggtcttggtcttgcaatttaattttcttctcccacgtgtggctaagataacaaatggtagttccatgagttgagtttgggctggtggtaaaaatta

SEQ ID NO: 21471 - DNA, 385 bp, Gossypium hirsutum
  Clone ID: LIB3146-042-Q1-K1-E8
ggaagagaagggtatggctagggacattcttgacagctgaggctgctgcaagggcatatgaccaagctgctattttgatgaacggccaaaatgcaaagaccaatttccccaaggctgctcaccctggtgaacaaaatgctcgtggtggtggtggtggcggtgatgatgatgatgatgatgatcggtctccattgccccctaaggccttggccgagcttttgaatgctaagctgaggaagtgttgcaaagaccaatctccttctttgacttgcctcaggctcgataccgataatgctcatataggtgtgtggcaaaagcgtgcagggaatcgatcgagttccaattgggtcatgagggttgagcttgggaataagaaggttgatac

SEQ ID NO: 21472 - DNA, 348 bp, Gossypium hirsutum
  unsure (1)..(348): unsure at all n locations; Clone ID: LIB3146-042-Q1-K1-F1
gaaaatcatttggtttttgaagagcccttaatagagcaaattggtgggctttattaaatctggtgggaacttattcttaaaggggcccaccagtacttccttcttaaaaatgtgggatttttatggatcacacgcttggtgtgtacccacccccaagaaaaagggcgcgaggggaagactccacagggtatctatcacaaaaaaaattttgtgagtgaaaaaaagcgcgtgacgagaatatttttctcacccgatatttgatgttctccaaaaaaaaaaaaaaaaaaaaaaaaaaaaaaaaaaaaaaaaaaaaaaaaaaaaaaaaaaaaanggggggggccgcctttt

SEQ ID NO: 21473 - DNA, 387 bp, Gossypium hirsutum
  Clone ID: LIB3146-042-Q1-K1-F2
cccacgcgtccgcttttttttttttcttttttttcttttttttctttttctttttcttttggtctttctttttttttttttttttctttttttctttttccaagggaaacatggaattttttttcataaaaaaccctcccctaaaaaaaaccctagataaaatcgtttgggtttatttatgaggccttaacagggcccaacatcccaatctttcacataaaacccaaaacccccattttcataggagagcttaaaacccccccccaaaacccaagacaggggtgcagaggggacccccctaaaaatttgaaaacacccaaagcccttccttttccaacctttttcccaaaaaaaaaaaccctttccggaccgggggaaacccctctt

SEQ ID NO: 21474 - DNA, 348 bp, Gossypium hirsutum
  Clone ID: LIB3146-042-Q1-K1-F3
gcatattttcatatcaaattgttctacaaatggctcgtaccaagcaaactgctaggaaatcaaccggcggcaaggcgccacgtaagcagctagccacgaaggccgctcgaaaatcagctccggcgactggaggagtgaagaagcctcatcgtttcaggccaggaactgtggctcttagggaaatcaggaagtaccagaaaagcactgagctcttgatcagaaagcttccattccagaggcttgtgagaaaaaatcgctcaagaatttaaaaactgcctggaggttcaaaaccacgcttgtggttctttttaagaagccggtgaagcttattttgtccgactatttgag

SEQ ID NO: 21475 - DNA, 400 bp, Gossypium hirsutum
  Clone ID: LIB3146-042-Q1-K1-F4
aaaaaaaagaaccttcctccctccctttttttctctctgcagaagccttaggccgatcagagctccagcgaaccgctgccgcgaccaccgccctcgaccgctgtgcacagttgttggagctcggaaagaagccccctttttagtcaatcggagaataggtaataaatccctctctttttttgtgtgtgtttttgatatatataggtatatatatagtagtttcgaaaaaagaaaataaaaataaaatgaagaggtaccttagcacgtctcaaactttggattctctttcgaaattctttttttttttggatctttctctggtttttatttcaaaaaatcccccttttacattgaataacgatggctttttatagtcgattatgttacatttgttgctact

SEQ ID NO: 21476 - DNA, 242 bp, Gossypium hirsutum
  Clone ID: LIB3146-042-Q1-K1-F5
cccacgcgtccgattggatcaccaagacaggttccaaaaagtcgaagtcatggtatgcggcggcgcggcctcgggagcttacgaagcggcagccagagggagattcctccctgcattgagctcctgtgggagaatggtgattacagggaacaatcacatatggaaaatggaaaacatgccaggacctcgtaccatgcatgacatgttgatccttactacaggtcatatactaatcatcaatg

SEQ ID NO: 21477 - DNA, 353 bp, Gossypium hirsutum
  Clone ID: LIB3146-042-Q1-K1-F7
cccacgcgtccgctcagctgaaggtcgtggttgaagctctggtggtcagggtggtgatgggggtgaaaccctttacttaaaagcagccgatgacgggaactgaaaggtaacaccagttggtcctacggatctgttttatcattgaaaaacggatggaatgggaggaaattttcttgctcaaggaacttgttccttatgccaaaaaaaaaaaaaaagaagctaggaaatatgctttagaccttaaaccatatgttttatggatttcaagtgtgagacactgcatcttatggtaatctaacatgtaaatttgtaggggctcatggttcaacattccttaattttggggtttaatt

SEQ ID NO: 21478 - DNA, 342 bp, Gossypium hirsutum
  Clone ID: LIB3146-042-Q1-K1-F8
gccgcagcaacagcaacaacaacaacgcctgctgctgctgtttgcatcaatttataatattttcgattccttaaaagaaaaccctttttttttattgctgcctttttagccgtgatgggttgtacaggatccaagcgaaccaggggtgacgaaaatgtgaagaaaatcaggaaaccaaaaccttggaaacattccgaaccgattacgaggacacaacttaagcagatgcgtgatgaattttgggatacagctcctcactacggtggccagagagagatgtgggatgctcttcgagttgcggcagaatctgagctaacccacgctcaagcaattatcaatagt

SEQ ID NO: 21479 - DNA, 393 bp, Gossypium hirsutum
  Clone ID: LIB3146-042-Q1-K1-G1
gcaaaatagaggatcaagattcgagtttggatccaatggaaaaagcagcagattcatctcagacgcagactactggaaatgatgtgatgatggaagaaacagggaaagaagacggcgccaggactcaatccgaggctatatctagtgaaaatgaaagggaaagtgcagagaaatctgaagcaggggtcattgttttggatgattaaattaaaatgtgatataatagatgatttattgagaggctataatattccttacccaaaacttgattttcttttaataggtaccttctacacaaattctttcgtgctttaagcaaggttaaaggctaatggtggataaagaataatttggctatattttggttaaaatttttaaatggtcatttaccat

SEQ ID NO: 21480 - DNA, 309 bp, Gossypium hirsutum
  Clone ID: LIB3146-042-Q1-K1-G2
tggagaagcagtgtggaagaagcagtgtggtacgtgggcggttaatgaatataacccgcctttggattgatttactttcaccgtgaggtaagttcagtgtcattatgtagtaaagttgttgaaatttgaaggggcaatgaaaagaatcaagtcggatgctgtaattattacaaacgcgtgcatgcatgacacgtggacgtattagatttcagcattgtggtttttgattttacgtgaagggattcgacagcaaatagctaagttggaatcttttcccgataaaaaccttctacacaaattctttcgtgc

SEQ ID NO: 21481 - DNA, 401 bp, Gossypium hirsutum
  Clone ID: LIB3146-042-Q1-K1-G3
caaaactctaggtataattctaagtattcaacatcttttttttaacacaatccatggaagttccagttatcaacagaataagcgattttgaaacggccggcacaacccctctaaactacccacctttcaattccccacatcatttgctttctgggattcagaaaatctatgaaacccatagcttttttaagttgggagctttgattcttgccctaatagcttcgctatctaccattatcaataacctaagaactttattattggatttccgggaccccattctttaccattccaacctttttttttttaatcaaatttcgacccttacacttatttcttgtcggacgacgaaccaaaatatgaagaactggcgtttactttcaagacctggcgacaaggtg

SEQ ID NO: 21482 - DNA, 360 bp, Gossypium hirsutum
  Clone ID: LIB3146-042-Q1-K1-G4
cccacgcgtccgcccacgcgtccggatgagtgtaagaaatcaagggaagatgggcttcagaccacaggagaagggttggagtggggagtgctctttgggtttggacctggcctcactgttgagactgttgtgctccatagtgttgctgcttaaagttaaacaaacatgctttttaagtaattggtcgtgctccacttggcttgcagttttatcttcttcttttttcctttctagattatttaaatcccatgaatttgtgtgtttattgttaaagactagaggtctttgatggtgtgggcgggaagcttaacgcctattcaattcatgtatcaacttatattaaatgtatggcaatcataa

SEQ ID NO: 21483 - DNA, 245 bp, Gossypium hirsutum
  Clone ID: LIB3146-042-Q1-K1-G5
cccacgcgtccggtttgatctctaaactactcgtggctgaccctgaaaggaggatcgcaattccagcaataatgcgtgttccttggtttcggaaaggacttagacgtccccttgcgttttcaattgaggaacccatatcagataatacagaagatgatgattctgtctccaagactaccaaaccatcgtctccgaaattcttcaacgcttttgagttcatttcctctatgtcgtcaagggtttga

SEQ ID NO: 21484 - DNA, 392 bp, Gossypium hirsutum
  Clone ID: LIB3146-042-Q1-K1-G6
gctccatattactgactgcttaaagctgagttgcctattttcaaacaccaagtttcccataacgcttaaatatttgagaattgggggatgtccaatgttggaatacatagccgaggagttcgaggaaagtgcttgtcttgaatctattaaaattacatattctggaattaaatctctaccacgaggactagacaagctcaaccatctccaggagattagtttgggttcgtgttcaaatttggtttcttttgaagaaagtgggttgcccagcaccagcttcagagatatcgaagttattgattgtggaaattttggagcccttcctaagtgcatggccggcataacctcccttcgacgattaagtgtgagcaactgttcggcagacatatcat

SEQ ID NO: 21485 - DNA, 394 bp, Gossypium hirsutum
  Clone ID: LIB3146-042-Q1-K1-G7
cccacgcgtccgcccacgcgtccgctttcattgctcttcttctccaccgccatgtctcacttcggaaggtcagggccgcccgacattagcgatacttactctcttctcatcctcaacatcacctttcgcaccagtgctgatgatttgtttccgctcttcgacaagtacggcaaggtggtcgacatcttcattcccaaagatcgaaggaccggtgattctcgaggttttgcatttgttcgctacaagtatgcggatgaggcacaaaaagctgtggataggctcgatgggagaagtggtgattgtcgggaaataacaagtcaatttgcaaaatatgggcctaatgccaagaggattcacaaagggaggataggtggatcaacaccaagaacggggc

SEQ ID NO: 21486 - DNA, 344 bp, Gossypium hirsutum
  Clone ID: LIB3146-042-Q1-K1-G8
taagagatgacagacagttccacttggattatcctggggcgtgtactatttctacagaacagggtcttgaactgaagaagcaaataggagcactggcatacatagagtgcagctcaaagacacagcagaatgttaaagctgtatttgatgctgctatcaaggttgttcttcagcctgcaaagaaaaagaagcaaaagaagagaacaggtatatgccttgttctctaaccagaaattcccaagtagaaaagccagtgtgaagctgacaatgtgattctcttcttataattctgtgcattcttgatcttgtttattacaaatctttttcgagttgattttgagtgc

SEQ ID NO: 21487 - DNA, 386 bp, Gossypium hirsutum
  Clone ID: LIB3146-042-Q1-K1-H1
cccacgcgtccgcccacgcgtccgcccaacctgtgaactttgggcaggtaatccagctagggttgttcgagctctaacccatgaagaaaccttagaaatccctaaactcgcggtagcaatcaatgacctgagcaaagaacatttctcggagttccttccatactcaacagtatatttggaagttgagaagctcaagaagtccctgggaataaatatttgattgccttttgattttcaatgtttaaaagaataagttttttgaagcaacgaaataagcaggctcattaacaagaccaaaaaccctttttatttttgcatatccatttactttattggggtttttggcggaaagagtaacaaccgtaaggttggtgggttcaattcta

SEQ ID NO: 21488 - DNA, 281 bp, Gossypium hirsutum
  Clone ID: LIB3146-042-Q1-K1-H2
taggactactgcggaacagacagcactatgaaatgggtcaagtggaaaattggctagaggttgaggcacacaatttcaacccaccaatttacgccttgaccctacatttgatgtttgcttccaagatggggttccctcctgatgaaaatttgatcaaggaaagcgaggaaaagctaggcaaagttctggatatttatgaggagaggctgtcaaagaacaagtacttggccggtgatttcttcagccttgctgatctgagccacctaccatttactcagtac

SEQ ID NO: 21489 - DNA, 395 bp, Gossypium hirsutum
  Clone ID: LIB3146-042-Q1-K1-H3
ttagtggtgggggaaaagagcagagaagaataaacaaagatgagcagcatcggaactggctacgatctctctgtcaccactttctctcccgacggacgcgttttccagatcgagtacgccgccaaagccgtcgataacagcggaactgtgattggaattaaatgcaaagatgggatcgttatgggagtggagaagctgatagcatcaaagatgatgttacctggttctaatcgtagaatccactcgggtcatcgtcatttccgcctgggcggtggttgattaaccacttgccggaaaacaaatggggcccgggccaaatctgaagctactaattaccaaagtgggtatgggggacccattcctggcaaaaaacttgctgaacgtggtgcaaggta

SEQ ID NO: 21490 - DNA, 173 bp, Gossypium hirsutum
  Clone ID: LIB3146-042-Q1-K1-H5
ctcctccttcctccagctcctttttccttcctcctcttcatcatcccctgcttccgtcgggtcgacccgttctggcagtggcgaccccgttttttttcaatcaatttgccttaattcaaggtaatttaagcgatctacgttaacccggggcgcaaatcaagttcggaatcaaa

SEQ ID NO: 21491 - DNA, 227 bp, Gossypium hirsutum
  Clone ID: LIB3146-042-Q1-K1-H6
tttgatcccaaatgaaaccaaaagcagcaagatggataacacagttgtggttgatggggctgatggtgtgggtggagagaaacttgaagttttgaaaagtatgttaaccagtttagttatcgaggttcgtaatactggtaaaggtgggggtctattgaatgatggggttggtgccgattatgtacagaaagagaaggttgttccacgtggattttgttcaatgatgt

SEQ ID NO: 21492 - DNA, 241 bp, Gossypium hirsutum
  unsure (1)..(241): unsure at all n locations; Clone ID: LIB3146-042-Q1-K1-H7
gtcaatgcgttccgtccggtacttacgggatcaaacacgagtgtccttgctacagagataaggtgaacaacaagggcaaacccaaatgcccttgaaaatgaaatatattcgagttcgggatttaatcaagcttaaagatcgaggacgaagaggccatatatatatatatatatgcatgttgatgatgatgttattataaaaataaacttgntttggtgctgatattttcctttgggctttt

SEQ ID NO: 21493 - DNA, 335 bp, Gossypium hirsutum
  unsure (1)..(335): unsure at all n locations; Clone ID: LIB3146-042-Q1-K1-H8
aagccctcaaggtcctcttgagcaggcaacgaatggaggtgaaatcctctccgaaggagatatggaagaacaatcattagctactgattctaccaacaaatgatacaccatagatttacacattttgattatgctatcccaatttttgtgtaaataaaccacatattgcttctcatagctcgcgggagaacatttagatgtttgaaaattttctgttacaacttacaagcactttagaggtaaagctaaaagaaaacgtacaatagagatgagttatacaggcaaggaagcactgattnntagcgattaccttacacaacactagaatcaatgag

SEQ ID NO: 21494 - DNA, 423 bp, Gossypium hirsutum
  Clone ID: LIB3146-043-Q1-K1-A1
cccacgcgtccgggactggcaaggtgctccagcaagcccaagttcatacactgtgaagaggattttgcgtcttgaaattcctgttgatacatatccaacagtaagccttatatgaaaaatgctagtgctttggattaaaaaatttattattttctaagatttcaattgaatgcacaaacctttttatgcttattgattacaagactctgcttttcctttgtttttagttcaattttgttggtcgacttctaggccctagaggcaattcattaaagcgggtagaagctactactggctgtcgtgtatacattagaggcaaaggatcaataaaggatccggacaaggaagagaagctgagaggtcggcctggagatgagcacctgaatgatcctctccacattttgattgaggctgatttacctg

SEQ ID NO: 21495 - DNA, 359 bp, Gossypium hirsutum
  Clone ID: LIB3146-043-Q1-K1-A11
ctcttaacaaggttaatgatgaaaaatgcatccggcagaaggatcttttgagtgcttgcatggatgctcagtctaccaagaataggaagccatggggcagcattaattaccacttgcagaggcttaataggggaaggaagtaatgtgggttttctttaaagatgaatgttgaatttatgcatcattcttctagttcatcacttctagtaagatgatgtgcattaggttgtagctacagagaacattcatttgtatttttttttcttgcggttggttgaaattttggagaaagatgctcaatgtagcttaaaccaattcctgtcacttcaaagagtagcaataaattggattatatacca

SEQ ID NO: 21496 - DNA, 282 bp, Gossypium hirsutum
  Clone ID: LIB3146-043-Q1-K1-A12
ggcgtcgatggccgggaccgccatggagaaagggaaagggaaagggaaagtcgaagtttttgattccgaggagaatctttcggtttcgctcgctaaatacaccgccgatctagccgctaagttctccaaagagaaagacagtttcaccgtggttttgtctggcggctccctcatcaagtctctcaggaaactagtggaacccccatatgttgatgcgattgattggtcaacatggcatgttttctgggtggatgaaagggttgttcctaaggatcatgatga

SEQ ID NO: 21497 - DNA, 264 bp, Gossypium hirsutum
  unsure (1)..(264): unsure at all n locations; Clone ID: LIB3146-043-Q1-K1-A2
cgagctcaacgttatgtttttgtaatagatattttacgcaaatgaattcaatcttctgagctattcgctnttaaaaaaaacagaaaaaacaaaaacaacaaaaaaccaaaaataaaaaaaacaaaaaactttttattaaaaaaaaaaaaaaaaaacaaaaaaaacaaaaagaaaacacaaaccggggcggccgctttaaagaaccaaactttacttccccttgcatgcaaagttatagcttttttataggctccccaaaaccca

SEQ ID NO: 21498 - DNA, 393 bp, Gossypium hirsutum
  Clone ID: LIB3146-043-Q1-K1-A3
gttcttttacaggatggcgacatggcaagtgcgggagggttattcattttggatgagatgaggaagaaatcaagggaagatggacttcagacaacaggagaaggactggagtggggagtgctctttgggttcggacctggcctcactgttgagactgttgtgctccatagtgttgctgcttaaagttaaacaaacatgccttttaagtaattgggcgtgctccacttggcttgcaggtttatcttcttcttttttccttttttagattatttaaatcctatgaatttgtgtgtttattgttaaagactagaacactttgatggtgtgggcgggaagcttaacgcctattcaattcatgtaccaacttatattaaatttatggcaataataagt

SEQ ID NO: 21499 - DNA, 397 bp, Gossypium hirsutum
  Clone ID: LIB3146-043-Q1-K1-A4
tgggaatatttacctggagcgttaccgcaatgagctccgcttgtatcgccggttcttatgcggattccggattccattgaccattcttggaccgacgtatgcggtggcggttgtggattcgccatggccatttctggttgtttttcctgtctctctctttctcgttggctttcctccccttctttccctgattttaaattttatttcttataaaaatattttaaattttcgataatgtaattgcggcttttgggctggttgttagattttgtacattttgatctgtctggttgccaagaaaatgtaaaaggactgggcgttataattagattttttcgttggtttcatttttggtttgccatgaagtcaactcacttgactcaattagctatgtgag

SEQ ID NO: 21500 - DNA, 416 bp, Gossypium hirsutum
  Clone ID: LIB3146-043-Q1-K1-A5
aacagaatagcaggagataaaaaaaaactttgtatggtataagcgagtgccgtgtggaaaaagagggaatttggaatcgcaaatcggtagcgaaagagaagaaaaataggacaaaagcttcgaagaagaaacaatgggacggtggtggagtaagtgtgtggtggcgttcatggcgttgaccctcttctctatctccgccacagcgaggccctgcaagaccttcctcatttcctcgtattccatctctttccataaccctaatgacccttcctccgctgtctcctcccgatttgtcaccgtcttcactgagatcggtcaattgaaccccttatccatgcccgccgataccaagccctcctacgtcttcagctccctccgtgatcgtagtagggacattctcagcgttgtcgtcgctc

SEQ ID NO: 21501 - DNA, 406 bp, Gossypium hirsutum
  Clone ID: LIB3146-043-Q1-K1-A6
cccacgcgtccgaaatccatcatcacttcgaggaaaggccaactctctcagtaaacattacattctaaatattctacttgacacaacagctggataaggctatctaatcacctgactagactaaactaatggtgacaaataaatagggtaaataaaccccaaggaacatgaacatgctggtactggtgagaagctaaataagcttacacgtaaaacaaggtggaatgggattcatcaaatttactttgattgcctgtggtgtcagtattggaaccttaaggttgggaaatttagattagcttccaggcaaagatacatttatgtcggtcggtttattccttgaatcagaaggcaacggagaccaaatctcgctgcaaattgatgaaatgatgtttgattttggatc

SEQ ID NO: 21502 - DNA, 419 bp, Gossypium hirsutum
  Clone ID: LIB3146-043-Q1-K1-A7
ccaacctccgctctgttcagcccgtgatcttttgatctttctccatggctaccatttccaagctcgctaaccccaacccagtcgcttctctttcattatctttcaaacccagatcttcttcatcgcttaaatgcttcgttgggttccctaccaggcctgctttcagctctaagctggtttcatcttctagcttgtcctcgataaacacccaccctttcaggggctccttggttgtcaggtgttctcttgctgatggaaacggtagttcagtgaagacgactactttgcatgatctgtatgaaaagaagggcagagtccatggtatgacaacctttgcaggccagtgaccgatttgctgccactgattgcaagtggggttagaggtgtaactagcaacccagcgattttccagaaagctt

SEQ ID NO: 21503 - DNA, 417 bp, Gossypium hirsutum
  Clone ID: LIB3146-043-Q1-K1-A8
cactaatgccaggacagtcgggatgtgagagtggagagtgttgccgtcagggttgtggtgggacttgtgctgagtgtggtcagcccaggtgcgcatcaggatgttgccaggctgaaactgttaagagcaaagggatagaagaggttatggacagtgaacccagtccaccaaagtagagagatgataccatattaagatgaaataacgaggaagagttggttgtcgtcttattaatacaaaataagaagtaatgatgttgcagaagggtttgctataaaatcctcttggacaaaaagagtaattatgaagaataaatagctcaaaacaatattcgatttgcaatatcctaaagttccttgaatcttgttttgtagccatatgtaattaatgcatgtgcatgctaatatatatgatttt

SEQ ID NO: 21504 - DNA, 390 bp, Gossypium hirsutum
  Clone ID: LIB3146-043-Q1-K1-A9
gcatgggagaaagagagaggggttgaatttttgtatgatggtattcgtctgctttctatgcttgaagagtacactatcttacgacaagagaaagagcaagagcgtcgtaggttgcgggaccagaagaaacttcagggacagctgatagcagagcaagaagcactgtatgggtcaaaaccaagcccatcgaagccgcagagcgtaaaaaagggtcctaggtattcaactggaggtgcaagcaatagaagagtctccttgggaggagccatggttccagctcataaacctgattctcttcactctgcaaaggctactcccaaaacacgtcctagcaagaaaagtgaccatttaaatcatcgccaggacgatggcattcccgctttctcagct

SEQ ID NO: 21505 - DNA, 328 bp, Gossypium hirsutum
  Clone ID: LIB3146-043-Q1-K1-B1
aatgacttcaagaggcaatgatggtagtaactatattgctctgagagcatctgatgtaatggctgtgctctcttagttgtgtaataaggtttggttttagattttgaggttaaaactggattgattggatgagttgccggtaagcacaaagattttgtaatttcttttccttaaatttaaatggatgcagcatttggtaaaaaaaaaaaaaaaaaaaaaaaaaaaaaaaaaaaaaaaaaaaaaaaaaaaaaaaaaaaaaaaaaaaaaaaaaaaaaaaaaaaaaaaaaaaaaaaaaaaaaaaaaaaaaaaaaaaaaaataaaaaattta

SEQ ID NO: 21506 - DNA, 384 bp, Gossypium hirsutum
  Clone ID: LIB3146-043-Q1-K1-B10
cccacgcgtccggttagtgtgcagcctcagttatctatcgaaaccaacacagctacgaaaagttcagatgtgaataagtcagagagaaatgtgcagtcatctcctctttcagtcaaggatcaggaagagaaggcaaaaagatgtgaatttgttaaagggctgctgttatccacaattcttgatgatgttttatgataaccttaaaggatggttgctgcaatcgcgggctgttcacaagtcgctgaagcctatggcatgggtcttcgcctaccgtatgggttgctgcgcttgttgtagtgaatatgtttgatgtattaagcaaaagtgttaaataaggtaggaaatgagtgtaatatatatgtggcatgtgtggactttttagtt

SEQ ID NO: 21507 - DNA, 404 bp, Gossypium hirsutum
  Clone ID: LIB3146-043-Q1-K1-B11
cccacgcgtccgtaggaaggcacctgaacgctcatcctcgacctgagaggttactgctgtctttctttttgtacacagctcgtgtaatttcagcacatatgaagattttggacctgatatatatcgggtatagttggttgcacatatgagttaaccttttcttcctttgcactccctttgccggccaacgaccagctgccggtggttggctgtacctctccttgtcctatattctcttttccatgctcccttcctctttgaataataatccccactatgatttgtggtttcggcggttcttttggatagattcaatgctaatagcatcggaactaacgatttggaacgttttgggctattctctcttctgagctgggttttgctgagggctgggtgtggtgctt

SEQ ID NO: 21508 - DNA, 381 bp, Gossypium hirsutum
  unsure (1)..(381): unsure at all n locations; Clone ID: LIB3146-043-Q1-K1-B12
gtgaaccccagaagatttgaagaagctaagaggtttgggattacagaatttgtgaatccaaaagactacgataagccagttcaagaggtgattgtggagatgaccggcggaggagtggatcgcagtgtggagtgtacagggagcgtccaagccatgatttccgcttttgaatgcgtccatgatggttggggtgtttgtgtgctggtgggtgtgccaaagaaagacgatgcattcaaaactcatccaatgaatctactaagtgagaggacccttaagggtgctttttatggcaactataaaccacgcactgatattcccatggttgtcgacaaatatttgaacaaggagctgnngcttgatatggacaagttcatcacacac

SEQ ID NO: 21509 - DNA, 371 bp, Gossypium hirsutum
  Clone ID: LIB3146-043-Q1-K1-B3
cccacgcgtccgggcaactcggacgaaaacacttctgggggaccggcatggggaccaacgatggcacctgttcgaccatcagcagctccatacgacgatcccaagtaccatccagatcaatgttattttaaggtgaagcatacatgagccgttctaaggactcattgcaggaggcacgggtcatgcgcaggcgcgatccaagagttaaaatgtcgtggaaaaatggacagtaccgctacttttcggatgcgagctcatccgtcggtgctagcgccaacacagccaccgagtctactgtcggaggatcaaggcctggatgtactcagttgcgtgaggagagagatgtgggtcatggtctgacttaaggttac

SEQ ID NO: 21510 - DNA, 350 bp, Gossypium hirsutum
  Clone ID: LIB3146-043-Q1-K1-B4
ctccggcggcggttgtcacggtagtgttgaaggtttacatgcattgtgaagcttgtgcaatggaaatcaggaaacgtattcaaagaatgaaaggggtggaatcagctgaaccggatctaaagagctcagaggtgacagtgaaaggagtgtttgaaccgccaaaactggtggagtacgtctacagaagaaccgggaagacggcggtgatagtgaaactagaggcggagacaccgaagacggaagaagaaaaagccaaagatgccaacaaggacgagaaaaaaagtgaagaaagtggcgaaaaagacaagaaagaagccggtggagaagaaaaagacgacggtgaagacaag

SEQ ID NO: 21511 - DNA, 415 bp, Gossypium hirsutum
  Clone ID: LIB3146-043-Q1-K1-B5
tctggtactaaacataaccaacacaaaaaataagaatctttagaggagggaaggatcgatgtaagcaagtaagatggattacgcctacggttggttattggattgttaattgtgatggtgccttcaatttattgtcgaaagaagttggaattggggagatcattagagattctatggctgctttagttgctaagaagggaagaagtttcttggctagctctacccttgaagttgaggctcttgctatgcatgaaggtttgttacttgctgacaacaagagacgccaacagagctgtagattaggttgcatctcaattcaggaagaggatgtgcctttccaactgggtggattcatcccatcttctctggttcctattctgagttgagatgaattaccaacaccccattgagtgtg

SEQ ID NO: 21512 - DNA, 391 bp, Gossypium hirsutum
  Clone ID: LIB3146-043-Q1-K1-B6
atgctattgaggccatcaagctgggttcaactgcaattgggttgaagacaaaagaaggtgtcgttctggctgttgagaagcgtattacttcaccactgttggaacccagcagcgttgagaagattatggaaattgatgagcatataggatgtgctatgagtgggttgattgctgatgcccgtacacttgttgaacatgcacgagttgagactcagaaccacagattctcatatggtgagccaatgacagtagaatccacaacacaagctctttgtgatctggcccttcgatttggtgaaggagatgaagaatcgatgtcccgaccgcttggtgtatcacttctcattgctggtcatgatgagaacgggcctagcttatctatactgatcca

SEQ ID NO: 21513 - DNA, 415 bp, Gossypium hirsutum
  Clone ID: LIB3146-043-Q1-K1-B7
cggaagtatcgagagtctctcacggagggcttctacatttcaagatggaatgaaccaggacgagcggaggctgatttcggacgattcgatgctaaaaccgttgtgaggaacatctacatactgttctcgagaagtgaaataccaatcgcagatgaaaaacaggaggtcatggatatggtggatgcttctgttcctcttccaccttggttcaccgaggaagatctcgcaacatacggagctttatatgagaaatccggattcaagactgcattacaagttccatataggtcattcgatgaagactttgggataacagatccaatagttaaagttccggcattactgataatgggttgcaaagattatgtcttgaaatttcctgggatggaagaatacataaagtttgggaaggcaa

SEQ ID NO: 21514 - DNA, 394 bp, Gossypium hirsutum
  Clone ID: LIB3146-043-Q1-K1-B8
cccacgcgtccgcgcggttttcatttcccctccgcaagtagccagccgtttcacacactcaagaagagagagagctcgtaaatcatggcggaacagaccgaaaaagcttttttgaagcaacccaaagtgtttttgagctcgaagaaaggtgggaaagggaagagaccaggaaagggtgggaatcgcttctggaaaagcattggattgggcttcaagactccccgtgaagctattgaaggaacctacatcgataagaaatgcccgttcactggcatggtttcaatccggggtcgtatcttagccggtacttgccatagtgccaagatggtcaggacaatcattgttcgacggaactaccttcattatatcaagaaataccaaaggtacgagaagc

SEQ ID NO: 21515 - DNA, 400 bp, Gossypium hirsutum
  Clone ID: LIB3146-043-Q1-K1-B9
gttttacttttagcttttatcttgaaggctgtgacacgaaacttgttgattccactttgcaaagaagcgaaaatgccaggagctagaagcataggggtggctatggatttctccgctagcagcaagaacgctcttaaatgggctatagacaacttggctgacaaaggggatgccctttacatcatccacatcaacaacaactctcttgatgagtctcgcaatgctctctgggcaaaatccggttctcctcttatacctttgacagagtttagagttccggagattatgaagaagtatgatgttgaaactgatattgaagttcttgacatgctcgacactgcttctagacaaaaagagataaacgttgtttcaaaaatctactggggaggagatgccagag

SEQ ID NO: 21516 - DNA, 422 bp, Gossypium hirsutum
  unsure (1)..(422): unsure at all n locations; Clone ID: LIB3146-043-Q1-K1-C1
gagaaatctgggagtgatgttgtgaagttggggcgaaaggacttccctcgatcggaagggatgactgttacagatgcacggcataaggaggaagaagaggaagaaagtaagaatggggatgaagataataagcctgaggtaaccgaagatgaaggaaatggggaagtcggtgggatgcatgagcatgataatgagatacccgaggagggaactgagcgtgaagaacataggaatgacgataacgaagagactatggaaaatgaaaacaaaggaaatgaggagactcgtgaaggcgataatgaagagaaagagaacatcaaggatagtcgagaaaaggaaaataaagagattggggaagagagcaatgagatggagaagagtgaaggtgagatagagaatgcangtagctcggatgatcgggt

SEQ ID NO: 21517 - DNA, 133 bp, Gossypium hirsutum
  unsure (1)..(133): unsure at all n locations; Clone ID: LIB3146-043-Q1-K1-C10
gccatgccaaagaaaacttatgctgtcaatttttcatttactgacccacnagtcgatcagcggatcggagaaaatacacacctccccgatttcgtcaacataaaccgactaaatacttctacaaccagatatt

SEQ ID NO: 21518 - DNA, 402 bp, Gossypium hirsutum
  Clone ID: LIB3146-043-Q1-K1-C11
cccacgcgtccgaattgcgatgcggcggcgcctttctctcacaattgtcagatagcaataataaaaatgggtggttggtaattgggggtgtgggctgggggagagagccattccttggtcgtctccgttgcagcagcaataataataacagcaactgcgatgcgaaaaagggtgtccctgattcaaactacgtagtgcccctggagaaatctttttcgccttccaactcctcctgcatcactcgccctcttattgaaatcctgcgcgacctcaataagcgtatcccgcataacatcatcaagtctccgcctaattcttccactttcctcccctggtaccatgccaatcgcatgttgagcttctacgcccctgggtggtgtggagaagtacgtgatgttatat

SEQ ID NO: 21519 - DNA, 319 bp, Gossypium hirsutum
  Clone ID: LIB3146-043-Q1-K1-C12
attcagaccgctgttaggctcgttcttccttttgagcttgcgaaacacgccgtctctgaaggtaccaaggcggtgactaagtttactagctcttgaatttaatgaaatttggggattttaggtttagcgttttttatggaggttcctttttgaaattgcgttgatgtatgtaactccttgttactgatggttttgaaattgttggaaccatgaaatgaaagtgtatccttttgtctatgttaaggaatcgaaatgtttctttgtttaaaaaaaaaagcgtattccgcataactaaataaagactccgcctaattcttcc

SEQ ID NO: 21520 - DNA, 202 bp, Gossypium hirsutum
  unsure (1)..(202): unsure at all n locations; Clone ID: LIB3146-043-Q1-K1-C2
gacccacgcgtccggtttttcttactagtcaaacactgaaattcgttgaaaataaatggctgcgtgagtgcctaaacgaattgatcacanaaaaaaaaaaaaaaaaaaaaaaaaaaaaaaaaaaaaaaaaaaaaaataaaaaaataaaaaatttaaagaaaaaaaaaaaaaactaaaaaaaaaatagcgtgcgacatattaa

SEQ ID NO: 21521 - DNA, 421 bp, Gossypium hirsutum
  unsure (1)..(421): unsure at all n locations; Clone ID: LIB3146-043-Q1-K1-C3
cggacgcgtgggcgattataagagaaatagcggtaagcttcctcaactggtcccagatcaagttctcaagttaaagcaacttactgtccttacacttgccgagacaaaaaagggtctagttagaggaaagctggatcagctgcgaagatattttgaggttcaatttgctgctgggagggatttgaggccaggacaacttggaagtatgatacaaacactatcaaactggttggctacgtcagataacttacttgtcacaattcaagacaagataaaatgggctgatacaatgagtgagttggacaagaaacaccgaaaggagcttgaagatagggtgatggaagtaaggaaagctgtctccgtcaagtatgactcggccattctagggtccattgagaaactcanaccacccagaggggag

SEQ ID NO: 21522 - DNA, 194 bp, Gossypium hirsutum
  Clone ID: LIB3146-043-Q1-K1-C4
gccttgcagcctctccgccagtatgatacaacccctacaatgtctttaggccagggaaaaagctacagacttacacaagaaggatgcaaggagggaaaacaatgtgcagtcgtttgaaaagtttgccaggtcaggcgcaacctatatcaagccagaccttacttgagctttgattagagagaggagaagaagag

SEQ ID NO: 21523 - DNA, 415 bp, Gossypium hirsutum
  Clone ID: LIB3146-043-Q1-K1-C5
gaagaagaaaaagggaaagataattaatatatcatcagttgttggtctggttggcaacatcgggcaagctaactacagtgctgctaaagcaggtgttattggtttgacaaagactgttgcaagggaatatgccagcagaaacattaatgtcaatgctgttgccccaggatttattgcatctgatatgacagccaagcttggggaagacctcgagaagagaatcttggaaacaattcccttaggaaggtatggtcaaccagaagaagttgcaggactggtcgaatttttggccataaaccctgcgtctaattacatcactggacaggtgttcaccattgatggaggaatggtcatgtaaaattgcattaccgtcactcgataagctgctatatcgccactagaaattcgttagttt

SEQ ID NO: 21524 - DNA, 378 bp, Gossypium hirsutum
  unsure (1)..(378): unsure at all n locations; Clone ID: LIB3146-043-Q1-K1-C6
gaaaatgaaagacacccatctttttacaaacttcatcaatgtaccaccctcaagattaaagagcctggaggagaacatggacatatatatagcagcttattacatagaaccagagataaaagcatggacatgacagacggttgatatctacagataactgagacatacataacagaaaaaaaaacaccaaagggaagaagaggggcaatctcacaaacaaatccctccattctctccctatttnttttttcttttattatcactggatcgatgatatccaaacgaaggtctaagataggatgataaactgaaaaccctgagtggaacaagacacactctctgacagttattcagaagcttcgacaaaaaaaggagctc

SEQ ID NO: 21525 - DNA, 400 bp, Gossypium hirsutum
  Clone ID: LIB3146-043-Q1-K1-C7
cttcaaacttggcagagaccttcccctgattatcgaagacaacattgaggaattctggaggaaactcatgtcaaaggctagtttgacagatttcaatgaaatgttttgggcagttcatcctggaggaccggcgatacttaaccgcttggagagcactcttaaactgaacaaggggaaactagaatgtagcaagaaagctttgaaggacttcggaaatgtgagcagcaataccattttctatgtgatggaatacatgagggaagagttgaagagaggaggaggagaagaatgggggcttgccttatcatttggtcctggaattacttttgaaggcatttttcttcgcagcctgtaactacatgacattcatattgggaagttggtactttgtttctaatct

SEQ ID NO: 21526 - DNA, 408 bp, Gossypium hirsutum
  Clone ID: LIB3146-043-Q1-K1-C8
ttcttgtgaagctgaagcattcacctccacctcacatgattcctcctccacccgctccagcaaaggacactaaagatggaaaggatgctaaagatggaaaagactcgaaaaacgttgacaaggctgcatcgaacggaactgcagagaaaggggcaaccgtttcatctgcaaaagatggcgccgccacctccgctgaacaagatgccgccgccacgaccgctcccgccaaggaccaaactgttgcggaaccagaggcaacagcagcctaattgcttacaacacatttaccatggttgtttccttgccctattcttttttgtttttgctcaaggtttcgatttcaaattgcattccctattaacatggtattttcctgggaagggattagtaccattagttacatacaca

SEQ ID NO: 21527 - DNA, 403 bp, Gossypium hirsutum
  Clone ID: LIB3146-043-Q1-K1-C9
gagctgagaaagagagctgatgctgacaagtatgacttgtctgtgaaggaccttggtctggtcctctgtgagactgctctcctcacctctggcttcagccttgatgatccaaacaccttcggcaacagaattcacaggatgttgaaacttgggttgagcatcgacgaggatgctggtgatgcagatgctgatgctgacatgcccccattggaggatgcagatggcgagggcagcaagatggaggaagttgactaaaatcttaaccattattttgatgccaacatttactagtatgatctctattttgaacgttcccttagcttttatggttttgcaacctacagaggttttggttattttgtcaaactcttaaaatgtagtttggttttggaatatattatat

SEQ ID NO: 21528 - DNA, 396 bp, Gossypium hirsutum
  Clone ID: LIB3146-043-Q1-K1-D1
cggacgcgtgggcgaagatgctcctttatctgaagcgtttacatccaaaggtttgaagtatgtttctattttgatcagtattggagctgttgctgggcttacaacaacccttctagctggtctatatgtccagtctcgcttatatcttgggcttggaagggacggtttactgccttcaatatttgctaaagtgcatccgatacgccacacacctattcattctcaaatctgggtcggtatcgttgctgctgttttgggagggctgtttaacgtgcatatcctatcacacattctttcagttggctcactgaccggctattctgttgttgcagcctgtgttgtaacgcttcgctggaaaaataacaccggcaatcgagtttcttcaaagtgcatctc

SEQ ID NO: 21529 - DNA, 397 bp, Gossypium hirsutum
  unsure (1)..(397): unsure at all n locations; Clone ID: LIB3146-043-Q1-K1-D10
cttacacagcgggcaatatgtgtccacacacatggttctcctcgccagattaccaaaatgcggcaccagattattaacaagtctccaaatgtgtattttgattttatcgggaatacttaatgaccataaatcattgtaaaaatctgtgtaaatctcatcaatagcaggcatgtaaatagtacgctgtagatgatctacaatcagtacccgatacccactcttgactgtatactccccagagccttcatgtttccagaccaacctatcctctggccgactttcagatatgggaatagcaagaattcggtccactgtactctcatcaacaatctntagaagcagcgctctatcccaggatcttgtttctccttgaccaaattgcccaaatgctacaaaa

SEQ ID NO: 21530 - DNA, 394 bp, Gossypium hirsutum
  Clone ID: LIB3146-043-Q1-K1-D11
gattgatatgccagggcttggaaaagaggaagtcaaagtgtctgtggaacagaacactctggtgatcaaaggcgaggccaaagaatccaaagaggaggaaaatggcgggaggtacaccagcaggatccatttgcctgaaaaagtttacaagactgaccagattaaggctgagatgaaaaacggtgtgctcaaagtggttgttccaaagatgaaggaggaggagaggaatgatgtgattcaggttcaaattgactgagttaactggttgcgtccggatgaggctaagtgggttttcgttggtttggggctgtgggtcttgtacgtatttagttttgataataagggcttggaatataatacgagtaatgttaatgtagaactttcattttgtgtt

SEQ ID NO: 21531 - DNA, 291 bp, Gossypium hirsutum
  Clone ID: LIB3146-043-Q1-K1-D12
ggaaataagacacccgataatttattgattattcatcactaatctatttccatacattacaataacttattgcaacccaaagcttaccacaccgaacaagatgccatcacaataagctaagagacttgtacgtagtagtttaagcacataaaagaaaaatggtaaaaagagtacgagctcaacagtgggattatagatttctactctagttcttgtgacatgtgggttcgaaagcgaagggcccaacgctgtagagaacatatgggagcttctttgaagtagatggtttct

SEQ ID NO: 21532 - DNA, 353 bp, Gossypium hirsutum
  Clone ID: LIB3146-043-Q1-K1-D2
gagagaatgaagaagctgtaacggaaccatcatcttctccttcagtctggtaactttctttcctttccatctctgcgtttccctttttttttcctttgattgcagaggaaacctaggtaagctgtaaagggatttctattcccttccctcctcacctttaccctcacaaattctcacctcaaaacggcagccaatccaaaagctatttctgcaaagcaaagtcaaggcttcgattattcactttcatcatacgctacgcgcccttcaagttttcttaatcttcgcatctttcgccagctccactgtctcagatctccggcccaactgtttcgctcactctctcattttgcaat

SEQ ID NO: 21533 - DNA, 415 bp, Gossypium hirsutum
  Clone ID: LIB3146-043-Q1-K1-D3
cccacgcgtccgcaaatagtgagcacaagactgagctgaaagagaaattcaagcgcatgtgcgaaaaatcaatgatcaaaaagcgttacatgtatctaacagaagagattttgaaagagaaccccaatgtatgtgaatacatggcaccatcactagatgcaagacaagatatggtggtagttgaggcaccaaggctattaaggaatggggtcagcccaaatccaagatcacccacctcgtgttttgcaccaccagtggtgtcgacatgcccggtgccgattaccagctcactaagcttttgggccttcgcccgtcggttaagcgcctcatgatgtatcaacaaggttgtttcgctggtggtactgtgctccgtgtggccaaggacttggccgagaacaacaagggcgctcgcgtg

SEQ ID NO: 21534 - DNA, 423 bp, Gossypium hirsutum
  unsure (1)..(423): unsure at all n locations; Clone ID: LIB3146-043-Q1-K1-D4
atggaagacgtaatgaagcttttcgagatcgaatcttacaaagcatggcagctttggagctagagaaagaaaaacaagtgaaaggagctgaaataaccatgcaacaagcagaggattattttgactcagtcatggaaaccgccatggatgagttcaggtgattcgaggaagaaatggaacgcgaggcaaaagctgaactcagtggtgttgatgatactgctgagaaagttaaaaaaatggggggtttgatagaaagttaaatttctatttttaataatcttttatatttactcttttcttttcaattaactttccctgctagacaatcacagcttagcgaaagccgaaaaaacagggatggcggcggctacgacgagcagaacggcttcgcggatgggagctgangatgagaagctagtgttc

SEQ ID NO: 21535 - DNA, 373 bp, Gossypium hirsutum
  Clone ID: LIB3146-043-Q1-K1-D5
caatttagttgatgcttccaagtattgctgttgcaatgcggcttatggatgttgctggtcgaaggtagattgattttcttttccgtgtatttggagtatcatatatccgagttcatgctgaagctctatcaacgtttgttctttgcttcctgtgcatgcaagagtttgctactcactactgtcccactcctgataatatctctccgtgtattagtcatcggaaccatcgccaaaatgcgtaacgtcacgtatgccgcattatcaaccattagagtcgtgctctgcttatttttctttgttatgagggtttggtcctatcccaaacatactctgcaccgagatcttcccaacgcgtgttcgtggcattcgcatt

SEQ ID NO: 21536 - DNA, 374 bp, Gossypium hirsutum
  unsure (1)..(374): unsure at all n locations; Clone ID: LIB3146-043-Q1-K1-D6
attaaatgagacccttgaaatgcttgagaagaaggagaaagtacttgcgaaaaagagctgctgctgaggttgaaaaggccaaggaatttgccaaagggagaaacaagagagcggctatacagtgcttgaagaggaagagactatatgaacagcaaatagagcagcttggaaacttccagcttcgtattcatgatcaaatgataatgttagaaggtgctaaagccacaactgaaactgtagatgcattgagaactggagcagctgcaatgaaagcaatgcagaaagcaacgaatatagatgatgttgacaaaacaatggacgagatcaatgaacaaactgaaaacatgaaacagattcangaagcactgtcaact

SEQ ID NO: 21537 - DNA, 420 bp, Gossypium hirsutum
  Clone ID: LIB3146-043-Q1-K1-D7
ctctctctctctctctctcatcttttacatggcatctcaagccagcctcctccttcaaaaacagctcaaagatctttgtaagaatccggttgatgggttctcggctggattggtcgatgagaacaatatctttgaatggagtgtaacaattattggacctcctgatactctttatgaagggggatttttcaatgctatcatgagttttccaccaaattatccaaacagccctccaacagtcaaatttacatcagagatttggcatcctaatgtttatcctgatgggcgtgtttgcatatcaattcttcatcctccgggcgatgatccaaatggctatgagcttgcaagtgagcgctggatgccagtccatacagttgaaagtattgttttgagtatcatatcaatgctttccagccctaa

SEQ ID NO: 21538 - DNA, 238 bp, Gossypium hirsutum
  unsure (1)..(238): unsure at all n locations; Clone ID: LIB3146-043-Q1-K1-D8
aaaattgaaagaccgagactagagatatctttctgttcaagcatgttttggggcagaaggagctgtagtagagagcatcaatgttattcanaaataaatgcttgatttggtttttcttccattgtttgatctttatgttctacaaaaaaaaaaaaaggtattgtgttccatttatatcacaatgggggtttttgggttgttttatgtaattattacaagttgaaatttatttactgct

SEQ ID NO: 21539 - DNA, 362 bp, Gossypium hirsutum
  Clone ID: LIB3146-043-Q1-K1-E1
gtggcccacaagtgcttaatcatgttgctccaccaaagtcatcaagcttctttgcggaatttggaatggacagtggttttcagaagaaatcaagctcaaattcctcaaaagtgcagattcaggaaactgatgaagctaggaaaaaattctcaaatgctaaatctatttcatcagcccaattttttggtgaccaaaccagagcagctgacaatgaagctcaagttactttgcagaaattctcaagctcaacagccatctccagctctgatctatttggtcaaggtgcagataatgctcttgaccttactgctagtgacctcatcaaccgactctctttccaggcacagcaggatatctcaagc

SEQ ID NO: 21540 - DNA, 411 bp, Gossypium hirsutum
  Clone ID: LIB3146-043-Q1-K1-E10
cggacgcgtgggcggacgcgtgggtcctgctaaagctggccgtttgacgaatgcatatgtcggatctttcccggcacctcctccatttgtaaggtctccctcccacacccagtaccctactccagtcccaggatacccatccccacctcccatgtatggaagcaggagcccacccaccaacccctatgcttactcaccagaagcagcccctcctccccttgctggttcataccctggagctcccatgaactatcctgcatacgggggctatggtaatggtttggcaccagcatatcagcaggcttactaccgataggcaatgatgacactactctggcgatggtaaccactgatacgctgactaccgacccatctaagtttttatttctaaatggtttggttgtaatcact

SEQ ID NO: 21541 - DNA, 404 bp, Gossypium hirsutum
  Clone ID: LIB3146-043-Q1-K1-E11
cccacgcgtccgcccacgcgtccgtggaattctatgatcttcctcgtccttctattttagaggaaatttctactggtgtcccgacaagattgcctgaaggagtgaaatttgaaatgcgtacattaccagtgaggatattaaatgccatttcaatattgttcaagggagattgctctctgggccagtcttgaatcctcaatggtgaaggtattgtactctagatgtctattcttgattatcttcaagttttatttctgtaattcaagaagaaacaaaagagattcacaaagtttagaaagtgtctcgccaccaaggaaatgtttagcatttagccaccaaagccaaatgctaaacatttctttggtggggagatgctcctaagttctgtgaatttttgggttcgc

SEQ ID NO: 21542 - DNA, 257 bp, Gossypium hirsutum
  Clone ID: LIB3146-043-Q1-K1-E12
cccacgcgtccgccaacgttctcttccaatataatcttattacctgacattcgactttaggggacagagtgatttatttccgaaccggactctctcatagcaagaaacggaggatccttctatctcacataggagcaagatgaggaacattgcaataaaactgacgggagatatggaagaatcaaacattgctattgctgaatgatcagcggatgtttctgtaaatgcgtataatatattatctgcaggtaatattt

SEQ ID NO: 21543 - DNA, 354 bp, Gossypium hirsutum
  Clone ID: LIB3146-043-Q1-K1-E2
gagatttctttgcaatcagacagcaatcttaccttggagtcgaagttagatacagaagtcaccagtcgtgaacaatctatcgagaccaattgtattcaaagtccatccatgaatgcaaccaagtactcagtttcgggcataatgcagaaaaaatcaacatcaagactgggcgaggatggatcagtggcagaacttgctatggttactccggaacaacctagtccagtttccgttcttgacacctcaatatatcgagatgatgcgccatctccagtaaggcagattttgaatgccccagaaggtgatattgcagaagtttcaatgacggtccgcaaagaagagcaatgggacccc

SEQ ID NO: 21544 - DNA, 427 bp, Gossypium hirsutum
  Clone ID: LIB3146-043-Q1-K1-E3
gtctcaggtgaaacgaagttgggtgaaaaaggttcaacaagaatggagtatcctagagaaaaatctccctgaaattatctatgttcgtgtttacgaggaaaggatggatctactacgagcggtacttgttggtgcccctggcacgccctaccatgacgggctgttcttttttgacatttttctcccttctaactatccgtacgaaccacctttggttcactaccattcatgggggctacgcctcaatccgaacctgtatgaatcagggaaggtttgcttaagccttctaaatacgtggacaggttccgacactgaggtctggaatccaggaagctcctcgattctacaagttcttctgtccctccaggctcttgtgcttaatgagaaaccctatttcaacgaagctggatacgataaaacagtagga

SEQ ID NO: 21545 - DNA, 335 bp, Gossypium hirsutum
  Clone ID: LIB3146-043-Q1-K1-E4
cccacgcgtccgctctaagctcccaatatggccaattcccaccaaccgtttgttgcactcatcgtcggcgtcaccggcatggcggggttgagcctagctgaagccttgaagagccccaatgccctcggcggtccttggaaagtttatggctctgcttcacgtcccataccaacttggttcccttcctcgcttctcgataaatacatcgcttttgatgccaccgacgccggaaacaccgctgatacgctcactccaatctccagcgaagtcacccatgttttctgggtggcaatccaagttcgtgaaagtgaacaagtaactgttacagttaacgc

SEQ ID NO: 21546 - DNA, 379 bp, Gossypium hirsutum
  Clone ID: LIB3146-043-Q1-K1-E5
atccccactgacaaggaacaaacgaacacatcggttgatcacaatggtgtttgggggtctcttgcagctgcgtctcatattgatcagaatccagaaacagctaaacagaagcatgttgcagcagaggcctcgtccaaggagatgcaggctaagcagggtgcatccaccacttcaaccagaagtcgtactaaggtacaaatgcaagggattgcggttggtcgtgctgtggacttaactgtgttgaaaggatatgatgatctcattaatgaagtggagaaaatgtttgatatcaagggagagcttcgccccagtggtaaatggtcccgtgttttcactgatgatgagggtgatatgatgcttggtggcgatgatccatgga

SEQ ID NO: 21547 - DNA, 402 bp, Gossypium hirsutum
  Clone ID: LIB3146-043-Q1-K1-E6
cggacgcgtgggttctgttcgatttctcggggaaccaagtttaacttaaaaccacaacttctgtagaaatataaatatgatagactcaactcaaatattgagctgctttagctggtttcctcgactgtagacgatttaagttgcgatttatcaactgctgtgcttcggttggaatggctaccaagcagccaaatactggcctctttgtgggactgaacaagggacatgttgtaaccaagaaggagttggctcaacgtccctctaatcggaaaggaaaaactagcaaaagagtccattttgtgaggaacttgattagggaagttgctggttttgcaccatatgagaagaggattactgagcttctgaaagttgtaaggacaaacgagcgctcaaggtgctaaa

SEQ ID NO: 21548 - DNA, 356 bp, Gossypium hirsutum
  Clone ID: LIB3146-043-Q1-K1-E7
cttcggtcaaaagttacccctcgcatgcctgtaatttcagagaaaaaacctgggaaaaaggcgggtgttaaaatgggaaaggccaaggagttttccgtgatagacttcatgactacagttgtcccgagctggaagaggtacaacctgtacgacctgcatatgcagcaggcggttaacgtccacctcgatatccctgttcatctgcttttctgcgtaggtgcctaagacacaaatgccactgtccatacatttggaactgctgcagctgcaaagaatacggctccaacagctgctattattgctgatgttcacaaaaccaaagacgagttgcttgaacaaactgccaacatacaaca

SEQ ID NO: 21549 - DNA, 415 bp, Gossypium hirsutum
  Clone ID: LIB3146-043-Q1-K1-E8
aacaaaccgtcagccgtcgcagtggatagatatgtcctttatgggacgaggacgagggcggggaaggggatttggtgggcgtggctttggtgggtacgtaccgccagaaccctttgtgcttttccctgatattgaacttcctgatgtaaaaacttggcctgaaaaaaaaatcttaatcgtttggaattcaagggtgcttaactattggaaaggctttccttactatcttgaagaacatgtttcaaagaaaagcccgaggatggatattgaaagattttctgactgggggaagccaaagaacacctcaaaacgtgatagccttaaccaggttctacaactccaatctcataattttcctaaagaattgattggagattcaaagagagcgcagcgaagtgccaaaagaatgcgatgg

SEQ ID NO: 21550 - DNA, 280 bp, Gossypium hirsutum
  Clone ID: LIB3146-043-Q1-K1-E9
ctccaatggttaagcaaatgcaagagaaatttaataagtattgggctttgtaatgaaatgggttgttattattttttatttttttattttggtttctggtttatggacccgggctaaattgggcctctacatgtttaaagcaaaaacttctcgctttcattaaaaaaaaaaaaaaaaaaaaaaaaaaaaaaaaaaaaaaaaaaaaaaaaaaataaaaaaaaaaaaaaaaaaaaaaaaataaaaacaaaaaaaaaagatattaattgatatcaaaaaaata

SEQ ID NO: 21551 - DNA, 426 bp, Gossypium hirsutum
  Clone ID: LIB3146-043-Q1-K1-F1
tgcgatgtttgttcccattggtgccatgctgcctgtggcattcagaggaatcttataaaaccaggacccagcataaagggaccatctggggctatgcaattccattgtattggctgtggccatgcttcagaaatgtttgggtttgttaaggatgtatttttatactgtgctaagaactgggttcttgagacattgacaaaggagctagactgcgtgcgaaagattttccggggcagtgatgattcgaaggacaaggaactatacgtcaaagctgatgagctttgcaaccggctgcaaaacaaaatgatgtctgcttcagatgcttgcagcatcattatccagttcttcaactactctgatggtttgtcagactttcctacctccggtgcatgttccaaagagttaacaacaactcaagttgacctt

SEQ ID NO: 21552 - DNA, 273 bp, Gossypium hirsutum
  Clone ID: LIB3146-043-Q1-K1-F10
ttttggtttttccatttattatgttcgttataagctccggggagtgggtagcttcgatagcaatcctagacggttataattgaatctactgtttgctgtactccgccaattgggtgcaatatgcactagctactggagtatatgttggccattgggaaggcctgccggttaacccttcataataaatgaaccagcagtaatttacacaatcgagatgactgacgcagcaacggaactaagaaagcagataagctatcatttttagttaatgaa

SEQ ID NO: 21553 - DNA, 411 bp, Gossypium hirsutum
  Clone ID: LIB3146-043-Q1-K1-F11
cgacggcagcgattagcactgtcaccaccgtttcccctccgccaccaataagaccaatgggcccaaagcaccaataccaacaccaacagctctttaagactcatcatggtcttaataatatctttaaatcaccatgcagatataacaacaacaataccaatgtctttgatttcaactttgttagaaaccaagaggcgacacttggagaagatgactcacaaaccctacaactcttccctcttcatagctgtaacgatgacggttccgatgattccaacgagaaagaaaacgagatatcgatcgccaccgccccggggaatgctaaccttggtggtcctaattatcagttttttgagttccttcctttgaagagctaaaatggaaaacaatggagggatattttttaaaaat

SEQ ID NO: 21554 - DNA, 393 bp, Gossypium hirsutum
  Clone ID: LIB3146-043-Q1-K1-F12
gcagttctatcactgaggcaactcaatcggttgatcttattagtgggactaaactgctggcaggtgggatgacatcagatcagatggaccttcttgttgagcaagttaagatgcttgctggagagattgcatttagcaccagtaccctgaaacgcctggtggaccagtctgtaaatgatcctgatagctcaaaaactcagattcagaatttggaaagagagattcaggagaagagaaggcaaatgagggtgttagagcagcgtataattgagagtggtgaagcttcaatcgctaatgcttcatttgtggatatgcagcagacagttatgagattgatgacacaatgtaatgaaaagagttttgagctggaaataaaatcagcagataatcgta

SEQ ID NO: 21555 - DNA, 399 bp, Gossypium hirsutum
  Clone ID: LIB3146-043-Q1-K1-F2
gtaccaccttatgggtcttcccttttcaatggtccttctattcctccatatgaagctcctttttctggaggatcagcttatcattacaattatggcaatcgtcttcccggtggcagtccctttcagccgttgcatatgtctggaccacccccttattctagtggctctatgattggaaatggtatcggtgggatgtatggcatgcctcctttgatggaccggtatggcttgggcttgcccatgggtccccctccaatgggaccaaggccagggttttttccagatgataaatcacagaaagggtgctgatgctacacgtgataatgattggacatgccctaaatgtggcaatattaacttctcttttagaactgtctgtaacatgcggaaatgcaacac

SEQ ID NO: 21556 - DNA, 382 bp, Gossypium hirsutum
  Clone ID: LIB3146-043-Q1-K1-F3
cggacgcgtgggcggacgcgtgggctgggattgcaataaatggtacctctgaacacgtccgcgcctcggtcgaggctagcctgaagcgccttgatgttgattacattgatctctactaccagcacagggtcgacactaaaacaccaatagaggatactatgggggaactgaagaagctggtagaagaggggaagataaagtacattggtttatctggagctagccctgaaactataagaagggcacatgttgttcatcccgtctctgccataaaaatgaagtggccgctttggactcgcgatagcaaggacgaaataatccccctctgcagggaacttgggattgggatagttccatatagcctgctcggtcgtggtttctt

SEQ ID NO: 21557 - DNA, 330 bp, Gossypium hirsutum
  unsure (1)..(330): unsure at all n locations; Clone ID: LIB3146-043-Q1-K1-F4
cccacgcgnttcgcggactccgtgggcgagacgtctttgtttatatgtggtaatctcaacgacatcacgagcagtgatctaatatgatacaccttgaaacaccttgtatgaaaaaacatgaatctctactaccatgacacatgtcgacactaaaacacctatataaaatcctatgagagaactgaataagctggtacatgaagcgaagataaaagacacagatttatctaaaggctgccctgaaactataagaatatcgcatagcgttcatgatgtctctgacataaaaatgaaatggccgctttatactcgcgattgcagggacgaaat

SEQ ID NO: 21558 - DNA, 253 bp, Gossypium hirsutum
  Clone ID: LIB3146-043-Q1-K1-F5
ggcacggccaacctttggattggcgtttaacttggaaacccccttaaatttatttcaaaaagaagaccactggcgggcttttttttaaccataccttcccctttactggtgcggaagaaaaactctgccccaaactcgccatgaattcaacctcactgcgcagggagtctatgtgggcggatcaaaaaggacaccctcttaagtcacccacggttccgtatcctttaacgtgtttgggccacttccttaccgg

SEQ ID NO: 21559 - DNA, 424 bp, Gossypium hirsutum
  Clone ID: LIB3146-043-Q1-K1-F6
cccacgcgtccgcggacgcgtgggtccggactcgtgggtgaagacccaggacattctcgaaagacgtggaggctacctttagccgctaaactacatcgaggacatctgtcatttgaaacaactctcctgattctgaggttaacaaagtttggtaaaaaatcccaagagatccgccagattgtaaatgaaatttttgatggcatctgtaggttccacagttttttgtaaaattcttttatttcggtttgtaataaatagtaactaggatccgagttagcaatttgtaatagtttataggcactgcggactgagaactcaccagataattctcctttccaaacttgaaaatcttcatgctcaatctctgcaaggagaatttgaagaattttccgagcaatatcctcttgaaagctattatcccata

SEQ ID NO: 21560 - DNA, 368 bp, Gossypium hirsutum
  Clone ID: LIB3146-043-Q1-K1-F9
ttttattttttttttaggtgtaaaaaataattcttggggtgtgtttaatttttttattaaaaaaaaatagataatagggtaataaaaaataacattttgtcttactcttagaaaatttaaaaaaaaaggtttaaaaaaaagaaagattttaaagatgattctaaataaaaaattcattttctgtgttacaaatattaatatctaatttggtggaaatgacaatattttgaaattaaaaacagaagttatattgtaaaaaaataatgaattatattggctttgccctgaaattaattcatataatataaaacaaaagatttgtttttggtttttttttaaaatgggcaacaaaaaaattgttttttatt

SEQ ID NO: 21561 - DNA, 413 bp, Gossypium hirsutum
  unsure (1)..(413): unsure at all n locations; Clone ID: LIB3146-043-Q1-K1-G1
agcgaagcaaagaagaacccgtggcgaatttgcaaagtacggggtctgctggtatgtgtacgggggtgtgggcgtggcgtacggaaactgtgctggcgcggggcgtggctgctggacggtacggaggccgtgcatggggggttgcttggttgcggcgcagaggaaaaggagatgtcctagggttttgtcctgttttagtgttctaggcctgttgggtcctgtagattcgggtcagggtttaattattgggcttgggttaatagactgtggtttttatatttatttgtttgtttttggtttgtttgtaatgggctcgggcacatttggcccactacactatatattgtgtttttgttcttttgtcaattnaaaaaaataataattaatatatnnaataaaaataaaatttaatt

SEQ ID NO: 21562 - DNA, 411 bp, Gossypium hirsutum
  Clone ID: LIB3146-043-Q1-K1-G10
gcttcgcactcaatcaaggcatctacaagacgttgaaatcgcaaggggctcgagaagagggaagcggtcgaaacaatcgagtcgaagtcagatgaaaggccggctagaagaaccgtcaagcgttcggccttcgagatgtgagatccataggctgcaagtaaaacacacaaactagtgattttattcacataggagcgaaccgagagactacctttccgaagggagcgaagctcatgtcgcaattgcgactgcttcgtgcttgaatcggccgcaaacaaactgttggccatgagccacacatcatgagcagtcctaacatcggtaaaggaggacaagaaagacgggctaatggtggagagaagccaagaagtaagcaagctatcttgctgatcaaaaaccagcacagcggga

SEQ ID NO: 21563 - DNA, 166 bp, Gossypium hirsutum
  Clone ID: LIB3146-043-Q1-K1-G11
agaaataccaagcttaagcatttcatgtttatggtgattttccctttgacaacatgtctgccctggcaagaacgacttgcgacggattttcgagaagcttgacaagaatggggatggcttggttagcctggaggagcttaattggttgcttgagagaatcggagtc

SEQ ID NO: 21564 - DNA, 411 bp, Gossypium hirsutum
  Clone ID: LIB3146-043-Q1-K1-G12
tctagatcgcgagggccgccctttttttttttttttgttattttattattttctaaggctacccctaacaccaggacgaggcttagatggctcagcgacatgaacagcatgacgattaataagcttagattcttcaaaaggaattttgggatgtttggcatcatgatggatctgcatcgatttcacatcgggagcggttgttttgcaatgaggacactcgtatttggcatgtcctcctttctcaaacccagaacggtcagctaatccggctttgccgccaccacggttggtggtggcagcgtcgaccttggcggcgagttccttggccgtgtgcttcttgggcttggcttttccggtcatgattgattgatggatgataattatgaaatcaaagaaccaaaaaggaaaatt

SEQ ID NO: 21565 - DNA, 131 bp, Gossypium hirsutum
  Clone ID: LIB3146-043-Q1-K1-G2
ctcgaatctgaagattgtggtaacttgtatacaaaggttttaacattgtattaaaaagtacacactattaaatccaaaatagaactcaaattgttcatgtaagtatacagcaaatctaaagtttgaatctt

SEQ ID NO: 21566 - DNA, 424 bp, Gossypium hirsutum
  Clone ID: LIB3146-043-Q1-K1-G3
aaacatagcagccatggcagtccgtatgcttcttgggttaggtgtcctgctactctgccttgcaaaggtttcatctgatctgaaagcagaagaagttataaccaatgtcggtgaggtgggttctttggttaccagaggcggaaacagaagactgatgctagagattgattgtggaggattatgcaagaaaagatgcagtcaacactcgaggccaaacagatgcaacagggcgtgtgggacttgctgcttgaggtgcaagtgcgtgccaccggggacttcatggaacagggaggtctgcgggacctgctatactggcatgaccacccatggaaacgttgccaagtgcccttaacctttacgtcgcccaatatgtgttgcagccatcaaggggaaaaatgaaatgtttgtttgtgtaatatgtatg

SEQ ID NO: 21567 - DNA, 424 bp, Gossypium hirsutum
  Clone ID: LIB3146-043-Q1-K1-G4
cggacgcgtgggtgaggagggagagtgtgttatcagcaacacgcaacataataatggataagctgcaacttgggggaccatcaatacgattgctagagttactggatgaaatgaagaagcaaaactctggcactgaaattcaccttcatgatctaagaactgcagttgcaactctagccagtgagggatttgttgtacttcatggtgacagcgtgaagagaatgtgaaaatgtgaaagctacaaaaaagaccgaaactatcaaagtcgaacgaaatagccagccaatgtgctaaccactggaaatgctgccttgtgacttccgagataccctctgcaaaagacatttactcttaaggtatcccttagcctgtggtggacttaaagaagagaattgagtgttaggtatgtcatttaattagttga

SEQ ID NO: 21568 - DNA, 423 bp, Gossypium hirsutum
  Clone ID: LIB3146-043-Q1-K1-G5
tggcctcaaatcccaaggtcttctttgacattactatcggtggtcagcccgctggtcggattgtgatggagcttttcgcagattgcactcctcgcactgctgagaacttccgtgccctctgtaccggcgagaaaggcgtcggccgcagcggttagcccctccactacaaaggctcctctttccatcgtgtgatccctaactttatgtgccaaggaggtgacttcaccgccggaaacggtaccggaggtgaatccatctacggatccaagttcgctgacgagaacttcatcaagaagcacactggtcccggtattctctcaatggctaacgctggtcccggaactaacggatctcagttcttcatttgcacggctaagactgagtggctcgacggacagcacgttgagtttggacaagttgttg

SEQ ID NO: 21569 - DNA, 397 bp, Gossypium hirsutum
  Clone ID: LIB3146-043-Q1-K1-G6
cttcattattccaatgataccagtctattacgttgtttcaaaaagatctggcttttataaggacttcataaccggaaaatggagacctccagcatgaatagaatgcacatgctagacagcaagcttggggtttatacaccatatatgatggtcatgatgttcttcaagtgagcttaaagtttccaagccattgatttgttcgtgtattagttagttggcatttcatattttcacaacaaagacaaaactggacaagactaggtctaggatgaaggagtttcttttacatctttataacttgagtgataatgtccatttttgagttgaactatcaaaaatgcatcattggtttatctataaagcacgtgaagggcattacaagtcctgtttttgaaaa

SEQ ID NO: 21570 - DNA, 422 bp, Gossypium hirsutum
  Clone ID: LIB3146-043-Q1-K1-G7
caggaggaaatgcacgttgtattgcaatgcttcaggcatttcaagaggctatcagagactattccacaccacctgaaaaaaccctcaccagagatttaacttccaaaattggtggttttgtttcttttctgattgaatgccgcccactttctatgagtatgggaaatgcaatcaggtttctgaagagtcgtattgccaggttaccactaactctctctgaatcagaagcaaaaacaaccctttgttctgacattgatcgtttcataaatgagaagatagtgcttgctgataaggtgatacttagacatgctgctacaaaaatcagagatggtgatgttcttctgacatatggatcatcatgtgttgttgaaatgattcttttgtatgcccatgagcttgggaaacaatttcgtgttgtggtg

SEQ ID NO: 21571 - DNA, 246 bp, Gossypium hirsutum
  Clone ID: LIB3146-043-Q1-K1-G8
gggccacatcagcctgaaagggcaagggttttttgaaacataaacccggtttctggtgttagaagttagcatttgcgatggaagggttgacactattatctagactttttatctggtgaccattttaatcgacacggccaacaagaggttagcgcttctatatgaaagggagtggtatgtaccagtgcgatagataaacatcaaattgttctgcaaattattaaacttgctagaaaaagaatggct

SEQ ID NO: 21572 - DNA, 307 bp, Gossypium hirsutum
  Clone ID: LIB3146-043-Q1-K1-G9
gatcaaataagagaaaaacaaagcgattcatttcttgtgagtgctaagctacaattctgcaacaatttttgctatactaacaatatcaagatattgtaccattttttttcattgccgcgttattagaacatatgcctagcacaacaaagaagaccatatgatgtggtgctttcttttttttttttttggtatatatctatagaacatggagaaacacattcataaatgtttttacaacgtagttatcttattggtaagcgccattacagtatactaccacctacagagttcgagtttcttagcctac

SEQ ID NO: 21573 - DNA, 385 bp, Gossypium hirsutum
  Clone ID: LIB3146-043-Q1-K1-H1
cgggattacccgctgagtttaagcatatcaattagcggagggaagaaagcttttactggaatgtaaggtgtaactgttttcaatcatagttcgggttgtaggaacataaggagaagacattaaaatccctgaactgcctctagatatgaagaacctgggactattagatgtttttatgtttttgtttttcctttcctattacttgttatgtttggatttgtcttgttatgacaactggaattttgaaggtatcccctattctagtatgatcctgttctctgaaaataagataataaagagaacattaaaaatgctgctacaaaaatcaaaaatgaggatggtcttctgacatatggatcatcatgtgttgtaaaaaagattcttt

SEQ ID NO: 21574 - DNA, 389 bp, Gossypium hirsutum
  Clone ID: LIB3146-043-Q1-K1-H10
cagcaggggcctgcgtattttccagattgtttctgggaaaaaatcgagtgactcatagtttgaggttggtattattcatcatgagagactatctggacaagagttgattaggtagattaaagtgcttggttctatggagattcttgtaagacagaagatgtagctgccatggcattagtttgattttggacttagcggctggggaggatattgccttcatgttttgatctattgttcataatggctagcttcagctttgtttactgtttactgtaattaagctatgtttacttaaattacgtgcttctttttttttttttttcaactttcccaggtttccagagttactgatgctctttatgcagtgttgttgataacgagtatagctt

SEQ ID NO: 21575 - DNA, 211 bp, Gossypium hirsutum
  Clone ID: LIB3146-043-Q1-K1-H11
ctacttactacccctttaactacctatctttttcacactctcttcgtgctcccgccgtattgcacttgccctctcttctctcttcttttccttccttccttccttctgtcaacaccactttctaatggctttccttgctggttcatccatttttatgcaaccccggcagaccctggctacaagcaggggttttgggttgaaattgggttta

SEQ ID NO: 21576 - DNA, 379 bp, Gossypium hirsutum
  Clone ID: LIB3146-043-Q1-K1-H12
cccacgcgtccggccttttgcagaaacttatatttgatacatgtagaatctttagcccgcacgtgttttgaagtgtcgactctatgatcctgctgcaaattacttgccgttacggtttcctccatagcttaagactactgagcttcttgttatggcagccatgttcaaggttcacctgtgagcctaatgctgctgtgaattcatgttgtgaaattgctagttgtatcccatttttgatgctgggtttatctcaataatgaggattatgaatatggttatggttccttgttaataatttaggcttgtaggcagacaaagctggattctcttaataaatgtaattttcattgatctattatatcatatgttttggtgcttt

SEQ ID NO: 21577 - DNA, 237 bp, Gossypium hirsutum
  Clone ID: LIB3146-043-Q1-K1-H2
aaataagccgtaccttatttaatattagaaccgagttggaggtctgtaaccacttcacaccaaaggatatttggataggagattatgaaatagtccgaaccttatttaatatagtaagtgagttgtgggtctctaaccacttcacaccaaagtatcattaccttaaaaaacacaagttatcttatgggtgtacatcttgaaataaaaagaaaacaagacccccccccaagcggaatg

SEQ ID NO: 21578 - DNA, 414 bp, Gossypium hirsutum
  unsure (1)..(414): unsure at all n locations; Clone ID: LIB3146-043-Q1-K1-H3
ggctaaatatgacaaagacactcctgaccgctggcataacattgccaaggctgtgggtggaaagtcagttgaagaagtcaagctgcactatgagatcctagtcagggatctcaaagacattgagtctggccgctacccttatccatatccaaccaactaaagcgctatgagtttactacttactattcactacctatccacaatcactatagataaccaagaagtgaaggccactttcatatgcatgaatcacattcctaaaaatgcagctgtcatgcttttttgttgatgtagttgtggatttaaagaaaacgtggttcttagaattatcatacatgcgcatatccatgacgtccttgtccttccagctccacacacccacaaccncaaagtccttaagcattgaaaactctc

SEQ ID NO: 21579 - DNA, 409 bp, Gossypium hirsutum
  Clone ID: LIB3146-043-Q1-K1-H4
cccacgcgtccgttcagctgcaatacaaggtcaacctcttgctgaacaagttctggctgggatccaaattttcaggctaggctggcctattgatcaagttccggtcaaaccttttaatcggtggccagcccttcattcctttatggggccagaaccggaaggtcattaaccctttcacaacctggtgcatttttcattcccattccacaacaacaacaaccggcatgggcttatggtagacaaggaagtgccacggaacttggtcaaccttcttattacaatcgatgacctgggtctattctattatgaaattaaatgatcctttgtctatcttatattcctcataaagattcgccaattggatctcttaagttatgactgaaattaaattttttttttattggattgg

SEQ ID NO: 21580 - DNA, 383 bp, Gossypium hirsutum
  Clone ID: LIB3146-043-Q1-K1-H5
gagcaaccccatttgcttacggctcatgacatgttagaccgaaccgtgcaatggatcccggtcttgtttacgacctaacagttaacgattacttgaacttcttgtgtgcccgtggctacaaccaaagccttttaagtctattttcggacaagccgtatgcatgtccgaagtcatatggtgtaatggacttaaactatccttccatttcggtttctcaactcaatggctcaatgacggttagcaggacagttaagaacgttggttcagcaaggtcaacatataaagcacgtgttagatcgccagctggagttactgtttcggttaaaccatcgacattaaagttcgagaagatcggtgaagtgaagaaatttgaattaaaattc

SEQ ID NO: 21581 - DNA, 395 bp, Gossypium hirsutum
  Clone ID: LIB3146-043-Q1-K1-H6
cggacgcgtgggctcattccccttccaaccttaccatccactacctccaccataagctccttagaattattattgtaatataactatgctagtttttaatatgtaaaactaatgtatgatctactttttcatttgcaaaactaatgtatgatctacttttttatatgtgaacctaatgtattatctaaaaaaaaaaaaaaaaaaaaaaaaaaaaaaaaaaaaaaaaaaaaaaaaaaaaaaaaaaaaaaaaaaaaaaaaaaaaaaaaaaaaaaaaaaaaaaaaaaaaaaaaaaaatgataaaaaataaaaaaaaattccattttggggggggcgttataaaaaaacaatttttttacacaagtggtacccaaaaaaatttttttttttggggtccc

SEQ ID NO: 21582 - DNA, 426 bp, Gossypium hirsutum
  Clone ID: LIB3146-043-Q1-K1-H7
caactaaaggccccactccatataaaccccttaccaaggcccccactccaccatataaaccagcaaccaaggctcctactccaccatataaacccccagctcctgcaccaccaaccaaggctcctactccaccatataagcccccagctcctgcaccaccaaccaaggctccaactccaccatttaagcccccagcaccagcaccaccaaccaaggctcctactcccccatataaaccccctactcccgcaccggcacctccagtcaaggcccctactcccccatatatgcccccaacacccccaaccaaagcaccaactccagcaccagcaccgccaactaaagcaccaactcccccatataagcccccagttcctacacctccagttaagccaccaacaactccagcaccgtcttacaagccac

SEQ ID NO: 21583 - DNA, 280 bp, Gossypium hirsutum
  Clone ID: LIB3146-043-Q1-K1-H8
cccacgcggacggccaggcgtccgcccacttttacgaaccccctcattagtcgcaaagtaattgatcagagctaagacttgctttataaaaaaaaaaacaaaaaaaaaaaaaaaaaaaaaaaaaaaaaaaaaaaaaaaaacaaaaaaaaaaaaaaaaaaaaaaaaaaaaaaaaaaaaaaaaaaactaaaaaaaaaaaaaaaaaaataatcaagcataaacaaaaaataaaaaaaaataaacaaagacaaaatataaaataaacatgtggggtcggtatcc

SEQ ID NO: 21584 - DNA, 260 bp, Gossypium hirsutum
  Clone ID: LIB3146-043-Q1-K1-H9
aggtgaccaagcgatgcttcttattgtgtgctttatatccggaggatcactcaattgatgtggaagacttggtgcgatatgctttggcattggagttatatggcaaggttgactcagttgaagaggtgagggttcaagtcttggaagccattgattacctcaaagattcttgtctattattaaaagatacgcaatggtacgatcacctttcatggagctggtatttttagtattttaataagtagaaatgtctaaaacac

SEQ ID NO: 21585 - DNA, 355 bp, Gossypium hirsutum
  Clone ID: LIB3146-044-Q1-K1-A1
gtcacatattccagcctgtccgtttattattttgctgttcctttcgatacacaacagccaggccttggtggatagccgttgcaaaagatatgcaaatattgctatcctgaactgcttcctactgcgtgtgctttcatattcagttggtcagctgtctacatttaccctcagggtctggtattctgaggatcgtcttacccgcatccgaagatgtgtctcccacgcactaacgctgttttgctagacgagggcttgaatgcctttgcacatgaataatctgcaagataactcctgatacccgggataaactgctttgtatgcgataaataatcgatccacgaaccgatttatccat

SEQ ID NO: 21586 - DNA, 398 bp, Gossypium hirsutum
  unsure (1)..(398): unsure at all n locations; Clone ID: LIB3146-044-Q1-K1-A11
agcaaacattagaatcgttgtccacttctcttgtctgtacagttggagagatctcaacctggccaagtgcaagtaatgtcattccagggcaggcaagaaattcttccgtgaacgaatctcagtgtcagcgtaaacagaaaatgctgataagcagtaaaatatgaactctaatgcaggtaactttcactgtggatttacgtgcaattgatgatgttggacgtgaggctgttgtttacgaattatctaatcagatgtataaaatatgtgatagacgttctgtatcttgcatcattgaacggaagcatgatgcaaatgcagtaatttgtgatcaagaactgagttcacggctaanatctgcagcttacagtgctgtcaacaaaatggtagggcagattcat

SEQ ID NO: 21587 - DNA, 264 bp, Gossypium hirsutum
  Clone ID: LIB3146-044-Q1-K1-A12
ctttgaaggctgagagagaaagagagagcttaatacagggggaaagatggattctttttcaactggttcaagcggaacaggatctccccaaatttcaacagatgaattcagggaccagatgaaggctcaacttgcccaggcttatgctcaagagttcctcgagactgtgagggggaagtgctttgaaaagtgtatctcaaagccaggaacaagtcttagtggaagtgaaagtagttgcatctctagatgtgtggatcgttacat

SEQ ID NO: 21588 - DNA, 414 bp, Gossypium hirsutum
  Clone ID: LIB3146-044-Q1-K1-A2
cgcgagatgcaggcatcgaccgagtttgcagttttttgccgttttggtgcaagactgtcgggctttgggcggtgtgcacgctgagggcgcacatggggcaggctggagaaggcgtacggcgctaggggttggatgcggcgcgaggaaaggagggaaccctagggttttctaatgctgcttaatcttttgaggcctattgggccgtttagagttttgggctggtgattgttattgggcctagggttattgggctaggatttgggtaggttttgtttaattttgtaatgggcccgggtgaaattgggcttctacaacatatataataaatataattacatgttattatttattactatagaatattaattcaaattaaaagtgatataatttaattaaaaaaaaaaaaaaaaagag

SEQ ID NO: 21589 - DNA, 280 bp, Gossypium hirsutum
  Clone ID: LIB3146-044-Q1-K1-A3
cggacgcgtgggtccaatttgcttcaccattatcttacactatattctgtttaattaaatgggacatgtatatactgtttagccgtgaaaactgaatatgagtatgagtgtgatatgaatataagacagaaagggggctgcttcaccatgggggagtctttaattgtttgaggcgaaaaataagatgtaagactgaatttgtcattatgtcatttactaacatgatttttaattagattataaatatatgatgataaataaaagagttaaattttccatt

SEQ ID NO: 21590 - DNA, 412 bp, Gossypium hirsutum
  Clone ID: LIB3146-044-Q1-K1-A4
cccacgcgtccgcccacgcgtccgcccacgcgtccgttgagatccaaatcttgtctattctgctaggttttctggaccggtaggtgaaccaatcaggccatgagttcacctggcagattggtctgtttagttagattaaataaataattaaaaaattcataaaagtaaatgtatattaaaaatttgtggcttatataacgatagaatgtctctcaataaggcatttcttttatatatttaaccagctttctgcaggtaaatttttccttcatcttgcagggacgtgtcttgtgagtacatgaattcatctaaagacattacaaaagaaattcttttatcatgttctcggtagcatcacctattaagaaaacatttcattagcatgtctctcaataaagcatcttttttggta

SEQ ID NO: 21591 - DNA, 417 bp, Gossypium hirsutum
  Clone ID: LIB3146-044-Q1-K1-A5
ggaacttggcaatgggctcagtaacaatgtcaacatgcagagaccaacacctgaaatatctgaagaaaatgagatgatgacaaaagacattatacttgatcaggtatctgagtgctcgtcttatgggttaagcaggagaggaactgctgcagaggttgatactgagacgcttgagttgtgggaaactgctgaccatgatgctaatgccgacctgaaagtcagcaaggcccagaagatggccactgcaccaactgactaccgacagattggaactgtgaaggcaggcaagagcagaactccctctacagaatctcttgtgaaggagttgggtgtagataaagagagctcgaagagatttgcagagcccaacaataacggaagcaagaggaagattttagaaagacttgattctgatgt

SEQ ID NO: 21592 - DNA, 375 bp, Gossypium hirsutum
  unsure (1)..(375): unsure at all n locations; Clone ID: LIB3146-044-Q1-K1-A6
cccacgcgtacgtagacgcgagggtgctgcttgctacacatcatgatcagcagaagcgaccccagctgaattgctacaacacctccaaggcttctctccgtctcaagcctaacttgcttactcttcttcctctgcaaattatttaccaagaagcctatgacgcaatgcctctgactctgtgtggtgaaatcattaattaattcctggtatgcataaaggtagtagcagtagaagtgaattaaagatttgaatcagaaatagatggcggctgatgatgagtgaatagcaactcgattgattgacttccctgtgcgaatgacagctagcattcgggtngaatcacctatattactatctcatgctcatttatttaaa

SEQ ID NO: 21593 - DNA, 415 bp, Gossypium hirsutum
  Clone ID: LIB3146-044-Q1-K1-A7
caaagatcgatactctatagcagcttttgttattccaaatgagggtactataatcaagacacccaaagagtttatagatgaccaacatcctcggcttttcaaggacttagatttcatggagttcttcctttttgccttttccgacccagcaaggcacatcgacaacggggagttgctccatgtctttgctggcctctcaccatcagtttccaattaaaattatgctcatatagacaagtaaaagtttggttttggttttaaattaatattacaaataataaattgagtcctatactcgagatctacgttctcgaactgtattaccatgttatattttgttataattgtgtactacaaaatctactgtgttgagtaatgttggtgtattgaatcaataagattgcagttcatggac

SEQ ID NO: 21594 - DNA, 283 bp, Gossypium hirsutum
  Clone ID: LIB3146-044-Q1-K1-A8
cccacgcgtccgcggacgcgtgggtgtgcgtggaaaatgagagtactcggtaggtggatgggtcatataaactcgggatctaatggtgtgctaatgggggagggggtgtaggaaacttggtgtgtggcaaagccaggaacaagtgatgagctactacagctgaacataaactttgcctgtaacctggtcgattgcaacgccactcattccggcggcgtttgctattatcccgcaacactcattaaccatgcatcgtacgccatgaatctttattaccagatca

SEQ ID NO: 21595 - DNA, 390 bp, Gossypium hirsutum
  Clone ID: LIB3146-044-Q1-K1-A9
ctcggtttctgctgagcaaagggatcgattgtcaatgtcagtggagagactaaatcagtcaagtgagagaattaaggagagtagaagaactgttctggaaacagaagagctcggtatctcgatacttgaagatttgcatcaacagcgacaaactcttttacatgcccacaacaagctttatgatgtggatagcgccattgacaagagcaagaaagttttaacaaccatgtcaagaaggattaccaagaacaaatggatcgttatctcgataatcgtagcacttgtccttgcaatcatcttaatcctgtattacaagatttcacatggctgatgaaatcttttgaaccattaatggtctgcaatttgtatatgttgatccgcatttgatac

SEQ ID NO: 21596 - DNA, 403 bp, Gossypium hirsutum
  Clone ID: LIB3146-044-Q1-K1-B1
cccacgcgtccgcccacgcgtccgcccacgcgtccgtccacgcgtccgaaaatattgaaatcaaccttctaaagtttctttttttttctctggtgcatatgaaaataaaatgttttttttgtattcaaaatccccccttgaatccccccatttttaaggctcttatagcctaatattacaatatatctactctttttgtcctatttctctgctttgtgtgttcgtttctcttttgcaggtgatggaacgggagtaggttgtggcagcaggctaggaggctactggtacggtgcacatgggcagcggcacgtgtggggagggctgaagtgacctagtacggcgcctaaggttctccctccctccattgctggaaaatattttgtgggctcgggctgttagggct

SEQ ID NO: 21597 - DNA, 318 bp, Gossypium hirsutum
  Clone ID: LIB3146-044-Q1-K1-B10
ggtgatttgaaccatttgatatctgcaacattgtctggagttacatgctgcttgcggttccctggtcagctcaactccgatctcaggaaacttgccgtgaatctcatcccctttcctcgtcttcactttttcatggtgggttttgctccactcacttctaggggatctcaacagtaccgagctctaacagtacctgagctcacccagcaaatgtgggacgcaaagaacatgatgtgtgctgctgatcctcgtcacggtcgatacttgactgcatctgctatgttccgtggtaaaatgagcaccaaggaagtggatgag

SEQ ID NO: 21598 - DNA, 314 bp, Gossypium hirsutum
  Clone ID: LIB3146-044-Q1-K1-B11
gcgaaatgagcatagctttaaatagaaaccaggaatctccacagacaaacttttgagtcttaagcacctcattgtgaagtaaacaaaaatgttctcattacagagacaacaaattaaaagcttccgactaacaatccatcactcagcagtttaagacgaagcaccctttgatttcctcggagccaactgagtcttcggctcttttttgacggcttactctttctcagacaggattatattctactccttaattacatctgatatatgagcgctatacagacacatgtggggtgtgggggaaaagaactacacat

SEQ ID NO: 21599 - DNA, 381 bp, Gossypium hirsutum
  Clone ID: LIB3146-044-Q1-K1-B12
gttaacaccaactcatcttgccatagtcatggaatatgcagctggtggagaactttttgaaagaatatgcaacgctggtagatttggtgaagatgaggcaaggtttttctttcaacaactgatatcaggagtgagttattgccatgcaatgaaaatttgtcatagagatcttaagctggaaaacactctattagatggaagcagtacacccagactaaaaatatgtgacttcggctactctaagtcgagtgtgttacattcccagcccaaatcaactgtaggaaccccagcctatattgcaccagaggtcttgtccaaaaaagaatatgatgggaagattgcagatgtttggtcatgtggggttactttgtatgtcatgct

SEQ ID NO: 21600 - DNA, 288 bp, Gossypium hirsutum
  Clone ID: LIB3146-044-Q1-K1-B2
ggagaagagacgaaatcgcagttgaccctttaaccatttatttcttataaaccgaatcactccttcggagatgttgattattcccccatctacctaaatctcctacatctcggacatggccgatgctcaatccacatacgtgaagctgacagaagatcatgcgcctttagaggatatccaacctggtgaacttaatcagcccattgatgtttctcagatgcatgtactaaagtgcaatgaatgtggacagcctgtacctgaacactttgaacctcctgctgttgaacc

SEQ ID NO: 21601 - DNA, 421 bp, Gossypium hirsutum
  Clone ID: LIB3146-044-Q1-K1-B4
cccacgcgtccgatgatatcttcagctttagaagatctcaacctctttatggttcatttagaggaggcattggtcatgtgaagctgtagcataaaggctcatctcttgttggaaaatcggaggaacatttatttttccggtaagttttcatataaaagttctacattgaagaaaaacagagaatccctcttgtctgttaatttattgttgtatctcacttagttatgaaaaataattcccttggttcagaaacagaattcatgtcgcccgaatattgaacaaatttaagctctggttcgaatccactgatataattgaacgtgcaattctatgttgcttcagagtcacaaaatgtgtctcatagggacatgcgtctgatgcaaggtttattcgaattattcttataaaaattgaagttcat

SEQ ID NO: 21602 - DNA, 333 bp, Gossypium hirsutum
  Clone ID: LIB3146-044-Q1-K1-B5
aagacgagtcaagcatcttggtctttgttagaaataaatgagcattgcttaaactagaactgcctgtttctgtcgtggttgtaataggcccattttgcccgggccaattagaatacaaaatagaaattaaaaaccaaaaaaaaaacacacacacacaaataaagaacccaaaatcagaagtccaatgtccgattacaaatatttgggcaaaaactaacttaaacccaaaatcccttaatataaacttaacccagttacataaaatttgacccaattaaataaatcctaaaacctaattctaataacccaaacccgaggcccaatacacccaaa

SEQ ID NO: 21603 - DNA, 415 bp, Gossypium hirsutum
  Clone ID: LIB3146-044-Q1-K1-B6
cggacgcgtgggtccggacgcgtgggttttggcagttgggagatgatcttcggggactagcaaaagtcgcagaggatcacaaatggttgatggctgcatcgaaactggctgaacagacgaggacaaagggtgaacgcatgaacaatctggatctttccaagggtccagctgaaatgaggacaagggataaattcgggttccaggaagacaacaagctcgagaaccttaactttaatatgttgaacttggactctaaggttggggataatgtaagcaaaagttctttccaaaatggtatgtacaatatgaatgctgtttaccagaaaaataacagtattagccttggaaaccctactggcaacaaatatatgagcaacaatcagagcaacaaagatgtcaacaataacagcagcac

SEQ ID NO: 21604 - DNA, 391 bp, Gossypium hirsutum
  Clone ID: LIB3146-044-Q1-K1-B7
cgagtcgggttgtttgggaatgcagcccttttcgggcggtaaattccgtccaaggctaaatacgggcgagagaccgatagcgaacaagtaccgcgagggaaagatgaaatggactttgaaaagagagtcaaagagtgcttgaaattgtcgggagggaaacggtggggggtatggtggaggtggatacagaggtggacgccgtgaatgaggatacagagacggaggttctcgttactcaagaggcggaggagcatctgattgctactggaggtcttaaatttattgtttcaaagtgggcttgcccctatattgttatgggtcaggaatgggtttggtggttggtaattataaaaacactctgctactgtttggttagaggtcactcgttttt

SEQ ID NO: 21605 - DNA, 130 bp, Gossypium hirsutum
  Clone ID: LIB3146-044-Q1-K1-B8
cccacgcgtccgaaaaaaaaaaaaaaaaaatttaaaaaaaaaaaaggacaaacaaaaataagggaacgaacttacaaacacatgaatgcaacaaaaataactcttgtatagtgggacttagattcaatat

SEQ ID NO: 21606 - DNA, 406 bp, Gossypium hirsutum
  Clone ID: LIB3146-044-Q1-K1-B9
agaactggagaaaacaaaagctgataatgttaaactttatggaaagattcgttatgtccaggattataaccaggagaaagtaatttctagaggatcaaagaagtatgccgaggatcttgaaagtggtttcacctcagatgttgaatccaagtacaagaagatatatgaggatgatattaatccctttgcagcattctcaaaaaaggagagggatcaaagatacaaggagctgggcttcagagacagaatcacactcagcagcggacgttttcttctgggaaacaagtatgctcgaacgtttgcatttttctacacaattggtttgcatatcctagtgtttacttgtctataccgaatgtccgctctaagctacctcagccatggctctgaggaaactgccgtcgtt

SEQ ID NO: 21607 - DNA, 422 bp, Gossypium hirsutum
  Clone ID: LIB3146-044-Q1-K1-C1
gtgcatctttcattttccatgttctttctagggttttgaagtgtttcccctttctggctcatttcaattctaattcaagttccagttttcatcatctgggtagtctgggatctcccttccaaatttgggttccttttattttttcatcaaagattcgatgtcacaaggcttttcaattgagctttactttgatccagcactcgaaaaccaagtcttgaaagcttggaatgtattggctcgtcgccaaatcagcactcagttaattgaaattgagtcaaggcctcacattactctcttctccagcccttttctagaccctgccaagcttgaatctgttgtcaagtcttttgcttcaaaacaaggacctttacctctatcttttacttcaattgggagtttcccaaatgacaaaaatgttcttt

SEQ ID NO: 21608 - DNA, 370 bp, Gossypium hirsutum
  Clone ID: LIB3146-044-Q1-K1-C10
cggacgcgtgggttcagcacatacaagttggaagatggagatgacgatggtgaagataaagagcactagtaaatgtaggcttttccggattaagaagatggggtcacttgtattcgaaggaagagcttcacagaaagccatggccaccgtgaagggttgatttgaattgtacaggaattgccaaatcgttcagagtaatacctgaaccgtgttgtgtttcgagtattggtttttgtatgcgtgtttgtatttgtattgttgtaattttctttctcgtttttaactttcaatgtattacttctggattggcattttatcattttgtaatggggaagtgttggtcaagagggagatcgggattttgtgtctt

SEQ ID NO: 21609 - DNA, 371 bp, Gossypium hirsutum
  Clone ID: LIB3146-044-Q1-K1-C11
cggacgcgtgggttcagcacatacttagtttttagatggagatgacgatggtgaagataaggggcactattaaatgtcggcttttccggattaagaagatggggtcacttgtattcgaaggaagagcttcacagaaagccatggccaccgtgaagggttgatttgaattgtacaggaattgccaaatcgttcacagtaatacctgaaccgtgttgtgtttacagtatcggattttgtatgcctgtttgtattagtatagtcgtaattttctatctcgtttttaactatcaatgtatgacttcgggattggcattatatcattttgcaatgacgaagtcgatgtcatgagggagatcggatttttgtgtctt

SEQ ID NO: 21610 - DNA, 339 bp, Gossypium hirsutum
  unsure (1)..(339): unsure at all n locations; Clone ID: LIB3146-044-Q1-K1-C12
ccttcaaaatgcactagagtttgagacttttggagtaagcatgtcgatcatgatttaatgacaggccacgtaacctaaatatatgaagtattgctgctcatacactatttaaataaatgacctgtcactgtcttggggtgctaccaagactcgcgtgttctcttttctctttttctttataagttaactaagctcttaaaggtagttgcttggatagcagagtaattgctcttaggtgtgccctgatatgtagttgctgttaattgaaaattatttatgaatactaatatatagtatacacatatacatcnnnnaaaaaaaaaaaaaaaaaaaannnna

SEQ ID NO: 21611 - DNA, 411 bp, Gossypium hirsutum
  Clone ID: LIB3146-044-Q1-K1-C2
cggacgcgtgggtggctatcgagttctttgtttaagaataaggatcttttaagatacgccggatccgctaaaatacgccgatccccgtccgtcttccgatcatatggggctgcttgaccagttgtgggatgataccgttgctggtccccgacccgataatggccttggcaagctccgaaagcactccactttcactttccggcctaactctgccaaggaatctgatggcgggagtgtaagatcgtacggtgatgaagcgccggaggaagcgacgagagtgacacgtagtattatgatcgtaaagccgcctggttaccagagcggatcgcctccggtttcgccggccggatcgacccctccggaggcagagaatcatatcggtttcggaagaggtccacatcggatgcatac

SEQ ID NO: 21612 - DNA, 415 bp, Gossypium hirsutum
  Clone ID: LIB3146-044-Q1-K1-C3
cggacgcgtggggagcaatctttacagagcttaacaggagtttctctaggggaaggaacaggtgcaacaatgtcggatgatgatgaagagcaaatagacagtgatgccaatttgtttgatggaagtatggagggtccagattcattgggatttgggcctctggttccaacagagagtgaaaggtctttgatggagcgtgtgaggcaagaactcaaacatgaactcaaacagggttacaaggagaagattgttgacataagggaggaaattttgcgcaagagaagggcaggaaaacttcctggtgacacaacttcggttttaaaagcttggtggcagtcacattccaagtggccataccccactgaggaagataaggcaaagttggtacaggaaacaggtttacaattaaaacaaa

SEQ ID NO: 21613 - DNA, 372 bp, Gossypium hirsutum
  Clone ID: LIB3146-044-Q1-K1-C4
gcggcagctgctgctatattaaattattattaaataaagggaaggggtattgaacgaacggggtcgggtttgtttgataattatgcatacctaatagacacagatgccgatttgtttgatggaagtatggaagatccatattcattgcgatttgggcctctggctccaacagagagtgaaacgtcttttatggaccgtctcaggcaacaactcaaacatgaactcaaacagggttacatggataacattgttgacataaggtaagagattttgcgcaagagactcgcattaatattttctgcagacacaacttagaccataacagcttggtatcagtcacattgcaagtggccataccccactgaggaatat

SEQ ID NO: 21614 - DNA, 417 bp, Gossypium hirsutum
  Clone ID: LIB3146-044-Q1-K1-C5
caaagaagactgacacacttgttcttctttcttcagttctcggaccaccatttcctgccaaattacccaaagcctacaacaaaaaagtcggcactgttcatttgaccctcgactaaaaacccatgacatccacgaaagatatgattgcaatcctcctcttcttggttgcatcgaggacaccgggcatcagcaactatacgtttaatcttcagattagcaaaagtaggaatgtaattccaagaaattccccatattgtaattttgactttcgaggggatttataaattccatagttttttgtaaaaggctttagtttcggtttgtaaattaataggattttgagtaccctcctgtaatagtttgtaggcgcttctaaccgaaaaattaccagatggttctcctctccagacttggaag

SEQ ID NO: 21615 - DNA, 300 bp, Gossypium hirsutum
  Clone ID: LIB3146-044-Q1-K1-C6
actcaacgtatttttttgctgagaggactctaaacggcgcggtcggtggcaactatattctactcactgatatttccatggttacagacgaatattcgaacaaagagctggggctggatatcgactaatgaatcacacactctgtgcgtagggtcgataataacacggcattcaactatctgcttcatgcaatcatgtgtaatatacatgactcatgttgacacctaagggaatgtagctgttgtgtatttgtacatccactaatgaaaacttttatgctttggtcgacatagtcttata

SEQ ID NO: 21616 - DNA, 417 bp, Gossypium hirsutum
  Clone ID: LIB3146-044-Q1-K1-C7
aaaaaagtgaaaagggtaatggtgttgctcctgctacaaggtctccaatggctttaatggggtcatctagaaatgaaaaccaagaagtgaataccagcatgagaactgccgagaccatgctgcggttggtgcctatggctttaggggttgctgcacttgttgtcatgctcaaaaactcacagtccaatgactttggctccgtttcatactcagatcttggtgctttcaggtacttggtgcatgctaatggtatttgtgcaggcttttcccttctttcagctattatagcagctgtgcctagtccttctactatgcctagagcttggactttcttcctactcgatcagattctaacatacgtaatcttgggagctgctgctgtttcaaccgaggtgctttacttagcaaacaaaggag

SEQ ID NO: 21617 - DNA, 414 bp, Gossypium hirsutum
  Clone ID: LIB3146-044-Q1-K1-C8
aaacaactgcaccaaagagttgttacatgcgacctccggaaggtatacttggtcccggagaaagccttatcgcaaccgtattcaagtttgtggaaccaccggagaacaatgagaaaccaatggaaaaaaagagcagggttaagttcaagatcatgagcttaaaagtgaaaggagaaacagattatgtcccagaactggtataattctgcagatacatttagaacatacaatttcttcatgtcaaatagtgaaactgaaaatgtgtggtataacaatcttgcaacagtttgaggagcagaaggatgaggtcacagttgagcagatattacttgtagtttttctagacccagaacgttcttgtcctgtaagtaatcaaaacataatcacaactggattacttggtttattcgtagt

SEQ ID NO: 21618 - DNA, 421 bp, Gossypium hirsutum
  Clone ID: LIB3146-044-Q1-K1-D1
agaaaatatctcaaatctcctcctcctcctcggaaatcttagtatcatcaccatggcctcaaatcccaaggtcttctttgacatgactatcggtggtcagcccgctggtcggattgtgatggagcttttcgcagattgcactcctcgcactgctgagaacttccgtgccctctgtaccggcgagaaaggcgtcggccgcagcggtaagcccctccactacaaaggctcctctttccatcgtgtgatccctaactttatgtgccaaggaggtgacttcaccgccggaaacggtaccggaggtgaatccatctacggatccaagttcgctgacgagaacttcatcaagaagcacactggtcccggtattctctcaatggctaacgctggtcccggaactaacggatctcagttcttcatttgc

SEQ ID NO: 21619 - DNA, 232 bp, Gossypium hirsutum
  Clone ID: LIB3146-044-Q1-K1-D10
gccacgcgtacggccacgcgtgcgcccactcgtgcgaaaaactcatatgcttggcgcgccgaagaaggcaaagcacaggcaaaaagtccaacgtgttgccatcactcccggatcccaaaaacagccggataactgctgggcatatggaagcgcctaccacacacctgcgtatatacagccttctgtaccacgatctgcacgatcctcactacgacttggacatcactgaagc

SEQ ID NO: 21620 - DNA, 406 bp, Gossypium hirsutum
  unsure (1)..(406): unsure at all n locations; Clone ID: LIB3146-044-Q1-K1-D11
cccacgcgtccgcggacgcgtccgcccacgcgtccgcccacgcgtccgcccacgcgtccgggcgagtgttcgatctggtctcctacgagcagcccttcgcggcggctctcgtcctactgctcctcccacgcgtggcttcgcttcctcttctcatcacgatgatgcttatgaaaccgcaaaatgggaaaagataacatatttaggtgttgctacctgcactgttttagcgatttataacctatcaaaaggtcatccccaccatgaagagcctcctgcatacccatatttgcacattcgcaacaaggagttcccatggggtccggatggtctgtttgagaaaaaggagcatcactagggatggccggatggatgcatatctttccgagttcggcgcattnttatcatt

SEQ ID NO: 21621 - DNA, 402 bp, Gossypium hirsutum
  Clone ID: LIB3146-044-Q1-K1-D12
cccacgcgtccgcagggaattccaaattcctacagactggatgcttgataatgggattatgagcaagattaagcttggatcagtgaaactggcgaagaggtacatgaaacgggtagccatggaactgcaggtgaaggcaaccttggagaaggatccttcaatggactatatgctacttcaaggagtcagatttgcattcagaatacatcagtttgcaggaggatttgattctgaaacaatgcatgcatttgaggaactccggaaccttgccaacctccttaacaagaagtagtagtagtagtaaagcagcagtatgggttgtgtgacaggatggaaggtgtgaagtttgtcagaagaagaagatgatgatgattggatggactgaaggatagctgttgctgc

SEQ ID NO: 21622 - DNA, 417 bp, Gossypium hirsutum
  Clone ID: LIB3146-044-Q1-K1-D2
ggctttcttttgcagacgctgcggtcaacagaggcaaggatttgccgttttggtgcaagtaggggatgcctcgggagacgagtgcgctagagtcacatgggcagcaacggcgcataggaaaggagggaaccctaggattccctggtgttgtttagtttttgggctctattgggccgtttagggttttagattactttgggccatgttgggccattaaggatttgggtaagtagtttgttattttattttgttttgtaattggactcttattgggctagtcaaaaattgggcgtgtacatcaatattttaacatttttatttatatattaaaattccaaatatgttataagtttgacggataaaactcaaaattgtacatcaactttattcaatgtgcaatttgatatttttttaaaa

SEQ ID NO: 21623 - DNA, 422 bp, Gossypium hirsutum
  unsure (1)..(422): unsure at all n locations; Clone ID: LIB3146-044-Q1-K1-D3
gcgatgacccagatctcaggaagaagctaagccgactctgcaaaacaactactgttaaaacaaggtatgtggtaatgtcagaagaaatcctgaagcagtatccagagcttgccattgaaggactccccactgtgaagcaacgattggatatctgtaacgatgctgtcacggagatggctgttgaagcctcacgagtttgtatcaaaaaatggggacggcctatatcagacttaacccacttagtctatgtttcctcgagtgaagctcggctgcctggtggtgacctttacttggccaaaggacttggactcagccctgagacgcaacgtgtgatgctctatttcatgggctgctctgggggtgcagctggccttcgtgtagcaaaagacattgccgaaaacaatcccngaagtcggatctta

SEQ ID NO: 21624 - DNA, 410 bp, Gossypium hirsutum
  Clone ID: LIB3146-044-Q1-K1-D4
ctgcaaggaaggctagaagaagaattgcaaggcaaaagaaggccgtgaggatcttcccaaggccaactgctggacctctacgccctattgtccatggacagactttgaagtataacatgaagttgagagctggcaagggtttcacccttgaagagcttaaagctgcgggtatttcaaagaaacttgcacccaccatcggtatatcagttgatcaccgtcgtaagaaccgatctcttgaaggtcttcaagccaatgttcagaggcttaagacttacaaggccaaacttgttgtcttcccaagacgtgcacgcaagtctaaggctggtgattctactgctgaagagcttgcaactgcaacccaagtgcaaggaccatacatgcctatttctcatgagaagccttctgttgag

SEQ ID NO: 21625 - DNA, 369 bp, Gossypium hirsutum
  Clone ID: LIB3146-044-Q1-K1-D5
cggacgcgtgggttgaggcctaggctaacttgatctactaaaaatattattgttgatgtagatgcttggcacgaccaagagaaggaatacgagcagctttactcggctgatgcctatgaagtgatccaaactcacctagcttttattctgggaaatcgattgactgattcagaataacgttgcacagattggtaaacttagggtcggtcaggtctatgctgcattggtgatgtatggatatattctaaagcggttcgacgagcgatttcaactagagaagaccatgagaatccttccagatggttcatatcgggagggtagtcgtatcgataacgctgtcatagaagacatatgacctgcaggggatta

SEQ ID NO: 21626 - DNA, 416 bp, Gossypium hirsutum
  Clone ID: LIB3146-044-Q1-K1-D6
gtttcgtttaccaaatgccacaaattgatgggtttctctacaggaccaagatcgcgagctacccattggaagcaaacagtcctatatctagaggatgtgttaaccatctgtgaaggggagacaataattgggagcatgactgttgcaccaaacaagaagaatccccgagacgttgatataatggttaaatattcattgagcggacgacgttgtgtggtttcgagagttcaattctataagatgcgctgattttgttgcagagtatttcatcaccactactagctgtaggataccttgtttgcatgttcctcaaatgtttcaccaacatttttttaattccttttctactttcttttttctcgaaaggttttccctgagaaagaaaaacacataagatgcatgtacttcattaactt

SEQ ID NO: 21627 - DNA, 404 bp, Gossypium hirsutum
  Clone ID: LIB3146-044-Q1-K1-D7
cctctctgctggggtctccaatgcccttgacgccgactgatgagccacctcagtggttcaccgcaccaccactatggctggtggccgacgacaagcgacgacggggaggtgtcagacgagcatggtgaagtgcggcggcggcgtgcagggagttggagcggcgcacaggggcaagggcgtgcatgcggcgctggagagggctaggttttgctcccctctaccgaaattgttaatgttatttgggctaggttttttaatattttgggcccgttgggtttatttaattttggttttgggccgcaactgtaatggactgttttattttggaatttggggttctattttggacccgggcaaaaatgggctcttacaataataataatcaattaagtcctctttaccat

SEQ ID NO: 21628 - DNA, 268 bp, Gossypium hirsutum
  Clone ID: LIB3146-044-Q1-K1-D8
atgccaatgccatgggcttcatggttgacgagcctgaagcaggctgtgctgagatgatgaagatgtatcaggaggatgaggaggatgtctagtgtgttggtttggatttatttgcatatgaaatatgatgttgtctgctatttgttatgtgaattgctccgttatttctacgtttagaggacttctataacttatttttcttacaaattctattaccaattatataaacctaagctatggcttctatctcggaagtatttttttgggt

SEQ ID NO: 21629 - DNA, 172 bp, Gossypium hirsutum
  Clone ID: LIB3146-044-Q1-K1-D9
cggacgcgtgggttttagtctttctctttttttaaaaaagacttttttttttttcttttccaagttttttccttttttatttatctggagtggaaaaatgaaaattggaatgtagattatgttctcaattattgatgtgtaactgtggtggaagccaccaatttcgattgct

SEQ ID NO: 21630 - DNA, 162 bp, Gossypium hirsutum
  Clone ID: LIB3146-044-Q1-K1-E1
cgaatcgtcgacccactcgcacgcgtcgaaagctttgttgttatgccagttttatcatctattgtgcattcttataaagaaacttttgcttttcacgcttttgctggtataattttataaaggttcttgatgatttttttataagttttaaaatttttaaaa

SEQ ID NO: 21631 - DNA, 394 bp, Gossypium hirsutum
  Clone ID: LIB3146-044-Q1-K1-E10
aaaaaaaaaagagagaggaaagagtttaggggctctgggcatggacgattttcggtgatcggaccgccgttcttttgtcgctggtgaccaccgtatacggcggtcggaagtgtaaaatcgtccccttttaacccttttgctccccttaacctaggtccgtagttgtagcccccaaaaacctcacgaatgctgctggaagtcgaaagaaacctctcggttctaatctctccgatcacctcctcaaaaacggtaaaagttcatatttttttatgtatttatcaacgaataacagtggtaaaagagaaaagaaacatagaaatcacctttctcttgttcgattgcttctcaatattggtttgtgtttgtattgttttgttcttttttgaatattcgg

SEQ ID NO: 21632 - DNA, 379 bp, Gossypium hirsutum
  Clone ID: LIB3146-044-Q1-K1-E11
attctgtcaaaaatgaggcgaaattcgacgtatagcaagagaaaacaaccctagcccgaatcaccatattcctgagacatgagggctttcatcggtgttgtttcaagtatccttttcgttttctatgctaaaataatgcaagcaaatcgatggaaaagagggaaagatttgaaatcacatttagataacttttttgatttcttttctactgtttagaatatgtattgtagtgtgcgtatctcatccccaaaaaaaagagagactttacaatcgaaatacacagggctttatagccaaaatccgaaaagatcaaaacataaaaaataaaaaatacaacttttctttgtttttctatttgctactgctgtggtttgtctgt

SEQ ID NO: 21633 - DNA, 399 bp, Gossypium hirsutum
  Clone ID: LIB3146-044-Q1-K1-E12
cattacatcacattccttactcgctttgtagcaattaagccaatggcaaaacttgtggctgctttcttcttggctctcattgccatctccatgcttcaagttatggtcttggcatcgcacggacatggaggtcatcattatgatcaaaaacattacggccctggaagcctcaagagttaccaatgtccatcacagtgctcgaggagatgcagcaaaacccaataccataaaccatgcatgttcttctgtcagaaatgttgcaacaaatgcctctgtgtgccccctggttattatgggaacaaagctgtttgcccttgctacaacaattggaagaccaaagaaggaggacccaagtgcccttaaaaattcttatttcataatttatgcctaatgcttaca

SEQ ID NO: 21634 - DNA, 336 bp, Gossypium hirsutum
  Clone ID: LIB3146-044-Q1-K1-E2
cccacgcgtccgctgataattccgcaatcggcagctcgggtttattaccatttcctcgataatttatttttctacttgtaatgggtgagtagttggtctttggtcgctgtcatgaagactgttatgttaaacaatatttgctcaattaaggattgattcttttttggtaaaaaaaaatcaatccttaattgggcgaatattgttttactctaacaggcttcatgacagcgaccaaagcacctactactcacccattacaagtagcataaatatattatcgaggaaatggtaataaacccgagctgccgattggggcgttctttgcggacgcgtagg

SEQ ID NO: 21635 - DNA, 419 bp, Gossypium hirsutum
  Clone ID: LIB3146-044-Q1-K1-E3
cccacgcgtccgggcaagaccctggtggggttgaatctccagcactgcaattcaatcagcacccaaaccattgagctgctcgtggaaagcttgtggagatgcgacatccttttctaatcgagagtcgagccactgaacaactacacttctggcgttaaagacagtagaaatatcaatctcgtatggtcatctcccacgggtagcaaaaacattcagcacagtttttccgttcaactaagtagccatgcgggttggctctatgacttggttatttttcctggggacttgggctcttttccagatggcctctatccatctcagttttttgcaggctttctatgtaaaagtctgttgtaaatcaaagcctcccttcaccagaggcgatttcatagccatggttcctggagaatctcatcatc

SEQ ID NO: 21636 - DNA, 85 bp, Gossypium hirsutum
  Clone ID: LIB3146-044-Q1-K1-E4
gttgattttgggttttaatttttgtattgttggtgataaactgataaaaggaaaggaacgaaagtttttgttctttttttttttc

SEQ ID NO: 21637 - DNA, 412 bp, Gossypium hirsutum
  Clone ID: LIB3146-044-Q1-K1-E5
gcaaattcagcagtaaacagcattggcccactcgggcttccctctagacctgttagtttccctctagtcttcaccctgtcaagtatttagctaagtatccatacaggggcaagccatatgttctagctatgctatgtatggtctctgcaaatatgggccaacttgcagattcgatcacccatacatgggatgcccttataattatggtctaagtgtccctttatccgtgttggatacgtctctcttaccatatcaaagaatgtcaccaacagcccatttgtctgaagctcctctgccgtcaaagctctctgatttggcatggaacactgactctgtgagcaagaaacatcagaactcggagattaaaaattcggatgatccacctcctcaacaggttacgtcaccacattct

SEQ ID NO: 21638 - DNA, 404 bp, Gossypium hirsutum
  Clone ID: LIB3146-044-Q1-K1-E6
cccacgcgtccggacgacaacaacaacaaagttcgtagttttagtccatcgacgccccctccgacttcggttaattaccgaaatgctaaacgtagaaaagggattccccagcgagctccaatggcaggactaatcatacaatattaaagctccatagccttaaagtttagacatatacacaatgtgatggccacaatgccccaccacaactctttccctaaaaaagatccggcattgtctcattcccctcccattctcaagtgttttgtaaatagaagcaagcaaaaaacatacaagtgggagaacaaagtggaaaaataagccccacgcataggattagaattgtctaaagatcgaattcgagatcgatgtgaattgaagacttaaatataaatcttttatca

SEQ ID NO: 21639 - DNA, 404 bp, Gossypium hirsutum
  Clone ID: LIB3146-044-Q1-K1-E7
gttccacatcaagtgagaaaacgagtaactctgactcagaggggaaaaaatctgagacatatagtcatgatatgacagaagctatgggcgctgttttgacctataggcatgaattgggaatgaactacaactttatccgtccagacctaattgtgggctcatgtctgcagactcctgaagacgttgacaagttacgaaagatcggagttaaaacgatattttgcttgcagcaagacccagatttggaatattttggggtcgatattggcaccattcgagattatgccaagaaatgtggtgatattgaacacatacgtgctcaaataagggacttcgatgcatttgatttacggatgaggcttccggctgtggttagtatattgcataaggccgtaaatcggaat

SEQ ID NO: 21640 - DNA, 402 bp, Gossypium hirsutum
  Clone ID: LIB3146-044-Q1-K1-E8
cttcaagaaatggatcgtagaagtgcatttgccgttgctttgatttgctttgtggtgaccgctgtcggtggtcaatctccggcagcctcacctactaaagctccgccggcagcgactactcctgccactgctcccgctactgcccctgttagcaaacctaaatcaccggctccaactgctgcccctaccacttccccaccaacttcttcaccaccggctgcggctccggagaagtctgcggcggttccagccccatctaaatctgctccggcttcttctcctccggctgctgctccggtgagttctccaccggctccagtacctgtgagctctcctccagccaaatcgcctcccgttgctgcaccgacgactccaccagagagctcggcctctcctccggct

SEQ ID NO: 21641 - DNA, 405 bp, Gossypium hirsutum
  Clone ID: LIB3146-044-Q1-K1-E9
cccacgcgtccgaagagctgaaactcagttgacaagagaaaacttcaatgacattcaatgtaacatggggacactagaacttgaacctgaaaggaatgaagaaagtgttggaggatggattctaaacgagtctcaatacgatgggcttggactttcagctggaatcgattcttccaaagttgatgcatatggtgtgacaagattaggtcctattaaactgagtcctggggtgaagcacatcctgaaacccagccaaaaggtcgatcaggataactcgaggttgatccattcgactatcccttttgcatctgtgaccgagtgtggcaaaatgttggagactcttaagaaatcaacgaagatttacgggttttaggagtaagtaatatcctcttgcaggtaattttt

SEQ ID NO: 21642 - DNA, 388 bp, Gossypium hirsutum
  Clone ID: LIB3146-044-Q1-K1-F10
caccaacagtatcaattcggtagctttaaaaagtaattttgttcattccccctttgcattcatttcctattttggtgctaaaaacaaagttatcgactgttgtgcattttggtgtgctactttcgtatcattctatggtacactccccgggaagtcctatctttccattaggaacatttgcaagtgaaattggtattgagatttgattcagacttagttaccaccatattgttgttgttcacacactgtgttagaattatttttagcgtcgtctgaatcaagttgtatagtccgtgtatcagggggcctccccagttactgaagcctgtttccctatattctgtttatcatccagtgtattcgtggtgaataaatatcagtcttcatc

SEQ ID NO: 21643 - DNA, 304 bp, Gossypium hirsutum
  Clone ID: LIB3146-044-Q1-K1-F11
cccacgcgtccgaagctatgggtcaatgactgattggagcaagaggctgcggtctagaaattgaacggcttttgcaactactggtgtatgtggctcattggtgcttacatcacatggccgaacttatgcctaacctggactacgtggaatcgatgctttgatgacatattgttatacatgtgccaactgttacacctaagactgtggactgtgttctatccttaaatgactatgataacagccctgctatgaataagctatcatcatgatcaaagaattcgactcctacggtgatggtttcata

SEQ ID NO: 21644 - DNA, 391 bp, Gossypium hirsutum
  Clone ID: LIB3146-044-Q1-K1-F12
cccacgcgtccgcccacgcgtccggttcatttcttcaaatattctcaaatccattgctttctattcatttatagtcataaaaaaaaaaaaaaaaaaaaaaaaaaaaaaaaaaaaaaaaaaaaaaaaaaaaaaaaaaggggtatttgaccatgagggaattccatttggtcatacgtctatttcttcaaaaaaaaatgtcatggaaaaaggttaaaattttcgccatactttatttccttaatacaaaagcaaccgccctcctacaccggataccatagggcagggacttcaatatttgaaggcatccatcaaagctatgtccattaaggtgataaaggtacctggtgtaaaagctgatgatgtgattgggacactggctgcaaggagtgtt

SEQ ID NO: 21645 - DNA, 413 bp, Gossypium hirsutum
  unsure (1)..(413): unsure at all n locations; Clone ID: LIB3146-044-Q1-K1-F2
cggacgcgtggctgcatttataattgcttcaacacaaacagaggaagagatgcttaactggtatcgtgaacgtgtcgtgtggggtgacaaagacctaaggcttaaactcttgagaaaggggattttaactcgcatatatgctccaatggccataatccaggggctaagagagtccggtgtcttcagctctgttattgctaacgcccccactactatttcaaaggacaagtttttagcatccattgatagtagtaactcatcaagagtcgtttcccccacgactcacacttcaagaaagattggtagaagcagacagcaacaaacatctgctaggaaggtgctggaagttgaaactaatgcagctgatgaagcagcagctgttccgccattgtcacccnctgcatggacaatga

SEQ ID NO: 21646 - DNA, 418 bp, Gossypium hirsutum
  unsure (1)..(418): unsure at all n locations; Clone ID: LIB3146-044-Q1-K1-F3
gtaagatcaataccttcttattttggggttggtgaagacgaagaagatatacccgacatggctgattatgaagaagctgacaatcttgttgagactgatgcggctactttacaaccgacatatcttgttgctcaagagcctgataatgacaatattttacggacccgaacctatgatgtcagcatcacgtatgataaatactatcagactcctcgtgtgtggcttactgggtatgatgagtcaaggatgctcttacaaccagagcttgttctggaggatgttagtcaggatcatgcacacaaaacggttactattgaggaccatcctcacttacctgggaagcatgcatccgtacatccatgcagacatggngctgtcatgaaaaagatcattgatgtgcttatgtcacgtggagtag

SEQ ID NO: 21647 - DNA, 410 bp, Gossypium hirsutum
  Clone ID: LIB3146-044-Q1-K1-F4
gcgattacattgtcagagacattgggaattccactcctcgttatatgagatgcaccaccaatcagaggttgtggattttgatgaaagtggtcctgttcgatgttcccattgcaaaggttacataaatcctttcatgaagttcattgatcaggaaaggaagtttatctacaatttatgtgtgccgccagcatttagatacattgcttgaaaacatcccaacaatgtttcagagtagtacaactgctaagtcatgttttggtgctgcaatcaaggttcattggcatcttgtcctgatgagagtgtagtttatgaagctttaaactttgcattgtcctccgaggtattagaattcctagttcaaaacatagcaatttgtcttttataaaagaccaaatttccaattttcaatg

SEQ ID NO: 21648 - DNA, 413 bp, Gossypium hirsutum
  Clone ID: LIB3146-044-Q1-K1-F6
cccacgcgtccgtttctatccaacatccattctttggtcgcaaaatgattaaaatatatatttttttttcaatctaatgttcttcattgatattagtatgttccactttttctttctttcattgttgcagaccatttttctatggcaccacaaaaatcagtggaaactattgggaaaaacttgagagatcaatatgagaagtggcagcccaagtaaggtcaaagttgatcctacagtggatgaagtgaagaaactttgtaatacatgttgcagatatgccaagttagagagttttatttcattacaatggacatggtgttccaaagccaactgcaaatggtgaaatctggctgtttaataagatgttcacttgtttaactgttaggaatcaattcttgttgcttttcttttgc

SEQ ID NO: 21649 - DNA, 416 bp, Gossypium hirsutum
  Clone ID: LIB3146-044-Q1-K1-F7
cccacgcgtccgcccacgcgtccgcttttgctaattttagatgtcaacattttgcttgatgtctataggctgccagagatgcaagatacgataaggaaggtgtgatgaagtttttccatatgttgatcaggagaagatatttttcggatgacttaccaacgccaaatacatggtccgcatctcctgttcagacaacctctcagcgtttagatgaaaattccagtgatgatgaacagctgtacaagcgtacaagtttaagtggtgacccttacaagtacaacatccttcctcctctaccagcacagcgcaatctgactccaccacccacactttaccctcaacagcctgtttccgtgacagagaattacagcctgccaagattctcctttacaggctcccaagaaatcagcggcagc

SEQ ID NO: 21650 - DNA, 416 bp, Gossypium hirsutum
  Clone ID: LIB3146-044-Q1-K1-F8
gggtgaagatggatgcataatgcttgaatttgtgtaaatggtggttccgatgctgaagaaattaatattcacggtttattggaatcactgaaccagagaaaagatgaaagcaagaccataccaacatgtatctcatcggtggttaccaaattgagtgcaaatgggataggaacagtatttggtcggctatttattggagcagctgaaaagattccaccatcagaacttgttgacacaaccggtgccggagatgcatttattggagcagtagtttatgctctctgtgcgggcatgccaccggagaagatgttaccatttgctgctcaagtggctgcatctggctgtagggctttgggagcccgaacgggtcttccacacagaacagatccacgcttggtgaccttcttgtgacatgt

SEQ ID NO: 21651 - DNA, 242 bp, Gossypium hirsutum
  Clone ID: LIB3146-044-Q1-K1-G1
accacgcgtccgtccacgcgtgcgaaaggatgtgcgttaggatcacgtacagggcaagccactggatcggctgttaacactcctgatcgacaaccaattgggaccggagataaaactgctggcctagacctattgggacttcgaagatggaactggcggagatgtactatctgtcttagatgatgaaacaccacgaaatctgaaattgttgttgaatttgaagatactacgtatccgatgtc

SEQ ID NO: 21652 - DNA, 398 bp, Gossypium hirsutum
  Clone ID: LIB3146-044-Q1-K1-G10
ctgacagactccatagtgttaccagaaaatgtggaatttctaggacaaaaaattgatctcactcctattaagggcttgctgacctctgtgcaagacacagcttcatctgttgcaaagaccatttccagccaaccgccattgaagatcccattatcaaacagcaatgctgaatcatggttgcttacaacataccttgacgatgaactgcggatttcaaggggagatgctgggagtgtgtttgtgctcgtcaaggagggcagcgctctcttgaactaaactctgggttccggttcttcttcttcctcagctatttattagagttatctgttgtcttggtttttattaagacagaatgtaagaactatacacttatatgggcaatacatggtcatggactc

SEQ ID NO: 21653 - DNA, 263 bp, Gossypium hirsutum
  Clone ID: LIB3146-044-Q1-K1-G11
cccacgcgtccgtccatttcggaggctctttaagcagctcgaatcgatgctcctaatgcagcacatcaccctgccttgaaaagcaatggaagggtccttagctttggcctagatgcacccatttgtgattccatggcctctgtcttaaaccttggggagaaaaaagttttgaatggtgcccgagatggatttcatggtcttgaagaacaaagagtttcggttccaaacaaaaaggaaaacggtgatgattgctcgagtggatc

SEQ ID NO: 21654 - DNA, 421 bp, Gossypium hirsutum
  Clone ID: LIB3146-044-Q1-K1-G2
cggacgcgtggggaacagttcaaacccttatttttctagctcttggaggcgaaattttgagggaggttttatcttggatatgggagtgcattttattgctggcttgaggatgatagttggttgtgaggtgacctcagtttcggccataacctctcatatagatagaactttacctccgccagacattatttcttctaattttaagctggagaatggatgctctggagtctttgtgatggttgtatcctctagttcacctaagataatttggcgagttgttgggtcaaaaggaaccgtacaagttgagcgtggaaaagtagatggaaagcatggttacttggtttcactatacagtgcagatgggcaatgcaaaagcactttccatccattctgtggagtgcacgaagaattaaaaattttt

SEQ ID NO: 21655 - DNA, 420 bp, Gossypium hirsutum
  Clone ID: LIB3146-044-Q1-K1-G3
gttttcaaggtggatctccgtacatatatccactgtatggattaggcgagctgcctcaggcttttgcacggcttagtgctgtttatggtggaacatatatgttgaataaacccgagtgcaaggtggagtatgacgatgaaggcaaagtttgtggtgtcacatctgaaggtgaaactgccaggtgtaagaaagttgtttgcgacccttcctacttgccaaacaaggttaggaagatcggcaaggttgctagggcaattgctattatgagtcacccaattccaaacaccaatgattctcattctgtgcagattatcctgccacaaaagcagttgggtcgtaaatcggatatgtatgtcttctgttgttcatattctcacaatgttgctccaaagggcaaattcattgcatttgtttcaacag

SEQ ID NO: 21656 - DNA, 420 bp, Gossypium hirsutum
  Clone ID: LIB3146-044-Q1-K1-G4
aaacacagtaacattaccaatggcaaccctgtctagcgtgaacctcgtaaccccaagaatcatagccaatggaccagacgccccaaccgtcaaggtcccatgccttaaccggccttggaaaagggtatccccaatgaagctgcgtgtcgggcctgttagagctgcaccggatggaatatcggagaaggtggagaaaagcataaaagaggcacaagagatgtgttcggatgatccggcgagtggcgagtgtgtggcagcttgggacgaagtggaagagctgagtgcggcggctagccacgctagggacaagaagaaagacgatgatcctttggagaattactgtaaagacaacccggagacggatgagtgtcgtacttatgataattgaaaatgtttggtttttctagtttcttagattat

SEQ ID NO: 21657 - DNA, 415 bp, Gossypium hirsutum
  Clone ID: LIB3146-044-Q1-K1-G5
cgaaagttgaaacacaaaagatcgaagagatggatagatcaagattgcggtctctcaccttgctttgcactttggttcttcttggatctctagcttctactcaggcaaagaagtccaaggaagatctgaaagaagttactcacaaagtttactttgatgttgaaattgctggaaaacctgctggtcgaattgtcattggactcttcggaaaggcagttccaaaaacagcagaaaacttccgagcactatgcacaggtgaaaaaggtgttggaaagagtgggaaacctctccacttcaaaggaagtgctttccaccggattattccaaacttcatgattcaaggtggtgattttacacttggtgatggaagaggtggagaatcaatctatggtgagaaatttgctgatgagaattt

SEQ ID NO: 21658 - DNA, 418 bp, Gossypium hirsutum
  Clone ID: LIB3146-044-Q1-K1-G6
cttgcatcatcaatcatggttcctttcatttatgttgttcttttcttagccatgtctggccattcaagtgccaactattgcttatgtaaagatggagtgaatgagcaaacacttcagaaaaccctagattatgcttgtggagcaggagctgattgtactccaattaatcaaaatggtccttgctataatcccaacactgtgaaagatcactgcaattatgcagtcaatagctatttccaaaagaaaggtcaagctcaaggaagctgtgatttttcaggcactgctactgttagtgttaatcctccttcaaatattccctctacttgcagttttccttccagtggtacaagcacaacaccatccacagggactccgacgacaccgaccacagggacgcctacctcaacaccaaccacag

SEQ ID NO: 21659 - DNA, 417 bp, Gossypium hirsutum
  Clone ID: LIB3146-044-Q1-K1-G7
tgtaattggtggaggaatagccaactttactgatgtgggtgccacgtttaatggcataattcgagccttgaaggagaaagaatcaaagctcaaagcagccaacatgcacatatatgtaaggagaggaggtcccaattaccagaaggggcttgcaaaaatgcgggcacttggagaggaaattggcatcccaattgaggtttatggtcctgaagctacaatgacgggtatatgccaggaggccatccagtacatcactgcagctgcataagttgtgggttcttcaatacaatctctcagtttgttttaccttttttttttttgttcccggtgggacatgttcattagatttccattgaaattgtgctacaaacttcataaaataatgtttagttcatggtacggcaccatctgtaattt

SEQ ID NO: 21660 - DNA, 405 bp, Gossypium hirsutum
  Clone ID: LIB3146-044-Q1-K1-G8
gttgagttgtacgttggctttcaacttgattttgtgaattggttaagtatgcctcggataggctgtggaatcttgacaggcagtatgccaacaatatataactaccaagcttgtcatgttatgtaaatcctcatagatgctgttcaggatagtcagagaaggtagaaagtagactacaatttactttttctgtggccattcggagttcagtgttctgaagatatatgcagctaaattggaccttgtgagcagttttctatgtggtgtttgaagtttgaaccaagtcggggataaaatatttccatttcgccaattgttgaatttaagaattcttttttggtttattgacacaaataatagtcaggtgttgagaatttgtgcatccgaacctggatgactgtagca

SEQ ID NO: 21661 - DNA, 379 bp, Gossypium hirsutum
  Clone ID: LIB3146-044-Q1-K1-G9
aatgttttcttctccgaagaaagaagatgatgattcaggccaaggctttcgttttgacaagtctctccaggaactgagagatttgcggtctcagcttcattacgctgcggattactgtgaaacaacatttttaaagtctgaagagaagaaaactgtggtggaaaacacaaaagaatacctatgcaaggcacttgtcactttcgttgatcatctgggaaacgtctctgctaatctaaatcactccatttcccagactaattcattttccgaggctgagctccgcatcaattgcctccatcaaagacttctctcatgccaacaatttgctcacaagcttgctctaaccagagtcaaatggaaccccattttccaagacata

SEQ ID NO: 21662 - DNA, 376 bp, Gossypium hirsutum
  Clone ID: LIB3146-044-Q1-K1-H1
cccacgcgtccgcaattactaatattaaatttgctctcaaaattaaaactataatgataaaatgttgagaacttttatttttataatacaatattgggggagatacgaagggaaggggataacagaaggaggagaaacaaagaacaccaacctggctgttttattttataccttaatgatttgctttcttaaaaaaaaaataaaaaagtaaaaacaaaaagaaataccacaaaaaataaataaaaaaaacacattaaaatcgatacacaagagccttgccggtttgctaccactatttacgaaaaacatggcctacggtcatgattctgctcgcgaggctgagatcattgaggcgtctacactaaccatcgcccac

SEQ ID NO: 21663 - DNA, 407 bp, Gossypium hirsutum
  Clone ID: LIB3146-044-Q1-K1-H10
cggacgcgtgggtaatcggctcgtgttaaaaacgggacgtccttctaaaaaacaaaaaaaaacttgcaacttctcatttctttcaatcggatcacacttaaatgtcaaattgaattcgtatttttgaaaatcaagacaacatgtgtttaataagataccaattttgggcgtcgcgagggtgctaataccttcctcgcgcgtaaccgactcccgaaccctaaattttctctggattttaacgtagacctaaactcaaccttttatttgttttaataagagatctaataggtgtccgatcacacctaggaaaaaggatcggtggcgactccctgtttatttcaaaaatcaaacgtcaaatttcaaactttttttcaataaatcgccacaattagcgaccaagctaagct

SEQ ID NO: 21664 - DNA, 218 bp, Gossypium hirsutum
  Clone ID: LIB3146-044-Q1-K1-H11
cggacgcgtgggcggacgcgtgggcttggatgatcaaggcactggcctgcttttaagcaaagtaggacatcattggcttgtttatggttctaagttggaagaagatattggtgctgtactgtaacttgtttcggtaacacgggatttgatctctgagctcgcctgcatgccaatggttcgctaacatgaattactgcatgtacgtacttttttgagat

SEQ ID NO: 21665 - DNA, 409 bp, Gossypium hirsutum
  Clone ID: LIB3146-044-Q1-K1-H12
ccggcttcgtggagaagttgaactaaagcatgtagacttctcttacccttcacgtcctgacgtcccaattttccgggaccttaatctccgcgcccgagccggaaaaacccttgcccttgttggtccaagtggatgtggtaaaagctcggttattgcacttatacaaagattttacgagccctcatccggacgtgttatgatagatggaaaagacataaggaaataccacctcaaatcgctgagaaaacacatttcaatcgttccacaagagccttgcctctttgctaccactatttacgaaaacatcgcctacggacatgaatctgcaagcgaggctgagatcattgaggcagctacactagccaacgcccacaagttcatatcctcaatgcctgatggttacaaaacg

SEQ ID NO: 21666 - DNA, 424 bp, Gossypium hirsutum
  Clone ID: LIB3146-044-Q1-K1-H2
cggacgcgtgggcggacgcgtgggcggacgcgtggggaaatcccaagaattccagaaatccgacaaaggccacagatcccacaaatcccacaaattccactaatcccacagatcccacaagtcccacagatcccacaagtcccaaaaatcccactaatgccaggacagtcgggatgtgagagtggagagtgttgccgtcagggttgtggtgggacttgtgctgagtgtggtcagcccaggtgcgcatcaggatgttgccaggctgaaactgtaaagagcaaagggatagaagaggttatggacagtgaacccagtccaccaaagtagagagatgataccatattaagatgaaataacgaggaagagttggttgtcgtcttattaattatacaaaataagaagtaatgatgttgcagaagggttt

SEQ ID NO: 21667 - DNA, 392 bp, Gossypium hirsutum
  Clone ID: LIB3146-044-Q1-K1-H3
aaaaagcttccccaaaattgagacgataaggtttcggattttgggcttgcaaaattagctttggatttaaaaatccatgtaaccacatgtgtgatgggaacctttggatatatggctccagagtaggcaacaagtggcaagttaactgaaaaatccgatgtttatttctttggtgttgttctcttggagttaattaccggacgcaaacctgttgatgattcttagccgttaggtgacgagagcctggttgaatgggctcgatctttgcttgctgaagcgattgaacattaagattttgatatgttggtggatccgaggctggaaaagaactacgtggatcacgaaatgtttcgaatgattgaggcagctgctccttgcgtgtgacattcagc

SEQ ID NO: 21668 - DNA, 415 bp, Gossypium hirsutum
  Clone ID: LIB3146-044-Q1-K1-H4
cccacgcgtccgaaaaaagaaaaacaaaaaacaacctttcatgggttccaggaagggcaacgacaacgatggtgctagccctgggaaaatatttattggaggcttagctaaagacacaactctgggttagctgagctttttttttacgtgttttttttgttgatgaatgttcctcaaattactgacttttttttctgggttcttgttggtggggatttatttttcagagacgtttactaagtattttgaaaagtatggggaaataacagattacgttataatgaaagatcgacatacgggtcggccccgtggttttgggttcattacctttgcggatccttctgttgttgacactgttatgcaagaggatcatgttattaatggcaaacaagtaagcaaaagtttcactttccat

SEQ ID NO: 21669 - DNA, 406 bp, Gossypium hirsutum
  Clone ID: LIB3146-044-Q1-K1-H5
ctctaattctaaagctaagagttttaagttaacgaagcatttgggtcgtttcgaagtaatggaaacttcaggaaaagtaaagaagggagccggaggaaggaaaggtggtggcccgaagaagaagcccgtttcaaggtctgtcaaagctggtctccagttccccgttggtaggatcggccgttacttgaagaaaggaaggtattcacagcgtgttggaaccggagccccggtttacttggctgctgttcttgagtacttggctgctgaggtcctggaattggctgggaacgctgcacgtgacaacaagaaaaacaggatcatcccaaggcacgttctacttgccgtgaggaacgacgaagaattagggaagcttctcgccggcgtaacaatcgctcacggtggtgtg

SEQ ID NO: 21670 - DNA, 326 bp, Gossypium hirsutum
  Clone ID: LIB3146-044-Q1-K1-H6
ggctgaggtcctgctttccctttgcaacgcccttgaaggaaattgaaggttttaatcgacaggaataagggcgattgccgaagtaaataggcaattacacttggcatggttttgagcaattctttgaatctcgtttaagtttatattggtgtttgttgtattgttttttaagcggatatagctacaatgatgactgtttttttttaaacgaaactttaataataatataaaaatatgagtttgaaaaaaattaaaaataaaaaaaaaaaaaataaagaaaataaaaaaataaaaaaaagacaacaagaaaaacagtttaataaaaa

SEQ ID NO: 21671 - DNA, 414 bp, Gossypium hirsutum
  Clone ID: LIB3146-044-Q1-K1-H7
cccacgcgtccggcaatcaatgttgtttgctcatcaccagaggcagctgcaagggtaaagagccaactgaaaagaatagctcgaccaatgtactcgaatcctcctgttcatggggcaagaattgtcgccaacattgttggggattcagctctcttcaaggaatggaatgctgagatggaaatgatggcagggagaatcaagaatgtgagacataaattgtttgatagtctttcttccaaagataaaagtgggaaggattggtctttcgttcttaagcagatcgggatgttttcgttcacaggcttaaacaaagctcagtgcgataatatgacaaacaagtggcatgtttatatgaccaaggatggaaggatatcacttgcaggattatctttggctaagtgtgaatatctagca

SEQ ID NO: 21672 - DNA, 225 bp, Gossypium hirsutum
  Clone ID: LIB3146-044-Q1-K1-H8
caaagttcgaaggatttattagcctatctgttctggaaaggagatctgcaagtagatattatttcttccaatttattaatgtttttcttgggagcataataaccggaactgcgtttcagcaacttaatcattttatccaccaatctactagtcagataccaaagacaattggggtctcaattccaatgaaggcaacattcttcattacttatataatggttgatg

SEQ ID NO: 21673 - DNA, 259 bp, Gossypium hirsutum
  Clone ID: LIB3146-044-Q1-K1-H9
cccacgcgtccgcccacgcgtccgtccacgcgtccgcccacgcgtccgggatcgcaattggttttccgtctctctggaactggttcagaaggtgcaactatccgcctctacattgaacaatatgaaaaggactcattaaaaactggaagagattcccaaggagcgcttgctccttttggggaggttgctctaaaactttctaaaatgctggagttcactggccgatccgcacctacagttattacataaactcataccc

SEQ ID NO: 21674 - DNA, 404 bp, Gossypium hirsutum
  unsure (1)..(404): unsure at all n locations; Clone ID: LIB3146-046-Q1-K1-A1
gtgattctttaagcaagggtgcatttgtccccaatgacatcagtattgctggttctggccatgcaagttttattcttcttactgggcctaatatgggtggaaaatcaattcttcttcgccaagtttgcttggctgtgattttggctcaggtaggagctgatgtccctgcagaacaatttgaactatctcctgttgaccgaatctttgttcggatgggttccaaagatcatattatggctggacagagtacatttttaacagagctttcagaaactgcattaatgctgtcctctgcaactcaacattcacttgtggcgttagatngaactggacgtggaacatcaacttctgatggacaagccattgcggaatcggttctagaacattttgtacacaaggtgcag

SEQ ID NO: 21675 - DNA, 417 bp, Gossypium hirsutum
  Clone ID: LIB3146-046-Q1-K1-A10
cccacgcgtccgcccacgcgtccggcgatggtgttggtcttttgggtattgcttgggcttttggtggcatgattttcattcttgtttactgcaccgccggtatctcaggtggtcacattaacccggcggtgacatttgggttgtttttggctaggaaggtgtcgcttataagggcggtggcttacatggtagctcaatgtttgggtgctatttgtggtgttgggttagttaaggcattcatgaagagtgaatacaactcccttggcggcggtgctaacacggtggcgactggttataacaaagggactgctttgggagctgagattattgggacattcgtgcttgtttacactgttttttcagctactgaccctaaaagaagtgcccgtgattcacatgtacccgtgttggctccac

SEQ ID NO: 21676 - DNA, 411 bp, Gossypium hirsutum
  Clone ID: LIB3146-046-Q1-K1-A11
cccacgcgtccgaggagctgtgacacccgttaaaaatcagggttcatgcggatcatgctggtcttttagtacaacaggagccttggaaggagctaactttttggcaactgggaaacttgtgagcctcagcgagcaacagctcgtggattgtgatcacgagtgtgatccataagaagcaggttcatgtgattctggatgcaatggggggttaatgaatagtgcttttgagtataccctcaaagctggtggactaatgcgtgaggaggactacccttacaccggcactgatcgagggacctgcaaatttgacaacaccaaggttgctgccaaggtggccaacttcagtgttgtttctttagatgaagatcaaatcgctgctaatcttttcaagaatggtcctcttgcagtggc

SEQ ID NO: 21677 - DNA, 424 bp, Gossypium hirsutum
  Clone ID: LIB3146-046-Q1-K1-A12
ccgccgtcatcggtagtgtttctctgcttcgggagcggggggagcttcaatggggatcaagtgaaagagattgctttcgcgctagagcagagtgggcaccggttcttgtggtcattgcgccaacccccacacccatccaagggtccgagggcaagcccaaccgactacgatgatgcatcggaggttctgccagaagggtttttagatcgaacgcatggcataggtaagatcattggttgggcaccgcaagtggcgattttgggccacccagcgactggagggttcgtatcgcactgtgggtggaactcgacgctggagagtatatggttcggagttcccatagcggcgtggccagtttacgcagaacaacaactgaatgcgtttgaattggtgagggagttgggattagcagtggaaattaaaa

SEQ ID NO: 21678 - DNA, 408 bp, Gossypium hirsutum
  Clone ID: LIB3146-046-Q1-K1-A2
gcggctaggtttatctggttttgaagcagatgaaaccttatatagcaatcaaggggtcatctctgaactggttggtactcgatctattacttttgccataaaccttggaacttgtagggaccatatccagaggcttgcatgtggaataaagaatctatctgaagcgtccttgttgtcatttgaaaaaataaaaggccaaatagaggaccattgtggttcagcaccatttactgatattactatgtgtcttaatcctagagaagccttctttgcaagaaaaaggaaagtgtcaattggagagagccttgggaaaatttgtggggaactcatatgtccatatccgccaggtatacctgtgatgatcccaggtgagaccattacaaagaaagctctggagtatttggtgct

SEQ ID NO: 21679 - DNA, 414 bp, Gossypium hirsutum
  Clone ID: LIB3146-046-Q1-K1-A3
gcttgtttcctatgcaactgaagtcacagctgttgttgagaaaaacaagatcaagaagctcactggggtgaagaccaaggagcttctggtttggatcacactcagtgatatctatgttgatgatccaccaactgggaatatcactttcaagacacctgctgggctgttcagaactttccctgtatcagcgtttgaggttgaaggtgaagttaagggtgctgttaaggacaagaaagaagaaaaggataatgtgaagcctgctgctgtggaagcagtgaaagaggtctagagtagtgagactagaattaaatttccaaattccatccatctgcggggttgtttttggacttgctatcttttaacaagcctcttctattaatatcatcaatagcagcaatcaataaaaaataacag

SEQ ID NO: 21680 - DNA, 346 bp, Gossypium hirsutum
  Clone ID: LIB3146-046-Q1-K1-A4
ctttccagaggctggtgagggaaatcgctctagatttcaagactgatttaaggttccaaagcagcgccgtcgctgctcttcaagaagctgcggaggcttatctcgtcggattgtttgaagacactaacctttgtgcaattcatgctaagagggttactatcatgcccaaggatatccagcttgctaggaggatcagaggtgaaagagcttagatcgtttgtatttacttgattgattgtgaaattaggttagatctagtgtttggtatccgtttttggaatttgctttttcgcaaaagtccttatgtaaacggtcgtctttctatggagttctcatattttcgttt

SEQ ID NO: 21681 - DNA, 406 bp, Gossypium hirsutum
  Clone ID: LIB3146-046-Q1-K1-A6
agctcacaccgatataagtgcactctctttcattctccacaacatggttcctggcgtcgagctcttttaccaaggcaagtgggtgaccgctaaatgtgttcccaactccatcatcatgcacattggagacaccatcgagatcctcagcaatggaaagttcaagagcattctccacaggggtctggttaataaggagaaggttaggatctcatgggcagttttctgtgagccaccgaaggataagatcatccttaagccactcccggagactgtctctgagaccgaacctccactgttccctcctcgtacctttgctcagcatatcgagcataagctgttcaggaagacccatgataatctgtccaactgaaactagtatttttatttgtcgcgataacctatttct

SEQ ID NO: 21682 - DNA, 409 bp, Gossypium hirsutum
  Clone ID: LIB3146-046-Q1-K1-A7
cccacgcgtccgctagatttcccgcgacttgttcgctatcggtctctcgcccgtatttagccttggacggaatttaccgcccgattagggctgcattcccaaacaacccgactcgtagacagcgcctcttggtgcgacagggtcctttttccatctttttggctggtaaaagagaagtagaaatattattctgaaaatgtcttgttctctctctctccctatatatataaatattggtttactgtctgagctgatcttgttaactggcgtacaaactaccttcggctgcaaatcagtcattgtattaactttggtgtttgtactaatgtggaactggtatatgtattattttcttacagagaagtgttgtaaaacaagttcttgaaatggaaattgtaagaaacatgtt

SEQ ID NO: 21683 - DNA, 296 bp, Gossypium hirsutum
  unsure (1)..(296): unsure at all n locations; Clone ID: LIB3146-046-Q1-K1-A8
cagactcttntgttattttacccgttacttgtacacactcgcactctcacccgaggaggagcttttactgaatttaccaccccatctcgactacattcacaaacaacccaactcgtacactactcctttatgatctacacgatcctttttccatattattccctgtcataaacagatattgaaagatcatcctaaaaataacatctttcatctctctccttatatatataaattatagaaatactgtcagatctatatcttgttaactggcttacaaactacctttagctgcaaat

SEQ ID NO: 21684 - DNA, 412 bp, Gossypium hirsutum
  Clone ID: LIB3146-046-Q1-K1-A9
cccacgcgtccggaaattagtgaagtgggttattgcaagtaacattattgacaagaaagactttgaagctgctgataatcttgagaaaggcaaagttcatggggctgctgatttcattttatataagctaaaagaggtgagaaagatcaagcaagaggatatttcatgcgctatgaaggatgcaggtatcggaattggacaaaatggttggcggtatttatttgtttatactggttaatttgacggaattttaggcctggaagtagaagataacccccttgaacatacagaacattggacccttttaagagaaaaaaaaaacctaattaattacaaatgttaaggatcttattaatagggaattaaatgagaagagaagagaaaaaacatataatttcattgaaattgaaac

SEQ ID NO: 21685 - DNA, 416 bp, Gossypium hirsutum
  Clone ID: LIB3146-046-Q1-K1-B1
cccacgcgtccgcccacgcgtccgctgaaactggacataatgaagatgctgaaggatcaatcaatgtagcaggggatgatgagcagcaaaaggagagttcagataataaagtcgatactgatttagtatcagatactctgcctcatgtagggctttccgaaactgaaaccgaagaggaagctgaacataatatggatcaggaacagcattgaaagccggggagggacattgatgattggaagataagttttttttttttcctcatgaagttttgtatgttttgataagagagagagagagagagagagttgctgatagccatagaaaggtttgaaatcacattgaacgccttattgcaggatgttggcccgtgacttttagagttgtttattataaaaccatgacgtttttttaaa

SEQ ID NO: 21686 - DNA, 410 bp, Gossypium hirsutum
  Clone ID: LIB3146-046-Q1-K1-B10
ggcaatagttcgtttgcgatttcctttgggttgaaggagaaaagtaaaaggggtatttttgatgtagaatttgatacctccaaagatggaaagtatggtgatttgaatgaaaaccatgtggggattgatgtgggtagtcttgtttcagttaaagtgagaaatttatcatctgtcaatttggtattaaacaatggggaaaagttgcattcttggattgattatgaggcaacttcaaagagactagagattaggttgagtgaatctagtagtaccaggcctaatgaaccattgctttcacactcaatcgacttggccaccctgtggaaggatgaggaagtgtttgtgggcttaagctcttcaaatgggaactcttctcagacatgctttattcacttgtggagctttaagct

SEQ ID NO: 21687 - DNA, 382 bp, Gossypium hirsutum
  Clone ID: LIB3146-046-Q1-K1-B11
cccacgcgtccgggtcaatgtcataatttgttgttgaagtgactcacagatatgaatcagggtccaaacttttcctgcttgtgccttttattgtgatagaattgacccagcaatggagtttttctgatggaatctgatatctggccagtgtttcctgcttaacatgataaaggctcctgtatatgaactttcttttcttttctttataatttgttttaagcatagctttaatggggatgggttggaaagttactcccaaatcctccaaaatgtacactaaaatactcttttgtagaaaattaaaatgaacatttattatcattagtttgtaaaaaataatctgttattacaatctatttaaacattgtgtttttttatacat

SEQ ID NO: 21688 - DNA, 425 bp, Gossypium hirsutum
  Clone ID: LIB3146-046-Q1-K1-B12
cccacgcgtccgaattttcatcccacatacatcactcttctcccacccacccaaccactttcctttctatcccaccattttctctttcttttgctttctaaaacatggccaaaacactacttaacaaacctctcattaccttcttcttctttttcttcttcagcttctttattcaaaccaagcaagataacccatgtccgtatccatgtttcccaccaccaacaggcaccggcggcggaggcggcggcggcacagtgacacaaacacctccagctagttactcaccaccctcccaaacaggagcataccctccacctacagggaacttaccatattactatccaccaccaccttatggtggaggtaattctttatatggtcagccccctcctgaccctatcttgccttatttcccatactactat

SEQ ID NO: 21689 - DNA, 410 bp, Gossypium hirsutum
  Clone ID: LIB3146-046-Q1-K1-B2
gttgattcaagtgacactgatagaattggaatagccaaggaagaatttcatgccattttagaggtattcttatgtctatactggctagtcgtgtttgcatacagagattgagcagggggtgacacaagcaattattcgctctgctattggctttaagagggacccatggcctaaggtttcggacaatgcaaaggaccttgtaaagaaaatgcttaatcctgatccagagcagcatcttacagtacagaaagtgcttgaacatccatggctacaaaatgccaagaaagcacccaacgttttgttgggtgagactgtgaaagctaggctcaaacaattttctataatgaacaagctgaagaagagagctctaaggggccctggtgctggaactagctctaacttacctcctg

SEQ ID NO: 21690 - DNA, 339 bp, Gossypium hirsutum
  Clone ID: LIB3146-046-Q1-K1-B3
aaacgttgcttgggtaattccaactgtacgtctaaccacactaaatcaaacgacgtcttttttaacttagtgttgatctgactttatgagctgacaaaatcatactcttaatccagagaagtaataagtactgaaattttaggagttaaatgggctcaagttcgtaactcacgagttttgacgaggttaatttcggcctaaagctgaaaatgggtttagttggctaaagtttgggacatgttggtatttgataaattaattaaggtaaatgggtgaaaaggtgggtgatgtgattgaatatgggaagtggaatatatattaaagcggggtggttgaaaa

SEQ ID NO: 21691 - DNA, 408 bp, Gossypium hirsutum
  Clone ID: LIB3146-046-Q1-K1-B4
gtaagggtacgaagagagcagttctggtgtgattcaactaccccaagacccaattcagcgtggggtggatgcatcaatgatgtgaaagccataagaggtgtgatcctggacattgggtttaaagaaagcgatgttaatgtcctcaccgatgcgccagggtcgccggttctgcctacgggtgtaaacattaaggatgcactcaatagaatggtgaacaaggctaaagcaggagatattctatttttctacttcagtggacatggaacacgcgttccaatctttcaacctggccagcctttcaagcaagatgaagcaatcgaggcttgtgatttaaatcttgtcaccgatgtggacttcagacgtttagtttatcggctaccagaaggagcaagctttacaatcctatca

SEQ ID NO: 21692 - DNA, 409 bp, Gossypium hirsutum
  unsure (1)..(409): unsure at all n locations; Clone ID: LIB3146-046-Q1-K1-B5
gccttanaattaattgctgacagtttgttttgaagagctaagtctgccacaaccggtgtgatgcttaatacaaaacttacagcaatcgagtatgatcaaggaataggacaagaagagaaagaagattcattactgcaagacaagactatttaccagaggctaataggcagattgctatatttaacacacacaaggccggatataacatatgctgttcattgcttgagtcaattcatgcaatatcctaaggtctcacatctgaatgctgcactaagggtggtcagatatattaaaaatagtccggggcagggaattttattaagttcttcaagctcttgtcaacttattgctttttgtgactcggattgggcctcatgtcctatgtcccgaaagtcagtcacaggttttt

SEQ ID NO: 21693 - DNA, 433 bp, Gossypium hirsutum
  Clone ID: LIB3146-046-Q1-K1-B6
aaaacccggcccgacccacgcgtccgaaagatgaaatgcaaactagagaagttcttgatgaacatggatggcttcataccggaaagatatgtctataagcatactggtggccatctaaagattattgataggaagaagaacatttttaagctggctcatggagagtacatagctccggaaaagattgaaaatgtatatgctaaatgcaaatttatagcccaatgttttatatatggagacagccttaattcttcattagtagcaattgtatcggaggaccaagatgctcttaaagcatgggcttcatctcaaggcattaagtacaaagatttagaacagttgtgcaatgacccaaaggcaagagctgccgtacaggctgaaatggatgccgttggaagagatgctcagttgagaggctcctaattatcaaaat

SEQ ID NO: 21694 - DNA, 391 bp, Gossypium hirsutum
  Clone ID: LIB3146-046-Q1-K1-B7
cggactcttgtttcgtcccacgctttcctatcacccactacccgactttcacagggcagatctgtttgttctagttgttcggctgtttctatcctctaagtttcatgtctgatcttgacatccagattcctactgcctttgatccgtttgctgatgcaaatgctgaagacgctggtgctggtgccaaggaatacgttcacattcgtattcagcagcggaacggtaggaaaagcctgaccactgttcatggattgaagaaagaatttagctataacaaaattctcaaggacctcaagaaagaattttgttgttatggcactgttgtccaggacccagaattagggaaggttattcaacttctaggagatcagaggaagaacgtctccacttt

SEQ ID NO: 21695 - DNA, 413 bp, Gossypium hirsutum
  Clone ID: LIB3146-046-Q1-K1-B9
cccacgcgtccggtttggagacatgggcatcacatttggcttacatccaagatggtcaattgaagagatctgcgaagttaacagaaattaatgagttgaaaagctcagaaaatttgctctctgttgttgaagcctggcttcgctctgaaaccaagtgcgagaaaaagaaaccgtccaattcccctgcccaagtccagaagtcctcgccttttggtacttctcctttcatgtcgtcgaggcacatggcatactaccgttgatctttctgaatccagctgtttttcaataatttttgaaggccaaaaccagatacacgagcggaaaactttctttctagtcatcttctattaacgtggagttggccattgtggatttatatacttgttagcttgcggttgcctgatggatggcta

SEQ ID NO: 21696 - DNA, 410 bp, Gossypium hirsutum
  Clone ID: LIB3146-046-Q1-K1-C1
cccacgcgtccgcccacgcgtccgcgacgtttttatacaaggtggatcgtaaatttagggtggcacatcacttataaatcaggagccttttcttccttgaaatcaaaataaataggagacacaggcttggaagggaactaagctagaggtagagagaaagaagggagttgccaaaatgtcgtcgttcttgcagtcatttctggatcccaagaaaagctggttggcagctctgcacatgaaatccctttccaagcgcctccgcaaatacggccttcgctatgacgatttatacgaccgttactatgatttggatatcaaggaggcgttgaatcggctgccccgtgagatcgtcaatgcccgcaaccaacgccttaagcgttcgatggacctctctatgaagcacgagtatc

SEQ ID NO: 21697 - DNA, 409 bp, Gossypium hirsutum
  Clone ID: LIB3146-046-Q1-K1-C10
gcgtaagcgtgccgttgtaaataatccaattctaatcaaggggacttactagcccatacccggatgcttaaatatgttggttggccttcatttgggttcatcatatgatatctaataactatataaactggaatatgatggatcatgcatcgatgggatactatgatttaatatcttcttatattctaacagagtgaaattgctatttgctctctgattgtggttacatgtgatgatgagtgtttcctatagattgatgcaaagaaattatcaacacgttatgaatctaaatcctagcagtagttatatgaactggaatatgactgaatatgcgtatttcagcagagggatattactatatactctgatttctttcattcatatagactaactggttgctacatgttac

SEQ ID NO: 21698 - DNA, 416 bp, Gossypium hirsutum
  Clone ID: LIB3146-046-Q1-K1-C11
cccacgcgtccgcccacgcgtccgcggacgcgtccgcccacgcgtccggtagcccatcaaggaagcagctctcggaaacattccaaccattgctttttgtgatactgactcaccaatgcgatatgttgacattggtatccctgccaataacaagggaaagcacagcattggttgccttttctggctgttagctaggatggttcttcagatgcgtggaacaattgctcctggacagaaatgggatgtcatggtaaaagagaacacaaccattatgttgtgattttgatgtttctgagatttgcacattcttatgcgtgagttgtatgtatgcaggttgatctattcttctacagggagcctgaggaagctaaacagcaagaagaggaggaagcaatcgctgctcctgattatggaat

SEQ ID NO: 21699 - DNA, 303 bp, Gossypium hirsutum
  Clone ID: LIB3146-046-Q1-K1-C12
ctcctgctgatgctgactatggtgaagctttttacgtatttggaaagccaaaaacagacacggagtttatgccatacaatggggatggattcaagctgtcgataccatctaaatgaaacccaagcaaagaggtggagttcccacgtcaaatgctgaggtatgaggacaactttaactccaccagctattagagcgtaatgatcactcccaccgacaagaagtccatcaccgacaacagttcccctgaagagttactctcttcagaggatatattttcttggaaaacaagcttacttagataaa

SEQ ID NO: 21700 - DNA, 406 bp, Gossypium hirsutum
  Clone ID: LIB3146-046-Q1-K1-C2
gttttcccagatgggaagtctgcctgattgaattgatagccatatcaaagagcctgaagcagatacagggttagttgcagtcttttgcatctttcttaacttgttcttttatacgtggattgggaaaattggtctatttgctttttcaggtttccgcttgctcagcttcatgcagtgagaaaacctagtcctaagaacaaggatgcctgtgacaccgaggatgatgaggatgaggaagatgaagcaggagatgatcaagatgaagatgcagatgaggaggatgcatctggtgaagatgaaggagatccagaagatgaacccgaggccaatggggatggtgctagtggagacgaggatgatgaggacgaggatgatgacgatgacgacgacgatgatggtgaggaag

SEQ ID NO: 21701 - DNA, 409 bp, Gossypium hirsutum
  Clone ID: LIB3146-046-Q1-K1-C3
cggacgcgtggcggacgcgtgggtgttgttgcacttatggtctatgacataacgaagaggcaaacctttgataatgttcaaaggtggcttcgtgaattgagggaccatgcagattctaacattgtcatcatgatggctggaaataaatccgacttgaatcatctcagagctgttaccgaagaggatggtcaagctctggctgagagggaaggtctttcatttcttgagacatcagcactggaagcaaccaacattgagaaggcattccgaactatattgactgagatctaccatatcataagcaaaaaggcattggcagcccaagaagcagctgctagtaccgcaattcctggccaaggaactaccattaatgtcactgatacatcaggaaacactaagagaggatgct

SEQ ID NO: 21702 - DNA, 403 bp, Gossypium hirsutum
  Clone ID: LIB3146-046-Q1-K1-C4
ggaagatttctcaccgacttcaatcatttcaactgatgctggacaagaggagggttcaaaaaggaagagagggtatgatgctgatgacatatctaggggtgctgcaaaggctcacaagtttttaaaggagtttgctgagctgccattggagaccatggacctgaaacaggctctgcaacaagtaaccaagctaaaggatgacttacaaaaagatgtaaacaactctgagtggcttcagcaattcttctagatttggttaaattaaagttgcttgtgttggaatactgaattggtaatggaagcagctgctgaactggttttgtcttcattttttacgtgggctgtggggggcatgaagccatattctaggccgctttgtaatttatttcatttcctcattctt

SEQ ID NO: 21703 - DNA, 408 bp, Gossypium hirsutum
  Clone ID: LIB3146-046-Q1-K1-C5
gcggaacaagctcgagagtaccgagttctcgttttcccggttcctgactccctacttggcgaattatgatggttgggcgctgtttatcgactgtgatttcctttacttagctgatataaaggaattaatggagttgattgatgataaatatgcgatcatgtgcgttcatcatgattataccccgaaagagaccacgaaaatggatggtgcagtgcagactttgtatcctcgaaagaattggtcctcgatggtgttgtacaattgcggtcatccgaagaacaagggtctgactccagaagttgtaaacaatcaaacgggcgcttttcttcataggttccagtggctcgaagatgatgaaatcggatcgatcccgtctatttggaatttccttgaagggcataacaaggt

SEQ ID NO: 21704 - DNA, 404 bp, Gossypium hirsutum
  Clone ID: LIB3146-046-Q1-K1-C6
cccacgcgtccgcccacgcgtccgaaattttggtaagtctcaaatcacttgtatctctgagttcccgatccgctgccgtagcactacttgttttggtggtttcagtggcagtgcagacccatactacaaatgcacaaagctgcccgaccgagctgacgagcctgaacgtgtgcgcacctttcgtggtgcccggtgcagctgtggctaaccctagcattgactgctgtaacgcactccaatcggtgcaccatgattgcctttgcagcactctaaggatcgcttctcgactcccttctcaatgcaatctcccaccactcacttgtgcttgaaagaaaagcagtggtgctgcatgcttaattgggtaggaaaatctaataacgccatggaatatggataccgccctg

SEQ ID NO: 21705 - DNA, 400 bp, Gossypium hirsutum
  Clone ID: LIB3146-046-Q1-K1-C7
cgataacaatcgaagctctgctaatgcctcatctaataccatttgggtcccatcaaatgctcgaggtgctcatagacttccacctggacttgctaatgctgtatcaaactcatacttacacttattgtgacgcaagccgaatgacgactcgaccaacgcttcaaagtatcctgccacatttactgtcggctatactgaacgatagaatattgatgcggctattgaaacgggaattttaccatgcttctctcccatcacgattgtcattcaactgaatgggctgcgttttagtggtcaaagcaggcatcacatgtgagtgttcatatgcatactcaatggcggtctgcctagaggttttcgcacactgatatgctcgctgcatttgactacatattcatct

SEQ ID NO: 21706 - DNA, 396 bp, Gossypium hirsutum
  Clone ID: LIB3146-046-Q1-K1-C8
cttggctttgactgttgaaaacttccttgagcgtcgtttgcaaactctcgtgttcaagactggtatggccaagtcaattcaccatgcacgtgtgttgatcaggcaacgacacataagggtcgggaggcaggttgtgaacatcccgtccttcatggtgagggtcgactcccaaaagcatattgatttctctcttactagtccgtttggaggtggccgccctggaagagtgaagagaaagaaccagagagcagctgccaagaaggctgctggtggagatggtgatgaagatgatgaagagtaaaccttaggctactatcaaccaccactaggaaccctttaaaagcctttgtttggaacttacaatatcctccattggtagacatggttttgagtttt

SEQ ID NO: 21707 - DNA, 410 bp, Gossypium hirsutum
  Clone ID: LIB3146-046-Q1-K1-C9
gtggctgcaagcggtaatgaagttgttaaacaatcattaatggacttacgagtcgatgagctgattctacaagttttgagtggacaaactcagggaagcattcaaagtttgtatgatgctatacgtgttttgttaacctccgatgataatcgggttgttgcttccgaagtttatggttatgcacgaagatttgcgaaaattggaattgcaaaagctcttgtggaaactcttcatggggggattagttcacctagtcttgtttccgctagcatagcactaaaagccgttgctgtcaatgatgaaatatgtaagtccattgccgatgctggtggtatcgatgtgcttcttaagtgtgttgatgatagtggtgaacaacgcaacaaaactgtagctagaactttgtgttcatt

SEQ ID NO: 21708 - DNA, 396 bp, Gossypium hirsutum
  Clone ID: LIB3146-046-Q1-K1-D1
ctgacgcgtgggctcattaccactcgctcgaggaacaagacaggcaagtccagatcgatcgaagttcttatttaacgaagtacatggttgagttaggcattcaaatcccaacaacttttgatccttttgcggaggccgaggaattcggaagaacaggaaccaaagactatgttcatatccgaatccaacagagaaatggcaggaaaagcttgacaactgttgaaggtctgaaacaagaactgagttccgataagatccttaagtctcttaaaaaggagttctgctgtaacgggaatgttgtgcacgacaaagagctgggcaaaatcattcaattacaaggtgatcagcggaagaaagtagcacacttccttgttaatgctggaatagtgaagaaag

SEQ ID NO: 21709 - DNA, 333 bp, Gossypium hirsutum
  Clone ID: LIB3146-046-Q1-K1-D10
aaaaaatattgtgatcctctgaaagaggagctatagaggttccctccagaatcacgcctcctggcactgggctgcacgcgcacacgcgccgccttacacgggcgttggaaggctaaaagccttcgtttttcttggcgaatcgcaggtcatcccttcttccttttaaacatcaacaattttttttgcaaaaacgattgacatacacgttggacaatgaagaacacactgtaaaattaaatcaccttcctcaaaaaaaactgctcgtatctctttgaatatatatatgtatctatttttgctcataatctaaaaaaaaaggcctcctattacaga

SEQ ID NO: 21710 - DNA, 406 bp, Gossypium hirsutum
  Clone ID: LIB3146-046-Q1-K1-D11
cggtacttgtatgggctcttcattgggcctttttagattcatgctggaaaatcagctcctagtgtgaaaggaggggagcaaacaaaaatggaagagggtgaattttatgccattgaaacctttgcttctactgggaaagggtatgtcagagaagatctagagtgcatccattatatgaaaaactttgatgcaggacacattccactgaggttgcctagagctaagcaactactagctacaataaacaagaatttttcaacattggccttctgtagactgtatttagatcgtttgggagagactaaatatctaatggctttgtagaatttatgtgatgtcggcattgttcagccgtatccttctctctgcgacatcaagggcagctttgtttcttagtttgaacaca

SEQ ID NO: 21711 - DNA, 429 bp, Gossypium hirsutum
  Clone ID: LIB3146-046-Q1-K1-D12
ggcgccgctcttgcttgcaccggtcctcccaatatcgaccccaaggtggcaatgctgattgctagggaagttgcaattgcttgccgcctcggtgtagaggtagcaattgttgttggaggtcgcaatttcttttgcggagacacgtgggttgcagctaccggtttagatagaagtactgcatatcaaattggcatgatggcatccgtgatgaattctatactactgcaatcgttgttggagaagatgggtgttcaggcctgcgtgcaaacggcattttctgtgcaagaggcagaaccgtacagccgggtaagggccatacgtcatcttgaaaaaggtagagttgtaatatttggtggcattggtgctggcactggaaacccactcttttctactgatacagctgcagcgcttcgagcttcaaaaattcat

SEQ ID NO: 21712 - DNA, 409 bp, Gossypium hirsutum
  Clone ID: LIB3146-046-Q1-K1-D2
caacaattcagatatataatgtccgtgtggatgaagtgaagagtaaactcataggtcactccaaaagaataactggccttgccttctctcatgcactgaatgtgcttgtctcatccggggcagattctcagctttgtgtatggaacactgatggatgggaaaagctgaagactaaattcttgcagattcctgttgggataacaccaactgcacaatcagagacacgcgtacaattccatcaagaccagatacgtcttcttgttgtacatgagactcagcttgccttatacgaaacaacgaagttggaatgttttaagcagtgggtccctcgtgaatctttcgcgccaataactcatgcaacattttcatgtgatagccaactggtatatgccagctttttggatgcaac

SEQ ID NO: 21713 - DNA, 206 bp, Gossypium hirsutum
  Clone ID: LIB3146-046-Q1-K1-D3
cccacgcgtccagcgacccacgcgtccagcccacagcgtccagtgataattttggatattcaaatcttatattttacatggttatggtttaaaaaaaaaaaaaaaaaaaaaaaaaaaaaaaaaaaaaaaaaaaaaaaaaaaaaaaaaaaaaaaaaaaaaaaaaaaaaaaaaaaaaaaaaaaaaaaaaaaaattataaatggtgaat

SEQ ID NO: 21714 - DNA, 410 bp, Gossypium hirsutum
  Clone ID: LIB3146-046-Q1-K1-D4
acccacgcgtcctcttactcttagcccgtttcttttttacggacatgcacgtcccgtgcggaagtttatcaacacaagcttctcccatattagagcaaataatacgaccatctctttagtcgaaaaatgatatccactcaacaattctacgtagaaaaaagagcaagatgtgttgatagacctacttcgacatgggatcatcacccaattagcatctacaagtaaggttcctagagactaggcatttcagtgacttttgtgaagacagtcgagacgtcagctacgtaaccacggtccatacgaattgttgccgccacataaatgcaaaggttaaggatctaacatccgtcctccgcgattggaataagttcaaggcggcttgaaccatatatcccaatactgctggtaat

SEQ ID NO: 21715 - DNA, 408 bp, Gossypium hirsutum
  Clone ID: LIB3146-046-Q1-K1-D5
ggggaaacaacaatggtgtctttgaagcttcagaagcggcttgccgctagcgtcctcaagtgtggtcgtggcaaggtctggttggaccctaatgaaatcaatgaaatctccatggccaattccaggcagaatgttaggaaactggtgaaggacggttttatcatcaggaagcctacaaagattcactcccgttcacgtgcatgtaggatgaaggaggccaagagaaagggccgacactctggatacggtaagaggaagggtacaagagaggcaaggttgccgacaaagatcctttggatgaggagaatgcgtgtactgaggcgattgctttgtaagtatagagaatccaagaagatcgacaagcacatgtaccatgacatgtacatgaaagttaagggcaacgtgttt

SEQ ID NO: 21716 - DNA, 393 bp, Gossypium hirsutum
  Clone ID: LIB3146-046-Q1-K1-D6
tgaatccacaagcagcttctgaagctgttataattctggcctcatctctttcgaagctagagtccttttggctcaagggttatggacgtctcttgctaggcgggaaccaaccatccatagcagatcttagccttgtttgcaagttaatgcaacttgaagttttggatgagaaggatcgcactaggttattgggtccgcacaaaattgcagcaatggattgagaacacaagaaatgccacaaatcctcactttgatgaagtacatagagtgatcatgctggccaaagaaagacaacaacatcagcgattaaaagcagcaaaaaatgaaggcggatccaacatgaaaaagccgttcgtctttagaatgtgaaggaaaaccgtattaccaagtact

SEQ ID NO: 21717 - DNA, 422 bp, Gossypium hirsutum
  Clone ID: LIB3146-046-Q1-K1-D8
ctaagcttaaatggaaccgaggatattcaaataagcgtggataaattttacggtgatccacgacccgagcataagttgatcaacacaggcttctaccatattagatcaaataataggaccatctctttgttcgaaaaatggtattcactcaacaattctacgtggaaaaaagagcaagatgtgttgatagacctacttcgacaagggatcgtcacccagttgcatctccgagtaaggttcctagagacgaggcatttcagtggcttttgtgaagacagtcgagacgtcagctacgtaaccacggtccatgcgaattgttgccgccacataaatgcaaaggttagggatctaacagccgtcctccgcgattggaagaggttcaaggcggctgtgaccaagtatcccaatgctgctggtaatat

SEQ ID NO: 21718 - DNA, 416 bp, Gossypium hirsutum
  Clone ID: LIB3146-046-Q1-K1-D9
cggaacttgaatgggcacagcattgggccctatcagatacatgctggaaaatcagttcctattgtgaaaggaggggagcaaacaaaaatggaagagggtgaattttatgccattgaaacctttgcttctactgggaaagggtatgtcagagaagatctagagtgcagccattatatgaaaaactttgatgcaggacacattccactgaggttgcctagagctaagcaactactagctacaataaacaagaatttttcaacattggccttctgtagacggtatttagatcgtttgggagagactaaatatctaatggcattgaagaatttatgtgatgtcggcattgttcagccgtatccttctctctgcgacatcaagggcagctatgtttctcagtttgaacacaccatcctact

SEQ ID NO: 21719 - DNA, 408 bp, Gossypium hirsutum
  Clone ID: LIB3146-046-Q1-K1-E1
cccacgcgtccgcccacgcgtccgctctctcgctcctccccttctcgcaagtctttcggggtgaaagccaccagtgagcttccattggtgggaaatcctgcccctgattttgaggctgaggccgtctttgaccaggagttcattaaggtcaagctctccgaatacattgggaagaaatatgtgattctcttcttttacccgctggacttcacatttgtttgccccacagagattactgctttcagtgaccgctatgaagaatttgagaagctaaacaccgaaatattaggtgtttctattgacagtgtgttctctcaccttgcctgggttcaaacagatagaaagtcaggtggtcttggtgatttgaagtatcctctcgtatctgatgtcacgaagacaattgccaaa

SEQ ID NO: 21720 - DNA, 400 bp, Gossypium hirsutum
  Clone ID: LIB3146-046-Q1-K1-E10
gaaagttcagatgatgaggaggaagctgagtccgaatcatcaaaggatgatgaagaaagtgaggacgatgattgaatccaggatggttttggattaggttctgtaaatgaaaccatgtttaaaaatactgtctttagcagcatggtatgatggtatgtttgcttgatgtgtcgtgtgcttggtttttcgatgtgaaagaaacgcatctcctatatttctatatatgcagatatatgtttgtgttaccatgttgaaggcactgcaactgcaaaagagagtactgaggatatggcggacggccattaatggcagcgactcgacagccacattccaacagctctttgcttgtatcatccgtgtgaactatcacttcaatgaaacataagcagtctttcatggc

SEQ ID NO: 21721 - DNA, 281 bp, Gossypium hirsutum
  Clone ID: LIB3146-046-Q1-K1-E11
gaaagtatatacccagttgcccaagcttgtttcaaaatttcaagaggcgttcaacaaggtggggccggtgatggaatccatgatgctctgcgattacgttctgccaatgataccctgtcaaaaaatactggatttacccacatcgagtgaccacttgcttgcttggtgtaccaaagactcacttttgcgatgcgctagaaaaccatgtactatctctatatatccacaaatatttcttcgaggaacaaccttttaagcacttgcactgcacacaagagcac

SEQ ID NO: 21722 - DNA, 280 bp, Gossypium hirsutum
  Clone ID: LIB3146-046-Q1-K1-E12
gaatgtatataccaaatttacgtagcatctttcaaatctttcaagggcgcgcaacaaggtggggccgatgatgcaacccatgatgcactccgataacgttctgccaatgataccctgtctaaaaatgctggctgaacccacatcgagtgaccgcttgcttgcttgatgtgccaagagctagcttattctatacgctaaagacccatctacaatccctttatatccacagatttttcttcgaggtaacaccttgaaagcactggcactccacacaagagca

SEQ ID NO: 21723 - DNA, 404 bp, Gossypium hirsutum
  Clone ID: LIB3146-046-Q1-K1-E2
gtcttcctatgataaatatccgttcatgttctatccgatttctggagtaccatattagcgatagtgcatagcaaaagagtcgactctgctccttagttccctgcagaagtacccagtctttatcccccaaacaaccgcggtggcagcatgcatttatgagcacccttctgctcctaaggtttacaagtgtgggcaaataattccaaaagatacgccaaattgtatttgtgatttctgtaggaagttgtaggctccaaagtttgctgtaaaaattttttaatccgatctgtaatataatgctactaggatttagcgaagaatcctgtgatagtttatatggcgctccgaatggtgaattccccagattgttccgccttccaaactagacggtcaacatagttcat

SEQ ID NO: 21724 - DNA, 403 bp, Gossypium hirsutum
  Clone ID: LIB3146-046-Q1-K1-E3
gcttgatagctgcgattaccgagaatttttacttctacttggatgctccaattatgtggttatgttcacaggatgtgcctacaccatatgctggaaccctggaggaagagactgttgttcatcctgcccagattgtgacagccgttgagcatctctgccagtaattgcaaatttgcaatagcagaaatattgatgcatggttgaagttctgttagtgttgtcatgtttattttgaaaccattctcttgcgactttgttttcaatatataagtttcacgagttatgttagtgttatgtttgttgagttgttcgtgggtttaaggcatttagtttgacctttgttttttcttgactgaaatgggcagcaagacctttaagcagtgttacatgtaaggtactggaa

SEQ ID NO: 21725 - DNA, 324 bp, Gossypium hirsutum
  Clone ID: LIB3146-046-Q1-K1-E4
cccacgcgtccgcccactcgtccgacatatccctggtgccctcgctgcaattcttttgttccatcttccctgcctatgaagaagcctaggattgacctcaatgcatcattttaatccttttttctctttctcctgtgaacattgattggagattttaaaaaaaaaatgttgtacaactcttcagccctgcaaatattcttgattcatgtaaattgaaaaagaaaaaaaaaaacaataggttcagaattcaaataaaaaaaaaaaaaaaaaaaataaaaaagaattaaaaaaaaaaataagaaacataataaatttatatggtta

SEQ ID NO: 21726 - DNA, 400 bp, Gossypium hirsutum
  unsure (1)..(400): unsure at all n locations; Clone ID: LIB3146-046-Q1-K1-E5
cccacgcgtccgcccactcgtccgcccacttcgtccgatctccgtcaagacaaactggcgaaggcccaagggtattgactctcgtgttaggaggaagttcaagggatgcactttgatgcccaacattngttttggctcagacaagaagactcgccactatcttcccaacgggtttaaganntncgtcgtgcacaatgtccaagagctagaacttctcatgatgcacaacaggacatactgtgctgagatagcacatgatgtttcgacgaagaagaggaaggaaattgttgagcgagcggctcatttggatgttgtcgttaccaacaaattggctaagttgcgcagccaggaagacgagtgaaggtcggttcttgaatgttgattttgttctttttaatat

SEQ ID NO: 21727 - DNA, 404 bp, Gossypium hirsutum
  Clone ID: LIB3146-046-Q1-K1-E6
agcatttgaagtaacacatgggaaagatctatggagctacaccgaggcgaaccccgagtgtagagaactccttaacaactccatgggttgcaaagctagactgacagtgcaagcgacaatcgaaggatgtcccgaagtgttcgacggagtcgaaagcctggtcgatgtcggcggtggtaacgggactgctttgagccttttcgtcaaggcattcccatggattcgaggcatcaactttgatctccctcatgtcgtcgccgttgcagaaaaatccgatggcattgaaaacgtaagaggagacatgttcatgtctatcccaaaagccgacgcagcgtttctcatgtgggtattgcatgattgggacgacgaggaatgcattaaaatcctaaaaaaatgtcgagaag

SEQ ID NO: 21728 - DNA, 399 bp, Gossypium hirsutum
  Clone ID: LIB3146-046-Q1-K1-E7
aggaaacccgttcagaggaagcggatcggatcggagcaggggatttcgaagaaatacagctccgccgatgacttgaagacggtgaggaacaatgttatggtggagaaggttacgattatgagacgaggtgagtcgttggattcgaagatcaagatcgacaacggcggtggtggaagggaagggggtttggttgttatgggtacggatcgtttgggtccggatccggaaatggttcctaaacagatcaaaatcgtggatgctaagtcttcggtgaccgtaaaatccgacgtgtatgccggatcggctttctccgtttctccggcaccgagctcacttcctttacccactttctcgaagaagaaacaggttccggtcgatgattcagctacaagggatctc

SEQ ID NO: 21729 - DNA, 244 bp, Gossypium hirsutum
  Clone ID: LIB3146-046-Q1-K1-E8
gaaaacccggcacaacgcgagcggccgacctatctttctctcattaagcccttttttttttaccatcatattttgaacaaagacagattctcctctaacttagagaaccccacccaacaaccatatggcatagaaaatgtccctgtaagacacctcacaaccctatgttaacatcttatcaccacctgaaaaacaatgaacggatctaataattgtcactacctatgcaatagcacaatatata

SEQ ID NO: 21730 - DNA, 381 bp, Gossypium hirsutum
  unsure (1)..(381): unsure at all n locations; Clone ID: LIB3146-046-Q1-K1-E9
tcggatatatccccaattgcccttttatcatacaatatcctcggaggcatgcagcaggatagcactggaaatgtggcagttgaagcactgcaggaactttttgccggtgatggacaatcaaaaaaaggtcgaagaacacaaaacgaggtgccacttcctcctagtgtttaccaaagactcacttcaagttctacgctaatgaacctggcacaggccctagcttaccacaaaatgtgctacgaggagatgccgcttcaagagttgcaagcaacacaggagcagcaaaccatccaaaacctatgcgacacactaagaaccattctccggttatagatagatagtcgtatgctacatttcttttttcggntgttgtatgttatt

SEQ ID NO: 21731 - DNA, 396 bp, Gossypium hirsutum
  Clone ID: LIB3146-046-Q1-K1-F1
cccacgcgtccgactacatcaccttgatgttgtttagccaattttccccaatgtgagcggggggcaagcccttcagcgccttattttgcctacaaatttggattccgcagggatcatgcagcagtccatctgctatgacaaaaccaagagttggaccatttcggtttcatggggttttgcagttcaagtttttagagggatcttttcaccacgggagatagaaatgccttcgagaacattcttgaattggtacaaaagagcagattacacagcatatgcattcaacactctccctgttagccgaaatccatgccaaaaaccttttgtgttctacatgtcaagtgtgagaatggattctgaactgaacaaaactgtgagtgaatacgagcgacacca

SEQ ID NO: 21732 - DNA, 421 bp, Gossypium hirsutum
  unsure (1)..(421): unsure at all n locations; Clone ID: LIB3146-046-Q1-K1-F11
gttctccttctgccctcctctgctcctatggcgatgaaacaaaggagcttcaacgacgccacaccggtaagttccctttactcccttcctcgttttgtttatttgttgttttttagaagcaaaagaaaagaactaaaataaattgaaaaaaaaacagtaaaggaacagagaaaaataaaaccaaatcccaccttcaaaaatatttttctgtatattttctttttgatttcggtacaaaaaaaattttgctccccattacaaagatcgattggcctttatatggtcgaatcaaaaaaacaagccctcgaaaacttccccccatttacatttttgtcatattttctgccattatcgattgtttgttgcatgtgtatggaaaacgtgcgttgtgcggngctactggacgtgcgagcaagaacgt

SEQ ID NO: 21733 - DNA, 422 bp, Gossypium hirsutum
  Clone ID: LIB3146-046-Q1-K1-F12
cccacgcgtccgtgacctactctgtgcacctctcgtcgatcataataggcgcgtcgtcgagaagcgtgtacaacgcgctacttacattagcagtgtacgcattgatatgtcgatacgagggtttaccgtttcgatacccaggtagccggtacacatgggagcatttttgcgacatgtccgatgcacgcgtgctcgccaagcagcatatatgggccgcagtgactcccagtgccaagaaccaagcctttaattgcactaacggcgatatgttcacttggaaaagcttatggaaaaaattgtgcgacatatttgatctcgaatttatcccttccgaggagttggaaaactttgattttgttgagctgatgaaggagaaaagcaaggtatgggatgaaataatggaaatgcatggattgttcaag

SEQ ID NO: 21734 - DNA, 406 bp, Gossypium hirsutum
  Clone ID: LIB3146-046-Q1-K1-F2
gttcaccatcggctctcccctagtgaccgattcttggtactatcatctgatggactttaccagtatttcagcaatgaagaggttgttgcccatgtcacatggttcatggaaaatgttcctgaaggtgatcctgcacaataccttgttgcagagcttctgttccgtgctgcaaaaaagaatggaatggattttcatgaattgctcgacatacctcatggagatcggcgtaaatatcatgatgatgtttctgttatggttgtttctttggagggaagaatttggaggtcttctggatgattttttttcttcttttctatccctttttattttggatcaccgtttgactacttttttcaagcaagggttgaaatcaatgatgcattacagaaatgaatgagaatcctag

SEQ ID NO: 21735 - DNA, 406 bp, Gossypium hirsutum
  Clone ID: LIB3146-046-Q1-K1-F3
atgagattccccgtcatatcgcgaaccaccagacccgtcgcagatgtgaagctactactatcaaatgctccatcaaaatagattgtcgttctcggcatgtcttcttagactctaaaaggtctgttcatatttacaggtcttttcatttttctgaccacttcatgttctgccagagacctctgtatgctttgcgctaactctctattggttgtgtttttcctttcatgcacgaactgattcctggagaaccatattagccataaagtataacaaaaaagtctacattggatgtcgtttcctctcttaaaaaccccggacagtcacggaagaaatgggggctatcttctacccaggaacaacctcgggggcatccatcatttgaaattactcttttgtactggagatt

SEQ ID NO: 21736 - DNA, 402 bp, Gossypium hirsutum
  Clone ID: LIB3146-046-Q1-K1-F4
gggtgagaccctcttggggttaaacctacagcaatgcaaagcaatcagcagccgtgccgtggagctacttacggagcagctatggaggtgtgatatccttttctaaactaatgcatacaaactcctccatacatagatttttcagaacagcctttgcaagtagccagcagctttttcctccagtacttggtccccttttccagggaatacggtcgttctttctttctttcttttttgcaggtttccatcatccgggatgatctgctactactttgtgagcctgacaatgggcgtcggtttcttcatggctgaatttccctgagatgggttctggatttttgcttagcctttgtgcatatttgctttaggcgaaagcttttgcttaatattgtccttatttaa

SEQ ID NO: 21737 - DNA, 398 bp, Gossypium hirsutum
  Clone ID: LIB3146-046-Q1-K1-F5
aatttattgcttagcattaaacttttggtgagtttgctttgccttcctctaagtttcctttgcttctcttgatttcatcgaatgttgattttaaaggatggtttgctcgtgatccatctgttctacaccgtgttggacatgttttacttaaagtaaaagcagtggaacctaaaagggaaaggcgccttgtgtttgctgacgatctattccagctttcaaaggttaccaagcagaagacagtttatgttgttagcaaagcaatagaaaagctttctggttgtaagttgtatggccttcaatttttatttatatcagttgcatgttttttgggtttctaaatataaaaaaataaaaaacttaaaaagggtccgtcatttttaaaaaatacaatcttactt

SEQ ID NO: 21738 - DNA, 403 bp, Gossypium hirsutum
  Clone ID: LIB3146-046-Q1-K1-F6
cccacgcgtccgctttgaagagcggctgctcagattttgcctatttcccagattgttctgtcagtttgaaacgatgtctacggctggtgaagctgcttgttcttacgctgctttgattctctatgatgatggaattcccatcaccgctgataaaattgcaacaattgttaaagctgcaaatgtttcggttgaatcttattggccaagcttgtttgcaaagcttttcgaaaagtgcaacattgaggatcttataaccaatgttggtgctgctggtgctggtgctccagttgccgcatctgcacctgttgctgctggcgagagtggtggtgccgctgctccacctcctgctgaggaaaagaagaaggaagaaccagaggatgagagtgatgacgatatgggattc

SEQ ID NO: 21739 - DNA, 411 bp, Gossypium hirsutum
  unsure (1)..(411): unsure at all n locations; Clone ID: LIB3146-046-Q1-K1-F7
cgctttcttcctccttccaatctcaaaacctcgaagaaccagagaatatgggtaaatagggaaacggttctctctcagagaactccgacgaagaaacgggaacaccatctaaacccaaaccaaaacacaaacccgactcagaatccgaagatacaaagcccagaagccacagcaaaagcgaaaaagggaaacgaccgagcaaatcacgaagaagacacgacagcagcagcggtatcagtgaagacgattcgtattcagactcagaatccgaatcggaatcccagtcggagtattcggaaacggaatcagggtattcggattcngaggaggagaggaggaggaggaagaggaagagaatggagagagaagaaagggaaaggaagaggaggaagaaagagaatggaaaagaaa

SEQ ID NO: 21740 - DNA, 408 bp, Gossypium hirsutum
  Clone ID: LIB3146-046-Q1-K1-F8
agaaagatggctgctgctgcccggattcaatataggttccgaacttggaaaattcgtaaagagttccttaatttgcgccaccaggctaccaaaatccaagcagctttccggggcctcctagtaaggaggcagtaccgcaagattacctggtcagttggtgtgcttgagaaagcaattctgcggtggcgattaaagagaaaaggtttgcgtgggctacaaattaacacagttgacacggtcacagagcaaaggccggaaagtgacactgaagaggacttctacagaaccagcagaagacaagctgagcaacgcgtcgagaaagctgttgttcgagttcaagctatgttccgctcaaagaaagcacaagaagactatcggagaatgaagttggcttgtgatcaagcaatg

SEQ ID NO: 21741 - DNA, 406 bp, Gossypium hirsutum
  unsure (1)..(406): unsure at all n locations; Clone ID: LIB3146-046-Q1-K1-F9
cccacgcgtccggaaaaaaggaaaatggtgatgagggtgatggtgcaccttccaaggcaggaattttcggaaacatgcaaaatctctatgagacggtgaagaaagcacaaatggttgtccaggttgaggctgtgaaggtgcaaaaagaactagctgcagcagaatttgatggctattgtgaaggggagctgataaaggcaacattatctggaaaccagcagcctatacgcattgagattactgaggctgcaatggaacttggtgcagaaaagctatcatttttagttaatgaagcatacaaggatgcacatcaaaagagtgtccaggccatgaaagaaaggatgagcgatcttgcgcaaagcttangaatgccacaaggtctcggtgagggattaaagcaacaatg

SEQ ID NO: 21742 - DNA, 384 bp, Gossypium hirsutum
  unsure (1)..(384): unsure at all n locations; Clone ID: LIB3146-046-Q1-K1-G1
cccacgcgtccgcaaaatatctgctttttcttagttttcctttttgtcccttgtttattggatatttccccctcatggccgccgctgatgtcgagttccggtgcttcgtcggagggctcgcatgggccaccgacgaccgggccctcgaagaagccttcagtgcgtttggtgaaatcgtcgaatcgaagatcattaatgatcgtgagactggaagatcccgaggctttggattcgttactttccgtgacgagaaagctatgagggacgcgatcgaaggaatgaacggtcaatatcttgatggaaggaacatcaccgtcaacgaagcccaatcgcgcataattggangcggtggcggaagatttggaggaggaaacggtggttaca

SEQ ID NO: 21743 - DNA, 250 bp, Gossypium hirsutum
  Clone ID: LIB3146-046-Q1-K1-G10
cttataaaccaggtgctcttggctttgcaccagaactcattctcccatataagaaatgtgaatatgaaaacaggcttgttggtactgttgtttgccgcaaatattagttaggtgcatgatgaacttgttttcttacatttgctggtaatttgaaggttggataaacagcgatatggtcttttatgtgatcagtaaactaccagctatagccaccaactttaatggggttattacatttacattttggaat

SEQ ID NO: 21744 - DNA, 270 bp, Gossypium hirsutum
  Clone ID: LIB3146-046-Q1-K1-G11
cttatgaaccaggagcttttagctccgctttttaactttttctcccatataagaaatgcgagtatgataacacccttatttggtactgttgttatgccgcaaatattacttaagttcatgatgaacttgatttcttacatgtactggtaatttgaatgttggataaacaaacatatggacgttcatgcgatcagtacactaccagctatagccactaactctaattgggttcctacatttacatgtcggaatacacactactgcttttag

SEQ ID NO: 21745 - DNA, 397 bp, Gossypium hirsutum
  Clone ID: LIB3146-046-Q1-K1-G2
ttctcttctagtgatcttcttttgttcgttacagaaagtatgattttacacttaccttgtacaactctttatcaaacaccattactatccaatcctagaaatcttcaacaattagctaaaacccaaaccagtttttcaccagccaacaagttgtccattgcaagaaagcttgtaacaagaggatgcagcaatagccaaggtggtgaaggagagaagaagacagaaagtagaagtttcctatctctagaagaggctggtttggttgaaatatctggtttaagctctcatgaaaagttcctatgtcgattaacgatatcatcattgaatctacttagagtgatatcagaacaggaaggatgttcaattgaagagatgaatgctggaagggtatgtgatt

SEQ ID NO: 21746 - DNA, 408 bp, Gossypium hirsutum
  Clone ID: LIB3146-046-Q1-K1-G3
aagtaatcaaattgggtgctcaagctgtttttgagttcatggctgatctcgttgccaagagggattccaaggcagcaccaccaaagaaggagaaaggtttttggttcaggatttgctcgatttgttggccgttccggaccgcaaatacggacgacaacatgtaaccaatgaattactactacagttttttctttttagccccttgtaaatatcttaaaaatgttttggtttcttgtcaagatgtgtgtgtgtgtttttttttatgccatttccattactttgtaaattatttgtgagattggtgagcttttcaaagttcaaaatcttgattgcttgcaagtgttttcaaattcaaatgaagtgaaaaacctacaattgtgattggtaatcttttggcatctattctat

SEQ ID NO: 21747 - DNA, 413 bp, Gossypium hirsutum
  Clone ID: LIB3146-046-Q1-K1-G4
cccacgcgtccgcccacgcgtccgcccactcgtccgcaaagaatggggaaacatgtcctcaacttcttgatttgatccctcaagaaagagagtggcaatatcccaagaggaaagaggagagaagccatgtagcatcagaagagaagaagctggaactgaggcttggtcccccgggtgatgaagaagataactggtccatcaaggctactggcaaaaacgacaacagagacagagatgaacctttaatctcacttggctacctctcttcaatgaagaagagtaatggaaaacaggcgcataagcttccatctccagaggaccagcagcagcaccacccgattggctcagttttgtccccttcatggaccaaaaaccaccaccctaaccatcaacagctgacaaaccctccattt

SEQ ID NO: 21748 - DNA, 397 bp, Gossypium hirsutum
  Clone ID: LIB3146-046-Q1-K1-G5
cccacgcgtccgcagcctgaccccttatgtattacgtttaaaggagaaagccatggagacttgcatatagatttcacctattatgtaaatacggatcttgtgattgcatttcactgtgattgccaagtatcctataggtataaatacaagtttcttcgagcaacaacttctaatctacccagcagtgttattaaagataacagaggaagtaaactgaccattgggagaggagggatgttgaaagttcaacacttggtttcagttgctagatcagctacttcacatcctcatattgattctgctgagcatcaacaacctagtctaattgcttatatcgagttctttgtgaaatctgaagtagatgaattaaagttgatttctaagacttctgggtttt

SEQ ID NO: 21749 - DNA, 417 bp, Gossypium hirsutum
  Clone ID: LIB3146-046-Q1-K1-G6
aaaaaccggcgcgacgccacgcgtccgatcaaatcctgctgatttcatggctttattttataagaatggaccggttgaagagaaggtctccttttatgaggattttgctcactacaagtcgggagtttacagacatttgactggcgatgttatgggaggccatgcacttaagctgatcgggtggggaacttcatatgatagaaagaattactggcttcttgcaaaccaatggaataaagactggggtgatgatagttacttcaagatcaaaaggggtgtacatgaatgcagtatcgaattcgatgtcgtaactagattgcctttcaccaaaaacctttgttcgataagttacagatactggaattgtcgaatatgcttcattctaagagaagaacatcttgactggcttatctaata

SEQ ID NO: 21750 - DNA, 404 bp, Gossypium hirsutum
  Clone ID: LIB3146-046-Q1-K1-G7
caatcaaccagggaagagttggataatatcatggccgctaccaaaaatggagttgcactcactggtgctgcagccactggatcagttggacctgttatcggaaaagtggacattggtgaattggaggattcatactatttccgtgtcgcccttcctggggtctcaatggataaaagagacttcaattgtgacatagaacctgatggaaaagtcgtaataaaggggatgtcaactactggcgagaagatagtgtgcaagaactttcaaatcttccatatgctgacacaaaatctttgcccaccgggactgttcactgcctcgtttcagctccctggtccagtgaataacgaagacgctaagagttatttggctaacggaatgcttgaagcggttgtgaagaggat

SEQ ID NO: 21751 - DNA, 235 bp, Gossypium hirsutum
  Clone ID: LIB3146-046-Q1-K1-G8
ccgtcgcctggcttcttctaaagtttcttttctgacaaagccaccctacctactgctgggggctgtatttccggaacagaaacgaccccctcggatgaacccaatgagatagctacattcacacccaaacaacaccgactgaacccccaaaaacatggataaaatgactttatcagccgctttccaaaaaccaacttagagagcacttttagtttgcatgaacaacaactagcta

SEQ ID NO: 21752 - DNA, 425 bp, Gossypium hirsutum
  Clone ID: LIB3146-046-Q1-K1-G9
cgaaggggaaggagacatttgagcggcacttgtttaaaaaatatgtctgcaacgggaaacgtcggcggcggaggaccagaggaggataagaagccggccgatcaagctaatcacattaatctcaaagtcaagggccaggatggaaacgaagtgtttttcaggattaagagaagcactcaaatgaggaaactgatgaacgcatattgcgataggcaatcggtggatctgaactccattgctttcttgtttgacgggcggaggctccgtggagagcagactcccgatgagctggagatggaggatggagatgaaatcgatgcgatgttgcaccagaccggaggagcggaataaagcagtaggtattattatatatgatattggttcttctatatatgtaaatgaaagaattatagaacatttggaac

SEQ ID NO: 21753 - DNA, 409 bp, Gossypium hirsutum
  Clone ID: LIB3146-046-Q1-K1-H1
cccacgcgtccgttctacttcaccgccagtgtgccgaatcagttcttcgctctctaggtgtgtattctctcctttcttcaatgattcacttccgatattatgagctctcctattttttgttctctgaaagtatttgaacttgatcttttgaaagcatgatttcttgctgtggatgtcttcaataattgttccgataactaagtaatccctttttgtcgactggaatttttaaattagtgttcttgagtcacccaatatctgaacttcctgaaaacccatttcgattcctaactttactgcatccatccctgcatgtgcctctactacgaacggagatgcaatattggcatgaatgattgacttcgaaaccagaaactcgtccctcatgccccaaattaccaaccctgac

SEQ ID NO: 21754 - DNA, 370 bp, Gossypium hirsutum
  Clone ID: LIB3146-046-Q1-K1-H10
gggatgccttccagtcttttccagccacaattaatgcagctgaaactgattctgtagttgagaggacagtaaaagaatcggaccatgatgagtccatctcttctgctttggaaatcagtactgataatagtcagcaatatttatcttcagaaaatcacaatagtataaataactctaatgcggagcattcagaggttgcaacagaaatattatctgattgctcaggtgacggaggtaacagggagaagattttgtgtgatcttgcagttgaagaagtgaaagaaatatccacaaagatagaggagcacgtgcaaagaagggcatcaactgaaactggaaatagtgaagatgctgaaagatcaatcgatgt

SEQ ID NO: 21755 - DNA, 375 bp, Gossypium hirsutum
  Clone ID: LIB3146-046-Q1-K1-H11
gggatgccttccagtcttttccagccacattttatgcatttgaaactgattctgtcgttgggaggacagtaaaagaatctgtccatgatgaatccattttttcagctggggaaatcatatctgataatagataccaatatttatcttcagaaaatcacaatagtgtaaataactctaatgcggagcattcaaaggctgcaacacaaatattatctgattgctcagatgacagaagatacacggaaaagatttagtgcaatcttgcagccgaagataagaaagaaatgtcctcctagatttatgatcacgtgctacaaagggcactaactgacactttacataccatacatactgccagatctattgaactaacac

SEQ ID NO: 21756 - DNA, 218 bp, Gossypium hirsutum
  unsure (1)..(218): unsure at all n locations; Clone ID: LIB3146-046-Q1-K1-H12
ggaattccttaaattcttttacaacgacgctgtatgcctgtgcaacaaangctggggatgcgagggctttgtatatatctggcccttaccatgtctgctataggcatttgaatatctttcccaactattggacacagtttgtatgtataataagctgacacggcatgatatgcctcctatgcttatcactgataggctacatcatgcaaattatattt

SEQ ID NO: 21757 - DNA, 407 bp, Gossypium hirsutum
  Clone ID: LIB3146-046-Q1-K1-H2
cggacgcgtgggcggacgcgtgggggccttcacaactgacgaacccaatccaccaaaacctgctgaaagtaataccaagtctactagtggaattgaggatttatttagtgatttacctccattaacaaccaaccaagtcccagagaagcctcaaaaagatgttaaaaatgatattatgagcctctttgaaaagtccaatatggtgtcacctttcgctatgcatcaacaacaactagctatgctagcacagcaacagtcccttctcatggctgctgcagctaaatctgctcctggaaatgctcaacagcctccatctaacggcacaaacataccctctcaagcttggccaaacagtggctaccaattccctggaatgatgatgcccgttgctgggcaggctgatctgc

SEQ ID NO: 21758 - DNA, 411 bp, Gossypium hirsutum
  Clone ID: LIB3146-046-Q1-K1-H3
cccacgcgtccgggaaacttctgggcaagaaaccattaagcttgcaattcgtgcattgctcgaggttgttgagagtgggggaaagaacatcgaagttgctgtgatgacaaaggaacatggtcttcggcagcttgaagaaactgaaatcgatgccattgcagccgagatcgaggcagagaaggaagcagccgaggctgcaaagaaggcccctccaaaggaaaaatgatgaagcatcaactgtttaagctatcatttcctttttctttttttttcttttctggtctgactgcttaatttctgcaattgaagtttcatttgccattgttggcattttatttgctttttagttgtttcagtttaagcaagtatcaatcacattcagataatatgcaaatatgaatcttgcaacaa

SEQ ID NO: 21759 - DNA, 401 bp, Gossypium hirsutum
  Clone ID: LIB3146-046-Q1-K1-H5
cccacgcgtccgcccacgcgtccggatgcccacagtgcaaagggaacaaggttactcaggaaaagaaggtgctggaagtacatattgagaaaggaatgagagatggtcagaaaattacatttgagggacaagctgatgaggctccagatacaataactggagacattgtttttgtattggaacaaaagaaacaccccaaatttgataggagatttggggacgaactttatgttgaccacaaactcagtttgacagaagctctatgtgggtttcagtttgccctaactcaccttgatggcaggcagctcttaattaaatcaaaccctggcgaggtcgttaagcctggtcaatacaaggctatcaatgatgagggtatgccccaccatcagagacctttcatg

SEQ ID NO: 21760 - DNA, 391 bp, Gossypium hirsutum
  Clone ID: LIB3146-046-Q1-K1-H6
ccgtaacggcgccatttgcctcgatttttttaaggaccaatggagccctgccctagaggagatacaaagtattgctttcaatcatctaactttcgacggacccaaacactgatgatgccttattgcccgagattgcccacatgtacaagaccatcagggctcacaacgattcatctgctcggagctgcacccaaaaatatgctctgggtttgtgagggcttttgcatctgcttgtaggactgcatagtatcaaactaatatcatcaatcttacaggtgaaaatccatgtagaaggatataggaacagactctcaagcttatacaggacctatcgctcctttaaacacatttggtgactgtactgtctgtatgaaaagcaacttacaaactt

SEQ ID NO: 21761 - DNA, 407 bp, Gossypium hirsutum
  Clone ID: LIB3146-046-Q1-K1-H7
gtgatacagtacaggatccagaaaactctgtaccagctgcaaatgaacagttggaaaggactattgatgaaggtgctcaagcttgctctactttattcatagcaaatctaggtccaaattgcactgaatatgaactgaagcaagttctatccaagtatcctggattcaatatgctcaagattcgggctaaaggaggaatgccagttgcatttgctgattttgagcaagtagaacaagcaacgaaagtgatgacggatcttcagagcagccttttgccttcatcagaccgaggcggcatgcacatagagtatgcaaggtccaagatgaggaagccctaggaaaaaggtaatggagctggctatctgcaaaaaatggtcccaccagttgtattttagaagcagtctcgt

SEQ ID NO: 21762 - DNA, 395 bp, Gossypium hirsutum
  Clone ID: LIB3146-046-Q1-K1-H8
ccacgcgttcagtgcaaattttggagggttcttccactactcatactcagttgttagaggagacgatttaatcgtccctgttgacatctatgttcctggttgtccacccactgcggaggcgttattgtacggagttcttcaattgcagaaaaagatcaacaggcgcaaggatttcctccattggtggtccaagtaagaaaatttgcaagttatttcaaggctatttgcactgcattttgcagtgttgagtaacaaataaataaaatcaaactttctggtgaaatgccatgtagatggagattgttaaaaaaagcttttgattataaaaattcatgggggttctattactttgcatggtgactgtacttcctgattaatttggaacttacagtttt

SEQ ID NO: 21763 - DNA, 337 bp, Gossypium hirsutum
  Clone ID: LIB3146-046-Q1-K1-H9
aaaaaaaaaatagaaaaaaaagaaaaaaggaaaagagataaaaaaaaaaagaaaaaaaaagaaagtaaaggaaaaaaaaagagagaaagaagtaaagagaggagaaagaaaaaaatagaagaaaaagaaaaaaaaaaaaaagaaaagagaaaaaataaggaaaagaagtatagaagaataaaaaaaataagaaaaaaataaataaaaagaaaaaaaaaaaaataagaaaaagaagtgaaaaaaaagaaaagaggggaaagaaataaaaaaaagattaataaaaaatgaaaagaaaaaaaaattggaagaagaaaaaaaaaaatagaaaagaatagat

SEQ ID NO: 21764 - DNA, 400 bp, Gossypium hirsutum
  Clone ID: LIB3146-047-Q1-K1-A1
cccacgcgtacgatggacaactgcgaagagctgatccctgaattccttggctttgtgaagggtgttgttgactcagaggaccttcctctcaacatctcgagagaaatgttgcagcaaaacaagattttgaaggttattcgcaagaacttggtgaaaaagtgcatcgagctcttctttgaaattgctgcgaacaaagaagattacaacaagttctatgaggctttctcgaagaacctcaagcttggtatccatgaggactctcaaaacagaaacaagattgctgaattgctccggtgtcactctaccaagagtggtgatgagatgaccagcttgaaggactatgtgaccagaatgaaggagggtcagaatgacatctattacatcactggtgagagcaaaa

SEQ ID NO: 21765 - DNA, 352 bp, Gossypium hirsutum
  Clone ID: LIB3146-047-Q1-K1-A10
cccacgcgtccggctcatgtacctgccccttctgaggatgctgagcaacttcgtaaagcttttgaaggatggggtacaaatgagcaattgattatcgacattttggctcacaggaatgcagctcagcgcaatttgattcgtaaaacttatcgtgaagcttatggggaagatctccttaagtctttggatgaggaactttcaagtgactttgagcgagctgcggtgctgtttactttggaccctgcagagcgtgatgcatttctggctcatgaagctacaaagaggttcacatcaagccattgggttctcatgggaaattgcttgcactaggtctttacatgaactgttcaat

SEQ ID NO: 21766 - DNA, 396 bp, Gossypium hirsutum
  Clone ID: LIB3146-047-Q1-K1-A11
agcatccttgcaatgagtgcaagggtactggtgaaaccatcaacgataaggatcgttgcccacaatgcaaaggtgataaggttgtgcaagagaagaaagtcttggaggttattgttgagaagggtatgcagaatggacaaaggattactttcccaggagaagctgatgaagcgcccgatacggttactggggacattgtattcgtcctgcaacagaaagatcatcctaaatttaaacgaaagggtgatgacttatttgtagagcatacattggcacttactgaggccctttgtggctttcagttcatactgactcacttagatggcagacaacttctcattaaaacccaacctggggaaagtcgtaagcctgatcaattcaaagcaataaacgatg

SEQ ID NO: 21767 - DNA, 421 bp, Gossypium hirsutum
  Clone ID: LIB3146-047-Q1-K1-A12
atcaagctagaccttgaaagcaacaaaattgttgatttcatcaagtttgatgttgggaatgttgtcatggtcactggagggagaaacagagggcgagttggagtaattaagaacagggagaagcataagggcagctttgagacaatccatgttcaagatgctgctgggcatgagtttgcaactcgtctcggcaatgtcttcaccatcggaaaaggaacaaagccatgggtgtcccttcctaagggtaagggtatcaagttatccatcattgaggaagctaggaagaggcttgctgcccaaaatgctgcctaaactttagcataagacatccagatatgtattgctgcagtagtttattctaaagattagctggagttgtttatttatgaagttgtgagcaaaattttgagaactatttact

SEQ ID NO: 21768 - DNA, 129 bp, Gossypium hirsutum
  unsure (1)..(129): unsure at all n locations; Clone ID: LIB3146-047-Q1-K1-A4
ccccaaagnccacaacttctgtggccaagatttaacttaatattttcttgaatcaaaaaaacctcctatttattatattacaaatgtttcacccccctttcaatgttctaacaaaaaaaggaaacctaa

SEQ ID NO: 21769 - DNA, 243 bp, Gossypium hirsutum
  Clone ID: LIB3146-047-Q1-K1-A5
gccattacagagctagcttcatctcttgatattcatgaagggttgcaagcagttaagacaaatactcttattccgacaccaccagctttacaggaggaatatgatgagaaccgtttgggggttgaagggagtgagatgcgtgaagacactgaagaacttaatgctttgctttactctgatgaagaggaagatgattttggtgttggtgatgatgattgtgacgatgatgaaataatgagcaca

SEQ ID NO: 21770 - DNA, 396 bp, Gossypium hirsutum
  Clone ID: LIB3146-047-Q1-K1-A6
caattttagaatcccctcaggagattgaatctccaaagaaagtagcttgtcatccaatgccatatctttatgcagtttatttctgtcactttgatgccactgagactaaagctttcaaactccgtttagttggtgatgttacaggagataaggtggatgctgttgttctttgccatatggatacttcaggttggagctctgatcatgtcgcttttcgcatgcttggtattaagcaaggaaacactgtttgccatgtattttctcaaggtaattttgtttggattaatcagccatcggatatcgctgccggtgccatataagtgttgaactgttcgatggagcactcatttggcactacgtatggagactctgatcccgatataagtatttaaaagc

SEQ ID NO: 21771 - DNA, 367 bp, Gossypium hirsutum
  Clone ID: LIB3146-047-Q1-K1-A8
cccacgcgtccgcggacgcgtgggcaagtgggcatgggctcgaaccgaacatatcagggttcacacaggtgctcgcccttacgtatgcggtgaggaaggctgtggccagacatttcgttttgtgtcggatttcagtcgtcataaacggaaaactgggcactctgggaagaaaggtagctgataaatttagaaggaagggaaaactgtaattttaacattgtaatgaacctgttattgaatggtaggctagggttaggatttcaccattgttgtcattcaggaaactgttaattatgttctgtcttgggatttcattaagccccattcatttactctcaaattagagcaattggttggatcttgagtc

SEQ ID NO: 21772 - DNA, 410 bp, Gossypium hirsutum
  Clone ID: LIB3146-047-Q1-K1-A9
cccacgcgtccgctcaagtttcccctcacaactgagtcagccatgaagaagattgaggacaataacactttagtatttattgttgacatccgtgcagacaagaagaagatcaaagatgctgtgaagaagatgtatgatattcaggccaagaaagtgaacaccttgatcaggcccgatggcacaaagaaggcatatgttaggttgacgccggattacgatgccttggatgttgcaaacaaaatcggaattatctaagcagttggcgactaccttgttttgaatgctttattttttgtgttttgttgcaaggtgagactgttattttcagattcagctggaagatttaagcttagtttttttgttttttaaggttgtaatcttgctttactgccacttaatcatctttggta

SEQ ID NO: 21773 - DNA, 418 bp, Gossypium hirsutum
  Clone ID: LIB3146-047-Q1-K1-B1
atccattgcacccaaaaagaaaacgcgagaaaaaaaaaaaaagagaatccttccaacaagttatttgtgagaaatactagtgggaagtcaaaatgcaggcttgtaatggagctgcaatgatgggttctttgcttcagcccatatgggtcaaagggaatagaccaatttttcctttaaaagggtatggtcttaagttcaactctgtcaaaccctgtagagctcaacttgaaagcagcttggttactggaaagcctccctcttcggactcattccctgtggtcgaaacccgatttgtggaccatggcctcagtgaagccgatcccgaagttcgtgctattattaacaaggagaaagagaggcaattcaaaagccttgagcttattgcctcagagaactttacatcccgagcagtaatgga

SEQ ID NO: 21774 - DNA, 422 bp, Gossypium hirsutum
  Clone ID: LIB3146-047-Q1-K1-B10
ggtcaacgaatccgatctacctcaccttaactacctacgctgcgtaatacgtgaaacattccgcatgcacccggccggaccgtttttaatcccacacgagtcccttcgggccacgaccattaaacggcttttacatcccggctaagacacgtgtcttcatcaacacccatgggttgggccgaaacactaaattatgggacgatgttgaatcgttcaggcccgagaggcattggctggctgatggcgctcgagtcgagatcagccacggagctgatttcaaaatcctgcctttcagcgccgggaaaaggaaatgtcccggcgcgccacttggagtgacactggtgctcatggctttggctcggctctttcattgctttgattgggctccccggaatggtatgaggcccgaagatataaatacc

SEQ ID NO: 21775 - DNA, 405 bp, Gossypium hirsutum
  unsure (1)..(405): unsure at all n locations; Clone ID: LIB3146-047-Q1-K1-B11
cccacgcgtccgaaagatttcaacaagaagttacagggtacagtcacagagttgaaacaggagcttggtggaatccatctggttatgtcaagcccctacgataagctcatggaaatgattcggaatccaagtcactttggatttgaagatgcagaaacagcatgctgtgggactggattcttcgagatgagttacctgtgtgataacatgaacccatttacatgttcagatgccaataagtatgtattctgggatgcctntcacccgacagagaaaacaaatgccattttggctgattatgtggtcaaaactaccctagccgagttccaataattactaaaaagtaaaagaagcagcactgcttcatttgtgtagaactagtattagtagacattatatttacta

SEQ ID NO: 21776 - DNA, 420 bp, Gossypium hirsutum
  Clone ID: LIB3146-047-Q1-K1-B12
cccacgcgtccgcccacgcgtccgaaacggtcatgatcattgcttgcaacacctgagtagcatcacaaggtaaattcaataagagtgagtgcctcctcaaattaaaagaatattggttgagggtaaatgtgtttatgattgtaaatgcagcccgctccagtttttcaccagtggaggtggttcgaaggcatggaaaggtgattttgattatttagacggtgggggagatgatgaaatcaaattttattacgacggccaaggattcatgtctgttgagcttactcccactaatgctaagattgccttctatgatgtttccggcaatgttctgcatagcttcaattccaaccaactctactacacttacagtactgaaatgtaggaaataatagaataatgatggatgaaatgaatcaatcg

SEQ ID NO: 21777 - DNA, 91 bp, Gossypium hirsutum
  Clone ID: LIB3146-047-Q1-K1-B2
gctaaatcatacaagaactaacgaaattccctgcctaccaaattatacagtattaaattcagaaaatttagattggaaatgatatttctct

SEQ ID NO: 21778 - DNA, 409 bp, Gossypium hirsutum
  Clone ID: LIB3146-047-Q1-K1-B3
cccacgcgtccggattactttgttgttttggttggtgatatgatcacagaggaagcccttccaacttaccagacgttgcttaacaccatggatggaactagtgatgaaacaggtgctagcctttctccttgggccatttggacgagggcatggaccgctgaagaaaacaggcatggcgacctacttaataagtatctctacttgtcgggaaaagtcgacatgaggcaaatcgagaagacaatccagtatttgattgcttcaggaatggactcgaagagcgaaaacaacccatatctgggagcgatctacacatcattccaagaaagggcaacttttatttcccatggaaacactgcaaaactcgctaaggagtatggggacactgagttggctaaaatatgtggtttca

SEQ ID NO: 21779 - DNA, 342 bp, Gossypium hirsutum
  Clone ID: LIB3146-047-Q1-K1-B4
attgaaagcatcaaaggacttctctaagttatatgcaggcatggcaatactttggcttcacataagcttgaaccaaccttctgttgtatattgtttcttcttttttttttttgatttttttcctttgattaatgagaggtgataatgaattggcattcttttctcatgaggatgaatttttgttttagaaattgtaatactttgtgtgtttgtgtgtgttattttttatgtattaaattacatattgaatcaatgtttatgtattaaatttaaattcattaatttttttatgttattgttataatcaggtaatttttttataaatttgttattttaataaaa

SEQ ID NO: 21780 - DNA, 416 bp, Gossypium hirsutum
  Clone ID: LIB3146-047-Q1-K1-B5
ggctactgttgttgaaatcaacccaccactcaccgtatcaggtacagtggaattttactgagaacgctgtatatgaccctttctacattagctcatgagagttgctcatgaattgggctggaatcggatcaaattgggtatacaagaaaaggaaatagaattgcctactccgagtttccatttcatgagattttgcggatacacaataaaggggaatgggcctagtgcagtgccacattttttgttcaaatgaatttgggctctaaataaattaatgtcaatacacgagaatggttattgtcaataccaggaaattcatggtccaaattggcataagaaaaaaatggtgcgaatgggggttacatctaatttgggtatggtattctcacaaatatatatatttataaattttaata

SEQ ID NO: 21781 - DNA, 262 bp, Gossypium hirsutum
  Clone ID: LIB3146-047-Q1-K1-B6
cccacgcgtccgtttctttgttctcattcttttcatttttctctcgaagtccaataccctcattttttttcccttgatttttgctctccttgatcctgttccatctgccaaaaggttatctgaaatgaattttaactttagaagcttaaatgaggattctgcaacttcccaaatggaaatccttagatgtccatttttgagaaacattaatgagccgactaacttttcattctcgtcgaccttgccctttcccttgccgtac

SEQ ID NO: 21782 - DNA, 394 bp, Gossypium hirsutum
  Clone ID: LIB3146-047-Q1-K1-B7
ggcatggtttagagaacttcctagtggagtgctcgattgccttacaccggagcaggtgatgcattgcaacacggaagacgattgcgttgagcttgtgaagttgcttccttcaacagaagctgctttacttgattgggctatcaatttgatggcagatgttgtggagtatgaacaatacaacaaaatgaatgcacgcaacatcgcgatggttttcgcaccgaatatgactcagatggccgatcccttgacagcattgattcacgccgtgcaagtgatgaacttcctcaaaacattgatcttaaagacaattcgagaaagggatgagtccgctaccaaagacaggttgcttccatcttgctcagattgtcctacaggcataaccgatacatgtgca

SEQ ID NO: 21783 - DNA, 411 bp, Gossypium hirsutum
  Clone ID: LIB3146-047-Q1-K1-B8
aaaggaatctgcaaaatctttttagcaacttccgcattgaagaggtcattccaaacagaaatacgatcccccttaccaaccctccagcaaagtcctccttccagaatgccttttgccgaccaaatactcttccagctaacaaagaacccgaggcatcggcgtcaaaaggaaaggagaaagttatcgaggactaaaacgggagaataacggtcgatagaagtcaaaggtcccggttcagcatccatattaatcccggcttcggcaaaacttggtgatgtatttttcctttggtaaaggtggcatgtacatagattgtgtataaatgttattatgttttaatatataaatgttaaaaatgttagtattaaaaagttatgggattttaatgaaagaagtctttctattttatct

SEQ ID NO: 21784 - DNA, 383 bp, Gossypium hirsutum
  unsure (1)..(383): unsure at all n locations; Clone ID: LIB3146-047-Q1-K1-B9
gcgtagcaggagctcggtttaaattattgtttttgaattctattgagtttaagtaccattttcaattggactgtttttggaatttttagggactgttatttgttttggattttaaaaaaaaaaaaaaaaaaaaaaaaaaaaaaaaaaaaaaaaaaaaaaaaaaaaaaaaaaaaaagaaagatatttaagactaaaacgggtgaataacggnggattcaaatagaatgaccaagtttaagttccatgttaatctcttttatatgcataagttggtgaaatatttttcctttaaaaaatgtaggatgtacataaattgtgtataaatgctattatgctaaaaaatataatggccaaaaatgatactatttaacatatatggttat

SEQ ID NO: 21785 - DNA, 250 bp, Gossypium hirsutum
  Clone ID: LIB3146-047-Q1-K1-C1
aggaagttttgcaagcaaatagagtcagacgtatgcaaactttctggggcactacggctacctcagaaaaggaagatccgggaagcggctttcgatgttgcaagatcaggtacccgatcgttcgacatgttggcttttctaatgcgccacttctattcacctctgtggccgtgcctagacaacggagcgtctgccaaaatggtggcgttacccacataaatcgccttgatagatataggggtatgatcat

SEQ ID NO: 21786 - DNA, 55 bp, Gossypium hirsutum
  Clone ID: LIB3146-047-Q1-K1-C11
ccgcgcccactcattatcactctgatcattttcaccatgcaggtgtgttgaccag

SEQ ID NO: 21787 - DNA, 57 bp, Gossypium hirsutum
  unsure (1)..(57): unsure at all n locations; Clone ID: LIB3146-047-Q1-K1-C12
ccgggctcgacccacgccgtccgcccacgcgtnccggttctagaatcgcgagcggtt

SEQ ID NO: 21788 - DNA, 422 bp, Gossypium hirsutum
  Clone ID: LIB3146-047-Q1-K1-C2
tcagcaaccaaacaaaaccttccattgtcttctagaactatccaagcacactggtattaatcaatggctcgtacaaagcaaacagccaggaaatcaaccggtggaaaagctccacgtaagcaattggcgaccaaagccgcgaggaaatcagctccagccaccggaggagtgaagaagcctcaccgtttcaggccaggaacagtggcgttgagagaaatcaggaagtaccagaagagtaccgagcttttgatccgtaaacttccgttccaaaagctagtgagggaaatcgctcaagatttcaagacggatctgagattccaaagtagtgcggtggcggctttacaagaagcggcggaagcgtatctggttggcctgtttgaggatactaatctctgtgctattcatgccaagagggttactat

SEQ ID NO: 21789 - DNA, 360 bp, Gossypium hirsutum
  Clone ID: LIB3146-047-Q1-K1-C4
ccaactcgtcgaccatcaactccatcaagtactaatatatctgcccctccaattaaatcatcttgttcagttacaaagccaactactgcagcatccagaagttctgtaccatcacgtggtgcctcaccgactgtagcatctagaccatggaagccttctgagatgcctggtttctcacttgatgctccaccaaatttaagaacaacactacctgatagaccactttcggccaccaaaagtaggcctggagcggccagggctcgatcttcttctgttgaaccaggtgccattggtagaccgagacgacagtcatgctctccttcaagaggacgtctccctaatggtgctatgctgcattta

SEQ ID NO: 21790 - DNA, 344 bp, Gossypium hirsutum
  Clone ID: LIB3146-047-Q1-K1-C5
ccaaccgttcgaccataaactcgatgaagtacttatatatctgcccatgcacttgaatcaggtgtgatcagttacaaagccaactactgcaacatgcagaagttcagtaccatcacgcggagcctcaccgactgtggcagataaaccatggactccttcttagatgccagggttctgacttgatgctccaccaaatttaacaacaacactacctgatagaccacatactgccaccagaagcaggccacgagcaccaagtgctacaactttttatgatgaaccaagtgccatcggtagaacgaaacaacagacattctctacatcgagaggacgtgctcgtaatg

SEQ ID NO: 21791 - DNA, 415 bp, Gossypium hirsutum
  Clone ID: LIB3146-047-Q1-K1-C7
gcaaaggcatggaaaggcgagggtgagagtgggcagagtttggaggagcaaagatggatgccgccacttcatggtcgaatggaatgttaacatcagcttgctttccaattgcgttgccgcttatgtccgcgatgacaactctgacatcgtcgctactgacaccatgaaaaacactgtttatatcaaagcaaaggaatgttcagaacaactttcagcagaggagtttgctattctacttggcaagcacttcacatcattttatccacaggtttttactgcaatagtaaagatagtggaaaagccatgggaacgcatttctgtcaatggtcaaccacatgaacatggctttaaactgggatctgaaaagcatacaacggaagcgattgtacagaagtctggtgttttacagctgact

SEQ ID NO: 21792 - DNA, 279 bp, Gossypium hirsutum
  Clone ID: LIB3146-047-Q1-K1-C8
cccacgcgtccgatgaccctgggcttgtatctattattgtatcattttagggtggggagggtgatgtatagtatgttccattacaatcgtttatgagttcgattttaagtgttagatctgatgagagggatttgaaagttttattgtgttatgtaaaatgtattaaaaaaaagatatatttgtattttgataaatatttttttaaaaattatatctatgattccgatttattttacatgtttagctcttaacattatttttttatattggtttttattt

SEQ ID NO: 21793 - DNA, 421 bp, Gossypium hirsutum
  Clone ID: LIB3146-047-Q1-K1-C9
cccacgcgtccgcccacgcgtccggcaatagagcaccaaaatcccctgaacaaagaaagaaaattgctgaagccattgctgccaaatgggctgatcctgattaccgcgagagagtttgctctggcttggcaaaatatcatggcattccgtctggggctgaaagaaaaccaaagaggaagccagcggctggtacacagtccaagcagagccctccaaagaggaaagctagtgatacaaactattcttctggaagtgagactataagcccaattgagcggttaaggatacgaagaagaaataaaccactttataaggatcctatggcaagctccaagctcgagatgttgaagaacttaagagcacaaagagcagcagaagaaaataaagaataaccaagcagcttgatatatgattgaattac

SEQ ID NO: 21794 - DNA, 383 bp, Gossypium hirsutum
  unsure (1)..(383): unsure at all n locations; Clone ID: LIB3146-047-Q1-K1-D1
ggaaatttcagggtgctatgcaaatagttgctatggccgaaattgtgatatacataaacattgatgactcctctgagaattactggctccggttgctggttcgagaatgggctcaattctgcatatttttgtacattgggtggacttttaggtcacaagaattggcaccacgcttttcggttatgccgactttaaaatctaaagtggatttaatggtccctccgatctatcgtatagtaagttaatttgctatttgaaaacagatttttgctttgtgtaatagactcttctagagatagcatttagtttccatgtcgacggagtaatttgaaaccttaattngcattcaactaattatttaaatngacttttacatcagttga

SEQ ID NO: 21795 - DNA, 299 bp, Gossypium hirsutum
  Clone ID: LIB3146-047-Q1-K1-D10
gcccagagccacgcgtcctcgcaatcgcaagtatattgcacggttttttatgtaccgtggcgacgatgaacccggggatgtcaatacttctgttgccaccatcaaaaccaacataactagtcaattcgacgactgttgcccaactggattcaagtgtggaatcaactaccatccaccgactgacatatctggaggtgatcttgctcaggtccaaacagccgaatgcatgatgtccaactaaaccagcgttgctgaagtgtactgccgcatagaccacaatttagatctcatgtatgcca

SEQ ID NO: 21796 - DNA, 416 bp, Gossypium hirsutum
  Clone ID: LIB3146-047-Q1-K1-D11
cacccctgcagctcttgttcacaagacattgcccaggattgcatccccagtccccattgggttgccaacaatgggaaagagggggaaggtgatgatgatgtgtagcatggagaagaagagtgagaatgggtcaaacatggggatgagtgcatcattgctggcagcagcctgtgcagcaaccatgtcaagcccagccattgctctggtggacgagagaatgtccactgaaagaacaggacttccctttggtttgagcaacaacctcctcgggtggatcctgtttggtgtgttcggcctgatctgggctctttacttcatctatactgcctccctggaagaagatgaagagtctgggttgtccctttaaaacccaaaccttatttccttcctttgttcttcattgcaaatatcatgta

SEQ ID NO: 21797 - DNA, 414 bp, Gossypium hirsutum
  Clone ID: LIB3146-047-Q1-K1-D12
aaaatatggctctcaaatggtttctcagttcggcatttactcaagtttttggccataccgatggcggtaacttgcatgccaaggcagtggtatcgtgcccaaacgaaggacttatcggttgcaaggaaatggaaagagggattaccagcatcaaaacctgcaaggaagactaccctaatggcttccaaatgccagttcattatcctcgatactcgaaggccgattacgagaagatggaagaatggaggatcgatatgttgttgaaggaatatggattcagctttaatggtggcaccgtcgatgagaaaagggcttttgccatgggagcttttctttggcctgaccaactttaagttacatatatacatgtatgtagattatgtttgtttggtagattgtgtgattaggaagtgc

SEQ ID NO: 21798 - DNA, 305 bp, Gossypium hirsutum
  Clone ID: LIB3146-047-Q1-K1-D2
tggagattcattaggtggaaggtcgtgccggcggctccacaaacgattcctagtaaagtggcatgacaatagaggagatggaaattgagaagttcagagtaaaggttatcggggccagtggttgtgggcgaaagccacctaatgttcgataaatttggtgaggaataaggaataagtctagacatataataaataaattgttgtttataaaataaaactaaaaaaaagagagaaaagttttaatctagtttaagtcttgtttgtggttttttttaatatcattttaataaaaaaatttaggttag

SEQ ID NO: 21799 - DNA, 356 bp, Gossypium hirsutum
  Clone ID: LIB3146-047-Q1-K1-D3
cccacgcgtccgctgtgaagcaagaagtcattgttgaccttgttgatcaatgccgttcttaccaaaagcgtgtgatgcttcttgttaatagtaccacagatgaggaacttttatgtcaggggttagcactaaatgacagcttgcaacgtgttctttgccggcatgatgacattctgaaaggaaatactgttccgactgaagcagtagcagagactcctgttgtgccatatgttaatattaaccatgaggatgatgagtcggaagatgaatttgctcagctatctcatagatcctcaagggataattctcaaggacagggcaggagagcgcctaaaagtgagcctgggcgagttgat

SEQ ID NO: 21800 - DNA, 420 bp, Gossypium hirsutum
  Clone ID: LIB3146-047-Q1-K1-D4
atcctcgccatggcaagtatatggcttgctgtttgatgtaccgtggtgatgttgtgcccaaggatgtcaatgctgctgttgccaccatcaagaccaagagaactattcaattcgttgactggtgcccaactggattcaagtgtggtatcaactaccagccaccgactgtcgttcctggtggtgatcttgctaaggtccagagagccgtttgcatgatttccaactcaaccagcgttgctgaggtgttctcccgcattgaccacaagtttgatctcatgtatgccaagcgtgcctttgttcactggtacgtgggtgagggtatggaagaaggagaattctcggaagctcgtgaggaccttgctgcacttgagaaggattatgaagaagtcggtgcttaatcaagcgaaggtgatgaggaag

SEQ ID NO: 21801 - DNA, 287 bp, Gossypium hirsutum
  Clone ID: LIB3146-047-Q1-K1-D6
ccaactttgtacgtacaagtgaagtgatctacaatcttgatacggtaatacgttaggtagttttcagcatacttgttttgagtttagtggttgtagataaagaaaaaatggctgaggagcataccaaggttggtggtgaggaagcagtggagagcaaggagcgagggatgtttgatttcttggggaagaaagaagatgagaagccttaacctcaagaggaggtggtcgccacccagtttgagaaagtcaagatagaagatgaacattagggagattagaagaaacac

SEQ ID NO: 21802 - DNA, 397 bp, Gossypium hirsutum
  Clone ID: LIB3146-047-Q1-K1-D7
ggaattccggggcggcccaacccgtccgccaacccttccggtgccggaaaccgaattggaagttaccggcggggcagtcttcggaccccggaactatccgatctcagtttcttcaactactccgtaccagacgaaatgctcaagttcctatgactgtggaacctgcgaaacctgtggttaagcctttgttccaggaggttaccccgccaaccttcagtgaggcaatggaatcttgtccaaaggctaacattggaaaccttaaggaactgctcaaagaggaaaatctatatctccatactgaggccggagatcaaggaaaattgcccgtgttgattttaagtacgaaaggaaacaatcaagaaaagaggcctgctgttgtttttctgcatagtactca

SEQ ID NO: 21803 - DNA, 408 bp, Gossypium hirsutum
  Clone ID: LIB3146-047-Q1-K1-D8
cttttacttgaatttattggactggggcagcagcaatgttcttgcaatagcacttggaaacactgtttatttgtgggatgcttcagatagttctacctcagaacttgttaccattgatgatgacaatggcccggtaacaagtgtgagttgggctcctgatggtcagcatattgccataggcttgaacaattctgaagtacaatcatgggattctgcttcaaaccggcagttgcgcactctgagaggttgtcaccgatcgagagtgggttcaatggcatggaacagtcacgttcttacaactggaggaatggatggtatgatagttaacaatgatgtaaggattagatcccatgtttgtaaaacctacagaggacatcggcaagaagtttgtgggctgaaatggtcagc

SEQ ID NO: 21804 - DNA, 419 bp, Gossypium hirsutum
  Clone ID: LIB3146-047-Q1-K1-D9
cttttacttgaatttattggactggggctgcagcaatgttcttgcaatagcacttggaaacacttgttatttgtgggatgcttcaaatagttctacctcagaacttgttaccattgatgatgacaatggcccggtaacaagtgtgagttgggctctctgatggtcagcatattgccataggcttgaacaattctgaagtacaatcatgggattctgcttcaaaccggcagttgcgcactgtgagaggttgtcaccgatcgagagtgggttcaatggcatggaacagtcacgttcttacaactggaggaatggatggtatgatagttaacaatgatgtaaggattagatcccatgtttgtaaaacctacagaggacatcggcaagaagtttgtgggctgaaatggtctgcttctggacaa

SEQ ID NO: 21805 - DNA, 416 bp, Gossypium hirsutum
  Clone ID: LIB3146-047-Q1-K1-E1
gatgcatcatcagctttactatccacagcagcaacagttctcaagcagcagtagtccaggagagtcacctggaactagcagaggaaatggtctatggagtagaacaggtggatcaccaacactcgcggctgcatcttcacttggacttttcactggttcaggttctaccaattcatcagaagcctcttctccagttgactggagcagtggtagctcaatggctcagttggattataccaatattgattggagcttggatcgcacatctccgagacctggtgggatatggctaggaccaacatctccaatgaagagcagtcacctttattatcctaatacaaatggactgagtgttaaaccaggaatgagattgacgcctaatgtgagtggtgtagcgattgcgggtttacaggatg

SEQ ID NO: 21806 - DNA, 217 bp, Gossypium hirsutum
  Clone ID: LIB3146-047-Q1-K1-E10
agcaaattcaacatgatctccagattgcgttgaacgagcccactgatgccgcttggggtggggcaaccacgaacgtcattgttgatcccaatatcaaagatatcatcactgcctaccagacacacaggcagacggccactactcattatgatgagcatgattaccgcagacagacataccttccatctagcaagaggagctactaaacgttcatagg

SEQ ID NO: 21807 - DNA, 349 bp, Gossypium hirsutum
  Clone ID: LIB3146-047-Q1-K1-E11
gccactctgaaaactccaaattattttcttacagaaaaatctggcatgctaattctgccgatactgatactgaaaccgggcattctctaaataagtgattcatcgtctgtgtcccactcccacaccttgggcagattgtaatgtatgtcaatcttctttgttgcatgtttgcccgtaaaggaagatagttccatgttactttccatactgttatttttatttttgaaggtaggttaagtatccatagttttttatagaagctcttgtagtcggtttgtaactcataagctctaggatctttatccaaactttgtaatagtttataggcactacgaactggatactaacc

SEQ ID NO: 21808 - DNA, 212 bp, Gossypium hirsutum
  Clone ID: LIB3146-047-Q1-K1-E12
cggactcttattctctactctcacacattttatgtatgcaaggctgggaattatccaggagggggtttattattgaccgtttatgctaccccatttatcaaatgtaattagctataccataattctcatgcctatatgatatttacatattaccctcaaggaaatattataagatcaaaactattggtgtctcatttagttgggttctgtaa

SEQ ID NO: 21809 - DNA, 332 bp, Gossypium hirsutum
  Clone ID: LIB3146-047-Q1-K1-E2
gagccatttctgtccctcagctgccgaggttgaaggagaacgtctgcaattccatgttcttctgctgagcccccatgttttgtataggcttttggttgttaccaaaacgactgaaacgtttttaagttatatgaaagttgaaaaaaaaagtagggttataattgatgatgtgatggtggttgaaacatcatcccatttgggtgttttgccctactgtatgtaggatatatgaaggtatgtttgactagcacttgttaaatggctttcgcctctgtagcacctgtaatcctgtttggtgataatcaatgcatagcctcagctatcgtcaactt

SEQ ID NO: 21810 - DNA, 414 bp, Gossypium hirsutum
  unsure (1)..(414): unsure at all n locations; Clone ID: LIB3146-047-Q1-K1-E3
ctaccacaacttgaagtctgtgatcaagaagaagtatggtcaagatgcaaccaatgttggtgatgaaggcggttttgctcctaacattcaggagaacaaggaagggcttgaattgttaaagactgccattgcaaaagctggttacactggcaaagttgttattggaatggatgttgctgcgtccgaattttatggatcagcagataaaacctatgatctgaacttcaaggaagaggtgatttgtgatacaagatattctcagtcattgcagctttatgagattctgtttatatatgattaccatatcattttagatatatattcaagttgctgtgtatatgtcgngtctatattctattgttcggcatgtgcagaaaaatgatggttcacaaaagatatcaggagatgctctca

SEQ ID NO: 21811 - DNA, 411 bp, Gossypium hirsutum
  Clone ID: LIB3146-047-Q1-K1-E4
cccacgcgtccgtgagattagtcggtctttgcatggtaaactagatgattctagtgagctggtgagcaatgtgtatttattggataattatgatgcaaaaatctgggacactaggtattcgacaacttcaacgaagggcatcgatctccagccaacgggcaacattattgaagagatttttggacaagataacacctgagataagtgcagatgctcttgaaaagtccagaatcttctcagtaaagaaggctatgattttggttatttaattatttatttttcttttatttcccccttgtaaattcatttactaaatgcaatttggtttaaccaggttaaaaaagtgatctttaatgagatcctttttgctttttgtatatttgattaaaaaatccttttaatttttatttt

SEQ ID NO: 21812 - DNA, 254 bp, Gossypium hirsutum
  Clone ID: LIB3146-047-Q1-K1-E5
cccacgcgtccgggaagttcacaaccactgtggttgtgatcatctttgggaaaagttaaatgaaggcattgtaggttaacccctcatgattttatgtttattttcgctttgaacgtttcttgtaactgttgtttgatatgcatagggacttttgatttagccatgtacaaaaacagttcatgtttcaaggaaagctcttcccccccaaattaaatatattaaatttattttaaattattataataaaaatatag

SEQ ID NO: 21813 - DNA, 422 bp, Gossypium hirsutum
  unsure (1)..(422): unsure at all n locations; Clone ID: LIB3146-047-Q1-K1-E6
gacctgaacgtggtctcggcaggcttaggatgattaccacccagcctttgtccatcaaagatgaaggagaaaggaaaaagtaccagaggtcgttgtcgctgccgaatagtccagtgtcaggtccgacacccgtgacaccgacgactccgacggcgcgtaaggagaacgtgtggaggagtgtgttccatccgggtagcaacctcgccaccaaaagtataggttctgaagttttcgacaagccacaacctaactctcctaccgtctatgactggctttacagtggggagaccaggagcaagcatcgctgagagggtggcgactgacaggcggctagcaggctgctctagtgagccagggttgcatgtaaatagngngttctctttccttttctttttttcaatgtgcttatttgtctctgtctt

SEQ ID NO: 21814 - DNA, 417 bp, Gossypium hirsutum
  Clone ID: LIB3146-047-Q1-K1-E7
gccggttccaaagccaagaaccttgaaaaagtggcaaacgagacgactcataagacaagccgagggagagagaaagaagggaagactcagcgaactcgaaagaacatttacagaggaatcaggcaaaggccatgggggaaatgggcggctgagataagagatcctcacaaaggtgtccgagtctggctcggtacatacaacacggctgaagaagcggctcgagcctacgatgaagccgccaagcgcatccgtggggagaaagccaagctcaacttccctcaaactccacacctaactcagcctcctgctaagaaaaggtgtatgatggctcctgagttgactccgccgagttctgaaacaaagagcccaccaaccccacaactttttatgggttttggttacgagaatggagtttac

SEQ ID NO: 21815 - DNA, 336 bp, Gossypium hirsutum
  Clone ID: LIB3146-047-Q1-K1-E9
agcaaattcaacatgatgaccaaattacccagaacgatccctctgatgccgcttctgctggtgaaaccacggaagtttctgttgatcccaatgaagaagatatcaacaatgcagagaagtcaagtggggagaaggcggctcctcattatgatgatcatcttaccccagcagagagacgatacattgagcagagggagcaactcgacgttcataggttggctaagcaagctaataaatctcaccgtgatagaatccaggatttcaatcaatatctggcaaacatgagtgagcattatgacattccgaaagttggtccccgttaattcacgcaaaacg

SEQ ID NO: 21816 - DNA, 291 bp, Gossypium hirsutum
  Clone ID: LIB3146-047-Q1-K1-F1
cccacgcgtccgaaaaaaaaaaaaaaaaaataatttaaaaaaaaaaaaaaaaaaaaaaaaaaaagggaaaaaaaaaaaaaaaaaaaaaaaaaaaaaaaaaaaaaaaaaaaaaaaaaaaaaaaaaaaataaaaataaaaaaaaatacaatggccattttttttaaaaattttaaaactggggaaaaccctgtcgtttccctaattaattcttctttttaaaattttagaattttgccatttttttttattagcaaaaagggaaagaaccccaccgctttttaccaatttttt

SEQ ID NO: 21817 - DNA, 409 bp, Gossypium hirsutum
  Clone ID: LIB3146-047-Q1-K1-F10
gcagaaaatatctcaaatctcctcctccttttcagaaatcttagtatcatcaccatggggtgaaatcccaaggtcttctttgacatgactatcggtggtcagcccgctggtcggattgtgatggagcttttcgcagattgcactcctcgcactgctgagaacttccgtgccctctgtaccggcgagaaaggcgtcggccgcagcggtaagcccctccactacaaaggctcctctttccatcgtgtgatccctaactttatgtgccaaggaggtgacttcacggccggaaacggtaccggaggtgaatccatctacggatccaagttcgctgacgagaacttcatcaagaagcacactggtcccggtattctctcaatggctaacgctggtcccggaactaacggatctc

SEQ ID NO: 21818 - DNA, 419 bp, Gossypium hirsutum
  Clone ID: LIB3146-047-Q1-K1-F11
cccacgcgtccgctacacatgacgtcgtttctcataatttttgtgagcttccagttggtacagtttgtgtagctgacactcagtttaaagggagaggtcggtccaagaatgcgtgggagtctccaaggggatgccttatgttttcatttacattacaaatggaagatggaaaaactgtgcctctggtacaatatgttgtgtctcttgctgtgacggaggctatacaggatgtttgtgatcgaaatggcttcccctttattaatgttacgatcaagtggccgaatgatctgtacttgaatggccttaaagttggaggcattctctgcacatcaacatataaatcaaagaagttcaatgttagttgtggtataagttttaatgttggtaatgagaaaccaacaacatgtttgaatacagta

SEQ ID NO: 21819 - DNA, 343 bp, Gossypium hirsutum
  Clone ID: LIB3146-047-Q1-K1-F12
agatgacgaccaaatgatgacgctctccttctaatctcgcaacggaacaagcgtgtggggtgcgctgagtgttgaacgtgggacggtgtggagactgccgaacgtggggcatgtggcgctgctaattgttgctagggtttttgctgttttaagccaattgggccctgtaattgggtttagcttggcccaagttttattgggtttgggcccaggtatatttgggcttgtacagttgtccctctttgctcgttgtcgtgtaactggaacagagtaaagactaaaagtccaattgtgctcggtcttactaaaaaaaaagaatgtattgataataatataaaaattc

SEQ ID NO: 21820 - DNA, 331 bp, Gossypium hirsutum
  Clone ID: LIB3146-047-Q1-K1-F2
ctgtggtttctgagtgttgttttgggattttgaatatgggtgagaataggatgaccggcaaggtgaagtggttcgatgaccaaaagggttatggcttcatatcccctgacgacggcggcgacgatttgtttgttcaccaatcttccatccgttccgagggtttccgtagccttgctgatggtgaagaggtcgagtacgttgttgagtcttctgaaggtcgccccaaggctgttgaggtcacgggccccaacggcaaccctgttcgtggatcatctagatccggacgcggcggcggcggtggtagcggttatggcggtggatccggtggtta

SEQ ID NO: 21821 - DNA, 422 bp, Gossypium hirsutum
  Clone ID: LIB3146-047-Q1-K1-F3
cggacgcgtgggcggacgcgtgggcaaaacaacacattgcaaagagaaagggaatattatcaaaagaacccaaccatggcatttgcaggaacaacccagaaatgtatggcttgtgacaaaactgtgtatttggtcgataaattaacagctgataacagggtttatcacaaggcttgttttaggtgccatcactgcaaaggtactttgaagcttggcaactacaattcctttgaaggagtcttgtattgcaggcctcattttgatcaacttttcaaaagaacttgtagtcttgagaaaagttttgaaggtacaccaaagattgcaaagccagaaaaaccagttgatggtgagaaaccaatagctactaaagtatcaggcatgtttggtggaacaagagataaatgtttttgtttgtaaaacac

SEQ ID NO: 21822 - DNA, 346 bp, Gossypium hirsutum
  unsure (1)..(346): unsure at all n locations; Clone ID: LIB3146-047-Q1-K1-F4
tcctttttttcctcttccgctactgtttctgtcggtttggttattattgtatggtttgcttttgatgttttccttttccagtttatgcaggacgatttctcttagtcagtttgctgtttttgtctttttggattttgaagttggcaaatggttgtaatgggtgctttcgtagtagtcttacagtgagggtggacattagtgtcgatgggaaaacaacaatgaagaagaaaatgatgttaaaactcactgtcatcaagtgtttatatcgatatcatataaatacaaactgatggatgatggattggtttcaatccttttcctttntaaaaaaaaaaaataatataat

SEQ ID NO: 21823 - DNA, 420 bp, Gossypium hirsutum
  Clone ID: LIB3146-047-Q1-K1-F5
atgcacagcggcacacccgatcgcttcctcccatagagttccttccacttcgaattccttcgtcgcgttagaatcgtcatcgttaaagaccgttaactctatttcgagcgctaagaacaacagaaggaaaggcgttgtcggaaaggtgaggtcgagcctggagacagcgggagcaactgtggggcaggtgacggaggttacaaaggacaccttctggcccatcgttaacgccgcgggggataaaaccgtcgtcctcgatatgtacactcaatggtgtggtccatgcaaagttatagctcccaagtttcaagaattatctgaaaaataccttgacgttgtctttctaaagctcgattgcaatcaagaaaataagccattggcgaaggagcttggcataagagtggttccaacgttcaagat

SEQ ID NO: 21824 - DNA, 425 bp, Gossypium hirsutum
  Clone ID: LIB3146-047-Q1-K1-F6
gagctttcaaaagccatagctttcaagcctgacttgcaaatgcttcatcttcgagcggcattttacgagtcgatgggtgatatgaagtcagctctctgtgattgtgaagcagcactctgcttggaaccgaaccatatggacacgctcgatctgtataatagagcacgagacagagccatcaatccacaagaaatgtgagaggcatcatcgtcattacatttctgataaacttgccggatgtagcagtcagttacaaggaaaaagaatcatggagtcttttcacatcgagctgctgactgaccctcaccgtggaaaggaaaggacccagagagagttgcttgtaaatgcgaacaggccttatggaatcaggtgtaccttgccacataagaaaagatttagccttgtaggttaaaaggggtcacact

SEQ ID NO: 21825 - DNA, 375 bp, Gossypium hirsutum
  unsure (1)..(375): unsure at all n locations; Clone ID: LIB3146-047-Q1-K1-F7
tgaaaccctcaaaattccactaaaaaatggcctccacagcttccctctccaccgccgtagccaccacctctttcctccgcggccatccggcgccgaaaaccctaaactcccttcctttcaaccaatctcttttcgggctaaaaccccaacgaaatggccgtctcaccatggcagcatacaaggtgacactgttaacacccgaaggaccccaagaattcgtgtgccccgacgacgtatacatcgttgaccaagctgaggaagaaggcattgatcttccgttctcgtgtagggctgggtcttgttcttcgtgtgccggagtgattaagcaaggctccgtcgatcaatccgacggtaatntccttgatgatgaccaga

SEQ ID NO: 21826 - DNA, 417 bp, Gossypium hirsutum
  Clone ID: LIB3146-047-Q1-K1-F8
gagaagagaagggaaaaaagaaagtgaaaggaaaaagacgaaaagatgatgtccggaggttataccagcattgataaccagaaagtttctggatccgtacccgccgtttcggattccggccgtgtcccggtccaattcgcagattcgggccttcaaacatttcctccatcgggtgtgcaggggaagatctcgggtggaactctacctccatctgatgccgacgattcattttcaagacctgctggtggctcttctagtggctctgatgaaccacaagcaagtggatggcttcataaattcacagttgctgcatacaagccatattttgatgttgatactacagatgttttggatagacttaaggagtcactctatccatttaggggaacatttacagagaaaacagctaccaaccca

SEQ ID NO: 21827 - DNA, 221 bp, Gossypium hirsutum
  unsure (1)..(221): unsure at all n locations; Clone ID: LIB3146-047-Q1-K1-F9
taaattcatacataagcaacttgaagttatgttctacacntagattattgntcaggcgggggcactatcactttatctccagaaccatccntcaccaaaactttaaactttcttcctttcaaccaatctctttttattctaaaatcccaacctaaaatccttttcatcatcgcatcatcctattaaactcttataacacactaatttcccatttaattcct

SEQ ID NO: 21828 - DNA, 124 bp, Gossypium hirsutum
  Clone ID: LIB3146-047-Q1-K1-G1
aaaaaaaaaaaaaaaaaaaaaaaaaaaaaattatttaaaggtcggccgttctaaaaagacggggcgtacatacacaaacatacaacaaactaaactcttatataatgtaaaccaaaattcaatt

SEQ ID NO: 21829 - DNA, 413 bp, Gossypium hirsutum
  Clone ID: LIB3146-047-Q1-K1-G10
ggaattactagatcttccttgtgttcttgataatgcatcggactccagggatgctccttcttcattgcctcaaaaggatgattacagtgaagacattcccaatgaagatgagattgatctagcagatgatgcagaacggaataatgaaaatcggtgctcatgaatatgaataatattttctatcaaccaagaggtttattagtgcaaaaagattgatagcaatatcttgctatactatgacgctttacttgtttgtgaagttggcaacttggtttaatggcccacacttttccaactttcatcagtagaggagagcacctatacaagtttctttctttctttgtatctaaaataatgtataaacatcaaatattatatcaatagcttttatcacaggcattcattatatgagc

SEQ ID NO: 21830 - DNA, 338 bp, Gossypium hirsutum
  Clone ID: LIB3146-047-Q1-K1-G11
agatgcagaagtactatattggtgaggtcgatgccaccaccattcccgcacgaaggatgtacaaagcacagacgtcaaccgcggcaactcaacaagaggagcctggctttctgtttaagattatacagttcctggtacccctcttgatcttaggcttcgcattcggtttacagttcttggggaagaaggaaaaaaccgaaacttagataactttcccattacggaacctgctagttcgtatgtatgcttgttaaagctgttgttggtgttggtgtaatgttcgtgacagtctataactgattgctattaataatgtcttggaatgtcgttttcgatct

SEQ ID NO: 21831 - DNA, 406 bp, Gossypium hirsutum
  unsure (1)..(406): unsure at all n locations; Clone ID: LIB3146-047-Q1-K1-G12
cccacgcgtccgcaaacacttacatttcatgaggacgaataccaattagaggagctggaagttgttgcggctgattatatgttgaaggtgggtgtctctaatttcaggaatgcatgggaaaccatggatgcggattgtgagcgtgtcgatgaatatggccttggccctagggaaagcctggctgaagctgttaatgcagtcatcaatcttctaggcatgcaaccttgtgagggcacagaggttgtccctaacaattcaagatcacacacttgtcttctatctggagtatacatcggcaatgtcaaggtgcttgtgcggctgccggttggacttgacggtccaaaagatgtggcaatgaaactcgctgntagatcagaggatgaagcttgtagtgatgcgattcatg

SEQ ID NO: 21832 - DNA, 356 bp, Gossypium hirsutum
  unsure (1)..(356): unsure at all n locations; Clone ID: LIB3146-047-Q1-K1-G2
cggggcggcccaagccgtccgccaacccttccggaaaaatctgccaaacttggttttggggacccccggggagtctattcaaaggttcatagacattcaaagggggcttttccacagccagatcgaccagcttcaaaccgttgttgttccacaatgcaaactcaccggcgtcaatcctttcccccaaaaaatggcagctgggcttttgtcctaaaaatggggaacgaccaagagattgctaacccctaagctgtaagtatatgcagctgtttttccattaagatgnattacaagaaagatcccggagatagtgctcaatttgtgttactgtcacacaggtgcgtgatttttttaat

SEQ ID NO: 21833 - DNA, 418 bp, Gossypium hirsutum
  Clone ID: LIB3146-047-Q1-K1-G3
ctcttccttcattacatcacattccttactcgctttgtagcaattaagccaatggcaaaacttgtggctgctttcttcttggctctcattgccatctccatgcttcaagttatggtcttggcatcgcacggacatggaggtcatcattatgatcaaaaacattacggccctggaagcctcaagagttaccgtaagcaaacttcaactcatctcacatttttcttttgcttttctcttaaagatctcatctgaaacattggaaaacagtaacatggtaaaaaagaaaaaaaagaaagaaagaaaacccagtagtaaaaagtttcataaatattactctttcttgaatggatgagcagaatgtccatcacagtgctcgaagagatgcagcaaaacccaataccataaaccatgcatgttc

SEQ ID NO: 21834 - DNA, 410 bp, Gossypium hirsutum
  Clone ID: LIB3146-047-Q1-K1-G4
cccacgcgtccgggttgaggtgatttacgacaaggtaactaggagaagtaggggatttggatttgtaaccatgtccacaatcgaggaagtcgaagctgctactcaacagttcaatggctatgaattggaagggagagcattgagagtaaactcaggacctcctcctcctcgtagggaagaattttctcctaggggagcaagaggtggtccttcgatgggagcaaggggtggtcctccgatgggagcaaggggtggtcctcctatgggagcaagaggtggtcctcctatgggagcttcaaatcgtgtctatgttggtaacctttcatggggtgttgatgatatagcactcgagaccttgttcagtgagcaaggcagggttgtggaagcaaaagtcgtttatgacaaggaaa

SEQ ID NO: 21835 - DNA, 428 bp, Gossypium hirsutum
  Clone ID: LIB3146-047-Q1-K1-G5
aagttctcagcctttgtatcgtcttcttgacagtttaacttaatacattctttctaaagttttgtctctggattcctcctcgaaaccctgtgattgtctataggttgattttgtggtggctaatagcaataccaacaattcgtgagtacaacttataccttcaagaccgtaaaccagtgaaaaaggtaggagcattttgttggctttccctcgcgatttgcatcatcgagcttctcatatgtatcaagtttggacatggtttatacccgaagccgatgccacaatggttggtagttttctggttgtccatgggatccactctcgtattgttccttatgatttggtcatggaaactgcagcggagttaccagaaaaagagacgataatttcaatatactattcttttggttacttgcaccattgattgg

SEQ ID NO: 21836 - DNA, 384 bp, Gossypium hirsutum
  Clone ID: LIB3146-047-Q1-K1-G6
ggggtgttcgggacggcagcgaatatgaatttatgttcaaagtgttaccgggacctccgggtttgtgtggagcaagcggcgaaggcgaaagctgttatggagaaatctctcagtatcaaaacgaagcatgaacctgtcgttgtggagacttttaagcctcatgtgggttcttcgtctacatcgattgagcaacaacaaccggctgttgttgccgttaatcaacaaccggaaccaaaggcggcgaacaggtgttttatttgttggaaaaaggttgggttaactgggtttaagtgcaggtgcgagaatacattctgtggggagcatcggttcccagaaaaacacgagtgttcatttgatttcaagggtattggacgtgatgccatt

SEQ ID NO: 21837 - DNA, 401 bp, Gossypium hirsutum
  unsure (1)..(401): unsure at all n locations; Clone ID: LIB3146-047-Q1-K1-G7
cggcccgaccgcacgcgtccgcacagaattacagtactattagcatgttgtttgattgaggctccgaagntataaaggggggaatccttatatttgtcgcttcgccacaaggagcatatcagtgcctatggtgagggaaacgaaagaagactgaccgtaaagcatgaaacggccagcatcaacacgttttcatggggagtggctaatctcggttgctcaatccgagttggtcgtgacactgagaagaatggaaaattgtacttggaagatcggcgttcggcatttaacatggacccatatgttgagacagcattgctggcagaaactacactattgtatgagccaacactttaagctgaatcacttgctgctcaaaagattgctttgaatgtcttaattaa

SEQ ID NO: 21838 - DNA, 96 bp, Gossypium hirsutum
  Clone ID: LIB3146-047-Q1-K1-G8
ttttaaatgctaatagtcccacccatataacatattctatgcggtggaggcaaccattatgaactatccagggaccattcattgagcattaaaaac

SEQ ID NO: 21839 - DNA, 201 bp, Gossypium hirsutum
  Clone ID: LIB3146-047-Q1-K1-G9
ctaaggccactggaacaatggactgcagggccccacgctatatctgaaaggattggtgaattcggatcattcactatttgtgacattagctaagaaatcattacggactcttgctgcgggcataagaaagacatagatcaaagaaaactaagtgacgattacatatatcgtacatatcagcattgcgtaatgtgaaccgta

SEQ ID NO: 21840 - DNA, 250 bp, Gossypium hirsutum
  Clone ID: LIB3146-047-Q1-K1-H1
cggacgcgtgggttcagatcgggcggccgctcgcgatctagaactagtggtagtagtaccaggatttgttacctatgacatggttcgatttgtttatcagatgttttcggactgttgttctgtgttctcttctgtttaaacataattgaatcggttactttatagtctttatgacttacttccttatgttcaattttttgttgtcttagcttcttgtttttccatgtgtttctgattgaagcacacttta

SEQ ID NO: 21841 - DNA, 416 bp, Gossypium hirsutum
  Clone ID: LIB3146-047-Q1-K1-H10
gacccacgcgtccgctactcaggatctgaaaggtcgcttgaacgtgcagtttcaaggggaagagggcattgatgccggtggactgactagagaatggtatcagttactctcaagggtcatatttgataaaggtgcattactttttactactgtggggagcaatgcaactttccagccaaatcccaattctgtttaccagaccgagcatctttcttacttcaaattcgttggtcgcgtggttgcaaaggcactatttgatggtcaacttttggatgtttattttactcgatccttctacaagcacattcttggtgttaaggtgacctaccatgatatagaggcagttgatcctgattattacaagaatctgaagtggatgctggagaatgatgtaagcgacattcctgacctgactt

SEQ ID NO: 21842 - DNA, 349 bp, Gossypium hirsutum
  Clone ID: LIB3146-047-Q1-K1-H11
cgcgtacgcatacacccacacgtttttccacttttgctttcaatttagggcttgcactagccagaggtgtccgttcttatcacgaataaactgcctaccctttgctttctaataatattgcgaataatcgtgtcaagaagttcatgacgccctaaaattaccgcaagatctccgtcatgacaaactgtctaatgcctaaaggtattgactccctttttattattgaagttcaagggatgcactttgatgcccaatattgtttatgggtccgacaagaatactctccactatcttctcaatcgttttaagaaatttgtcttgcatatcatcctaaagctcgagcttctta

SEQ ID NO: 21843 - DNA, 431 bp, Gossypium hirsutum
  Clone ID: LIB3146-047-Q1-K1-H12
ccggaccggaagggccggctcgagccacgcgtacgccacgcgtccggcttttgatattctttaattattctttccttctttctttctcttttccgcccattctctgcattcattctgcttctttcctgactttatttctgcatttttgttgggttgccatgtccaggtgactcatctccatccccgatctatttccgcttccgtaatatccagggagcaaggagtccccctcaataatcacctgctttaagcccagttcgtgacccacttggactgcctgaaggcatgcgatggcttcagccgcaaaactagaacaaatgttgcatcgaaatttattttgtaaaaaccctctttcagaggccaccatctctcagattcaaggctcaagccgtccatatagcccataaagcgcagatgaaagttctacttgc

SEQ ID NO: 21844 - DNA, 408 bp, Gossypium hirsutum
  Clone ID: LIB3146-047-Q1-K1-H2
gcagcagcagcagcagcagcagcagcagaagtaaaagcagaagccgaagccgccccagtggaagcacccaaagaggaagctgcaaaggaagaagagaaaccagctgaagctcaagctgagaatactactaccgagtaaataagcttgtaagatggggaatcaatggaagcttgtgtagtgggcttactgttagctaagtttgcatgttgaaatcaattagtttcaattctagttgaataaggatgtgatagtattaaggtggatgaggcttgggactggggcatggaaatgacccaccaatgatagcttgcctattggctaaactaacatgcaattggcatatggcagggagagagagtttaaagaaggttcaagcaggcattttgggggggggggggcatttttcat

SEQ ID NO: 21845 - DNA, 394 bp, Gossypium hirsutum
  Clone ID: LIB3146-047-Q1-K1-H3
agatggtggagtccaaattgtggagccattggagtcggaaggaaaatggggcacctctcctccagctgaaaatggtgctggaccaagtaccacatcaggtgtaactggttcagaacctccccagcggtgaccagcacacgtgcaggtattgatagaaaggatataaccaaagcatccatctctagcatgcatttttatcatatgctccctggtgtcatgttaaaaagaaattctcaaggggaagcttcagaagtataatggattggtatgaatcgcatgacatcctttttgcagccaaggcatatagtgttgatttcagggatcttggtgtaaatttaggagatgttggcttaaagaaagtgggtctgtctgactatagacttgaaaaaaaaga

SEQ ID NO: 21846 - DNA, 426 bp, Gossypium hirsutum
  Clone ID: LIB3146-047-Q1-K1-H4
cccacgcgtccgattcgatttgtcttcatttgattacaatgatgatctccaagctgttggagtggacaccatgccaaaacaagatgtctcaatctggttctagtaacaatctcaaggctgaaactgaaaccgtacccgactcaaccctactgagccccgtatcgtgtgtttcatcgttatcgtattttttcaagcttgtccgtgtagtaatagaagttttaacaagttttagcaggtttatcatatatggggaactgattttatacatagaatgtgactttgtcttataaataagttaggtgtctggttttttgttctttcatgttcactgtttttttatcagttttctaccattattattacatgttggggtaggaatctgataatgagtgttgttttgtcttgtaatgaagtcattgggggggg

SEQ ID NO: 21847 - DNA, 433 bp, Gossypium hirsutum
  Clone ID: LIB3146-047-Q1-K1-H5
cccacgcgtccgcccacgcgtccgcccacgcgtccgtccaatttagggtttgcacgagccgtagtgcgccgttcgcatcaggaagaaatggcggtccctttgctgtctaagaagattgtgaagaagcgtgtcaagaagttcaagaggccccaaagtgaccgcaagatctccgtcaagacaaactggcgaaggcctaaaggtattgactcccgtgttaggaggaagttcaagggatgcactttgatgcccaatattggttatgggtccgacaagaagactcgccactatcttcccaatgggtttaagaaatttgtcgtgcataacgtccaagagctggagcttctcatgatgcacaacaggacatactgtgctgagatagctcatgatgtttcaacaaagaagaggaaggaaattgtcgagcgggcagcacagt

SEQ ID NO: 21848 - DNA, 431 bp, Gossypium hirsutum
  unsure (1)..(431): unsure at all n locations; Clone ID: LIB3146-047-Q1-K1-H6
ccggaccggaagggccggcgtcagagcgtacgcgatacagaacacagacgtaagtctataggcacgaataagacgtacgaaacccaancttccctagaaatcgattatncgttcttcagtcaaacaccacgctattgcttttgtttgcatacacaatcaggaaagggtatggcagccgaggacaatttggacttgtcaactctgcaatctcagcttagtgaaactcatgaactgtggaagcaggagattgaaaatcgtcgaggccaagtagacgtgttacaagccaaaattatggaggtaaaggcttctatacaagggtcggaagaggagtcgaagaaggagttagatgttctttggcgaagggtagaaactaccgcgaccttattgacttacttgaaatcaaaagcaagagtaatggctgntcccgattt

SEQ ID NO: 21849 - DNA, 390 bp, Gossypium hirsutum
  Clone ID: LIB3146-047-Q1-K1-H8
ggaagttttcttttcaatagcaagggacataaagcaaagactcgtcgatactgacttaaaggctgagccttcaacaattaagatcaataaacctgaccaggcagctggggctggtcaagctgcacaaagaccggcttgctgtggttcaacctaagggagctcaaacctggtgggacacgtattggatgttaaaaactacttttcttcaaaaaatggaggggaaagagaaaactaattgtggtgactggatgatgagtgcctgtattttcttattgtcattctttataacttggtttagggtgtgaggatgtagtgtttttctttataattgtttgtgtcatgtgaagaacataaccttttggtttctcccccatctttcggttcctttat

SEQ ID NO: 21850 - DNA, 330 bp, Gossypium hirsutum
  Clone ID: LIB3146-047-Q1-K1-H9
cccacgcgtccggttctagatcgcggcgccgcccttttttttttttttttttgttcccaaggttaccttagccttgccttgtttgtttgtttcctcgtaattatatatattacaagtgtttcagacagaacacaattacagtgtaaaattagaaactcccagaatcccgagcaatttctattattattcccatagcatctcttctatattttgctaaagctgaagaacgaggctattattaaaaagtccattatgaaatgagtttggttcaccaaaatcactcacttacacagaagccatgtgccggatcaagtcgatcacacgagaact

SEQ ID NO: 21851 - DNA, 304 bp, Gossypium hirsutum
  Clone ID: LIB3146-048-Q1-K1-A10
agccttcggccaagccgtccgcccacgcgtccggaaaaataaaacccttgctttactagactttatcccatggggcaccactaacctccatattggggggtatgcccaccatggcggtttaccatggtccaacttgggatctgtctccttggggccggggcccctaagacccccagaccgtcgggacaccctgcatgttgctgtcaagcttcggtgctgtgattcttgattggcttcgagctaggtatgattggttatgtggataaaatgaaggctgacttaatattggttatttatttttttg

SEQ ID NO: 21852 - DNA, 408 bp, Gossypium hirsutum
  Clone ID: LIB3146-048-Q1-K1-A11
cgcacgcgtccgcccacgcgttcggaaaaattattcccttgctttactagactttatccgagggggcaaccactaacctccagtaatttggtggctaatagcacagacaatggacagatcttacccatggatgccaagacttttgggaatctggatcatccgtatggaggagcggggagaggcacgcgtaaaagaagccgtgcgaggaaaccgctcgtgagacccaaccccctggcactgttctggcatgttccagaagcttccggtgcttggctgctggaattccttttgaatttgggctatacgagctaggggtttatgaatttgggtttattgatggattaaaaaatgtaaatggactggactcttaaattattttggctttatttatattcttatttgattcat

SEQ ID NO: 21853 - DNA, 415 bp, Gossypium hirsutum
  Clone ID: LIB3146-048-Q1-K1-A12
ctgtaatcaatatatcttccattgctggtcttaatcgtgggcaactacctggaggtttggcttatgcttcctcaaaagcaggcctaaacaccatgacaaagaccatggccatggaactggggatgcataaaatccgagtgaactcaatatcacctgggcttttcaaatctgagatcacagaaggccttctgaagaaggcttggctacaagaagtggctacaaaaatcaaccctttaagaacatttggtacggcagatcccgcattaacctcgctagttagatacttaatccatgattcttcggaatacgtaacaggtaacatattcatcgttgatgccgggtctaccttacccggtgttcccatattttcttcgctttgaagcacaattggaatactaaatgtttgtattccttg

SEQ ID NO: 21854 - DNA, 409 bp, Gossypium hirsutum
  Clone ID: LIB3146-048-Q1-K1-A2
ggccgacccacgccacgcgtccaggcgtcgcatgggttcaaccgacatccactttattggttggatcccagcgaagctgagaggcatcccatgccacaagtgactgccagttcgaaaaagaaaggcttcaagaggtaaggtcattcaaattgatcttagcatcgttagaggtttctaggtgactgaatcgatgttttcttcttttatgcgcttcgatggatactatagtccaactgatttttctgaaatttttttgaaccatgaaacaattaattgaagagtaaccttcttatgcattaattactcttccttcttgacaattatactatattacatcggtgctataggattttgatttagatttccttgattatattgtggtcggatcgttgtttataaattaatataa

SEQ ID NO: 21855 - DNA, 409 bp, Gossypium hirsutum
  Clone ID: LIB3146-048-Q1-K1-A3
aatttccagagattgggatggggaccactggattgatattgatgcaagaccggatgttcggtccttgatatctgatgtcattagcccagatatggacacgaaagtttccatgtccactactattgtcatggatgccaagcatgatgggggtacaatgccagttgaagctgttgctgccaaaattattgctgaaggggagaaacctgagttagcttttcaggactgttttgataaccttgtagaagacgctgattgtaaggagcctgcatcatcaaaagatgaaaaggatggggattcaagtgattgtaagaagcctccaccatcagaaaatggaaaaaatgatgatgctgatgatgccagtaccattcatgataaactaaatggtattgatggtaatgatgaaatcaac

SEQ ID NO: 21856 - DNA, 398 bp, Gossypium hirsutum
  Clone ID: LIB3146-048-Q1-K1-A4
cccacgcgtcccaacaaactgtccaatttttgatcaaagcaacatcgaaagggcctgggggggtatatccaagatattatacatccccaaatacagcactcgactcaaagaacacgccacacacgaatcaccaaactaatctacgagcaaacccatggtgacatcaataccttcttgtagaacgtaataaacaactgcataacctacaccaaacattctacgaaccatactcatactgctactaatacaaatcctgcactgaagatgcaacgcaagacacagaattgaacagctgattcgaataccaagtgatcataaactaacgcatacaatttcggaaatgctctaggactcatactatcattcatgttctttcactagcattctgactcttaatc

SEQ ID NO: 21857 - DNA, 315 bp, Gossypium hirsutum
  Clone ID: LIB3146-048-Q1-K1-A5
cgtcccgttcacgatatctgtcactgatacaaattaatattatattcagcttctgctataaacttaaaatcgtatttctttccataataaacgattatacatgttttcaaactaaagtatacagataaattacacatatagaaaatttactgtaactgtcacactataatatacgtctttttaaaattaaacttatgatcacatacattttcagttaaattacaacataatttgtgatccatacaatattctaaccaatcacatcactaatatcgtactatacaatgaacaaagtcatttcctttgtttataact

SEQ ID NO: 21858 - DNA, 407 bp, Gossypium hirsutum
  Clone ID: LIB3146-048-Q1-K1-A6
cgcaagggcatagatcgcccatcgtcgcggctccaccttccccaaacgcacaccgcggtggccgacgagccagatatctcggaggtgtgggagcgtggcatggagtagcgcacgaatcggaagcttggcgcgcgtcgtacgctgcttggtctcgaagcttgcggcgccgatttccttctgcagctggggttttgggttggctttatgttttgtgtattgggttgagagatgtgggttaggttttgggtaatctgttgggctttgggtctgttttgtattgggttttaataggtgtttttatatttgggtttagtttttttatttaattttgtatgtgtgagcctgggcataaattgggctcaacaataataacataacaaacatagcaataaagacattaacgatac

SEQ ID NO: 21859 - DNA, 333 bp, Gossypium hirsutum
  Clone ID: LIB3146-048-Q1-K1-A7
acacgggcttgcccgtcacaataatagaggattatgcataaattgacattcgggtcgggttaggctattacattggagtggtaaagggaagccatgggtgagactagatactaaccgaccatgaactttagatgctttatgggctccttatgatttgctacaaacaccctttgctttagaatcttaaaaaattatgattagtatatgtttttttcaacaataattttctttttatgggctgaaattttttctttcaatgttgccatggaacttaataaagaaaaaaaatggacttgagtggaaaatttaaagaaaaatttttttgggaaaaat

SEQ ID NO: 21860 - DNA, 376 bp, Gossypium hirsutum
  Clone ID: LIB3146-048-Q1-K1-A8
cccacgcgtccgattggatcatcccaagagtggacctcggtctttgtctggtgagatgtcggggtttgctggtgtccctcctacttgcatggttcagtgcttgcacaaagggtttaaccatccaaatgggtataaatgtgcacctgagaatgttaaggttgggtccttacagatgtatatgaagaatgccgggagtggtgaggatgtaggtccaggaggtttccctgtggaggaagtgcacaagatcagcgtgctcgatataagaatggcaaattccgatcgacatgccggtaatatcttgattggtaaacgggaaaatgaccaaactgtgcttattccaattgatcatggctactgcttgcctgagaatttccag

SEQ ID NO: 21861 - DNA, 362 bp, Gossypium hirsutum
  Clone ID: LIB3146-048-Q1-K1-A9
agaagttcaagcgcatgtgtgaaaaatcgatgatcaagaagcgatacatgtaccttacagaagagattttgaaagagaatcccaatgtatgtgaatacatggctccttcactggacgctaggcaagatatggtggtagttgaggtgccaaagctaggcaaagaagcagccaccaaggccattaaggagtggggccagcccaagtccaagatcacccaccttgtcttttgcaccactagcggtgtggacatgcctggggctgactaccagctcaccaagcttttaggcctccgcccctccgttaagcgcctcatgatgtaccaacaaggtttgcttcgcaaggggggacggttgctccgagtg

SEQ ID NO: 21862 - DNA, 413 bp, Gossypium hirsutum
  unsure (1)..(413): unsure at all n locations; Clone ID: LIB3146-048-Q1-K1-B1
cgcagctccccctaagaagcctgtatatgtaccattctccagaaactatatgcctacttgggcttttgatcacattaagtatttcaatggtggctctgagattcagctccaccttgacaaatacactggtactggtttccagtccaaaggatcatacttgttcggacacttcagtatgcaaataaagctagtccctggagattctgctgggactgtcactgccttttatttgtcttctcaaaactcagagcatgatgagatagattttgagttcttgggcaacagaacagggcaaccatacattcttcagaccaatgtgttcactggtggcaaaggagacagagaacanaggatttacctttggtttgacccaaccaaagaataccactcctactctgtcctttggacatgta

SEQ ID NO: 21863 - DNA, 404 bp, Gossypium hirsutum
  Clone ID: LIB3146-048-Q1-K1-B10
gcgacgcggccggacactcgtaccaaaatcgggcttatcctcaaaaactgccggatataacacgatcatgcgtgttggcgcatataacagggactctacctctgcagacaccccagccaagcttggcaccgcagcttactatgaagctgaggaggaggcgcccaacgctgctgctcaggcagtcaagagtgatgaggacgaagctaaacctgaccctggaagtatcagtcagatcaactttgctagacgccttccgttccaatatatgaagcaccagatagcaggacatgacgacgagactttgtcatacagttatagtttgatcgaaggtggacctttgggggacaagcttgagaaaatcagctatgacaacaagtttgaagcagctgcaagtggaggaagcc

SEQ ID NO: 21864 - DNA, 237 bp, Gossypium hirsutum
  Clone ID: LIB3146-048-Q1-K1-B11
ccggggccgaccaacgcgtccgcccaaattacagtacaaatatcttgaggttttatttaggcttaaaaactataaaaaaagcgagggtgaatttgtcgcttcaccacaaggaacatatcaacgcctatggtgagggataccaaagaagactgagcggatagcatgaaacggccagcatcaacacgtaatcatgggagtggctaatcgcgggtgctcaatccgagttgggcgtgacac

SEQ ID NO: 21865 - DNA, 230 bp, Gossypium hirsutum
  Clone ID: LIB3146-048-Q1-K1-B12
cccacgcttccgcacacttttctttaaactttcttttccctccaaaactctcaaaaaaggtgtgggcttatttgtatcatcaccacaaaaaacatatctaaatctatggtaaaccataccaaacaatactaaccatacagcttgaaacctacactgtaaccaccctttgataaagaatatctaatcacgattactcaatccgagcacctctcgacactgataaaaatgga

SEQ ID NO: 21866 - DNA, 403 bp, Gossypium hirsutum
  Clone ID: LIB3146-048-Q1-K1-B2
cccacgcgtccgcggatgatcaaatgttgtcgatagaactgcaaagagaaaagcaggtaacaagtcaagacaaagctggttggagtttgacaatggtaatggcatgttgttctagcgtgctgtcgcatgtcagtgtcggatttgtcaaagccacattataagtcatatttaactgtgttagtgttaggtagatcaacagtttgatggtttgataggataggtagcttgaacattcttaaagaacaagtatcatattgataaattcgttaatcttcaggggctacttataaaaattgtcaactattttataacaaatatgggcttgaagggtttctattaagtttttcttcggcgaggtattttactcgtgtatatggacatataattccaatatatattacat

SEQ ID NO: 21867 - DNA, 239 bp, Gossypium hirsutum
  Clone ID: LIB3146-048-Q1-K1-B3
cccacgcgtccggggaggcttgactttttttgacttacttcacagacttgctttagaagggcatttcatatatttcaagccttccctcccaaagcaagccaaggtgaggatctttgactggttgtgaaaagtgaaagaaaagctggtaaatgattcttgatatgctttaagtctagcattacgtaagcagggtttgtggttcatgttttaaagtttctgcttacctttggttttcaaaa

SEQ ID NO: 21868 - DNA, 410 bp, Gossypium hirsutum
  Clone ID: LIB3146-048-Q1-K1-B4
gagatgagcccgatttatcatgggttcagtctcttgtaaaagagtctcccactgagatcaaagacaaaatagcagcaccggtctcaggtgagggttctagcaggaactcggatacagttgataatgccatgctgggagcttggcttgagcaaatgcagctcgatcaacttgtggctcagcaaaactgaaaaatgttttagctgagccctcctgaggtagttcatcaaaaaaaggttttggtaaataacatttgtattttttcttcggattttcggattctgttggtgatttaatgttgaaggtaaagaggaacaaggtgaaggcaaagagattgaggtcagtttgacgaaaggaggcttcaattttcatttattattattattacaacaaaagagttagaacaggatgag

SEQ ID NO: 21869 - DNA, 411 bp, Gossypium hirsutum
  Clone ID: LIB3146-048-Q1-K1-B5
catacactgaaaaagtctgctcgctcattttccctattgtcaccattcaaaagcaagaccagtgagaagaagttgacagcttgatgatgatgaaaggtgaaccgaagtgtctcaattgtctcgtttatatcgatttccaaaggaagttccttaagtagacacaatgttaaaccgaactggttcttagcaagtgacatcccagcatgattttatgtactttctctgttgtagccatggatttctgccattgttttactgtaaatgagagaatgcctttgattttatcccattacctcacaagtcacaaccaaaccaaacatgaaactatcaaaacccgaaaaaatataaacccaacccgaagccgttcaaacccacccgattgccacaagaatgcatttcgccaaattaatt

SEQ ID NO: 21870 - DNA, 277 bp, Gossypium hirsutum
  unsure (1)..(277): unsure at all n locations; Clone ID: LIB3146-048-Q1-K1-B6
ccgtccgcccacgcccgtccgnngcctatctgatagggtggcacttgggatggggtaaagccnncatctgataagcaacatcanctgtcacanctgccatgccagaagncgtttcaggcnagagaaggangatgggancttaaacaannaacagaaattttatgggancttaacacnatctgaaaaaagatgtattgggggtccttataaccatgaataagagtggaaaattttagagtgaaaaacaaagaaagcaaaatagaaaataaggaaggtc

SEQ ID NO: 21871 - DNA, 493 bp, Gossypium hirsutum
  unsure (1)..(493): unsure at all n locations; Clone ID: LIB3146-048-Q1-K1-B7
ggaataacccgggctcgaccccacgcccgtccgnnctttgcttttttttccctttcctttnncttttctcataaatnncggttcccttttcccccatccctaaagagagatccgtataaatttcaactttgaannatttcttctcttttnnttttccctaattttaaatttttcccaaacccanntttctccccttaccccgattccctttttatttnnntcccccaatttcctcaaatncggcagcccctctgcatttctccgtcggtagcccaactgctgtatnctctgtcgacatcnntgctgtcgtccttggttttggattaatgagaaaagtgagcctggtggtgaagtcgccggtgaaggttgggaagaaaagcgtggcggaagagaaagttatagcggctttaaagagtcacagcaaagctgagaggaggaggagagaaaggattaatgctcacctggacaccctccgtactctcttgccatatag

SEQ ID NO: 21872 - DNA, 309 bp, Gossypium hirsutum
  unsure (1)..(309): unsure at all n locations; Clone ID: LIB3146-048-Q1-K1-B8
ggcaagaaacggtgatggaaaggggtatggttgtgggtggggatatggttccccaggtggaggaaaaggtggcagatatggttcttctgcttctacgtctcaaaaggaccatccacggctaggagactgagtcccattggtcttagaaattaaggtgcccactcagtttttcaaatcttcgttctgggagggaagagaagcaagccagcaaaagcatgtgaaaattgattgctgcggtgtctaaactccccatccaacaacaactntaagcatccacgaaattttgtcaattttcaatggaaataagtc

SEQ ID NO: 21873 - DNA, 208 bp, Gossypium hirsutum
  Clone ID: LIB3146-048-Q1-K1-B9
agccttcggccaacccgtccgccaacccgtccgttttttttttttcaactcaaaacctcccaggtatattagaaataatggtgttggcacttattactattagtcttactcttcaggcccccctggccggcttttcaagggtttttctttttaaacttaccagggttggcccaaggcttgttcttaagccgtcaaaaatggtgagggt

SEQ ID NO: 21874 - DNA, 418 bp, Gossypium hirsutum
  Clone ID: LIB3146-048-Q1-K1-C1
ctgaaaccttaggagcagaaaaaaaagggaaaaaaaatctcagattttctgtcaaggaaaatatggaatccagtaggggccaaggtggaatccagcagttgcttgctgcagaacaagaagctcagcacattgtcaatactgccagaaatgccaagatggctaggctgaaacaagccaaggaagaggctgaaaaggagattgcagaatatcgagctcaagtggagaaggagtttcagaggaaacttgccgagagcagcggggattcaggtgctaatgtgaaacgccttgagaaagagactgaagcaaagattgaccacctgaaaaatgaggctgcaagaatatcagatgatgttgtccaaatgcttctcaagcatgtaacaactgtaaagaattaggccccttgagatggcaaacattc

SEQ ID NO: 21875 - DNA, 414 bp, Gossypium hirsutum
  Clone ID: LIB3146-048-Q1-K1-C10
gcgccgcttggggtacctctctacgcaaggtttacacatttgacaccgtagaagaattttggtgtttgtatgatcaaatattcaagcccagcaagttgcccgggaatactgacttccacttgtttaaggccggaattgagcccaaatgggaagatcccgagtgtgctagtggaggaaagtggtctgtcactagcaacagaaaggctaatctcgagaatatgtggcttgaaaccttgatggcatttgatcggggagcaattcgatgaggcggatgagatttgtggtgtagttgccagcgtacgctcaaggcaggacaaacttgcattatggaccaagacagcaacgaacgaagctgctcagatgggcatcgggaggaagtggaaggagatcattgacgtcaacgataaaattact

SEQ ID NO: 21876 - DNA, 286 bp, Gossypium hirsutum
  Clone ID: LIB3146-048-Q1-K1-C11
tttttatttgacaccgcaaaagaatcttcgcttttttaatcaaatttcaaccccatcaagttgcctgggaatactgacttccacaatgttaagactgctattaatagcctaaatgaaaacatccctattgtgctagtacaagaaagtggactttcactagcaacagaaaggctaatctctataatatgttgttttaaacctttattcaggagttgctcagacaaacttgaaaagcttatgtcatacatatattgaactcccaaatacttttaacaatggaaaaatt

SEQ ID NO: 21877 - DNA, 396 bp, Gossypium hirsutum
  Clone ID: LIB3146-048-Q1-K1-C12
gccactcttttcttcaagcgggtgagagagaagaaaatcttaagaggccgaagatgccagctggtcacggtctacgttctcgaacaagggatttgttcgccagaccctttagaaagaagggttacattcccttgtctacttacctcaggacctacaagatcggcgactacgtcgacgtcaaggtaaacggtgccgttcacaagggtatgccccacaagttctaccatggtcgtactggtcgagtttggaatgtcacaaaacgtgccatcggtgtcgaagtcaacaagcaggtgggaaacaggattatcaggaagaggattcatgtacgtgttgagcatgtacagccttcgaggtgcgctgaggaattcaagctcaggaaggtgaagaatgatcaac

SEQ ID NO: 21878 - DNA, 324 bp, Gossypium hirsutum
  Clone ID: LIB3146-048-Q1-K1-C2
cgcgttcggtacggaatcgagaggacaagatgctcttaaggcaactaaggcagcagttgaggaacgtattgttgtcggtggtggatgtactttgctaagacttgcttctaaggtggatgctatcaaggattcactcgataatgatgaagaaaaggttggagcagatattgttaaacgagctttgagttaccctctaaaattgatagctaaaaatgctggtgtaaatggaagtgtggtgagtgagaaggtgctctccaacgataaccctaggtatggattcaatgcttccactggaaattatgaggatcttatgtctgcaagaat

SEQ ID NO: 21879 - DNA, 397 bp, Gossypium hirsutum
  Clone ID: LIB3146-048-Q1-K1-C3
cccacgcgtccgcccacgcgtccgcccacgcgtccgggaactctcagaagattacacctgtgtgatatctcatggaagtaatccaagaaccacccatatctttgatgattgcattgttgaaagctgttgtggggttgttggtttctcctctccgaagagaaacgggtcaagttaccaatcagaaaatttccttagctactgttatgcttgtaagaagaatctttctccaggaaaagacatttacatgtacagaagtgagaaagcattttgcagcaaagaatgtaggtaccaagagatgatgctagaagaaagcaccaacaaactagaatctgatgacatctttgggacttattcctaacatttgtttcaagttctcatcatcagtcttgcataaaag

SEQ ID NO: 21880 - DNA, 404 bp, Gossypium hirsutum
  Clone ID: LIB3146-048-Q1-K1-C4
ccggaaactccccgatgaattggaagatcaaagttcatgccttaaggacttgtaagttgtcatgtttctcctttctaagctttttcactgcctgcatttttacactgactgacacagcttataccgtaataacaactccgataatctaaaatgataggcattaggattcagaaatccagcacccaacaaccagtcaacacactggttaagataatattcaaggtaaaataaataaataaatcagcagtgactgactggtaatgctaaagttgtatgtaaaaatgggtagactttggtactgttcttgtttactatcaagtgaaactctactgtatgactatgtatggattttcatcataataacaaagatgtatgaagaaaaataaactagtttgctgatacct

SEQ ID NO: 21881 - DNA, 408 bp, Gossypium hirsutum
  Clone ID: LIB3146-048-Q1-K1-C5
atctcatctcatcttatgttgtgttctactactctttctacctcgaattatatgtatatctatttctctctcacctaatctctatcgtttattggctcagatcagcagcagcagttggcaaaacaaagcatattgctttgctttgcctctttggcttatattacacagtttaattacccatgttgcccgataactcttgttcctcacttccttctttggagccatttacatgcatagacaatggtaataacaacaataagaggaaaagaagacccgcaggaacacctgatccagatgcagaagtggtttctctctcgcctaaaacattattagaatcggatcgctacgtttgtgagatctgcaaccaagggttccaaagagaccaaaacctacagatgcacaggcggc

SEQ ID NO: 21882 - DNA, 410 bp, Gossypium hirsutum
  Clone ID: LIB3146-048-Q1-K1-C6
cggacgcgtgggttttgaggttgatcagccaagggacctttatctctattgctactatgggggaatgatatgcattggacaaaagtgttttcggaaagcattggagcttctacacaatgttgtgactgctccaatgtctaccatcaacgctatagctgttgaggcttacaaaaaatatatattggtctctcttattcaccatggacagctttctaccagtctccccaagtatgcttcaggagttgctcagagaaacttgaagagcttatgtctgtcatatatggaactggcaaatagttataacaatgggaaaattgcagacttagagacttatgtacaggcaaacatggagaaatttggaagtgacaacaatctaggtttggtgaagcaggttgtatcatctatataca

SEQ ID NO: 21883 - DNA, 397 bp, Gossypium hirsutum
  Clone ID: LIB3146-048-Q1-K1-C7
aaagtaatgaacgtaccgaagagagctcatgtgatgctgaagaaacaccggagataaagcttgagactgctcctgcagattttcgcttcccaactacaaaccaaacaaggcattgcttcactcgatatattgagtaccatcgttgtgtagctgcaaaaggagaagatgcttcagagtgtgataaatttgccaagtactatcgtgccctatgtccgggagaatggatagatcgatggaacgagcaaagggagaacggtacttttccaggtcctctgtaagacggtacttttcgggaaatccagtgaagttgtcaaatgagaaacggcattttcaggaaataagaaattttggcatgtacccgttttgactggatcatgattgataaaatggagtatat

SEQ ID NO: 21884 - DNA, 422 bp, Gossypium hirsutum
  Clone ID: LIB3146-048-Q1-K1-C8
ggcccgcccacgcgtccggttctagatcgctagcgtctcacccttactctttgtcgaaagctggtatcgtcggactgatgagaaccgcagcatgcgagttaggtgtgcacgggattcgtgtgaactgcatttctcctcatggtgtacctacagatatgctcattagtggttatagaatgttccggcggaacgaaacaacacccgaagaagtgaagaaactggtcggtgatcaagggagtctattacgtgggaaagctgcaactgttgaagatgtggcccaagctgcagtgtttcttgcctcagatgacaccggattcataacagcacataacctcattatcgatggtggatatacttctgctattagttcactgagtttcatctacaaatagtaaagaattgggagaagaaaaaaataaaac

SEQ ID NO: 21885 - DNA, 251 bp, Gossypium hirsutum
  Clone ID: LIB3146-048-Q1-K1-C9
acccactccatcatgcaaagttttttatccaaacctttaaaatctccgtggtgcggccttccttaacaatgtcttccattatggctttctctgcttctcccactgctcacctgccttacatcattaactccttagccgatctccgtcgacacagccgccgctcgctatcatgcgctgcccatttcttctactcctcctcctttcgacccgattacttctcccccgctcccaccctgaggatcatagactct

SEQ ID NO: 21886 - DNA, 382 bp, Gossypium hirsutum
  unsure (1)..(382): unsure at all n locations; Clone ID: LIB3146-048-Q1-K1-D1
gctaagagaaatggaagccgtcctcgccatttctgtaagagcagtggatctgttgctcgccacattcttcaacaattgcagaacgttaacatcattgatattgatcctaaaggtggtaggagaatcacatcgaacggccaacgcgacctggaccaagtagccggaaggattgcggttgccatctgagtaacttttaatacccaaatttgcttgtttttgctgttaagcaattttcattttaggtaccgagagagtgaagacatggaatatttttattttagggtttgttgacttgttctctctttatcaccgtcgatcttgaaccttgttgatgaaaactcgaatctttanaatttgcctttntttattgtctaaaannaaa

SEQ ID NO: 21887 - DNA, 349 bp, Gossypium hirsutum
  Clone ID: LIB3146-048-Q1-K1-D10
cgtccgacttttcattaaaaatattcattaaacggctatttatttacacaaattgagatagagaccgctgtattgatattaatgcaagaccgcatcttcttacaccgacaactgaaatcacatgcccagatatgcacacgaaagcttccatgtccaagacttttgagacttttgacaagcataatgcaagtccacttccatttaaacctattgctgccaaaattatccctctatcaaagaaacctgattttacctactacgactgtttatatcaccatctataacacgctgacctacttatgacaaaatagtctacaaattaattagctcaatatgcatgggctacaca

SEQ ID NO: 21888 - DNA, 399 bp, Gossypium hirsutum
  Clone ID: LIB3146-048-Q1-K1-D11
cccacgcgtccggtggtgttggtgactcggtgatcggtcgggcactttcgcagctgctgtggagcgttaatgacattcctgttagctcgagcaagtatgggatcgttcgatctttagcggaacagcttatagaagagaacaataaggaagatattgaagctttgcgtgaaatgaatcggacggttttatcggcggctttttcgaggacactttgcctggttgaagctgcaatgcttgaattggggcaaggcagggttggtcattatggtgctgggtttggaccggtttgttatcagttgaaccggcttttacgtgcggttggggtagggagtgggagagtgggtgtgagccgttcggggaattcgatggagaagctggcggctgagttgctttggttgc

SEQ ID NO: 21889 - DNA, 411 bp, Gossypium hirsutum
  Clone ID: LIB3146-048-Q1-K1-D12
aagggattgaggaagcagcaagcaattgccccataagctatcagaaaatctaagaagcttggcactgaagggacttcattattttcaaacttttgaggattcacttcagctttctcttctgcttttgcttctttgattcagctaatagtagaggccaaggaagcttgcaatgtttgagcctggttgattgccaaaggattactgatgaaggtcttaagcatgttgttgaaaataatccaaagctaatcaaggtattgaggtatcttctttcatatgcaagatggtggctggaggagtataagtttgatgggtacagatttgatggtgtgacttcaatgatgtacaagatttccttgattaagtaaatgtattatttatttgagtaagaaaatgcattgtatgttttattac

SEQ ID NO: 21890 - DNA, 350 bp, Gossypium hirsutum
  Clone ID: LIB3146-048-Q1-K1-D2
ctcgatgggagagttgttgatggtcgggaaataacagttcagtttgcaaaatatgggcctaatgcagagaggattcacaaaggaaggatagttgaatcagcaccaagatcggggcacaggtcaagaagccgcagtcctcgcagaaggcaccgtgatgaccattacagagatagggattatagaagaagtcgtagtagaagtcacgacaggtatgaacgtgatcgctatcgtgggaaagacagagattctcggcgccgtagcaggagtcgtagtgctagtcctcctattctaaaggccgaggaagaggccgttatgatgatgataggcggagtgttagtcgatcgataagt

SEQ ID NO: 21891 - DNA, 408 bp, Gossypium hirsutum
  Clone ID: LIB3146-048-Q1-K1-D3
acctacacgacagctatggtgggagattttttggcatccgacaaaccatcagctggggagagtggcgtcgatgtactccccttttataggatttgggttcctagccatactgcgagggctgctttcagaatcccccaacgcttacaaaaacatggccaaccgaccaacgttggcttttaaaaagaaagcctgaagttgacacatgaattataaaacatcatcttctttcttgaaatgcgatatccattttacaacaattaggatcaaaattcaaagtacaaaaaattaccaatactactagcaatctaacagtacttggagtttgttctttgtcattgttaaaaagttattattttaaaaagttggattatgaattataatttttaaagcccttctcttttttccttt

SEQ ID NO: 21892 - DNA, 403 bp, Gossypium hirsutum
  Clone ID: LIB3146-048-Q1-K1-D4
cggacgcgtgggttttgatgttgatctttttatggacctttatctctattgctactgggggggaatgatatgcattggacaaaagtgtttacggaaagcattggagcttctacacaatgttgtgactgctccaatgtctaccatcaacgctatagctgttgaggcttacaaaaaatatatattggtctctcttattcaccatggacagctttctaccagtctccccaagtatgcttcacgagttgctcagagaaacttgaagagcttatgtctgtcatatatgcaactggcaaatagttataacaatgggaaaattgcatacttagagacttatgtacaggcaaacatggaaaaatttggaagtgacaacaatctaagtttggtgaagcatgttgtatcatct

SEQ ID NO: 21893 - DNA, 399 bp, Gossypium hirsutum
  Clone ID: LIB3146-048-Q1-K1-D5
gaagcttacagaaagagctaaaccgttacattcccacagctgctgcattcggaggcatgtgcattggtgcactcacagtattggctgatcttatgggagcaattgggtcagggacgggtattcttctcgcagtcacaatcatctatcagtattttgagacttttgagaaggagaaggcgagtgagcttggcttctttggactgtgagcttaggctttgactggagggatgcttgtgcttcttagctttcgcaattttgggtaagctgagggattcatttcaggcctacttttgacaaaagagtttacaatttagttagttcaatatgttttgtttacacattttgttttgagaaattacagaaaaagggtattgcctgaaatcagtgctgcttttgtct

SEQ ID NO: 21894 - DNA, 410 bp, Gossypium hirsutum
  Clone ID: LIB3146-048-Q1-K1-D6
attttattcttttttaaaaaaacgtataaaaaaatgagcacaaatttaataccattcatccttcacccatatttacatatttctaaaatgtttgggctctcatcgattaccgttcaaccccttccaacaccacgattgaaggatgacgcctttggatccccttccaacttcgatctcaacaaagtgaacagagatcaaaggctgaattacaaggtaagacttgccttccctttttctttgttttaaaatgtagatgatgagaataatgagaagaaaatagataaaaatgacaggaaaactaaaaaaaagctaaagaaaatcaccttttcagagactgtttttgaattttttttattcaatatgcgtattgcgtatctattctgtgtgcgtaaaaatatatggatgaaatc

SEQ ID NO: 21895 - DNA, 283 bp, Gossypium hirsutum
  Clone ID: LIB3146-048-Q1-K1-D7
caaacatggaaaatgatgtatcatcatcatacttgcaatgcagggttgattttgaagcatcatctaccatccttgaaaatgagtgctttaagaaatatgggaagagtgggaaatctttttattactcgcaagtggcgagtaaggtgaggtggctatctacaacaagctctgcagctgagataacaaatcaaatcggtactggtatcacgtctcctttggagaatatcacaaggaaggaagaaccctctcctcgaacagtgtcagctatgttacatgatgagag

SEQ ID NO: 21896 - DNA, 417 bp, Gossypium hirsutum
  unsure (1)..(417): unsure at all n locations; Clone ID: LIB3146-048-Q1-K1-D8
cggacgcgtgggcggacgcgtgggatcctatagatgccgatgatgcaagatatgcattgaatggtcgagacatggatggaagccggatgattgttgaatttgccaaaggagtgccccgtggttcaggtggatctcgagattaccctgnaagaggccccactcctgggtcaggacgctgcttcaactgtggaattgatggtcattgggctcgtgattgcaaagccggggattggaagaataagtgttaccgctgtggagaacgaggccatatagaaagaaattgtcaaaacagtccaaagaaactaagccgcagaccacgcagttactctcgctcacctagcccctaccgtggtagaagcagaagccgcagttacagcaggggacgcagcgacagtagatcaagatcacctgtgaaga

SEQ ID NO: 21897 - DNA, 439 bp, Gossypium hirsutum
  Clone ID: LIB3146-048-Q1-K1-D9
ccgggccgacccaagccgtccgatttatcaatgaacatacacaagaaaggtttaataatttccagagattgggatggggacgactggattgatattgatgcaagaccggatattctctccttgatatctgatgtcattagcccagatatggacacgaaagtttccatgtccactactattgtcatggatgccaagcatgatgggggtacaatgccagttgaagctggtgctgccaaaattattgctgaaggggagaaacctgagttagcttttcaggactgttttgataaccttgtagaagacgctgattgtaaggagcctgcatcatcaaaagatgaaaaggatggggatgcaagtgattgtaagaagcctccaccatcagaaaatggaaaaaatgatgatgctgatgatgccagtaccattcatgataaactaaatg

SEQ ID NO: 21898 - DNA, 415 bp, Gossypium hirsutum
  Clone ID: LIB3146-048-Q1-K1-E1
cccacgcgtccgcccacgcgtccggttatattagggattcctctgtggcagtcactgtctatgatgttgcaagcaggcagtccttccagaatacttcaaagtggattgaagaggtgcggactgaacggggtagtgatgttatcattgtgcttgttgggaacaaaacagatcttgtggacaaaaggcaagtctcaatagaggaagcagaagccaaggctcgtgatctcaatgttatgtttattgaaactagtgccaaggctggcttcaatatcaaggctttgtttcggaagattgcagctgctttgcctggaatggaaaccctttcttcaacaaagcaagaagacatggttgatgtcaatctcaagtctaccaacgctaatgcgtcacagtcgcagcaacagtctggaggatgcgc

SEQ ID NO: 21899 - DNA, 370 bp, Gossypium hirsutum
  Clone ID: LIB3146-048-Q1-K1-E10
ggacacacaagacataattgagaaggcacacttgggtgacctggattatataaagcatgctttgacactttttactgatttcgttgccgtatttgttcgcattctgataatcatgttgaaaaattcagctgagaagggtgagagaaagaagaagaagaggagtgactaaatcataaagcaccgtatggaataggcttctcatctaatccgccgtgttgaactccattgttaatacaagtttaatttcttgattccattgttaatacatgtgttgatatacgggaaggttaggtctttactgtttctgtttcttccggtggtttttctgatatggaacctttaaactaatgacatgttaatatttgccttt

SEQ ID NO: 21900 - DNA, 419 bp, Gossypium hirsutum
  Clone ID: LIB3146-048-Q1-K1-E11
agccttccggccttccatgtttaagtccgacagtgttcacggtcaatggaagcatcatgagcttaaggtgagggactcaaaaacccttttttttggtgaaaagcctgtcacagttttcggtatcagaaaccctgaggaaatccaatgggctgaggctgaagctgagtatgttgttgagtctcctggtgtttttactgacaaggacaaggctgctgctcacttgaagggtggcgcgaagaaggttatcatttctgctcccagtaaggatgctcccatgtttgttgtgggtgtcaatgagaaggaatataagcctgaccttaacattgtctccaatgctagctgcaccaccaactgtcttgctccattggctaaggtgatcaacgataaatttggcattgttgagggtcttatgaccactg

SEQ ID NO: 21901 - DNA, 411 bp, Gossypium hirsutum
  Clone ID: LIB3146-048-Q1-K1-E12
gcatcacaggccggtcaattccctggggttttccaaactcctggtcaaccaaatatggtgccatcagaatcctggagacctgctgttccagttcagtcaaacgttcaacttcctgctccaccaaatttaccttggggtatgactgtccccgataaccaaggtgccaccgccctgagacaggcaccagggaatcaaaaccctggttggggaccaataccagggaatcaaaacatgggatggggtgcactggtccctgcaaatacaaacatgaactggggaccatctagtcagggatcagcatctgttaatccgaatcaaaattgggctccacccggccaaagacaagtacccgggaatgtaaatccaggttggtctgctcctgggaatacaatccaaggatggacaccacct

SEQ ID NO: 21902 - DNA, 59 bp, Gossypium hirsutum
  Clone ID: LIB3146-048-Q1-K1-E2
agacgcgcattgtacccgcgcattaagcgcggtacgcgcagtggttacgctcaacttga

SEQ ID NO: 21903 - DNA, 416 bp, Gossypium hirsutum
  Clone ID: LIB3146-048-Q1-K1-E3
aaacggccgggccacgcgtccggggacacatgggtactgatcctaccttattttgtgctggcataggcataggttatggaggaggcccttactgtatcgactgcgacgatgtggatatcatgggcggcagcttttgccgcacctgcaattacggatgcccttacccgcagttcaataacgggtgtggaggtggtatcgcttatatgggttgaactaaacgaacgattaaagaccttaccatgaaacttgatgccaatggtcttttagggaaaaagaaaggccctaaatatacaagctatggcgcccgaatcttcatagatttatttatagattatagaaaaccctggttcttttccaagagagagaaaatttagaatatccccgcggcttgatatatgattgaattacaaagtgct

SEQ ID NO: 21904 - DNA, 408 bp, Gossypium hirsutum
  Clone ID: LIB3146-048-Q1-K1-E4
gaaatggctgcttacaacaagcttttttgttagttcgacttggtaggcattcccccggctggtagaggtatgcctcagattgaggttacatttgacattgatgcaaatggtattgtcactgtttcggccaaggataaggccaccagtaaagaacagcaaattacaatacgttcctctggaggtctctcggaggacgagatcgagaagatggtcaaagaagctgatttgcatgctcagaaggaccaacaaaggaaaagtctgattgatgtaaaaaacaatgcggacaccactatttatagtgtagagaagagcttgaatgagtacatggacaagattcctagtgaaattgcaaaagaaatcgacggtgctgttgcatatttgaggaacgcaacggaaggagaggatgtt

SEQ ID NO: 21905 - DNA, 389 bp, Gossypium hirsutum
  unsure (1)..(389): unsure at all n locations; Clone ID: LIB3146-048-Q1-K1-E6
ggaagatgtaaagaagattgcttttcactacggattcgagttagagaaagaacagaccattgaaacaacgtatactacaaatcctcgatccatgatgcaaaaccattaccatgctgcattctggacaatgcgaaagaaaagaacaactacgacatagcttgcaagaagatgatatgcattcctctcttaaacatactctcaggttttattcctcatttggatattttttatatataagacttaatttcccctgagattttcttgttagtttggattattacaaaacataatcagttctttgattaattatatagatttatgcaatcagcatattctgttttgaacccnnnnaaannaannnannnnnnnnnnnnnnnntnnnnnnanat

SEQ ID NO: 21906 - DNA, 418 bp, Gossypium hirsutum
  Clone ID: LIB3146-048-Q1-K1-E7
caaaaacctaaaagagagatgcgatattattgacttagctgtggaaatggatcggatactgagacccggtggatatcttttggtccaagacaccatggaaaatattaagaagctcaatccagtactccgttcacttcactggtcaacaacactttatcaaggccaatttcttgttggcgagaagggcttttggcgtccgagtgagaatgataaccgaaaagaaacatgagcagttatccaggttcttccactcccaaattgtcctcgattaagattggacttcaactctgcaacattcaaatacttctttaccctaaattcaatcctatagaagaaggatgagtttatagcattaaaatagcttatctgtcgattaaattatccgagttttgcttggccatgaacaacaggtccagca

SEQ ID NO: 21907 - DNA, 398 bp, Gossypium hirsutum
  unsure (1)..(398): unsure at all n locations; Clone ID: LIB3146-048-Q1-K1-E8
gccacgcgttcggccacgcgttcgcccacgcgttcgccacgcgtncgcccacgcgtccgcgcacgacgtacgcccacgcgtcgccccacgcgtccgagagccagagccagacgaaaacactggctgagatcagtcaggcggacgaaatctctccaaatatgacactatacatcaacaatgtcaacgagaagatcaaaatcgaccactggaagaagtcattgcgcgctgtgtcttcacaactcggcaagatgctagatgtgttagcattcaagactctgagacacaaaggtcgagcttgggttattgtcgatgatgttagctgcggtgccaatgcttattaggcaaatgccaggctttaccttgtatgacaaggaactgagaatgcaatgtgcggagac

SEQ ID NO: 21908 - DNA, 61 bp, Gossypium hirsutum
  Clone ID: LIB3146-048-Q1-K1-F1
gacttttggactattattttattttatttattttatatatatattttgtgatgtaaaaagg

SEQ ID NO: 21909 - DNA, 432 bp, Gossypium hirsutum
  unsure (1)..(432): unsure at all n locations; Clone ID: LIB3146-048-Q1-K1-F10
gaatncccggggccgccccacgcgtccggacctgcttggaacccaaatagagcggggttggtgcaaacaaaagctcgcagcctatgccattctggccgcgacccttgctgtgagcaaagctggccctgaagtcaagaaactgaccctttacaagcacagttgctaaccttgccgcgcacagcaaggtggatcttgctgcccctgctttcaatgacatcaatggtggttcacatgcaagaaacaaacttgctatgcaagagttcatgattcttactgtaagagcatcatcctttaaggaggccatgaaaatgggtgttgaaagctatcaccatatgaagtctgtgattaagaataagtctggtcaaaatgcaaccaatgtcggcgatgaaggtggcattgctcctaatatccaggagaacaaagcaggacttg

SEQ ID NO: 21910 - DNA, 412 bp, Gossypium hirsutum
  Clone ID: LIB3146-048-Q1-K1-F11
ggaagttgagagctctgacacaatcgataatgttaaggccaaaattcaagataaggaagggatgcctccagaccagcagaggctgatatttgctggaaagcagctagaggatgggaggacccttgcagattacaacatccagaaggagtccaccctccacttggttctccgtctccgtggcgggatgcaaattttcgtgaagaccctgactggaaagaccatcaccctggaagttgagagctcagacacgattgataatgttaaggccaagatccaggataaggaaggaattcctccagaccagcagaggctgatttttgctgggaagcaacttgaagatgggaggacccttgcagattacaacatccagaaggagtccaccctccacctggtccttcgcctccgcggcggg

SEQ ID NO: 21911 - DNA, 109 bp, Gossypium hirsutum
  unsure (1)..(109): unsure at all n locations; Clone ID: LIB3146-048-Q1-K1-F2
ctgccgataccgcagctccactgcggtttttatctattaaactancaaaacaaaaatatcaaaacataaaaaattttaaacaattaaaattcataaaaaatacaatcat

SEQ ID NO: 21912 - DNA, 410 bp, Gossypium hirsutum
  Clone ID: LIB3146-048-Q1-K1-F3
caacacatgataacctggaagcatcactacttgatctttctaggactgggaacattggaggttgtaaagctgctcgaaaagcagctgatggtttgttaaaagagctgtccaaagaattgaaacccttgctgaccttcttgcgatcttctccatcagctgctcaagtattacccaaggtggaggagctggtggctaaggagagagaattacaggaaaaagtaatggtgaagcactctacagtggtggacggctatgagaagaagtcgggggcccgtgatattgagaaccgggtggctttgcagcaacagaaacttacagcactgaggcaagaagttgatgatcttcttgagttcattgatgaaatataatagtaagtgctaaagtaggcataatattttggtccaaaccat

SEQ ID NO: 21913 - DNA, 345 bp, Gossypium hirsutum
  Clone ID: LIB3146-048-Q1-K1-F4
agaaaacataaggtggcttaaaaagattcgtgtgctcatcaacaacaacagataagctcagcttttatgcaataaacagttgttttctggatttggttctttcaatcagttgtggataaaatgaaagaaccatccttattttggaagaacaatgttgtttcagctcttaaattttaaacacgtatcagaagtatgtttggcaatagagaatctgaactcatgcagaactttgcacgttttggaccaaaaaaaaaaaaaaaaaaaaaaaaaaaaaaaaaaaaaaaaaaaaaaaaaaaataaaaaaaaaataaaaaaaataataaaaaaaaaaatattttttttttt

SEQ ID NO: 21914 - DNA, 406 bp, Gossypium hirsutum
  Clone ID: LIB3146-048-Q1-K1-F5
aaatattgtcttggttgtttttcgatttttaatttaatcaatcttcactgatatcctcggatcttaaattgctttgagtgtgggctcaaagaatcaaattagtgcgcataatgaaaattttacttaactttcagtagggaagttgattctctttataaactgacaactatgagtattcttgcaaaaaatataatttattcttaaaataaattgccattattttttggcagaattttggtgctcaaaagatatgtgttagtaggttaactcatagttattatttatagagaatcggttttcgagttctgtttgaataaagtcttaattaaataataatattttaatagaaaatacaatgttccaattgaactagagcataagaagcgaccacattcctaattaatat

SEQ ID NO: 21915 - DNA, 409 bp, Gossypium hirsutum
  Clone ID: LIB3146-048-Q1-K1-F6
cccacgcgtccgacggctccgacccatccaagcccatctacgttgcaatcaatggtcgcatctacgatgtcaccgccggcaaatccttctacggtcctggtggtgcctactccatgttcgccggcaaagatgccagcagagctcttgcaaagatgagcaagaacgaagaagatgtctgtcccaacattgacggcctctctgaaaaggagatggatgtccttaacgattgggtcaagaaatttgaagctaagtaccctgttgtcggccgcgttgtctcctgaaaatttgcacctttcctctatgttgggtgtaatttgtttcgtttttaagtgtctttagactctggttattacttatctatcaattgtgtttggtgttttgcttagctcagagcaatttctaggttaaa

SEQ ID NO: 21916 - DNA, 79 bp, Gossypium hirsutum
  Clone ID: LIB3146-048-Q1-K1-F7
cccacgcgtccgcttttatacgtaatgttgttctataaccatgcccggcagtgctcatatgtggtattgtgtttagatt

SEQ ID NO: 21917 - DNA, 403 bp, Gossypium hirsutum
  unsure (1)..(403): unsure at all n locations; Clone ID: LIB3146-048-Q1-K1-F8
tgaatttcttataactgtgatatttaatctggtttgggaactccgaggggggggatgttaagtcaattacggacccnaatacgtgccgaccgccaaagatgggtataccgagatcgtatcgaaaacaaggaaagtttcttcggccgatgaaaccgagatctccgatagcttcaagaccggtgagcctggaaaggttgttctcaccattgataatcaaacatcaaagaagaagaaactcctttaccggtccaagaccaagccttattctgattgaagctttcaaatgatcaatggggatggattttgtattcttctttattggaaaaattatttttataaatttaaaatcttgtgggatttatttttatttatatatatattttttattagctaattgggattg

SEQ ID NO: 21918 - DNA, 414 bp, Gossypium hirsutum
  Clone ID: LIB3146-048-Q1-K1-F9
ggcaagcttgatgctttcttatcacagggcaaggagtatgtcttcgttgcaaactcagacaatctgggtgctattgttgacatgaaaatcttaaaccatttggtccaaaacaagaatgaatattgtatggaggttacacccaaaaccctagctgatgtcaagggtggtactcttatttcttatgaaggaaaagttcagctccttgaaattgctcaagtccctgatgaacatgtcaatgagttcaagtctatagaaaagtttaaaattttcaatacaaacaatttgtgggtcaacctgaatgctatcaagaggcttgtggaagctgatgcactcaagatggagatcattccaaacccgaaggaggtcaatggaatcaaggttcttcaactggaaactgcagctggtgcagcaatt

SEQ ID NO: 21919 - DNA, 189 bp, Gossypium hirsutum
  unsure (1)..(189): unsure at all n locations; Clone ID: LIB3146-048-Q1-K1-G1
cgcactcttctatcttcttaaccaatttattctatcacccacngacagacaacctccccgcctttttatacataatcaaaacccacccccacaaccaacattaaccaaaacaccaaacaatatcaaccctaacttacctccaacccaccaacttcatcaaattctcaaacactacattcttactaaaaa

SEQ ID NO: 21920 - DNA, 405 bp, Gossypium hirsutum
  unsure (1)..(405): unsure at all n locations; Clone ID: LIB3146-048-Q1-K1-G10
gggacccttggttcctgttataaaatggtttattagcagagaggcatgcatttggtcacgaaggggttgggggatttgaagtgaaagagcaagccaaagctcagttggaagctacatgtccgggagtggtttcttgtactgatatagttgccttagcagctcgagatgctatagctttggcaaatggaccgtcatatgaagttccaacagggcgtagagatggaagggtttcggatgtttctctggcggctaacatgctagataattaagctaactntatggttctatttttaattaatgcaggactgagcaatgcttcctttacaggaggatgggttgcttcacactgcttgcgagactccaaattatgttgctccggaggtgctcaaagataaaggttatgat

SEQ ID NO: 21921 - DNA, 409 bp, Gossypium hirsutum
  Clone ID: LIB3146-048-Q1-K1-G11
attgcatggtctttcggtgggatgatctttatcctcgtttattgcaccgccggtatctcaggtggtcacattaaccccgccgtgactttcgggttgtttttagcccgtaaagtgtcactaataagagctgttacttacatggtagctcaatgcctgggtgctatatgtggtgttgggctagtcaaagcttttatgaaccatgaatacaccaccctcggcggtggtgctaacaccgtggctacaggctataacaagggaaccgctttgggagctgagattattggtactttcatgcttgtttacactgtgttttcagctactgatcctaagagaaatgcccgtgattcccatgtccctgtgttggctccacttcctatagggtttgcaagtgtcatggttcatttggcta

SEQ ID NO: 21922 - DNA, 416 bp, Gossypium hirsutum
  Clone ID: LIB3146-048-Q1-K1-G12
tccggacccacgcgtccgcccacgcgtccgatcgttcctgatcctaccggattcggggctggcatagggataggttatgaaagaagcccttactgtatcgactgcgacgatgtggatatcatgggcggcagcttttgcggcacctgcaattacggatgcccttaccgcaggttcaataatgggtgtggtggtggtatcgcttatatggatgaactcaaacgaacgattaaggaccttaccatgaaacttgatgcccatggtcttctaaggaaaaagaaagccatgaatatacaagctatggcgccagaatcttcatagatttatatatagattatagaaactacggattctatacaaagagaaagaaaataaagaataaccaagcagcttgatatatgattgaattacaatgtgct

SEQ ID NO: 21923 - DNA, 257 bp, Gossypium hirsutum
  unsure (1)..(257): unsure at all n locations; Clone ID: LIB3146-048-Q1-K1-G2
cgacccacgcgtccaaatcatacactttctcttacatcatttattacctcatccaacccaccaccgtactctgatgtttttatattaaccaatacccccactacctatcgtttttaaccattaaaatatcactaataatagctattacttacattgcaactacatacccccttaccatatgttcaatacaactattcaaatcttttatcaacaattaaaacaccaccctccatcaantatactaccacaccatcaac

SEQ ID NO: 21924 - DNA, 411 bp, Gossypium hirsutum
  Clone ID: LIB3146-048-Q1-K1-G3
cagcattgcattttgcatgtggatatggcgaggtgaaatgtgcccaagtccttattgaagctggagcaaaagtggatgctttggacaagaataagaatactgcacttcattatgcagctggttatggaaggaaagactgtgtggcccttttacttgagaacggtgctgctgtcacactccaaaacatggatggaaagactgccatagatgtggccaagctcaacaaccagcatgaggtgcttaagttactggagaaggatgctttcctgtgagttggagtgtcggcaacagccatgtgtattgtttgggtcctagcatgtgatagaccattagacaaaaaccaaattgctttcatttcgtatgcgggttatgatcacacagtcacagctcgactagttgtccatgctgtct

SEQ ID NO: 21925 - DNA, 378 bp, Gossypium hirsutum
  Clone ID: LIB3146-048-Q1-K1-G4
cctgagattacatacccaactctatttttttttacactgacaagaaaaggctgggtggtgggccatttttaaaaagccttctcttctcatactctgctgatatttcctaattattatcatcattattattacgagtgaatcattataatatgtgggcttccacggagattattttagtgccaggcttaaatttactctttataaagaaatttctgaacttaaaatcttttacataaagcctaacatatataccattttttttcctattaaagtttcacgatattcccacctttcctctatgttgggtgtaatttgtttcgattttaaatgtctttagactctggttattacttatctattaattgtgtttggtgtttt

SEQ ID NO: 21926 - DNA, 387 bp, Gossypium hirsutum
  Clone ID: LIB3146-048-Q1-K1-G5
ggaactctcacttcacaaaaccaacaatcagttcgcaaacgtctggcttctgctacatctgagttgagtgaggatttaccagttcccggggagaccagcacggatgtggttgtacctgctcttaagaaatcaaagggtccagattctggacaagaggctgctgaaggtcaagctgctgcactctcagaaaatgttggttgtccacaagtaacagacgaagcttatgataatgttggtgatgaaactcaaggttcaaatgaggagcttgttgatgttgagaaggaagaggctgacacaatggaggaaaatcttgaaaagtcaaaagaaccccaagtagatggcacgaatgaggttggattgcaggaaaataagaacgatgagatcttg

SEQ ID NO: 21927 - DNA, 405 bp, Gossypium hirsutum
  Clone ID: LIB3146-048-Q1-K1-G6
cccacgcgtccgagcagttgaaaaagatgcgacaaaaactgctgtcctggatggaactgtccatcctttaaccagctatgtgatcaattatgtaaagtttttatttgactaccaatcaacactgacacaacttttccaggaatttgaaactggtgatggtacagtatctcagttggcttctgtaacaatgagaattatgcaggctcttcaaacaaatttggatggaaaatccaaacagtatagagatcctgctttgactcacttatttctgatgaataacattcactatatggtgagatctgtgcgcaggtctgaagccaaagacctgttaggggatgattgggtccaaagacacaggaggattgtgcaacagcatgcaaatcaatataaaaggaatgcttggca

SEQ ID NO: 21928 - DNA, 418 bp, Gossypium hirsutum
  Clone ID: LIB3146-048-Q1-K1-G7
gtttgtgggattgggagcttcgatataatgaaaccatgagacagttgaagggcgagaacgcggcgttgcgccgtgtgtttgccgaagaaaatcgaaaggaaaaggctgaaaactataagctgaggtgtgaacttagacggcgaaccaaggaactcaaagattataaatctcagaatgataacaatatggaacgaagaagctttttgaatgaaattgaagcgccgaaagagaatgtgccttgtcgagatcttattgaactcgagaaaactacgagcgatcagattgctgctctaaaggaacaattggaggaaacatcagaggcattgaaagatatggaaagccgatacagttgtcttacggtgaaacaattcttaactaatcaagaagtgcaagatgctcgaaaagaatcgataaatgg

SEQ ID NO: 21929 - DNA, 417 bp, Gossypium hirsutum
  Clone ID: LIB3146-048-Q1-K1-G8
cgaaaatgaaaaaagatgtcgtcgtcggtgggaaagatgttaaggaggttgataatgattgcttcttagtggttgttaagattttcgaccatcagggacctctttctacaagctttccaattgagaatcggaaaaaccttgtggcgctgagggcactgaagagtcatctagatagaacaaagagtcttccttttgtgaagagaatatcggattttcatttgctgttgtttctggccaagtctcaaggccttggttccgacgtccctgcactcgcagagtgtgttaacacacagacagcggtgccagaaggttatcaactgctaattgagtccatggccaatgcagcttgatgttctttacatgtgtatttatgattttacagttacatttacctcataatttaccatgctcattagc

SEQ ID NO: 21930 - DNA, 433 bp, Gossypium hirsutum
  unsure (1)..(433): unsure at all n locations; Clone ID: LIB3146-048-Q1-K1-G9
gggccggaccgggncgacccaacccgtccggagaaaaccgcggttccgaacaataactcggcgagagggttcaacgtcgtcgacaacatcaaggctcggctggagaaagcgtgtcctgaagttgtatcctgccctgatattctcgccattgctgctcgtgattcggtggttcggttggggggtccgtcatgaaaagtaaggttggaaagaagggattcgacaagcgctagcagaagtgccgcanatacctctattccaccgcccacctctaatctaagcgctcttatttcaagcttctcagctcaaggcctctcaatananaaccttgtagcactgtctggttcacacaccattggcctcgcccgctgcacatcatttcggtcacacatttacaacgactccaatatagacccctcctttgccaactcgttgc

SEQ ID NO: 21931 - DNA, 342 bp, Gossypium hirsutum
  Clone ID: LIB3146-048-Q1-K1-H1
tctcggtcaatattttaaaggaaccttaattctattctttgtgaatagatactttcaatcgatgttctttgtgaaaaaaaaaaaaaaaaaaaaaaaaaaaaaaaaaaaaaaaaaaaaaaaaaaaaaaaaaaaaaaaaaaaaaaaaaaaaatggacttccaaaaaagagctaccggcacactccacaacatgaatcgaaagactgccttatatatggccaacctaaacaaccttcatgagccgcttaattaaaacgagaaggctgctaaaatcagagttggaccgaacaaaaaacccatgtatatcagaatgagtcccaccatgtgatataccattaaacaaa

SEQ ID NO: 21932 - DNA, 430 bp, Gossypium hirsutum
  Clone ID: LIB3146-048-Q1-K1-H10
ccggcccgacccacgcgtccgcgtgttcttacgctatttcgagtgccacatttttttacagagatttggatcgatttattggttgagcatcggctacagccatggctttatcggcaccaccagagtcgtcctctaccgctcaaaatgcaaggaagccgcttggatttatgaaaaacgcagtgaaatacaaacacaacttcattcagttcttcgcgatgaccgggattttgcttttgagcgtccgatctttgggccgaaactgccaactacaggacctccatgaggatacagcagctctcaagcaagagcaacactctcttaatgatcggatgagcaacataaaacgtggtctgctccacgaggcctctctcgagccctctggacgctttgactcacgcctgcgcctcctatttggtgacgataattagac

SEQ ID NO: 21933 - DNA, 430 bp, Gossypium hirsutum
  Clone ID: LIB3146-048-Q1-K1-H11
ccggattccggccggacccagcgtcgggaccgtgggcggaccgtggcggcgcgtggcagccatggaatattaacatggatgaaagacgaatggtggattttcccggttggactggtaatgtgtaagcttttccaatcacaacttataaactggcatatagcgaatctagagatacaagaccgctcattgtatagtaatgattttgagctattttggcagtcataaagcaccattgttaaaagacatatatagacttacgcattaacaaggttctttcttttactttttactgtttttgtatgtaacttggttaacaacattaacaaggttctttcttttactttttactgtttttgtatgtaacttggttaacaaatccagttcttgacaagtagaaatagaaacagagggttaaaaaaggtgcgactag

SEQ ID NO: 21934 - DNA, 405 bp, Gossypium hirsutum
  Clone ID: LIB3146-048-Q1-K1-H12
ccgacgcttgggggatcttaaacgttgtttttacgattgacactccaaggatgatgcgggcgaggaagctgccaacttcacctcacaggttatcatcatgaaccaccctggccaaatcggaaatggttatgccccagtcctcgactgccacacctctcacattgctgtcaaattttctgagctgttgaccaagattgacagacgatctggcaaggaactcgagaaggaacccaagttcttgaagaacggtgatgcaggtatggtaaagatgattcccaccaaacccatggtggttgagactttctccgaatacccaccactcggacgttttgctgtccgtgacatgcgccagaccgttgctgtcggtgtcatcaagagtgttgagaagaaagacccaactggtgc

SEQ ID NO: 21935 - DNA, 418 bp, Gossypium hirsutum
  Clone ID: LIB3146-048-Q1-K1-H2
cccacgcgtccggaaaaagagtagaaaagtatcatctggaaagaaggaatctgctggaaaagctaaaacgaagaaagtgtcgattcccaaaaagtctactccacagaaaagaaccccaaaaacatcagcatctaaaagttcaaaggcagatgatgatagtgacaaaagtccaaaggtgtcttcgaggaagaaaccggagaaggtcactaaggaaaagtcctctacaccgagtacatctgtgtccaaggagaaaaccagcaaaagggctggaaaggggaaggacaaagctaaagagcaaaaactgaagccaagtgatcatgaactaagggatacaatttgtaaaattcttaaggaagtggacttcaatacggctacattcactgacattctgaagcttcttgctcaacatttcaatact

SEQ ID NO: 21936 - DNA, 414 bp, Gossypium hirsutum
  Clone ID: LIB3146-048-Q1-K1-H3
cccacgcgtccgcacaaagaatacaatcgtttcatctggcaagaaagagtctgctgggagggctgacacaactaatgtgtcaattcccaaaatgtctactctacataacaactcccccaaaacatcatcatctaatagttcaaaggcagctcatgataatgtcaaaactccaaatgtgtcttcaaggaaaaaaccgtaaaatgtcactaaagaaaagtcctctacaccgattacatatttatcctatgaaaaaaccatcataagggctggaaaggggaaggacaaacctaaatagcaaaatctgaatccaagtcatcatgaactaatggattctatttgtaaaattcttaaggaagtggacttcaatacggctacattcactgacattctgaagcttcttgctcaacatttcaa

SEQ ID NO: 21937 - DNA, 410 bp, Gossypium hirsutum
  Clone ID: LIB3146-048-Q1-K1-H4
gctccaccttgacaaatacactggtactggtttccagtccaaaggatcatacttgttcggacacttcagtatgcaaataaagctagtccctggagattctgcggggactgtcactgccttttatttgtcttctcaaaactcagagcatgatgagatagattttgagttcttgggcaacagaacagggcaaccatacattcttcagaccaatgtgttcactggtggcaaaggagacagagaacaaaggatttacctttggtttgacccaacaaaagaataccactcctactctgtcctctggaacatgtatcagatagtgttctttgtggacgacataccaatcagagtgttcaaaaactgcaaagatttgggagtgaggttcccattcaaccaaccaatgaagatatact

SEQ ID NO: 21938 - DNA, 199 bp, Gossypium hirsutum
  Clone ID: LIB3146-048-Q1-K1-H5
taatcacacatactcttttcctcaaaattctcttatatgccataattgtaaacgcgtaagactctagagatcattcttcaatacctctgtaatattattataggccactatcatactagtgaattcactccgtcgacctatgcacatccaaaacctgaaaatcatcattactgttaaaaaaaatacatcttaaatcaca

SEQ ID NO: 21939 - DNA, 432 bp, Gossypium hirsutum
  unsure (1)..(432): unsure at all n locations; Clone ID: LIB3146-048-Q1-K1-H6
ggaananccggnccgggggggggggggggaaagttgttgtctccgacaggattgtcgtctcaccttgctgtctggtcaccggagaggggggatggactgctaacatggaaaggatcatgaaagcacaagctttgagagataatagcatgagttcttacatgtccagcaagaaaacaatggagattaatcccgataatggaataatggaagagctaaggaagagagctgaagccgataagaatgataagtccgttaaggatctcgtactgttgctgttcgagactgctctattgacctctgggttcagcttggatgatccgaacacattcgcaggtagaatccatagaatgctgaagctgggtctaagtattgatgaggatgagaccggtggtgatgatgcggacatgcctactcttgaggaagatgaagctg

SEQ ID NO: 21940 - DNA, 122 bp, Gossypium hirsutum
  Clone ID: LIB3146-048-Q1-K1-H7
cccacgcgtccgggccgccctttttttttttttttttttttttaaagtccagattaaagaaaaggggaaaaacaatttggaaaaaagaaagaaaatcaaatagtataaaccttgattataat

SEQ ID NO: 21941 - DNA, 314 bp, Gossypium hirsutum
  Clone ID: LIB3146-048-Q1-K1-H8
cccactcatccggccccccctttctatggtttttttttccccaaaagcccacattaaacagaaggagccaaaccatttacacacaagaatgataatcaaatagtctcaacttccattataataaaaaaaaaaagacaagatccttgccggtctaaatataccaatctaagctcaccctacctccgagcatacacgtccactctagttatacctaaaggtaacctaatttccggatgcatacaactatgtgactaaaaactcccttgcatgtctctacttaatagcttagaaccacatactcttttcaccagcta

SEQ ID NO: 21942 - DNA, 442 bp, Gossypium hirsutum
  Clone ID: LIB3146-048-Q1-K1-H9
gaataaccgggcccgccccacgcgtccgcccacgcgtccggaacaaaggagcctacatttatttatactttatctaagtcaccttgaagggggtctgatgtttcacctgaagctgcatttttggaattcaaggggcttgtaaaatctctaaatgatatacaacttattgcagctttatgtccccttaaaatttttattttgacatggtcaagcaatcttagagtatatttgtcatcttcttctctagttctaaatatggagtggcctgtggaatttgacctaaaaaatctttccactccttcacgtttcttgtgatgttcttttgtggttgaagagctttgtgcttcatcagctttctccttgttatcttctttaatctcaatgcaaacagcattttgtagaggactttgatttgccccaatttgatgcatggaattactct

SEQ ID NO: 21943 - DNA, 362 bp, Gossypium hirsutum
  Clone ID: LIB3146-049-Q1-K1-A1
aacgctcttcaacgttgtagggcagcccctgagatttcctgaatcacccgttgtaagcttttcagccagagatttgataaggggcttgctagtcaaagagccacagcagagattggcgtacaagcgaggtgcaacggagattaagcaacatcctttcttcgaaggtgtaaactgggctttaatccgttgtgcgagtccaccagaggttccaaaaccagttgaggttgagcggattccagctccaacatcatcagctggtaatagacctactgttcctgcaaccaaagatcaaaataactatctggaatttgatttcttttaaattattctcaaaaccattttcccgttggtttttttttttt

SEQ ID NO: 21944 - DNA, 396 bp, Gossypium hirsutum
  Clone ID: LIB3146-049-Q1-K1-A10
ttccattgttcttgtcataggaacgacgaacgagcttagcgattaatcttacttctggattgtagttgatctacatattattggggtttgatcggttaaccaaaatagggtgactggatgctgaacgcccgagatttgcttgcttggctacttagcttgatgccatggatatatggtctccctaaatattctggaattccttctattgctatggttgtttgagaactattagtttctttgcaactgttgcttagcatctaaaattatggttcttaagtgcatagctcatggtatgctgtggacgtgggttgatctggccctctcttttttgatttaagtgtttgtgtttgatcgcatggtctcaaatgagactgatgtgtgaaagattgcatttct

SEQ ID NO: 21945 - DNA, 349 bp, Gossypium hirsutum
  Clone ID: LIB3146-049-Q1-K1-A12
cccacgcgtccgtgcaagttggaggatggtggggcggtgttgcagacatcggtggtggatgggacaagggtcaggggcggccagcagctgattaggctagggttttggtttttttttgttttagggtttgaattgggctgctattgggttttggatttagtgggttttgggctcatctgtttagtaggttttgggctttggttagtttgggtctggggttatttaggtaggttatttgttttgggcccaaaattggacttgtacaccgtttttttcaaaaaaaaaaaaaacggttacgacaaaaagcaccttaaaaatttaagtgacgaaattataaaaatttcatttt

SEQ ID NO: 21946 - DNA, 419 bp, Gossypium hirsutum
  Clone ID: LIB3146-049-Q1-K1-A2
gggcgttacaacaatgaggttaatgttctcaagccaagtcacaagtcgactttgcaatcaaagataatggaagcccctgctcctgatagtgtttctgctgtgcgaaatgccacaaatcctaccagagatttggaatctgactttgaagttggtcaagaaggaaaaatacgagaaattgttgtggataacaatgactcggagcgcatgaaatccaaaggtgaggagactagtgagctcattatagcaacactaaaggcggagaaggaagaactagaatcatcactcaacaaggagaaattgcagtctctccagctgagggaagaactaacccaagctgagactcgaaacacggatctgtacaaggaactccaatccatacgtggtcaacttgctgccgagcagtcgagatgtttcaaatt

SEQ ID NO: 21947 - DNA, 361 bp, Gossypium hirsutum
  Clone ID: LIB3146-049-Q1-K1-A3
gtacggtccagagacaggaaaagggtagcttatactatatatgggtgtctcatgctcaagttgtggggcggccattatctgctgcattgggtattcagacatttgaacactctgaaaaatttgtgctggaggcactgagttataaacaaccaactttacctgctcagtgcagctacgcacccactttgcagatgcatgtgagagacttggagcagattttgaatttactgcggggaaatgttgtcgacttaatgggatatggatatgaatgggaaatagaggatgaaaaatcacatcatgcagatgaagatgaggattatgatgaagaacacctataataaaactactgctgttttttctt

SEQ ID NO: 21948 - DNA, 395 bp, Gossypium hirsutum
  unsure (1)..(395): unsure at all n locations; Clone ID: LIB3146-049-Q1-K1-A4
cccacgcgtncgaggagattgcattgcgaggattgaaggatcaggtgtttgtaaatgcttgctctaacattgaagggcttaagtttgctgggaccttgattatcttcagtccagattccaagggaaaaattacgggccactggtatggctatgttactcctgaagatgtacctgaattgctggatcagcacattgcgaatggcaaaataataaaacgtctttggaggggtcaaatgggggtttctactgaaagtggtgatggcacagggaaacagaatcttccaagtgggacagatgtgaagaaaaatgagaagcctgaagagtcaactgttcaaaagaccagggaaaatgtcggcggttgttgccagggtgctaatgggtctagctgttgcatg

SEQ ID NO: 21949 - DNA, 399 bp, Gossypium hirsutum
  Clone ID: LIB3146-049-Q1-K1-A5
gcttttggtggtgaaaaggccacaggaggaggccgtgaagctggcagtgattcttggaaacaatacatgcgacggtcaacctgcacaataaactacgggagtgagttaccgctggcacaaggaatcaatttcggctaggaatgcatacatgggtgaggcctaaagaagcaaatttgcattcctgcaaaatcaactcccagaccttttatgctctacatatagactgggatttgggtcacataattgtcgctgaaaaccattaatagtaacatactaatgaaaagaggcataatgaagaaatcaatgattcctaaaacacacttgctacgaaaattacgtgtagagtgtgtgctgtaataattcttataatagaagcacattattgatcttgcggatggg

SEQ ID NO: 21950 - DNA, 248 bp, Gossypium hirsutum
  Clone ID: LIB3146-049-Q1-K1-A7
tcggccctggaggagcttgataagagaataggcttttctaaaacatcagcttgaactctaaagctatgtatgagatgatctgacagtgtgtgtattcatgccatattttatgtgtggtatccaaatgtacccacaagataatcatcagtcaatgacgagattaattatttccatttagatcattgtattcaaaccaaggcaaacaatgtagctagtaatggaagcacgatcatttatatcgttggccc

SEQ ID NO: 21951 - DNA, 416 bp, Gossypium hirsutum
  Clone ID: LIB3146-049-Q1-K1-A8
gctgtagattacagtgagcctatttttgattggcttagaaactctccagatgatgctatgaaaaaatgggaaagcatcataactggtgagttgcaacaaaagcaaagatcagttttaggcagtgtgacaccttcaagattgcctcacttcaaagccgcggacatgcacaagactcggttttgtgactttaggtttcaacttggtgccagatatctctattgtcatcagggtgactgcaagcacacaatcgtgattagggacatgaggtcgattcatccagatgatgtacaaaaccgagcagcttatccaataatgatctttcaactaaaaccccgagttcagaaatgcagtgtttgtaaaattacgagagcctcgaaagtgaccttagatgataagtgggcaagggagaacccttg

SEQ ID NO: 21952 - DNA, 417 bp, Gossypium hirsutum
  Clone ID: LIB3146-049-Q1-K1-B1
gccttttctaacagaggtggcttggtccatcctcatacatccattgaagacttggatgaactttcaacgcttcttcaggttccattggtagctggcaccatcaaccgtgggagcgaagtgatagccgccgggatgaccgtaaatgactggacagccttttgcgggtcagacaccactgcaacggagctttctgtgatagagagcgtgttcaagctgagagaagcgcaacctagcgccattgtcgatgagatgaggaagtcattgattgatacctatgtttaagcttccccttcctttggttaatctaaaattgaagtccttcatataaatatggtattacactgttttatgtgagaaacataatataagtgtaaattaagtgagatgttgattgttgatgaaaatcacttggatgca

SEQ ID NO: 21953 - DNA, 408 bp, Gossypium hirsutum
  Clone ID: LIB3146-049-Q1-K1-B10
cccacgcgtccgcccacgcgtccggcgggaaagtggactctgtgatttgaaagaaattcccgaggataaatggttttgttgcgatgactgcaacaggattcatgtggctctccagagttatgtttccagtggggtgcagataattcctactgtatttgcaaatataattagaagaaagtatttagaaaaaggattacttattgatggagccacagattgtgttcaatggcgaatactgagcggaaaaagccgttattctgaacatctgcctctactttcaagtgcagctgcaatatttcgagaatgttttgatcccattgttgcaaaatcgggtcgtgatttgattcccgtcatggtctatgggagaaatatatcagggcaagagtttggtggaatgtattgcgtggt

SEQ ID NO: 21954 - DNA, 397 bp, Gossypium hirsutum
  Clone ID: LIB3146-049-Q1-K1-B11
gccacgcgtgcggttttcagagccatgctgttctagctctccaggaagctgcagaggcataccttgtgggtctttttgaagacaccaacctttgtgcgatccacgccaagcgtgtcacagttatgcccaaggacatccagatggctcgtaagatcacaggagagcgagcttaatttacatgtgtgtggatcagacgcttataaagaagaaactattgcttatttttaggcaaatggattggttttatgatttttctaatcatcttttatgccatgatggtagtggtaggttcaatgtgatgtgatgatgaagtgtggcgactgatatgttaatggacaatagctctggtatagtctgtttaaatgagttattgcttaatcgaaagatgctttgcaca

SEQ ID NO: 21955 - DNA, 397 bp, Gossypium hirsutum
  Clone ID: LIB3146-049-Q1-K1-B12
cccacgcgtccggctaaacatcacaatatcacatatgcagacctataccagcttgcaggagttgttgctgttgaagtcactggaggtcccactattgactttgtaccaggaagaaaggattcagacatttgtccgaaggaagggcgacttccaaatgctacaaaaggtgctcctcatctgaaggacatctttcatcgtatgggtctatctggcaaggatattgtggcattatctggcggtcacaccctgggaagggctcatccagagagatcaggttttgatggcccttggaccaatgaaccactgaagtttgataactcttacttcgtggagctgctaaaaggggaatcagaagggctattgaagcttccaacagacatagctttgatggatgacc

SEQ ID NO: 21956 - DNA, 376 bp, Gossypium hirsutum
  Clone ID: LIB3146-049-Q1-K1-B2
gctttgcaacactcgttgaagcgaaggattaaaaaaattcgacaaagacttatggctctgaaatttgaaatttctgaacctcctgctgctcctgaaaatactggtattggatataggactgcagtgggaactgctagagcgaaaattgggaggtggcttcaggaacttcagaaacttcgacaagcaagaaaagaaggagcctcaagtatagggttaattactgcagaaatgatcaaggtataccaatttttagaccaccattcaaagatattatgatcttaacatctactacggttgtgatttatcaacatgggatgtcttctttaaggatattatgagttttaatggaatttatatgaaccctttagtggtagca

SEQ ID NO: 21957 - DNA, 423 bp, Gossypium hirsutum
  Clone ID: LIB3146-049-Q1-K1-B3
tacttttttggggttttcgcttttctttttcactatcatcagttcagcaaatcagttccaaaaaaaaaacccacttctacaaacatgaaatctggttatggggtcactctttttctcttgtttctcttcttttcagcttttgtcttcaattacaatgaagctacaagcatggcccaagtaaatgggccttcagaaatgttcccattggtggaagagaagatgatgttgttcaatgaaagcagaagaaagttggggagtttccagatatgtgctgtttgtacatgctgtggtggagctaaaggtgcttgcttaccttctccttgttgctatgctatcaattgcaacattccaaacagaccctttggtttctgttctttcactcccaaaacctgtaactgctttggatgccatctctagtttaaa

SEQ ID NO: 21958 - DNA, 244 bp, Gossypium hirsutum
  Clone ID: LIB3146-049-Q1-K1-B5
tcgcccacgcgtccgaagagttccggaattgtatattagtcaaagattcatagatcaaaagaggaaggagaaaagtatattcgtatggcagggactgaatatgagcggcaatttgtgaggctcatcaagtatatgcgggagtgtatctacagaagccaccatgtgtaaaaggtttgaggatggcctctataaaaaaaatccgagtgtttgtgggcattttagagctttttgaatttgtagccct

SEQ ID NO: 21959 - DNA, 415 bp, Gossypium hirsutum
  unsure (1)..(415): unsure at all n locations; Clone ID: LIB3146-049-Q1-K1-B6
cccacgcgnccggatggcatccttaaactctttcaactgtcaaatgcccaggttctcggctggacatggtaccattggtatgtatgctggcacaggcggcccgacttgccctgttggtatttagctttctatgctgaggaagactgaaggtataaatcaaacacaaaatttcacatcggagatcagatatctatagagagccaccaccaccaccgcactacaatcagaaccaccactcaaccgttactcgtaatcatcgtcaatactatacttactaccatacaaaatgcgtacataaaaggcagtgaaggaagtgggtcagccattcctttattttgttggaatattggtatctattgtttcaggagtttggaccacaggtgaaagcatagaagaagaaagaaaaaaaaggatc

SEQ ID NO: 21960 - DNA, 416 bp, Gossypium hirsutum
  Clone ID: LIB3146-049-Q1-K1-B7
gttctttgtggagagggaacactgccaatgttattcgttatttccctactcaggccttgaactttgccttcaaggattacttcaagaggcttttcaacttcaagaaagacagagatggttactggaaatggtttgctgggaacttggcttctggtggtgcagctggtgcttcttcccttctctttgtctactccttggattatgctcgaactcgtcttgcaaatgatgcaaaggctgcaaagaagggaggagagagacaattcaatggtcttgttgatgtctacaggaaaaccctaaaatctgatggtattgccgggctttatcgtggtttcaacatttcatgtgttggaatcattgtttaccgtggtctatattttggaatgtacgactctctgaagccagtgcttttgactgga

SEQ ID NO: 21961 - DNA, 408 bp, Gossypium hirsutum
  Clone ID: LIB3146-049-Q1-K1-B8
gcgaaatccgccgctggtgacaaccttttcttcttcctctttctttaccccgattgttcttttttattctttccctgcgctttgtgggaaaaagaaaaaagcaaagcaaaaaagaatcgaggaagaatttaagacaatggcacagcaagcagtgcagaagaacacgttgtacgtgggaggactagcagaggaagtgaatgaaacaatcctccatgcagctttcatcccctttggagacataaaggacgtcaagactccattagatcaggccactcaaaagcaccgctcctttggcttcgttaccttcttggagaaagaggatgctgctgctgccatggacaacatggatggggctgagctctatggtcgagtcctcactgtcaactacgccctccctgagcggatcaa

SEQ ID NO: 21962 - DNA, 397 bp, Gossypium hirsutum
  Clone ID: LIB3146-049-Q1-K1-B9
cccacgcgtccggaaaattatcatttcgtgatatcgttaaatcacgttaaatcacgtgatggcgggtgctgacgtggaggccgcggatttcgagccggaggacgacgacctcatggactaggacgccgccgccggtgacgcctcacctcaagcctgcatgcctaagctcaagtctgccatcactggcggcgcttgcgtttctctttctggccctaagaagactaaaggccgtggcttgcgccaggacgacgccgatcgtcattaccatctcgccttccgcgactttgactctatcggctctgacgagggccccggtccccagagatctattgaaggatggataatcttggtcactggggtacatgaggaagcacaagaggatgatttgcacaataca

SEQ ID NO: 21963 - DNA, 390 bp, Gossypium hirsutum
  Clone ID: LIB3146-049-Q1-K1-C1
cccacgcgtccgcccacgcgtgcgattggtgtgttaacaaggcaatgagaccttggtctgtcaaaagcaatttttgcaggcatcgatagtgatatgttaaaggctggaaaagttgtgttctcggtggccgattagaaaggtaatgaattggcatcttccgtggcgattgctggctttaatagggagaaaatgtttaaagcttggtggtgtgtttttgtattgttgctctgatgacgtagtattgttggtagacggtttaattttgtctgctgttttttctgattctctgctgctgatcttttttgtctttgacaacagttcagttcgactgtagcaaaaaaaagtaatatgtgaatttgtaaaaaaaaaggcttctaatataataattat

SEQ ID NO: 21964 - DNA, 406 bp, Gossypium hirsutum
  Clone ID: LIB3146-049-Q1-K1-C10
aagagaccacagagccagcaatttgtttaactgaagatatacaaactaacgagtgcttagaaaacaatggtggttgctggcaggacaagagtgccaacataactgcatgcagggataccttccggggaagagtgtgcgaatgcccgttagttaatggtgtgaagttttctggagatggttatacgcattgtgaagcttctgcggctttacgctgcgaaatcaacaatggaggatgttggagagaaacacaggaaggaaggacatactctgcttgtattgatgatcattcacatggttgcaagtgcccatacggattcaggggtgatggagtcaagagctgtgaagatgttgatgagtgcaaggagaagctggcctgccaatgtccttggtgcaaatgcaaaaatac

SEQ ID NO: 21965 - DNA, 409 bp, Gossypium hirsutum
  Clone ID: LIB3146-049-Q1-K1-C11
cccacgcgtccggccgtcactgttcttaatctccgtgtcaagtcatcaacatcccactctgcagtgcccattgctttttctgctggggacgagtttagccgtagccctactaccgatgccaactctgggaaacttgtcatgttttctggtgaacctgactttagcacaggagcacatgctatgctcaacaaggactgtgagctcgggcgtggtgggttcggagcagtgtaccgaacagttttgcaagatggacgcgcggtggcaatcaagaagctcgctgtctcaagtcttgtgaagtcacaagaagaatttgaaagggaagtcaagaaactagggaaaatacggcactataatcttgtggcgctcgagggctattactggactccatcgttgcaacttctcatttctg

SEQ ID NO: 21966 - DNA, 401 bp, Gossypium hirsutum
  Clone ID: LIB3146-049-Q1-K1-C12
tcggcaatcagtaccctttccgcttggttttgggtgactagcatctgcatagtgtaagaatggagtcaggggcgaaggaggaaggtaaagtgctgggatacaacagcaaaaaggtgaagaaagtggcgatactttcaacactggctgcactccttgacgatccaattctcgccgatgtccctaagaaacccagtttgtccgatgttgataccctaatcaaccttgaactggggagtgccatgtgtatctctatcttcaaattagatggaacctccttcgatgttgcggtgatgaattcagccacggtgaaagacttgaagctcgcaatcaagaagaaagtgatcgagttagagcaatccaagatgggtcatcgacacattttatggaggcacgtttgggct

SEQ ID NO: 21967 - DNA, 375 bp, Gossypium hirsutum
  Clone ID: LIB3146-049-Q1-K1-C2
caagtacgaaacccggaaaggtagagagaaaagaaaagaaagatggagaaaggcaaaggaataatggggtccggcggaagatgggccgttgatttctccgataattccactgctcctccttctcgtgacatccccgatcctcccggcttcactcgtgcctctgtggatcaggacgattcgactgtaagtcgtcaaaagaaggatgctgaatccaattggaaagctcagaaagcttgggaggtggcacaagcacctttcaagaatttgctaatgatgggcttcatgatgtggatggctggaaatactgtgcatctctttagcattggtataactttttctgcactttggcagcctatcagtgctcttcaaggggtt

SEQ ID NO: 21968 - DNA, 423 bp, Gossypium hirsutum
  Clone ID: LIB3146-049-Q1-K1-C3
cccacgcgtccggcttcggggagttgaaaataagcgtagatccggagattcccgaataggtcaacagatgtcatcacaaaaagactattccatggcaacagcagatgtggtggatgcagaggtaagggatttagtagagactgcatacacaagggcaaagcagataatcacaactcacattgacattctccacaagcttgctcaacttctgatggagaaagaaacttgtgatggagaaaaattcatgagcctcttcattggtggaaaagctgagctatatgtttcttaaatcgtacattatatagtccccattcagtccttggataactatgacccttaaatggtcaaaatcatctgtggatgctttcataaagaagggaaaaaaatctcaatactttttctttctgtaattgagaaaaccta

SEQ ID NO: 21969 - DNA, 422 bp, Gossypium hirsutum
  Clone ID: LIB3146-049-Q1-K1-C4
gcattatgctaatgaaatcaacatgggtttcgatatcgaaatagttagcctcgaggcattgaattcgtgttcttggtcttcattgcccctgcatttcggtgaaaacgaaacgattgctgttaatctaccgatcggttctttttccaattacccttcaactctccccttgatcctccgtttcgtaaagcaattatcacccaaaatcgttgtctcgtctgaccgtggctgtgaccgaaccgatgtcccgttccctcatcacataatccatgcactccaatcatactctggcctactcgaatccctcgacgcggtgaacatgaaccttgatgcgttggaaaagattgaaaggttcttccttcaaccaagcattgaaaaaatcgtgttgggtcgacatcggtccctcgaaagaagacctccatgga

SEQ ID NO: 21970 - DNA, 389 bp, Gossypium hirsutum
  Clone ID: LIB3146-049-Q1-K1-C5
gcccttgtggtcatatatgcacttacatcaggaattgcaggatatactgcaacttctttctattgtcagcttgaaggaaacaactgggttaggaatctcttattgactggctgtcttttctgtggtccgttgtttctcacattctgcttccttaacacggatgctattgtatacagtgcaactgctgcactgccttttggaactattgtagtaatagtccttatatggacactagtgacatctccattgcttgttctgggtggaattgctggcaaaaatagcaaggctgagtttcaagctccttgccgcaccacaaagtattctcgagagatttcaccattgccatggtacaagagtgctgttcctcagaaggcaaaggctggaatttt

SEQ ID NO: 21971 - DNA, 344 bp, Gossypium hirsutum
  Clone ID: LIB3146-049-Q1-K1-C6
cccacgcgtccgcccgtaaggcgcaaggaagctgattggcgggatccctcgcgggtgcaccggggaccgaccttgatcttctgcgaaggagttcgagattgaactgaaaaaggagcctgagtcaatgacagagcaaccgaaggagaataccactgctgttagtgaagagaagaaaccagatcttgaggtctctagctcaaaggaaagtgtatgaattcctaaaatcatcgtcttgttggtgaaatttctcaattcgtatgtctgttgtatcgatgaacatcgaacaaataattttgaatgtagatcagttatgttagtgattgctcacaaaaaaaaaaaaaata

SEQ ID NO: 21972 - DNA, 243 bp, Gossypium hirsutum
  Clone ID: LIB3146-049-Q1-K1-C7
agagattagatgaattgcctacgagaagagtgtggccagcaagaaagtctattgcattaggagaacccgtggaaggacccctaattgacttcaattctgagtccaaggtcgatagagttcacttgcatgaagataaaaacgacgatgaagatgaagaatatggtttccaggctcttcgaagagctgtgacggaatattggggcacaatgaaggaatattataaagccgcttttgatgctttcg

SEQ ID NO: 21973 - DNA, 413 bp, Gossypium hirsutum
  Clone ID: LIB3146-049-Q1-K1-C8
caaagttcatggaagaacatccaggaggagaagaggtgttgttggaatcagcagggaaggatgcgacgaaagaattcaacgatatcggacatagcaagtcagctcagaatttgctcctcaagtatcagattggtgttctccagggtcacacttcaaagaataatgaacaggttggttcaaccgaggagccccaaaagaaagagatgagtgcattcccgatcaaggatgacctgacgccttaaaatgcggcaatcgttgagttccacttgcccccactccctggttgctgggttcctatttttttggtacaataataccctcacaacttaatccttatataattgctggtaaaataagtttggggttttccaaggttttaaaccctcaaacattgccccctttttttccccttt

SEQ ID NO: 21974 - DNA, 410 bp, Gossypium hirsutum
  Clone ID: LIB3146-049-Q1-K1-C9
gaaaatctttccagtttcaattttctcacaacaaaactgaaaatgtcttgctgttcaggaaaatgtggctgcggcgctgattgcaagtgtggcagtggctgtaacggatgcagtatgttccctgacataatagagaagactacaactgagactattgttcttggtgtggcaactcagaaaatgcactttgagggatctgagatgggagttggggttgagggtggatgcccgtgtggagacaactgcaaatgcaacccttgcacttgcgggaagtgaacaacaaagagaagcagagtggcctttgtcattttaactaaataaattctattactttagtatgtatcagcaaatcttcatgaggatttggttcttaattatgtgtaatgtggcttttctgctatgtcagaatg

SEQ ID NO: 21975 - DNA, 130 bp, Gossypium hirsutum
  Clone ID: LIB3146-049-Q1-K1-D1
caacattaatgttaataatgttgggaatataatggaggaaggtttcactaatcttcttcttaatgattccatcgaccggagtttatcggatagcggcaaagaatctgacgaaaacatcggaggcagcggg

SEQ ID NO: 21976 - DNA, 353 bp, Gossypium hirsutum
  Clone ID: LIB3146-049-Q1-K1-D10
cagagtttagttagactgaaagagcctgtagtcctactccgttgtcgcaaagaagatttgcatttggtggagtctgttctggattcagcaaaggaggaatatgcttctaaagtgaatgttcatccaccagagataatcattgatgatgtccatcttccccctggcccttctcatcatcatggttttttccatcatcatgctgaggctcacgggcctttctgctctggaggtgtagtcatagcatctagagatggaaaaattgtgtttgagaataccttggatgcacggttggatgttgcattcaataagaaacttccagagatccgcaagtggctttttggtcatgttgctgc

SEQ ID NO: 21977 - DNA, 414 bp, Gossypium hirsutum
  Clone ID: LIB3146-049-Q1-K1-D11
cccacgcgtccggtcaaaatttacgagcacaagtgttactgaaaaacagtatcaagcccctttagctcgggtgtcttctttggaagatccatgtactgaaatttcagagtatgacaaagcacctccgacaagcatgcaggttgcagcaacagattcggagaatgttagagctcttgtagctgacacgaagaacttgaaactggaaaagattcctgaagtgttggataaatctcaagtaaaggagccatcgaaagggtttcgacggttgttgaagtttggaaaaaggaatcatagctcagctagaagtgaacatagtattgactcaaacaatgaggctgatgagttggttgcaaacggtgcctcatctagtgaagttcaatcgttgaagaacctaatctctcaggatgaaacccc

SEQ ID NO: 21978 - DNA, 413 bp, Gossypium hirsutum
  Clone ID: LIB3146-049-Q1-K1-D12
cccacgcgtccgggcacctccgaactcctgtctagcgctaagctggtggcggacgcagcaaaatccacattcaacaaagaaagcgacaaggttgacaagggtaaggttgctggtgcaggtgctgatcttttgggtgccgcccaacactatgggaagctggataaggacaagggtgttggccaatatgtcgaaaaggctgagacttacttgcatcaataccagaccagtcacttagctcccaccaccaaccccgacttccatggagcaggtgccgccgccaaagattctgaaactgctgcagcttgtggtggtggtgttggggattacatgaagatggctcaaggtttcttaggcaaataaaattataattaaaacttattaatatttatttacttaagccttgctgtcaatat

SEQ ID NO: 21979 - DNA, 427 bp, Gossypium hirsutum
  Clone ID: LIB3146-049-Q1-K1-D2
cccacgcgtccgcccacgcgtccgcccacgcgtccgcccacgcgtccgagatcccaccatagctttggaaacctcaggtcaacgtgtgtgcatgaacaacaggagctagaaactgttgattcttcctctgatatatctgatgagaagtctgaagaagaggatggcgctttcctaaaagaaccaatggaggaacaagacaacaataaggcaaggtcaaccccaaactacattcgaatagttagtaagtagatggttggtatatacatatctatatgggtgacaaagaggctgaggagacatataaacaatttaaaagtctctcctgttggagttggtcttatgggctacatgggaaacaagggatctgtttttgttagcatgacactttttcagtccaggctatgctttgtgtgttctcatttgacat

SEQ ID NO: 21980 - DNA, 400 bp, Gossypium hirsutum
  Clone ID: LIB3146-049-Q1-K1-D3
cccacgcgtccgcagatttcggatctccatgagttctggcattttggaactgaaagaggaagtagccaataggctgaagctagaggtgggtgcttgcgacataaagtatttggatgacgataatgaatgggttttgatagcatgtgatgccgaccttgaggaatgtatagatgtttcaagatcatcaggcaacaatatcattagattgtgtattcatgacaccatggccaatctagagagttcttgtgagagcacaggagagttataattaggttgtagatatatttgttagtgcaattctcactcatagaattatagaagagtgaaagtgcagattttggtttcaagagctttctcaattgtaagaaacttctttttatgataggaggcttaattgtaa

SEQ ID NO: 21981 - DNA, 266 bp, Gossypium hirsutum
  Clone ID: LIB3146-049-Q1-K1-D5
ctctgtttgtagattcattggcatcttgtcttaatgagagtgtagtttatgaagtttaaactgtgcattgtcctccaaggtattagaattcctagttcaaaacttagcaatttgtcttttataaaagacctttgcattttcagcgttgtttaggttcgcaaacaagatgctgtatttggacttgtattttatttatatttatatttaatctaatttttattattaaaaaaaaaaaataaaaaatcattaaaaaaatattaaaaata

SEQ ID NO: 21982 - DNA, 259 bp, Gossypium hirsutum
  Clone ID: LIB3146-049-Q1-K1-D6
cccacgcgtccgcccacgcgtccgccatgcgttcgtacacacttgctatggaaactgttcaaagttgcaaataatgaggcgattgtgttttgttttgttttttttttcttttttttttttggggggggggggggaggtgtttttttttatatatttttctttattgttttttttttgtttaatttttcattttgtgtctaatttttatattggtttttatatttttttaataattttttatatttatttatgtaaatta

SEQ ID NO: 21983 - DNA, 417 bp, Gossypium hirsutum
  Clone ID: LIB3146-049-Q1-K1-D7
caagtcttccacagccatttccaagtgtatgatcatgggtgcagctggatcaactgtatactataacctgagacttaggcacccaacactggaaatgcctctcatagattatgacttggcattgctatttcagcccatgcttatgcttggaatcagcattggagttgcccttaatgtcatgtttgctgattggatggtcacggttctgcttatcattctcttcattggtacatcaacgaaagccttattcaaaggtatagacacatggaagaaagagacaatattgaaaaaggaagctgccaaggtggaatcagaagagtccaaaccagctgatggagcttctcaagattataaaccattacctagtggccctggcaaccagacagaagatgaagttcctctcctacaaaacatata

SEQ ID NO: 21984 - DNA, 304 bp, Gossypium hirsutum
  unsure (1)..(304): unsure at all n locations; Clone ID: LIB3146-049-Q1-K1-D8
ccagcgtncggtttcttttttttctagataggacaaaaggaaaaaaaaaaaacccacgacccatcaagtgttcaataatggtgattgctgtggattcatctgcaacgaaaatggcagctactataacaatgggttttggaagctcgtatgaagcgtggagtaaccgtataaggaaccggtgactgaggcggtggcgacaggtgtgatattggcgggttcggctcaatctctatttttcttttttggccccataatgttgggaaaaagcaaccagtaggttggggttttaattaatttacttttt

SEQ ID NO: 21985 - DNA, 381 bp, Gossypium hirsutum
  Clone ID: LIB3146-049-Q1-K1-D9
ctgggttatcagctgacccagagacatttgctaataaccgtgagcttgaagtgatccactgcagatgggcaatgcttggtgcccttggttgtgtcttccctgaaattctttcaaagaatggagttaagttcggagaggcagtttggttcaaagctggatctcaaatattctccgagggcggccttgactatcttggcaacccaaaccttatccatgctcagagcattcttgcaatctgggcttgccaagttgtgctcatgggatttgttgaaggatacagagttggtgggggaccactcggtgaaggactggacccaatttacccaggtggtgctttcgacccacttggactggctgatgatcctgacgcgttcgcagaat

SEQ ID NO: 21986 - DNA, 415 bp, Gossypium hirsutum
  Clone ID: LIB3146-049-Q1-K1-E1
acgcgagttccacatcacccataaggcacagcagaacacctgacattgttccttggttcctttttcgaagacccaccgtattgctgggcgacatggacactgttctcttccccggagccacaacgagggcatctcacatttgtggttcatcggctgcatcgaagattcactagtgcacgaatatagtttcaggatattctccaggccaaaattagaatttttgatggtatttgtaagctccataattttctgtagaaatctttgaaatctcgctgtgataaatgactcggatccgaattagcttattgtaatagtgtataagtgctccttactgacaattctccggacggttatgcctttcaaacgagcatgtcttcactgtgtgttttggcaagagggatctgtaaaatttttt

SEQ ID NO: 21987 - DNA, 374 bp, Gossypium hirsutum
  Clone ID: LIB3146-049-Q1-K1-E10
ggaaaagaagggaattctggagaagatcaaggagaagcttcctggtaaacactccaaatcagatgaagaaaaagaaaaggcttgagattcaagttcacataaaaatactgatgggattgtgtgtttcttcaattgttaaaaaaatatctgtttttgttttgaggttgtatttgttgtatatttcatattaagtttcttcttttcccagcatttttagtacaaatcataagaaaaaaaaagtttgctttcggtatgtaagaaatgacatgtttccattctgtctttttgtgattcgaacagtatttaatgaatcaatttcttgctttgttgtttttaaaaaaaattaaaatattatatttttatgtaaagttttt

SEQ ID NO: 21988 - DNA, 399 bp, Gossypium hirsutum
  Clone ID: LIB3146-049-Q1-K1-E11
aaggatgagaagattggttcaaagcttgacccggctgacaagaagaagattgaagatgccattgatggagcaatccaatggttggatggcaaccagctagccgaggctgatgaattcgaggataagatgaaggagctcgagagcatctgcaatcctatcattgccaagatgtaccaaggtgcaggggctgacatgggtggtggcatggacgaggatgccccacctaccggtggcagcggtgctggacctaagatagaagaagtcgactaaatcaaatattaagatagtattttgccgatgtttaacagcttctgctggtgctatattttatgttttcagcaacctatgttttgatgtattgaaaaaatctggataatttttgggaacattaccattctt

SEQ ID NO: 21989 - DNA, 372 bp, Gossypium hirsutum
  Clone ID: LIB3146-049-Q1-K1-E12
cccacgcgtccgcggacgcgtgggaaactgcaatgcaaatcaatgtgaaaaagaaagttgagtacacatcagttaattagagaagaccccatctcattacaaaacctatggtaagatcttaattttgttataattagctttgtcttccgtttgatgcaattttgattgatgagtgctgggccgcgcaagcgtcatgtagatttaagtatgataaatgttgacgatctcatttatattgtgacgtgggatttgaatttgtggtatttacactttccatttcaatctcatttatttaatgaccaaaaatatcaatttagttattgtttctatactcggtatatagaggcagtccattcatgacaggtgtacaat

SEQ ID NO: 21990 - DNA, 379 bp, Gossypium hirsutum
  Clone ID: LIB3146-049-Q1-K1-E2
cccacgcgtccgcccacgcgtccggtttgtgactcaatttgagaaaacgaatgtcatcttaaaggcacaagaagcattaaccaatgaaggatttatgataattatgaagcccacacatgttgggagacggttttatatggctgtccctactgcatgggtggctaaatatctcccgaaagataatgcggatgtgattcttcgaatgaacaaacgtacatggaagacccgattttattatcacagaagtcgtgattgtggaggtctttcaggtggatggaggaactttgtgaacgacaacaaactagaggaacatgatgtgtgtgtatttcagcctgcaaatataggaaagaaaaccaatgaatcctgatgttaacatttt

SEQ ID NO: 21991 - DNA, 418 bp, Gossypium hirsutum
  Clone ID: LIB3146-049-Q1-K1-E3
ggccacaagaatcctccaacttctgcatctcaccatggtattcaacccttaattagcccgccaccaccatctcgagtgatggcgcctccaagcattggtacccccgcattttaccgtcaactcgttccacaatacggactaccttactcggcttacgggtatccgggttacacacacaacagttatccattgaactattacaatgtatatggagggcaacatttggcatcccaatacacaactggagtctacttaacttacttcccactctatccccagtatcccaaataccgagcattggcaccctctccagttgctgccgcaccagcaagagcggaagaagttaaagctatagtaggagctgcttcctctgcacaaagttcagcactgtaattatgccaatggaacgtaaacagac

SEQ ID NO: 21992 - DNA, 269 bp, Gossypium hirsutum
  Clone ID: LIB3146-049-Q1-K1-E4
cccacgcgtccgaaaaaaaataaaaaaaaaaatatataaaaaaaaaaaaaaaaaaataaaaaaaaagggaattgttagagtaaaaaaagtgggggggcggtggatctatgcgttgtatgcgcaaattatgtgacattgtattgattatttttttgatctgtttgatggtactttgttttaccactctcttgttaagtgtgttaggtttgaaatgtatgcgggttaacttgtggtaattccgtttttggcttttgagttttttttgattt

SEQ ID NO: 21993 - DNA, 385 bp, Gossypium hirsutum
  unsure (1)..(385): unsure at all n locations; Clone ID: LIB3146-049-Q1-K1-E6
ggcatggacggaggctnatggagggnnnagctcagnnctnatatggctgcttgttatgcacagggctcatcgggaagtacgagagcgccaccattattctgtagattgtgttgttgccatctatgtgggtattcttctttggaagatgactggttttatctggtcggctaagggtggaactggagatagcagactcactaagcttgggaaaattcaaggtagactactccaagcagccaaggattccgacatggatgaagtaagggagcttctcaaaaatgttgagttggggaatcaagagagcctgaaacaagggccgagcaaggtcatgtggttgtttgctaacggaactattttcttctaactaaccattggtattttgggc

SEQ ID NO: 21994 - DNA, 415 bp, Gossypium hirsutum
  Clone ID: LIB3146-049-Q1-K1-E7
cccacgcgtccgactcaacacacttgatcagaagtcctcctctgccaagttctgttacttctcacatgcacaaagatgtttatcaagcttttccatactcagatccaatgcaatgtactattaacttcaagcaatcagatgatccagtaatgagctttgaccaggaagatctaaatattccttggagcgaacttgttttaaaagagagaattggagcaggttcttttggaactgttcatcgggctgaatttcgtggttgcgaagttgctgtcaaaattctcatggagcaagagtttcatatagaacgcttcagggaatttttacgggaggtttccatcatgaaattgttactgcaccctaacattggtctgtttatgggtgctgttactcaaccaccatagttgtccattgttac

SEQ ID NO: 21995 - DNA, 432 bp, Gossypium hirsutum
  Clone ID: LIB3146-049-Q1-K1-E8
tgaaggccagttggaggaccctctgatatcatgctggcagcttgtatttgttgaccgggagaatgatgttcttctccttggcgatgacccctggccggagttcgtgaacagtgtcgggtgtatcaagatactttccccacaggaagtgcagcaaatgggccaacgaggcctggagcttctaaactctgtgccagttcagaggctctctaatggcagttgtgatgactatgtgagccggcaggattcgagaaatcttagctctggtatcgcctccgtgggttctttggactactgaatgaaaattcatcgggttatgatacctgtttttcttcctgtaatattaattgtgttcttgcaacccctttttaatattaggtgggaaatgagcctgcctaacttctagctttggaattttattttttatataaaaat

SEQ ID NO: 21996 - DNA, 399 bp, Gossypium hirsutum
  Clone ID: LIB3146-049-Q1-K1-E9
cggaatatcaagttaccttaactacgaatccgctgtggaatctgccgaccagcaaatgagttgggtacttttcgccacaccagtcgtgttaatactcttggcacgatggctctcctctatggaagtctctggtatgctgtttggttcatcaccctgggaacgtatccgccggactcatcatcacccttctgaaggtacctcaccctgggtggtggctgctttcattgtgttgctgttagtcctgttgcagtacctgtccatttttcgtgagagctggatggtatgatctttatatatgtgtgtgtgtagtactatagtttgaaaaaactgtgttggaatttctcatctttaacagggttttgccttgttagatccaacacagtatctgtgctagcaacg

SEQ ID NO: 21997 - DNA, 382 bp, Gossypium hirsutum
  Clone ID: LIB3146-049-Q1-K1-F1
caactacgaatcatgacatcacatgcttgatagcaacaaaaatcaaactctctataatattaaggagatatttgctttagaggtctccaatgactatatcaagaaggcattgggtaaaaattggagagaccataaaagcactttgaaaaaactatatttgaagaaagacataagccttgaagaaaaaattgagaaatgtcctgccgggaatgttgaggtaccaatgggaagatgcggttagattctgcaattcgaagaaaggagatgtattacgtatttccaaactcttatatatagtgtttactatatacgtaataataatttcattatgtaggaccatgagcgagttggaacaagcagcagacaaaaacaaaaattcacg

SEQ ID NO: 21998 - DNA, 332 bp, Gossypium hirsutum
  Clone ID: LIB3146-049-Q1-K1-F10
cggctttatagccgatttgttacaacatttatttgctatcttttcttcgtgcaggtgattggagcaagttgaggagtaggtggctgacaagggcggtggaacaggcatggtgcgatgggacagggggcagaggcggctcctagggtttctgttctctgtttaggttatgggctataattgggcttaaggttttttagtttgggcccaaaattgggctgtacaaaccctacttagtaaaccgaaagaagaaccaaaaaggatccaagtgacaacgattaaattgagcaattagaggccgaagttgaagaaagaggcaaaaggggaagggaccc

SEQ ID NO: 21999 - DNA, 410 bp, Gossypium hirsutum
  Clone ID: LIB3146-049-Q1-K1-F11
ccgaatatgactcagatggccgatcccttgacagttttgattcacgccgtgcaagtgatgaactggctcaaaacattgatcttaaagacaattcgagaaagggatgagtccgctaccaaggacaggttgcttccatcttgctcagattgtcctacaggcataaccgatacatgtgcatctaaggaacctgccactgctaagttcttgagggttgacacattgagtagactcgaaagtgaccccgaagagaaacaatggagcagtcaggatagtaacagagaagaggaagttgagtccatttcaggcaacaatatactaaatgaatgggaaatgggaaatgttgaaactgaatgtataagtggatatgataacggtgaccggctaagtttaagaaaaggtgttaggcgatt

SEQ ID NO: 22000 - DNA, 362 bp, Gossypium hirsutum
  unsure (1)..(362): unsure at all n locations; Clone ID: LIB3146-049-Q1-K1-F2
gaacaagcggagcttgtgaaacatttgggaacttatgtttggcgcataaccaagactttgaaccaaagaacatcgagctttggggattcacacatgcatcaaagcactttcaaaactgaaagcaagtgaaacgagacttaaaagcttatttattttcatctgaaatgttaaaaaacgtatggtttaggaggtattgaagctgccattctttattctttaacttgtaccatccatgatttaatgaccttgccctgcattttgcggcttaaattgtattatagcaaattgcttgtaagttaaaaaattatgtgctttctttaaaaaaaaaaaaannaaaaaaaaaaaattttaaatatttatta

SEQ ID NO: 22001 - DNA, 254 bp, Gossypium hirsutum
  unsure (1)..(254): unsure at all n locations; Clone ID: LIB3146-049-Q1-K1-F3
cggacgcgtgggttttttgctacagattgattatgtaatatttcagagaagtttgtacagtataataattgatgtcttcaaatacaaactttgtcgnnnaaaaaaaaaaaaaaaaaaaaaaaaaaaaaaaaaaaaaaaaaaaaaaaaaaaaaaaataaaaattgtagaattataaaaagggtgggggggggaagtatagaaaaattaaaatttataatagttttataaagaggtatctatttttttttttttga

SEQ ID NO: 22002 - DNA, 397 bp, Gossypium hirsutum
  unsure (1)..(397): unsure at all n locations; Clone ID: LIB3146-049-Q1-K1-F4
cccacgcgtccgcccacgcgtccgggaatttggtggttgctaaggaataccattgaattattcaatttatgccacttaattgcctgatttaatgtgatgtanatgcttaattacgagttagacattaactgtgtttggtaattgataaagcaggtaagttgttggaagtgggatgttggatgcttggcagtcttggagggggctcaggattccgatggtgtcaatgaatataaaaagaaattggtagtgtggaggtgaacaatactttttccgggtaaaaacatgcattctcatctcatctgcggttttagggttaagattgtgtcataatacaatgggaggggaagggcctaagcctggtgaatgctcgtttcatatcctcaaaaaagccgacgag

SEQ ID NO: 22003 - DNA, 216 bp, Gossypium hirsutum
  unsure (1)..(216): unsure at all n locations; Clone ID: LIB3146-049-Q1-K1-F5
cccacgcgnccggnnnnncaaagcataaaaacctaannncnaacagagcagcngcaacgatcaggacccanggcggcaccgaacggggcaagggcannaaacgaagccccaacacaaannccnaccgngaagggaaacacagaaggcgaggccccnaaaacgacgagaagaagcccaacggaacccgaaaacgggccccagagcagggagcccacc

SEQ ID NO: 22004 - DNA, 299 bp, Gossypium hirsutum
  Clone ID: LIB3146-049-Q1-K1-F6
cccacgcgtccggtgaaaaaaaaaatctagctggaaaataatctggtaaaaacaaacattgtgtgtccgacgacggagataagagacgttaaacgatgtcgtcgccggacattgcttcaatcatggacaactcaagggaactcgatcgattaaggaaagatcaagaagaggtgcttgttgaaatcaataagcttcataaaaagcttcaagccactcctgaggtagttgagaaacccggtgattcttcattgtcaaggctaaaaagtttgtatattcaagctaaagatctttcagagcga

SEQ ID NO: 22005 - DNA, 328 bp, Gossypium hirsutum
  Clone ID: LIB3146-049-Q1-K1-F7
caactacgaatcatgacatcacatgcttgatagcaacaaaaatcaaactctctataatattaaggagatatttgctttagaggtctccaatgactatatcaagaaggcattgggtaaaaattggagagaccataaaagcactttgaaaaaactatatttgaagaaagacataagccttgaagaaaaaattgagaaatgtcctgcctggaatgttgaggtaccaaagggaagatgctgttagattctgcaattcgaagaaaggagatgtattacttattttcaaactcttatatatagtgtttactatataccgaataataatttcatt

SEQ ID NO: 22006 - DNA, 407 bp, Gossypium hirsutum
  Clone ID: LIB3146-049-Q1-K1-F8
cccacgcgtccggtagcagcggccactgctgcccctactactgctcatggaatcgaagtagccgtggagtttaaaccggtagaacatccaattgaacctttggacaacgaccagccgattcaatgcccattgcctgagccttcaattctaaatgacggaagaatatggaaggagcgtgtatcagctagcgtacggaggagagccgacttgccggttatgcaagatggaggcacccttcaatctcaatccgaatccgaagctactgtcggaaccaaacctcggccgacctcaaatcgtatgatcttaccgtctctaagtgctccggaacataatttactaaagctccttgaagagtgtactgcatctatgatctaaaagcatgctgctacaatgctacttcaacttta

SEQ ID NO: 22007 - DNA, 338 bp, Gossypium hirsutum
  Clone ID: LIB3146-049-Q1-K1-F9
cccacgcgtccgcccacgcgtccggtgggtgagttcataaaccctaaataactgctacagttgatcaagattttgttcatgattactgattttcactaggctttttcccaagctatctgtggttaaataaattctttctagggaaaatgctaaccactgcctgtgtattaaatgaaaaaaagaatggtaactcgtaaaattattattgattaaataatccgtaatgtctataggcaaaaatgttggctcaaaaaaaaaaaaaataaaaaaaaaaaaatataaattaaaaaaaaaaaaatatatttttaattttaataaaaaatatttaattttatttt

SEQ ID NO: 22008 - DNA, 399 bp, Gossypium hirsutum
  Clone ID: LIB3146-049-Q1-K1-G1
agcaattctggtatgttgcgctactagttgtttctcttgtttgttatttggcaacatttggcttctcgggacttctcttccactggttcactccatccggacaagattgtggactcaataccttctttatcgttatgacattgactcttgttcttttgtttgccatagttgcactgcatcctgcggttggcggtagcattttgccagcttcagttatatcactgtactgcatgtacctatgctatagtggacttgcaagtgaaccgagagattacgaatgcaatggtcttcacaagcattcaaaagcaatttcaactggtaccttgaccttaggtctgcttaccactgtcctgtcagttgtctactctgctgttcgtgctgggtcttcaacaactttac

SEQ ID NO: 22009 - DNA, 366 bp, Gossypium hirsutum
  Clone ID: LIB3146-049-Q1-K1-G12
gggaaagtcagtcagaacttgaagaagaggctgttgaatgcatcagagaattcaacagcctcatcgtctagggaaagtcagtcagaacttgaagaagagcagtttcttttaatcgggttcttgatattgaaaaaggaagcattagaaaagcaggagtgagtctaaacctttgcatcaacagccagacaggttcctgatatctaatgtaccatactatcacagatatcgcttttaaatatgtatatgggtcaaaatcaaaattatggagcccctaagattgtttttggtaccacaaaatgagaaaccatttgttggctccccacttacctgttcataccatggtgatacaacttcttcgggaattgt

SEQ ID NO: 22010 - DNA, 408 bp, Gossypium hirsutum
  Clone ID: LIB3146-049-Q1-K1-G2
accggcacagatatgaggtaaacccagatgtcatcggggttcttgaagaagctgggctaaaatttgttgggaaggatgaaactgggaaaaggatggaggttctggagcttccaagtcatccattttatgttggcgtgcagtttcatccagaatttaaatcacggccggggaagccttcggctctatttttaggtcttatattagctgcaaggggaaaattagaagcatatcttacaaggcatcaaaatggaagttgatttactagttatattgatacatccaaatcaattttacaaggaggaaattggtagattggtggtcttgtggtataggtatacccaaagagggttcctcaagtgaatcttattgcaatagaattcgagttaaggcacatattatggtccgagc

SEQ ID NO: 22011 - DNA, 405 bp, Gossypium hirsutum
  Clone ID: LIB3146-049-Q1-K1-G3
agatcttgaatatggattgccagttcaagttcgggatactgctctaagtataaactccaatgatgccattccaaagagtgatgtcaatagagagtatttcgccgaggagcatgacaggagggcgagagctggtctagattatgaatcctcatatgggaaggtacgtccaaacgacactattctgaagcttcagaggacaacaccttactacaagagaaaccgagcacatatttgcagtttctatgtgcggggtgaatgtacaagaggtgctgagtgcccttataggcatgagatgccagaagctggggagttgtcccagcaaaatataaaagaccgttactatggggtgaatgatccagtggcactaaagctacttaacaaggctggtgaaatgcctttctttga

SEQ ID NO: 22012 - DNA, 346 bp, Gossypium hirsutum
  Clone ID: LIB3146-049-Q1-K1-G4
cccacgcgtccgggaggtcaagtgctgaggtttgaagtacaaaaatgttgggtcaacagcaccatccttgtagtaagcaaacaccaagcatccatcatcatgcatgctctctcctacgaaaaattgaaggtccttcaattttgaaagcaaaaacttggatgctccctcaatgtttttcttgaaggactcttgcttttcgcttcgagagagaccatgttggtttaccaggatcttatcttcggtgacgagcttctttctgactcatttccctacaatgcaatctatactggtttgctgtgggaagtttaaggaatgtgtgttttgttaggaaactgtttatctttac

SEQ ID NO: 22013 - DNA, 407 bp, Gossypium hirsutum
  unsure (1)..(407): unsure at all n locations; Clone ID: LIB3146-049-Q1-K1-G6
gagaatcaacaaactggactcaaccaaggatttagagcaaaagtctgctgggtcatattattgcgtagatgattgatcgacacatctactggcagttgtcaattgtgatgagatgaacaacaagacgtgaatgttgggtattcccgggatctctgagtggagcagtgatggtatgttgataagctgagaagaggtccgttgatggtatccatgaggcggcaagccatttgttttagaaaaatatttcaattatcctacagngtgcttttctttatgttttagcaattttggttgatattttatgagtcaggaatactgatactcctgttttatttacttttaagagcaaaggtatgctgttgacatgagagagctttgaattattcatgtagcttgagattattata

SEQ ID NO: 22014 - DNA, 375 bp, Gossypium hirsutum
  Clone ID: LIB3146-049-Q1-K1-G7
ctctatctttctcctttcttttgatccctcttctccaccgccaccagtccctgacccgagctctctcttgccttcaagtggcgtacagacgatatcgggaaattgtataaggtagaacaatgccgaaggtgaagacaaaccgcgtaaaatatccggaaggatgggaattgattgagcctaccctccgtgaactacaagcaaagatgagagaagctgagaatgatcctcacgatggtaagcgaaaatgtgagacgttgtggcctattttcaaaattgcacatcagaagagccgctacatttttgacctataccatcggaggaaggaaatatcaaaggaattggatgagttctgcttggatcaaagctatgctgacc

SEQ ID NO: 22015 - DNA, 369 bp, Gossypium hirsutum
  unsure (1)..(369): unsure at all n locations; Clone ID: LIB3146-049-Q1-K1-G8
acgggacgcgtgggatcaaattgntctattccattatctaccaagcatggaccaggcgggttacgttcatttgtatttgagcgtgaagacaacaatagcagcacaaccttgatagcagaaagttcttccgatgtgatccaaaaggagaaccgaccaaagaaaaatgctccatcagccaagtttagcaattcacagatcaaatcaagttcacaaccaagaaaagatgagatggaaacaagttctggagctcaattattggaaatattaaggcgttcctcctcagcgcaaacaagtgagtgcactggtaagagatgtattgtaggccaaactgaatccatatttgttgcattcaagcttggaaaagaaatc

SEQ ID NO: 22016 - DNA, 161 bp, Gossypium hirsutum
  Clone ID: LIB3146-049-Q1-K1-G9
cttttctttatgttcattaagactggtggaaaaacatagggaatgagctgtgttaggaggattgtctactctggtgttatagatttaattgcaatgatgtgctgatatgtagatcattgaaggattcttcttttgcttttaacatagtaatgtttaattcc

SEQ ID NO: 22017 - DNA, 420 bp, Gossypium hirsutum
  Clone ID: LIB3146-049-Q1-K1-H1
ggaaaagtgaagatagaggtctaaaggacaggctgcttcgaagatttgggagtcatattagcagcttgaagttggaattctctaagaagaagaagaaagggaaactaccaagagaagcacgacaaacattgctcgggtggtggaatgttcactacaaatggccataccctacggaggcagataagctagcattggcggaatcaacggggctagaccagaaacaaatcaataactggtttataaatcaaagaaagcggcactggaaaccatcggagagcatgcaattcgcggttatggataatctgtcgggacaattcttttcagaggactgaggtggggggcaactaccgactggcttgctttctcataaatgtatatcccacatcattaattaattatatggtcttgtttgcatatgac

SEQ ID NO: 22018 - DNA, 398 bp, Gossypium hirsutum
  Clone ID: LIB3146-049-Q1-K1-H10
gtttaagttaagactaaaacatgatgttgtttgttccttgtgacagggatctagaaaagattggtgttggaaggggatgggttcgcagatttggtcgaggacgtggacatgaacatgaacatgaacgagatggaccaattggtaagaaattaactgcagaagatcttgatgctgatttggacaagtaccatttagaagctacaagaattaaatgatgatattttgcttgttccattactcttggtttttgaggggaaaaacacagaagaggttatttcaattgttgggttactctagtttttgaggggaaaaaagaagaggtatatggttggaaaatggtcactgacattaagaaggttcaaagtgcagattctctcgtggtttttattttcctcgat

SEQ ID NO: 22019 - DNA, 240 bp, Gossypium hirsutum
  Clone ID: LIB3146-049-Q1-K1-H11
cttttagtaggataaaagggcatttccattcgaatctttaccaacaatacctgaaacgggccgatggtagagttttttttatatgcgccgacaaagcttatgcttgagaaactccctctgtggcccaaagcgcgcaatatcaaaatgcgtcatcgactaacgtagagctgttcacaccgtctaaacattcccgaaggacatgagtcaataaaagaactctctgaccacataaaggaccac

SEQ ID NO: 22020 - DNA, 423 bp, Gossypium hirsutum
  Clone ID: LIB3146-049-Q1-K1-H12
ggaaaagatagctcagttggtcttcaaatccttaagggccaaacgtgggtgcctgttaagcctattccaaatgcactcgtcatcaacatcggtgacactctagaagtacttacaaatggaaaatacaagagtgtggagcatagagcagtaactcacaaagagagagaccgcctttcaatcgtcactttctatgctccaagctatgaaatagaacttggtccaatggcagaactggtggatgagaagaatccatgcagatacagaagttacaatcatggagagtacagtaaacattacgtaaccaacaagttgcaaggcaaaagaaccctggatttcgcaaagatccaatccaagacctcgaattaacaaggattccactttggtcttcccccccccactagatcactattcttgtactattta

SEQ ID NO: 22021 - DNA, 430 bp, Gossypium hirsutum
  Clone ID: LIB3146-049-Q1-K1-H2
cccacgcgtccggtcttttgtggtggatataccggatgggaacaccaaggacgaaacatgctacttcgttgaggcactgatcaagtgcaacctcaagtcattggctgatgtttcagagcgtttggctgttcaggatcgcactgagccaatcaaaataatgtgaataatctgggtccctcttagcagcatcaaggttgttgtgtgtgatgagtgaagaaatgttattattagaagctgagtagaaagttcgggctaccttgggttagagtcaactcctattttcttaatacttcatgcatcttcttcttactagaacattataattaggtgtgttgtgttgatagtagctgacaattaagctacaccttcggcctacagatttcttaaatgaagaaacatttcagaaattttctttgtggcttattctatg

SEQ ID NO: 22022 - DNA, 419 bp, Gossypium hirsutum
  Clone ID: LIB3146-049-Q1-K1-H3
caagccggttatacccgagaagtaccttgatgagaaaaccattttccaccttaacccgtcaggccgtttcgtcattggaggtccccatggtgatgctggtctcactggtcgcaagattatcattgatacttatggaggatggggtgctcatggtggtggggctttctctggtaaagaccctaccaaggtggatagaagcggggcttacattgtgaggcaggctgcgaagagcattgttgctaatggactagctaggaggtgcatcgtgcaagtctcctacgccattggtgtacctgagccattgtctgtatttgtggacacttacggtactggaaagatcccagacaaggaaattctcaagattgtgaaggagacctttgacttcagaccaggaatgattgccatcaatcttgatctta

SEQ ID NO: 22023 - DNA, 409 bp, Gossypium hirsutum
  Clone ID: LIB3146-049-Q1-K1-H5
cccacgcgtccgacactccactttatcatcaccctctttttatccccctcttttatcttgactttaatctccacgccttcttcccattacttcattacattctcaagagaaaaacccagagccaaaaaaatggccaaattattgctgttcattgcactatttgtggttccatgtcttgttagtgctacacgcatggtgaagaacccgttggtggttcaaggtcaagtttactgtgaccattgccgtgctgggtttgaaacaccaaagactagaaacatggctggtgccaaggttaaggtggtatgttccaaccggaagaccggtgatgtcgtgtacgagaaggaaggacacacggattcaaccggacaatacaagatcgctgtctccgaggatcatttggatgagatct

SEQ ID NO: 22024 - DNA, 165 bp, Gossypium hirsutum
  Clone ID: LIB3146-049-Q1-K1-H6
cccacgcgtccgacacttttgcattactattcgacccggccagacaccccagcggagggtaaactcaaagatggggggctcaaacacaccaaaaaatccaacaccattccatagcataagaaataaccaaacaaatttactctacattactacacaaatactact

SEQ ID NO: 22025 - DNA, 236 bp, Gossypium hirsutum
  unsure (1)..(236): unsure at all n locations; Clone ID: LIB3146-049-Q1-K1-H7
cggacgcgtgggcttggaataaaaaataaaatttaaaaaaaaaaaaaaaaaaaaaaaaaggaaggggaaaaaaaaaaaaaggggtggggaaaaaaaaaaagggggggccgctaaaaaggacccaagcaaacnaacccgngcaggcaacatctcaccttctgctatattgttcccaaaatacaagacaagggccgtcgaataacaacatcatttctgggaaaccccgggcggaaccc

SEQ ID NO: 22026 - DNA, 402 bp, Gossypium hirsutum
  Clone ID: LIB3146-049-Q1-K1-H9
cccacgcgtccgcccacgcgtccgctgaggtttacctcagttacttgaacctagaggatgacggggcagaagcacttgccaatgctctgaaagagtctgcaccttcacttgaagttctggacatggctggaaatgacattacagccaaaggtgcagcttctttagcagcctgcattgcatcaaaacaattcctctcaaaattaaacttggctgagaatgaactcaaggatgaaggtgctattttgattggtaagtcattaggggagggtcatggtcagttgaatgaaattgatatgagcacaaatgctattaggagagctggggcaaggcttttggcccaagtggttgtgaaaatacctggatttaagttgctgaatatcaatggaaatttcatatctgatg

SEQ ID NO: 22027 - DNA, 251 bp, Gossypium hirsutum
  unsure (1)..(251): unsure at all n locations; Clone ID: LIB3146-050-Q1-K1-A10
tgaaaagaacatgaaagcctacaataagagacaggctgagggtccccaagaagatgaggaggaatctgagaagtctgtatctgaggtgaatgatgaagaagaagatgatgatgaaggcagtggagacgaggaagatgatgagtaggaaaaatcctgngaggatagcataatcaaagtaggctgtgatagtgtttgatcatcttatgttaatgctttntaaatgcaaatttcatttaaccaaaaatgtaact

SEQ ID NO: 22028 - DNA, 222 bp, Gossypium hirsutum
  Clone ID: LIB3146-050-Q1-K1-A12
agcttgccaatgaaggccacctcaagcaaaggacctaagcaaacaccttttggtttgtcagtttcttgaagcattttatccactagtgtgtgctacttagattttatgttcctagtattcgacatctataatgctacagctttcatttggatagatactgtgcctagaactgaatgttaagtttatgttttcttattttaaataaaatttaagatatttgtt

SEQ ID NO: 22029 - DNA, 320 bp, Gossypium hirsutum
  Clone ID: LIB3146-050-Q1-K1-A2
gaacggacagggcccggacgacccacacgtactttgacgcattttttttagaactatgcactcacactggtggtaatcaatggctcgtacaaatcaaacagccatgaaataaaccggtggaaaagctccacgtaagcaattggcgaccaaagccgcgaggaaatcatctccatccaccggaggagtgtagaagccttaccgttttaagccaagaacaatggctttgagagaaatcaagaagtaccacaagagtacctagcttttgattcgttaactttcggtccaaaggctagtgaaggaaatccttcaagatttttaag

SEQ ID NO: 22030 - DNA, 235 bp, Gossypium hirsutum
  Clone ID: LIB3146-050-Q1-K1-A3
ctgcattgaggtttgttgttgataatccaggggtttggggatttcactgccacattgagccgcatttgcatatggggatgggggttatttttgctcaagacgcccatcgtgtaggtcaaataccaaaagaggctcttgcttgtggattaacaggaaacatgccgaactgttagactgatctgagctaatttatgtattacgctatttgatgccatgctattttgtcatatttact

SEQ ID NO: 22031 - DNA, 287 bp, Gossypium hirsutum
  Clone ID: LIB3146-050-Q1-K1-A4
cccacgcgtccgcccacgcgtccgtcagatcttgccattgaagaaggtcaattagatcaattttacaagcatctgcccaagatatttgatcggttttcaagtgctgatggctttttattcctcgaagatgatactgttcttaattactggaatctcttacaggcagacaagactaagctatggataacggataaggtatccatgtcttggagtactgcatcaaccaaaggaagttctgattggtactcgaagcaagcggagctggtaaggaaggtagttagtacaat

SEQ ID NO: 22032 - DNA, 285 bp, Gossypium hirsutum
  unsure (1)..(285): unsure at all n locations; Clone ID: LIB3146-050-Q1-K1-A5
tccccagtgacctttcagatgatggaggatatgagaaatcagtttatagatctgttatcagacataggctttgtagacaaatcaccgggtgctagcgcttacaaccaatacagccatgatttggagatggtatgtgcagtcctttgtgctgggctttacccaaatgttgtgcaatgcaaaagaagaggaaaacgtacagcattctacactaaagaagtcggaaaagttgacattcatcctgcatctgttaacgcggnggttcatctctttccattgccttatatg

SEQ ID NO: 22033 - DNA, 87 bp, Gossypium hirsutum
  Clone ID: LIB3146-050-Q1-K1-A6
cccacgcgtccgcccacgcgtccgcccacgcgtccgggacttttggttttttttaatttatgtttctgggtttattgcaggccgggc

SEQ ID NO: 22034 - DNA, 108 bp, Gossypium hirsutum
  Clone ID: LIB3146-050-Q1-K1-A7
cccacgcgtccgggccgcccttttttttttttttttttgaaaaacaaaagtcaccatatttaactggaattgacgggcgcacaaccccatgttcaaacaatgccggcg

SEQ ID NO: 22035 - DNA, 283 bp, Gossypium hirsutum
  Clone ID: LIB3146-050-Q1-K1-A8
cccacgcgtccgggacaaggaggtgcaggcggtggtggtggaagcggcagcactagtgttaccagtggaggtgttggaagtggtactaccggtgcaaatggaaaatttagtcatagtggcaaatttagtgtttttcataatagtgaaactaaatcatctcgtaagagtgaacacaaagctacttttgaaggaaattttggaggaaaaggaaatgttgatggaagtggcaggtctgtaaatggtgctcatagtagcacaaaaactagtgctggcaaagctagtg

SEQ ID NO: 22036 - DNA, 54 bp, Gossypium hirsutum
  Clone ID: LIB3146-050-Q1-K1-A9
ttcacttggaaatggagttttagattcttgtttatcggagatgaggaagagcat

SEQ ID NO: 22037 - DNA, 246 bp, Gossypium hirsutum
  Clone ID: LIB3146-050-Q1-K1-B10
tgacgagcttgccccaaatgtaacagaaggtctcgatgttcactttgtagatgattacagtcagattttcagtttggccttcgaatatgatgataacactatggtaaattaggttcttattaccagccaatggtttagattggtttttggctgaatattctttgcaactgatcttggaatccaaaacccagttttatattgtgaattacatcaaaattttcaatcaagaaataacaaggttgagta

SEQ ID NO: 22038 - DNA, 322 bp, Gossypium hirsutum
  Clone ID: LIB3146-050-Q1-K1-B11
aggtgcaaggttgtggactttggaaacgcatgttgggctgacaaacgatttgcagaagaaattcaaacaaggcagtatagagctcctgaggtcatacttctatctgggtataccttttccgttgatatgtggtcatttgcttgcatagcctttgagctcgctactggtgacatgatgtttgctcccaaaacgggacaaggcttcagcgaagacgaggatcaccttgctctcatgatggaacttcttggaaagatgcctcggaagattgctgttggaggagctcgatcaaaggatttttttgacaggcatggggatctgaaga

SEQ ID NO: 22039 - DNA, 287 bp, Gossypium hirsutum
  Clone ID: LIB3146-050-Q1-K1-B12
tcacaaaccaaagccctatctctcgaggattcaccatgaaaggcggtcaaacaaagtccgattcgatgcaggctggaaacaaactgaaaggcaaaggcgcaggcgccggaaaacgtgcgaagaaagccgccaaggatccaaacaaaccgaagaggcctgccagtgctttcttcgttttcatggaggagttcaggaaacagtacaaagaggcgaatcctgataacagatccgtgtctgctgttggcaaagctggtggagaaaaatggaaaagcatgacagatgctgag

SEQ ID NO: 22040 - DNA, 289 bp, Gossypium hirsutum
  Clone ID: LIB3146-050-Q1-K1-B2
atttaccagtctttcaattctataacatggctccagtgcgtagtttaccaattaaagttggacatattgatgatgtccaagaactaagaaaagctaaaccagccacggttcctgaaagatttatcagagacatggctgataggccaaaagttgttccaaatctatcatcatctcttgacattcccatcattgatctttctaagctcgtgaaaacagacaaagatgaagttatgcagcttaaaactgcctgtgaagaatggggatttttccaggtactgaaccatgggat

SEQ ID NO: 22041 - DNA, 287 bp, Gossypium hirsutum
  Clone ID: LIB3146-050-Q1-K1-B4
tgaagattgtgtgtctgagtggtttgagagggaaagaacttgtcctttgtcagggcgttggttaaacctgcagatctgagatcatatggtgatggatctactagtttgttttttcagatattctaatatcattgctaagatacgaccagaatcagaatcagaatcagggaagctttactgcttggatgttcctaaaatgtatccagagcagccctatcctgaacctcatcatcatcatcatcctctagaggggtaaattggattgtttggttttgccatgtcttgtc

SEQ ID NO: 22042 - DNA, 284 bp, Gossypium hirsutum
  Clone ID: LIB3146-050-Q1-K1-B6
tgaaactttgggaactctttttttaaaggctgaaactttgggaacgttgtcccagaacacacttagcatcagcctccaatggccagttgggttgtatcagaatgtagtttaagacccttcactgccgtcaaaatccaccataaacctagaccttcattaccttcaaacaccattaatgctttcaagttcaaacctttaccatgttctgcattcaaggtcccaactttatggtctaaaggtagaaacttggggggattggggctgttgagtgtgagtgctccatt

SEQ ID NO: 22043 - DNA, 281 bp, Gossypium hirsutum
  Clone ID: LIB3146-050-Q1-K1-B7
aagttccaaaagattataacaaagagaggagctgtgcctgagacaaccacaaagaaggggaaggattatcctgttggtcctgtgcttcttgggttcttcatattcgtcgtcattggatcatctctcttccagattatcaggacagcgaccagcggaggtatggcataagtctgcacttctggtgttaaggaattgcgaggagactggtcttgcattgggcttttcttttctgttagttttgtagggaaactgatgatatatttactagagatatgcttact

SEQ ID NO: 22044 - DNA, 286 bp, Gossypium hirsutum
  Clone ID: LIB3146-050-Q1-K1-B8
aacggtgctgactgtaaccctatccgttcaaatggacctggttacaaccccaacactgttaaagcacattgcaattatgctgttaacagctatttccaaaaaaaaggccaaggtcaaggctcctgtgaatttgctggcacggcagctatcactacaactgaccctagctctggtggctgttcttacccctccagtgccagtggtggaggcacgaccttaacaccaacaacaccgggcacgacaacaactccatcatcatcaacaaccaccacgccctccatcatgt

SEQ ID NO: 22045 - DNA, 307 bp, Gossypium hirsutum
  Clone ID: LIB3146-050-Q1-K1-B9
cttgtggtactctgtttcacaatcccaatcgcattaaccaaggcagaagcaactacaaccaccctccctgaaaacgaagggaacaatgctgaacctgtgggcaacaatgctccatttgctaaacctgttggggacaacgggaaacaatcccacttgggctatcaacagcaaaaagacccaaactatccacaacaaggcattaaccagccactgtcgtcagggttgaaccagccgtattcggctacgaaccagccttactctgccgggtttaatcagccgttttctagtatcagtcagccatttgggg

SEQ ID NO: 22046 - DNA, 260 bp, Gossypium hirsutum
  Clone ID: LIB3146-050-Q1-K1-C1
caccttactagcatttttttatcttcgccggaaaacaggggggagatggccgcaccttggccgattacaacatccagaaggaatccaccctccaccttgtcctacgtcttcgtgggggtattcagatcttcgtcaaaaccttaaccggcaagaccatcaccctcgaagtcgagagctctgacaccatcgataatgtaaagtctaaaatccaagacaaggaaggcatcccaccagaccagcagcgtgtcatcttcgccggc

SEQ ID NO: 22047 - DNA, 66 bp, Gossypium hirsutum
  Clone ID: LIB3146-050-Q1-K1-C10
gtgggtgggggtccccttttcatacagcttttcttcttaaagccgagcatctggatgggacgcgtg

SEQ ID NO: 22048 - DNA, 307 bp, Gossypium hirsutum
  Clone ID: LIB3146-050-Q1-K1-C11
ttcaatgaggaggacatttgacatgccagatagtgtcatccagaaggaaatcgccgagggggtggcagaggtggttcgaatgtttgaaagtgatgcggacactgtttgatgcactcttgtaaaaatgttgtgtaatatgacaaaatcaccctttatgggtgctttgcgagtcagatgtttggaagatgcagattagtttatgatgtgtggacctgatctctcgttttattttctgtggcacttgtgtaattgtgttttgcacgaacatattgggacttatttgaagatggtggtacttgttttatgc

SEQ ID NO: 22049 - DNA, 323 bp, Gossypium hirsutum
  Clone ID: LIB3146-050-Q1-K1-C12
gcagtgggtaatgtggaagttattgcatatacaaaccagctgctggcttctgtttctaagttacagttgaggcataagttaaaaaaccgagcaccacaatctgcaatgcatcgtccggaggctgtcattgtttcatacaccgttgatgggcttctgtttctaagttacagttgaggcataagttaaaaaaccgagcaccacaatctgcaatgcatcgtccggaggctgtcattgttccagacaccgttgatggctgattccaacttgtaagagtttacctttttttttttttgggcttgtatctacttttttgactatgaaaa

SEQ ID NO: 22050 - DNA, 288 bp, Gossypium hirsutum
  Clone ID: LIB3146-050-Q1-K1-C2
gttccttatgctgcctctaattattttgcttatgatacactaagaaatgcttataaaaaagcttttaagaaagaggaaattgggaatgttatgactcttctaataggatcagcggccggtgcgatctcgagcacggcaacttaccctctcgaggtggctcggaagcagatgcaggctggtgctattaatggaagacaatgccacagcatgattcaagcattaacaagcatagttgagaaagaggggatggcagggctttatagagggttgggaccaagctgcatgaaa

SEQ ID NO: 22051 - DNA, 281 bp, Gossypium hirsutum
  Clone ID: LIB3146-050-Q1-K1-C3
cccacgcgtgcggtttgcttaaaaagataaaagggctcattagggatattacaaatgagataccatatggcaccagaagttacactctacataaccgcacacatagattgagacggtcgatggcaacaatctcagaagaagatcatccaagagtacataaactggatctccgccgtagatgccaacacgcccttctgctgccggctggtggaagaccgcacaactatatacggaccaaactggcaccaacatgtcccatactgagcatttaggggctgaga

SEQ ID NO: 22052 - DNA, 289 bp, Gossypium hirsutum
  Clone ID: LIB3146-050-Q1-K1-C4
cccacgcgtccgccctacgcgtccggtaaattattatatataaaatataattgtttatttagtttttatgatgtataggattcataatttattaaataattataaataatgatctgtaaattttgttttattgtaaaactatatgattttgtaataagaaaaataaataatgttagtaaaatatcattatctaaataaaaaaaaagcataattgagtattattatatatttaatttgattttaaataaatcattgcaatatatgtaaaagcaatttaaaatataaatta

SEQ ID NO: 22053 - DNA, 275 bp, Gossypium hirsutum
  Clone ID: LIB3146-050-Q1-K1-C5
aaaaaaaaaaaaaataaaaaaaaaaaaaaaaaaaaaaaaggaaaaaaaaaaaaaaaaaaaaaaaaaaaaaaaaaaaaaaaaaaaaaaaaaaaaaaaaaaaaaaaaaaaaaaaaaaaaaaaaagggggggtcttttaaaaaaaaaaaaaatataaaaaaactaaaatgaaactaaggggggggttttttagaaggaactaaaatcaaattcaggggccgggggtaaaaaaattttttgtatggaaaaaccatgaatttacccaattaattcccttt

SEQ ID NO: 22054 - DNA, 282 bp, Gossypium hirsutum
  Clone ID: LIB3146-050-Q1-K1-C6
acctggtgccggacttttgtttatggttgcagatgggatgtgggataatatagtgaagacacttttggtgggagaaaagtagtcttcagttcatttatggattttgccgtttgtcccattatcccccattacaaccgaacttgatgcctgcaatatttagatgagaaatgctggggttgtagtcattgagttttaaagaggagggcttattcaatagttgagatcttaaacaattggtagttacccttcaatatatttgtgtttagcatgcttgctgatggt

SEQ ID NO: 22055 - DNA, 281 bp, Gossypium hirsutum
  Clone ID: LIB3146-050-Q1-K1-C7
ctgagtttgtggcttcaggatctccaaattccagttatggtcaggcattgccaacggaggaagattttgcaaaggagcctgttatagttccctcccagctgcatcaaactgtcctcggtacagataatcaagatggagcatcatcctcaaagcctcaacatgttgtacttaaccaccttttcattgagaaaggatgggcatcgcattctgttgttgccctgggattgacccataggtttgagtccaaatacgtgactgttgtactctataagccactcaaa

SEQ ID NO: 22056 - DNA, 286 bp, Gossypium hirsutum
  Clone ID: LIB3146-050-Q1-K1-C8
tagctgtatcccgttcttttggcgacactcgatttagaagggaataataatgaaatgctgaagaagggagttgaagaaaagagatggtctgaaaaatttatttcacgtgtagtgttcaatgatgacttggtcatagcatctccagacacttttaaagtagctcttggatcagatgcagaatttgtcctgttggcatctgatggtttatgggattacataaacagttcggacgcagttgcttttgttcgaaatcaattacgagaacatggagatgttcaggtagcat

SEQ ID NO: 22057 - DNA, 270 bp, Gossypium hirsutum
  unsure (1)..(270): unsure at all n locations; Clone ID: LIB3146-050-Q1-K1-D1
gaaaaanaaagnacannggnanancngaagcnagccccggaacganaaggagggcacacgcngnncanccncnnacngccgnacaacnngagnggncgcnnnggacncgngangnngaggaagaacaaannccccnnngcagggaacncggaannggganngnngcananagnccccnnggncanggnnncnnngccggnaaagcaaaggagganaccncnaanaggncncnggaangagacccaaggggacaaggagaaaacnnggagc

SEQ ID NO: 22058 - DNA, 319 bp, Gossypium hirsutum
  Clone ID: LIB3146-050-Q1-K1-D10
aggaagcagggtcaaatgctgacattggttgagtacatgatgctactttaccgtgctttactgccaactccagtttggtaccgtttcttcttaaacaaagactatggaagcctcttttcatcactaatgacagggttgtacttaaccttcaagctgacttctgttgttgagaaggtgcaatccttctttgctgcattgaaggcattatctcgtaaagaggtacattatggtgcttatgcaacatcggagcaggtgaatgctgctggggacctgtgtgccatctgccaagagaagatgcatgctcctatactactacgtt

SEQ ID NO: 22059 - DNA, 264 bp, Gossypium hirsutum
  Clone ID: LIB3146-050-Q1-K1-D11
ccatcggtgtctccgtcctcggcgctgcatggggaatatacataactgggagtagtttaatcggtgctgctattaaagctcctcgaatcacttccaagaatctaattagtgtaatcttttgtgaagctgttgctatatatggtgtaattgttgcaattattttacaaacaaagttagagagtgttccatcatcacagatatatgcgcctgagtctcttagagcaggatatgcaatctttgcttcggaaattattgtgctttgca

SEQ ID NO: 22060 - DNA, 322 bp, Gossypium hirsutum
  unsure (1)..(322): unsure at all n locations; Clone ID: LIB3146-050-Q1-K1-D12
gcaaattcaaggtccaaggcatccctatgcttatagcactcggaccaactggaaaaactattacaaaagaggcaaggagtctggtcatggctcatggggcggatgcttatcctttcactgaggagaggttgaaggagattgaggcacagattgaggagatggcaaaagggtggccggagaaactgaaagatgaacggcatgaggagcatgagctggtgctcactcgtcgcagtaattatgtctgtaatgtatgcgacgaaatgggacaagtctggtcattctactgtgaggaatgtgactntgatctacatcccaaatgtgc

SEQ ID NO: 22061 - DNA, 287 bp, Gossypium hirsutum
  Clone ID: LIB3146-050-Q1-K1-D2
cccacgcgttcgccttcttttccgcccacgcgtccgggaggatgaacactcaacttttggagattgagccaaaggaacttaaattcgaatttatattgaagaagcaaagctcctgctcgattacgcttacaaataaaactaaccaatatgttgctttcaaggttaaaactacatctccgaagaaatactgtgtacggcctaatgttggcatcattatgccaaaatcagcttgtggttttacagttaccatgcaagctcaggaggaagcccctcctgatatgatatgt

SEQ ID NO: 22062 - DNA, 285 bp, Gossypium hirsutum
  Clone ID: LIB3146-050-Q1-K1-D3
ggggttctctgcttgggtttcgaccctagcaccttcatgccgccaccgtcgtgcccaccgtgaggccaccgcgaatggcgctcgaaaccaggaattaccttccttgttggtgccgggccaccttccccacatatgtggccacctttgggccgttactgcggcaccagtttgctgctactgcttagggtttctgctgtgttgtgtttttgctgagggccacactgtagttaggctaggctttaggttagtgggctaggtattggatcatttgggtttaggttattt

SEQ ID NO: 22063 - DNA, 287 bp, Gossypium hirsutum
  Clone ID: LIB3146-050-Q1-K1-D4
ggcgcagataagagtgataggttcgtacggagcgagggcaaggcaggatctaccaaagttggtaaaactagcagaaacaggaatcttcaatctaaacaatgctgtttctcgaaaatacaagtttgaagagggaaataaagcatttcaggatcttaaccagggaagaattgtcagccgaggtgtcattgagataatgtaagttgcttctcctttttctcaataataatacaactttgacacatgcaattcagcaaaatcaaagtaatattgggatattatggagttgt

SEQ ID NO: 22064 - DNA, 285 bp, Gossypium hirsutum
  Clone ID: LIB3146-050-Q1-K1-D6
cttctctcaacccatacacatatttcccaggaaaaagaaaaagcttgagcgaacaagaaaatggccgatcagcttaccgacgatcagatctctgaattcaaggaggcctttagcctgttcgacaaggatggagatggttgcattactaccaaggagttgggaactgtgatgcgatcacttgggcagaaccccactgaggcagaactgcaagatatgattaatgaagtcgatgctgatggaaatgggaccattgattttcctgaattccttaacctgatggcaaga

SEQ ID NO: 22065 - DNA, 282 bp, Gossypium hirsutum
  Clone ID: LIB3146-050-Q1-K1-D7
cccacgcgtccgcctacgcgtccgcccacgcgtccgcccacgcgtccgcatttctgaagagatgccagcttgtcgtcaaatgctcaacatcttccacccatatgatcctgtagcatatagaatagaaccacttgtttgcaaagaacacatcacaaaacgtcctgtcattatcccttatcacaaaggtggaagaaggttgcatattggatttcaagaattcactgaagatttagctgctcgttctcaaggagtaatggatcgtctcagctttataagggctaa

SEQ ID NO: 22066 - DNA, 285 bp, Gossypium hirsutum
  Clone ID: LIB3146-050-Q1-K1-D8
gtcgctgcagatattgcagagggggagaacaaactcaagctctattcttactggaagagctcctgctccttccgtatcagaattgcccttaacctcaaaggtctggaataccagtacatacccgtgaacttgcttaagggggagcaattcagtcctgaattccaaaagctgaaccctattgggtatgtaccggtgctggtggacggtgacatgatcatttcagactcttttgcgattttcatgtatctggaggagaaataccctcaacaccctttattaccatct

SEQ ID NO: 22067 - DNA, 226 bp, Gossypium hirsutum
  Clone ID: LIB3146-050-Q1-K1-D9
cttggctctcattgccatctccatgcttcaagggatgggcttggcatcgcacggtcatggcggtcatcattatgaacaaaaacattacggccctggaagccttaagagttaccaatgtgcataacagtgctcgaggagaggcaacagaacccaatgccatataccatgcatgtgcttctgtcagagatgttgcaacagatgcctgtgcgagcccactggttattat

SEQ ID NO: 22068 - DNA, 269 bp, Gossypium hirsutum
  Clone ID: LIB3146-050-Q1-K1-E1
atttttccgcataaacccaaatcggggggctttttcaagatacctataaaataacccctgatgatccaaaatgccagcaattacagccaatgatgactccgactatttatccaagctagtattgatccgatattccggggtctgggaaatccaacttgttgtctctattcacaaaaaacgagttgaatctgaattcaaaatccacaatctgagtagaatttgctacccgaagtatacgggtagatgataaggcctttaaggcccagatt

SEQ ID NO: 22069 - DNA, 312 bp, Gossypium hirsutum
  Clone ID: LIB3146-050-Q1-K1-E10
aggctgggcaaatccctcacaatctccggtcgcttcgaaagtggtgttccttcttgtcggtgccggtccgttctcttcagttttaacctatacttttctgcatctcccaggtttgtcccgagtggggcaagaaacgactcgaaccaaatagaaagagttaatggattgcccagaaagtcgggacatggagaacataaaatcgtaacattgacactgcatatacacttagaaggattttcgagcaacatcgacaagacaagcagaccgtgaccaaggtcacgacattggaagctaaagtcgcaacattcaaca

SEQ ID NO: 22070 - DNA, 264 bp, Gossypium hirsutum
  Clone ID: LIB3146-050-Q1-K1-E11
tcaatgtccggaatcagatacagtaagaaattaaagattcaagtggtgattacaggtgaagtaactctaaacttgttgtcggtgacaatggtgtcaccagcttttaatacccattccttctcgatgaatcaaaggttgcttgtacttggaaacgacaaagttatggcttccgggaaatcaacatataagattgaagtgatgacgccaggttcgggtaacctcgcacctgcaggcttttatcttttgttggggttcatcaagaca

SEQ ID NO: 22071 - DNA, 264 bp, Gossypium hirsutum
  Clone ID: LIB3146-050-Q1-K1-E12
catactttctatcttgaggatcaatccaccaatttgcatgtactttgggccttctctgagtagttgattaggaaatcgactggctatcgtatggaagtgtattgtatgaagtggaaggtttattagattctgtatatatgtctgttcttttgtatatttccaatcgtggattataagacaacaatctctcttaagtaattggattcatcagaggacttctctgaaatctcaaagtcggttttacaagaaacttctctgttcgta

SEQ ID NO: 22072 - DNA, 288 bp, Gossypium hirsutum
  Clone ID: LIB3146-050-Q1-K1-E2
aaaggctttggttgatactttctttggtcctcctgaacggggtgtatatagtgcatctgttcaaagcactcttttgcagatggcaaaggctgtacttggcaggtttggtgacatatcatcagttaaactaaaaatgccgaatatccatttcttacctgttaatatatcaagcaaggatcacggcagcattgtaaagttcaatgatgatgtatatcttccgacggacgaacctcacggatcgattgaagctagcttgagccgattctggtcaaagatgtagtacgtaca

SEQ ID NO: 22073 - DNA, 286 bp, Gossypium hirsutum
  Clone ID: LIB3146-050-Q1-K1-E3
gtttatcttggtaaacttaattttgcagctgctactggattttttgagcttctctgcttctagcttttcatctatagtcagatactcagttgtgactgataaggtctcaatggaggttgttgaagaattcattctagaacagttgaatctgacaaaagtcacaatatctgaaattaagcacattcatttgataggataatttggaaaccctgttgcaagaggacattcaggctgatctagtctgttgcagcatttgcagttaagatttgaaactgaagacaaagca

SEQ ID NO: 22074 - DNA, 270 bp, Gossypium hirsutum
  Clone ID: LIB3146-050-Q1-K1-E4
ggatgaggaacatgatatggaaactcaggtacgggaagctactttgtgatgacgatttagctgggtttatagggctttctgtatcaaggtctgttagcatgatgcctagagtggatgggcaatatgaatgtacctagagtggaccatgtgaatttaatgtatttgtcaattaatttttgagaacacaatgccatggtagtagttgaattgttgcttgcagttgtattggtgtttggactagtagatatttggcaattttatgttcccgtt

SEQ ID NO: 22075 - DNA, 282 bp, Gossypium hirsutum
  Clone ID: LIB3146-050-Q1-K1-E5
gccacttgataaaattttccgcataaattcaaatctttattctttttcaagatccgatagaagaacccctggtgatccgaaatggcggcgtatagagcagatgatgactacgactatttgttcaagctagtattgatcggagattcgggggttgggaaatcgaacttgttgtcgagattcacgaaaaacgagtttaatctggagtcaaaatccacaatcggagtagaatttgctacccgaagtattcgggtcgatgataaggtcgttaaggcccagatttgg

SEQ ID NO: 22076 - DNA, 285 bp, Gossypium hirsutum
  Clone ID: LIB3146-050-Q1-K1-E6
cccacgcgtccggtttctcatattcttctaccctggagggtcgaccggattaagaagcgaatcacttccatggcatgtactgttggggctgtttgtatacatcttggcagttggcaatgccaccttagggttcctggagaagcttacattccttgagaactcagggcttgataaatatggtgccgaggcataccttgtaaacttcacagctattgtcacaatattgtatggagccttcgtcatatttacagttctctcccagggtcctcaggaagatgactacaa

SEQ ID NO: 22077 - DNA, 282 bp, Gossypium hirsutum
  Clone ID: LIB3146-050-Q1-K1-E7
caaatgatgaccactaacatggatggtgtcagagaattaagacggagttcacatttgagtataactatcttgaagatgaacttatttgctgaaacgtaatgtaagttgtgtcacccccggaaatttcattgcaacttttttgaaaagcctcatgatgaagatgagatgagatgtcaagctttgattagacggttcatcttccaattatgccttttttgttggatattagttctgttgaaattcattacgacgaaagatattgggaacattggtagcagtctt

SEQ ID NO: 22078 - DNA, 282 bp, Gossypium hirsutum
  Clone ID: LIB3146-050-Q1-K1-E8
cccacgcgtccgcttacgcgtgggttggaattgaatgtcgcattggaaggttccacaacatttacggcccttttggaacttggaaaggtggaagggagaaggctccagctgccttttgcagaaaggctattacttccattgacaagtttgagatgtggggagatggtcttcagactcgatctttcactttcattgatgaatgtgttgaaggtgtacttagattgacaaagtccgattttcgtgagcctgtgaacatcggaagtgatgagatggttagcatga

SEQ ID NO: 22079 - DNA, 307 bp, Gossypium hirsutum
  unsure (1)..(307): unsure at all n locations; Clone ID: LIB3146-050-Q1-K1-E9
cgaagctaccaactgacttagggtggcggtttatgctcggcgtcggagcaattccgtcggttttcttggctgtgggtgttttagctatgcccgagtcaccgcgttggctggttatgcaaggccgactcggtgaagccaagaaagttctggacaaaacttcggactccattgaagaagctcaacttagactaagtgaaatcaaagaagcagccggaatcccacaagtatgcaccgacgacgtcgttaaagtccaaaaagcgaagccacggcnaaaggcgtgttgaaagaaatactattatacccaaca

SEQ ID NO: 22080 - DNA, 283 bp, Gossypium hirsutum
  Clone ID: LIB3146-050-Q1-K1-F1
gggagaagtaggaacttcgcatttgtcacaatggcttctggtgaggaagctcaggctgctatcgataaactcgattttcttgtaagtttctctttttcttcattttaaatttatttactcttttgcttggtctgtttgaataaagggtattttgtttcctatctttttttacacactttgattgttagattggactaaatgattgttatttttaatgatattcaattatgtcctgtgaattagctagcctctgtttttcttttaattgagagagatacatttg

SEQ ID NO: 22081 - DNA, 302 bp, Gossypium hirsutum
  unsure (1)..(302): unsure at all n locations; Clone ID: LIB3146-050-Q1-K1-F11
gattctttgggctgtcttggaagaaatgaggtttgattcaacttggattggatggatcatggagtgtgagcagtgtttcttacacttcgctaatcaaatggtaaaccaagtagaagaatcagtccctctagaggtttgagataaaggcacctcttgtctncctatctttttcttttgttgtcgatgttttatctaggttaatatctaaagaagtggagtctaggtcggcccatgggatcagtcttagcaagtcgtgtccaattgtttcacaccttttatttgcagatgattcactactattc

SEQ ID NO: 22082 - DNA, 316 bp, Gossypium hirsutum
  Clone ID: LIB3146-050-Q1-K1-F12
aggcgacgaggcaaaacgatgttaaagctattgttcttacggcaagggaggaaggttttccggtggttttgatatcaatgttttcacgaaagttcatggaactgatattgaaggtgcagcagaggatcaatctcttcaagctggaaaagccaaggcttagcacttcttcaagtgaagcgttatttaatgttgcattccatggtcattcatcttagtcagaacttgaattgtgttatggaaatagggttttgtagctacgttgtgtaccagcttctttaaccatgatggttaattattacgagttttgtagcttctt

SEQ ID NO: 22083 - DNA, 287 bp, Gossypium hirsutum
  Clone ID: LIB3146-050-Q1-K1-F3
aaagtttcactaccgtaacaaaaggggttgcgaaggctctcgacattggcttagaaatggtttatgttggcaaaaacaatgcaaaggaacgagtgaaaaagattactggtctaatcaaagagaaaaaacttagccacgcttgggaagatgacaatgtgtggttcttttggaaccgattagagagcatgttgtactcgaaaacacaacatgggaaagccattgaaaacgattttataaagcaagaagtgatgaccttgcttgcatatgacggtagtgaaaatggatgg

SEQ ID NO: 22084 - DNA, 287 bp, Gossypium hirsutum
  Clone ID: LIB3146-050-Q1-K1-F4
gtgcttcatgtgttatgttttcttgctcttaaaacaagggagcttttggaagtgaaaggtgctaaaaacaaaccataatcatacaaaaagagttgattctaggatccacacggcctgtgcctttccacaccggctggacactcacccatgttccaacctatgtcagttttgcaccttacttttaaaacaggcagaaaaacacactttttagactttttgagcattctaaagcctataaatactaattagaagaagaaataagggggccaccagagaatatcgaagaa

SEQ ID NO: 22085 - DNA, 284 bp, Gossypium hirsutum
  Clone ID: LIB3146-050-Q1-K1-F5
ggaacgtaaaagtacttgatttggaatatgattcatttaattaaatctttaagatgggctgcaggttgctttgtttatcgaaaagtataactcccaactggggctactgatggagttttagcatgttcagctacaaactttcctcacttttttggtcggtttcggtcatcgttgtcatcactcttaaaccttcttgttgattaggttacagttggtttcactttctgataattttcactcaaatcatgtcatgttttttagcgttgcaatatgtttgtcactgt

SEQ ID NO: 22086 - DNA, 284 bp, Gossypium hirsutum
  Clone ID: LIB3146-050-Q1-K1-F6
cccttgcgtttgcttcgacaccgggccattaccttggactaaaaaataccagagactatggtcgtggtgaacgtggcaggtaccgtggtggtggtcgtgatgactacgggtatcatcgatctccaaggcgctcaccatatcgaggtcgtgattactctccaaggtattctcctcatggtggaagatcaaggagggagcgctcttattcaccaccatattctcgcggatctaggtgaagaagtgttttgggtcgaaggggaaagatgagagatttgctttagtct

SEQ ID NO: 22087 - DNA, 280 bp, Gossypium hirsutum
  Clone ID: LIB3146-050-Q1-K1-F7
tgtatatatagtgcttgcctgcgattaggaaagctacatgtagccctgagaatgagcgacaaacggcggtggaagaagcttgtgagtgtcttgttccagtaaaaatttagcaacttcagttgctttttgttttcctcttttacccatatgttcttcaattgcattcttcaggcttttctgatgtctgttaccttcttctcccctttccccttccccttccccttcccttttcccttccgcttgggttgcaaatcattttggtcaaggacttcttccggtt

SEQ ID NO: 22088 - DNA, 171 bp, Gossypium hirsutum
  Clone ID: LIB3146-050-Q1-K1-F9
gcatcaatccaccaattgagcatgtactttgggccttctctgagtactcgataacgaaatcgactggctatcgtatggaagagtattggatgaaatggaaagttcataaaacactggatatatgtctgtcatacgcatatttccaagcgtgcagtataagacaacaatctc

SEQ ID NO: 22089 - DNA, 288 bp, Gossypium hirsutum
  Clone ID: LIB3146-050-Q1-K1-G1
tcttcctctcagtaacaatggagtcgcggttgttgtcacgcgcttccaccattgccggcttgcctcagatcaggccgaagctttcgcgagactgtctcagtgtttcgtttgcttcggctaagcctatcggagccgtcggagaaggcgggaacgtgatatgggggagacagctaaggccgtcgctgttgctcgagagctcgctggccaataaacgggagattttgaagacggttctagcttccgcgtcgtcggcggccgggggaggaagcgattccgccgggtgaggga

SEQ ID NO: 22090 - DNA, 323 bp, Gossypium hirsutum
  Clone ID: LIB3146-050-Q1-K1-G11
gttaaatctgaagagaaaccaatgtatagttctcaatcagcaatgccaatcacaaacgggcagtcgtctttctttcatatgcatgacagtgggaagcaacatctttctggaacattatcatcagcaactgaagccttcgatgctcctagtgcagcaccaacagttaaagagttatctggggtttcacgctcagactgtgctctctctcttctgtcagctcaatccttggatttgtcaagccatgtgacaggtattcaaatgactaggcccttgatcaatcaagctggccttgcccatcgtagcactgagaaatctgcagtgat

SEQ ID NO: 22091 - DNA, 288 bp, Gossypium hirsutum
  Clone ID: LIB3146-050-Q1-K1-G2
tgaaattccagcgtttggtgaggagacacacacacacacgcacgcacagagatcttcaaatttcatcaatggatcattcaaaggttcaagagatcgtggagaagcaggtattgacggtggcgaaggccttcgaggaccagatcgacgaagagattgcggctttagatcgactggaccatgacgatctggaagctattagagagcggaggttgcagcaaatgaagaagatggcggagaagcgaagtcgttggatcggtttaagccatggtgaatactctgagattccag

SEQ ID NO: 22092 - DNA, 288 bp, Gossypium hirsutum
  Clone ID: LIB3146-050-Q1-K1-G3
gtcaaaaccctcatatttgatatgctccaagctgctcgagctcaagtcaactgatcacactgctaaaagtgacccaagtggatattgggttacagtttcttcaaacttctccagaatatggaccaacatatatttccagaattcatccaataaaaatacaattacagaagacaagcagctgggataattcagctttctgcatcttatacctcggaaactttcatttcaagttattactattacagtctatgatgccatttgaaagttgaaactaagggacgtgaaact

SEQ ID NO: 22093 - DNA, 283 bp, Gossypium hirsutum
  Clone ID: LIB3146-050-Q1-K1-G4
cttatgcaattgcttgttctcacgagagggggcagatgttcatggttcctgcgattgaagtgtataaagggcacatagtcgacatctatcaccgccctgaggactcatgccttaatcactgcaagaaataggctgcaaccaaagggcgctccaatataagaacaacacagcggttcttgatacaccatatgcactatagtctggaccaccgcattgactatatccaataagatcagtgggaggaggctactccctcaagcatcagaatgtgcaaacatccaaa

SEQ ID NO: 22094 - DNA, 125 bp, Gossypium hirsutum
  Clone ID: LIB3146-050-Q1-K1-G5
ttttctttcttctttaggatagaaagtttcaaaaagcaagaagtaaaattgtaaattgtgagaagtcaaaaattttccctttcattttaactcaaccatgctgccaaaaccgcagctttcatgtc

SEQ ID NO: 22095 - DNA, 285 bp, Gossypium hirsutum
  Clone ID: LIB3146-050-Q1-K1-G6
cccacgcgttcgaatggtcacctccttacattaacccagcgagttcagaagattgaaatttcaggttcgagatgaattagagcatcttatggatgatgatggtgacatggctgagatgtacctcacagagaaaaaactaaggtcagagggcaacaccccccatgaaataaatcctctaactaatttttctggtgggaccagacaagtttcaaaatctgctcctgtttcaccaatagcatcgaccagtggagctccaagattgcaaagggcatttagcagtatcgt

SEQ ID NO: 22096 - DNA, 284 bp, Gossypium hirsutum
  Clone ID: LIB3146-050-Q1-K1-G7
ataaaaggggtccataatcaaagaacccagaaccaggaaaccaaggaaacgatgagaaaaagagcaaaaagggattgcgactattagctcgagttaaaccatctgagattttcttgaaatctataaccaaggatgttaccaatgttcagattacatacccttgcaggttctttttcctgttccttactaatgcaacatattctgttttttatatgattaattttttcgaaaacactgtcatggctatgcaaaccggagtaggtttgtcgaagatcttgatctta

SEQ ID NO: 22097 - DNA, 255 bp, Gossypium hirsutum
  Clone ID: LIB3146-050-Q1-K1-G8
aaggctacgacttttttcttgggaatttgcgtggtcgaggctctagggggcatgtggataaaaatatcccctcacggaagtcactcaatatatgctttcactatcaatatgctttaattcattttctcagacattaaaaccggaaattaaaacacactattttgactcagatattgctggttcacagcaaatgagctcgggacaaaagatgttcacggctttgaagctatagattaacttttagaaattaggaaa

SEQ ID NO: 22098 - DNA, 299 bp, Gossypium hirsutum
  Clone ID: LIB3146-050-Q1-K1-G9
attcaagatggaagagtacttgatgtttccttctccaaagccttctacaaattaattttggggcaggaccttagtttgtatgatatccaatctttcgatcctgagcttggtaggacgctactggagtttcaggctattattgttaatcagaaaaggcatcagaaatccatttgtgttgaaaacacagcattgaaacaggatttgtgctttcgaaataccaggattgaggacctttttctggactttacccttcctgggtatcctgattatgttctttcttttgagtgtaatctcaaaat

SEQ ID NO: 22099 - DNA, 287 bp, Gossypium hirsutum
  Clone ID: LIB3146-050-Q1-K1-H1
gtttctctcatttttccttcaaagattccaccgtttttgaaccaagatggactgttttgtaccttcaaggaagccttgtttcgttgaagaagatgatggtttagcttcacttgcaggcatggagggtgttggatattcagatggaagctattacaaaaaccatagccaaaatgggtttttctcaacacccttttgtttctcaaggaggaataatagtctaaggaacatgtcttcctcttcttcttcttctgctttctcatgtttgattccttcatctccaaggtcta

SEQ ID NO: 22100 - DNA, 319 bp, Gossypium hirsutum
  Clone ID: LIB3146-050-Q1-K1-H10
catgactgtcttgtttaaaatgcctgtcgttttgggtttctttgtgggtcttatgatgctgggtttggttagctctgctgagtttcatgagctttttcaacctggttgggcaaacgatcatttcatctatgaaggagagcttcttaagctcaaacttgataatttttctggtgctgggtttgcatcaaaaagcaggtatttgtttggaaaagtatccatgcagattaaacttgtagagggtgactctgctgggactgtcactgcttactatatgtcatcggagggtccataccacaatgagttcgacttcgagttcctg

SEQ ID NO: 22101 - DNA, 238 bp, Gossypium hirsutum
  Clone ID: LIB3146-050-Q1-K1-H11
cattgccaacggaggaagattttgcaaaggagcctgttatagttccgtcccagctgcatcaaactgtcctcggtacagataatcaagatggagcatcatcctcaaagcctcaacatgttgtacttaaccaccttttcattgagaaaggatgggcatcgcattctgttgttgccctgagattgacccataggtttgagtccaaatacgtgactgttgtactctataagccactcaaaag

SEQ ID NO: 22102 - DNA, 291 bp, Gossypium hirsutum
  Clone ID: LIB3146-050-Q1-K1-H2
cggacgcgtgggcggacgcgtgggcggacgcgtgggatcgtggattaataggggtcatgcatgactggtgtgagtcgtttgatacatacccaaggacctatgacttattgcatgcagctggcctcttctcggttgagaggaaaagatgcaatatgtctaccatcatgcttgaaatggaccggatattacgacccggtggacgagtatacatccgcgattctcttgatgttatggatgaacttcaagatatcgcaaaagccatgggttggcatcctactctacgcgatacgt

SEQ ID NO: 22103 - DNA, 288 bp, Gossypium hirsutum
  Clone ID: LIB3146-050-Q1-K1-H3
aaaagagttgaaatgggaggggttgcttggactgaagaagaagattatttgctcaagaaatgtatagagcggtatggagaagggaagtggcatcgaatacctgttttggctggtaaatttattttatcttctttttttttttttttctaagtttacatattttgtttaagcttttagtggaaattaaaggattagttttgaatagaagatcatctaaagcgtgaatattatttagatatgcctatgaagagagacagaaagtaaagaaatgccttagctttctatctt

SEQ ID NO: 22104 - DNA, 292 bp, Gossypium hirsutum
  Clone ID: LIB3146-050-Q1-K1-H4
ctgttatatttttctccttatgtatgaattgatttctggggaagcatatcaaccatagagcataacagaagagtcgggattgagcgccgatacttctcttgaaaacccagacatgaagactttgctctgcccaggagcaaccacagagacatctatcatttgaagtgactttgctgtacttgagattagcaagattagggatataatcccaggaaataggccaaatagcgattgcaattctttagggtagttggaggctccataatttcctgtaaaactatttagttttggt

SEQ ID NO: 22105 - DNA, 286 bp, Gossypium hirsutum
  Clone ID: LIB3146-050-Q1-K1-H5
tagctgtatcccgtgcttttggcgacactcgatttaaaacgaagaagaatgaaatgctgaagaagggagttgaagaaaagagatggtctgaaaaatttatttcacgtgtagtgttcaatgatgacttggtcatagcatctccagacacttttaaagtagctcttggatcagatgcagaatttgtcctgttggcatctgatggtttatgggattacataaacagttcggacgcagttgcttttgttcgaaatcaattacgagaacatggagatgttcaggtagcatg

SEQ ID NO: 22106 - DNA, 285 bp, Gossypium hirsutum
  Clone ID: LIB3146-050-Q1-K1-H6
gtgaatctcctccaataatgactgattgccatccccgagccactccgattcggactgctctccaacaagccactgcttcaatggcgaatgaatgcagagcaaaataaacgacttcggcaaggattgagttgtccaaaaacccagggcactctcggaaaatatggtcaatgtttcggctcgtgcttcacatcgagggcatgttgtgatgtttaaaagctttctgtgctgcatattcacttttgtggatgaggaaatcttcatgaggcgttcgtgccagagggatcc

SEQ ID NO: 22107 - DNA, 284 bp, Gossypium hirsutum
  Clone ID: LIB3146-050-Q1-K1-H7
cggacgcgtgggttctagaactatccaagcacactggtattaatcaatggctcgtacaaagcaaacagccaggaaatcaaccggtggaaaagctccacgtaagcaattggcgaccaaagccgcgaggaaatcagctccagccaccggaggagtgaagaagcctcaccgtttcaggccaggaacagtggcgttgagagaaatcaggaagtaccagaagagtaccgagcttttgatccgtaaacttccgttccaaaggctagtgagggaaatcgctcaagatttca

SEQ ID NO: 22108 - DNA, 158 bp, Gossypium hirsutum
  Clone ID: LIB3146-050-Q1-K1-H8
tcccactcgtcctctttttaaatgccccgataaataggagggaacttcaaaatttttataacccaaatcgccatcccttaactatcttactatattctcaaaatctatatactactatcatatatttaatacattaactaatacccacttcctataat

SEQ ID NO: 22109 - DNA, 304 bp, Gossypium hirsutum
  unsure (1)..(304): unsure at all n locations; Clone ID: LIB3146-050-Q1-K1-H9
ggataccgatatttgttgtcggagagtcaggtcctgataattaagtccagatatgcgttgaacacagataattggagagtcggagtaatgcccgataacatgtttattttacaagtgaattgctggcctcgtgtccaatgtttggggaaaaaaactattctaaccatttgataggctgtagaatatccagtataatattctgcatattgtacagatgacgctgacaaaagatattattntagcaatttacatatgagaaaaataattcctatttttcataaaaaatatttggataactttcaat

SEQ ID NO: 22110 - DNA, 403 bp, Gossypium hirsutum
  Clone ID: LIB3146-051-Q1-K1-A1
tatgggagagttgatggcagagatatttacattggaagcaaaaaaatttcagtgagagcggacggaacagttccaactctagaaggcaatatgatgaaagggaagaccattgggtttgtatattctggagcaacccctgctggaatcttcagtctttcagatgcttgtcgaactggtgttccagaggcagtcgatgagcttaagtcaatgaggataaaagcggctatgcttacaggagacaatcaagctgtagccatacatgtacaagaacagctggggaaccgtctagacgtagttcatgcagaacttctccctgaagataaggcaagaataatcaaagaatttaagaaagaaggggcaacggcaatgattggagatggtgtcaatgatgcccctgcacttg

SEQ ID NO: 22111 - DNA, 281 bp, Gossypium hirsutum
  Clone ID: LIB3146-051-Q1-K1-A10
cccacgcgtccgccaaggccaacttacttcgagatttcatcggcttcacctccagaaaaaacataataaaaccaccttaggttcttcataaattttggtaaataatgtgtctcatggtttgttgagctatatatagcatgaaatgggtgttattaatgtgtaaaaaacttggtttagatcacaaagctagcacttattatttgcttgggttgtattctcatactatgatatcaaacaagttgttggttttgtaaaaatacatgtatattgaagttgattgt

SEQ ID NO: 22112 - DNA, 413 bp, Gossypium hirsutum
  Clone ID: LIB3146-051-Q1-K1-A12
gttattttgcaggtgatgggacgatgggatgaggttaggtggtggcagtaggtacaaaggctgagacatatggctaggttttttttttctgattttgtttgggctagggttagtttggtttaggttgaaattgggttgggcaatttgggcattctacatatattatccatttaatttcaataatatgttaaaaaatatttgggtaaattacaccattagtcactattatggtaagttttcgttttgatcacttaactaaaaaagttacaatttggtcactaaactattcaaatatttttatttgagtcgctgaactatttaattttttttaagtcactaagttgttatttaaaaaaaagtttcattagtgaactccaagtgacaattcgacaattagtatggtggatcagcac

SEQ ID NO: 22113 - DNA, 300 bp, Gossypium hirsutum
  Clone ID: LIB3146-051-Q1-K1-A2
gacccacgcgtccgcagcggccgtttgcatatcgtagctaacctgcaaagtttcgacaatggctgtcgggaagaacaagaggatttccaagggaaagaagggaggaaagaagaaggcggctgatccatttgctaagaaggattggtatgatatcaaggctccatcagtttttactaccagaaatgttgggaagactcttgttacccgtactcagggtaccaagattgcttcagaaggactcaagcaccgtgtgtttgaggtctcactggctgatcttcaaggaggtgatgaagatcatgc

SEQ ID NO: 22114 - DNA, 385 bp, Gossypium hirsutum
  Clone ID: LIB3146-051-Q1-K1-A3
cccacgcgtccgagctttaggacttaaaatctctgttccattggttttggaattctctggttctcaagctccgttatggtggagtggtttccgttcttggctcaagcctccatatctttacgtcgtcatcaacgggatcatcatcacaatagcagcatcgtcgcggtttaaccaaaacaacggcgagaaagatcagatggagcagatgcaaccgcggccgaagatctcggaggatcaacaaccaattgtggagtatgatacaaagagcgggtggggctccgacgcagtggaatccagtgatttcgtgtacgaggaaaatcagagaggagaagaggtggcaaccagggtttccgaggaggagagcaatgtgggcggtgaagatgac

SEQ ID NO: 22115 - DNA, 369 bp, Gossypium hirsutum
  Clone ID: LIB3146-051-Q1-K1-A4
gacttgacttttgttttgcttccaaccaatctgtcatttatgttagaaacccacaatcaggctggcttatgtctgtcactctaatctcctaaggaccctctcacaaatatcttctttgctttgctctagttcgtgtagttctcttttctgcaattctctgtttttttctacatttcttttccattgaagaggaagctgtcttgtaagaatgaagccaacaaggggcagagaagctgcaacaatgaacgacaagaaggaagcaaaaaagcctgctgagaacaaggtcgtcggtaagcgaaaagcggcgagccgggccgataagagtgaccgaaagcgcgcaaagaacatatcatcatcgaccaacaagga

SEQ ID NO: 22116 - DNA, 398 bp, Gossypium hirsutum
  Clone ID: LIB3146-051-Q1-K1-A5
cgcgcttaaaaaggccgccaaagtgttggaagatcgcagagagaaaaacgccgttgccagcatcttgatcttatccgacggtcaggataaacaatgtgaaatgaattccaccaatcagaacctcccagttgtttcaaccacgcgcctggcacaatcagagatccccgtgcactccatcggtttcggcacatgcagtcaggctccaaacgacgacgctttctgtaaaatcgtgaatgggcttgtaagcgtggtggttcaggatgtcagactccaactgggattcgtatccgggtcagcgccagcagagatttcgtcggtctattcattgacaacccgaccgtcttacgtcgggtcgaattcggtacggatcggggacttgcactcgggcgaggagaaag

SEQ ID NO: 22117 - DNA, 354 bp, Gossypium hirsutum
  Clone ID: LIB3146-051-Q1-K1-A6
cccacgcgtccgcccacgcgtccgcccactcgtccgcccacgcgtccgcataacctggggagaaaatggtggcagttattccttaaaaaaaaaaaaaaaaatgccaagaaggctgctgggggagatggcgatgatgaggaagatgagtaaacgttaaggccattaccctgcaactaggaacccttgaaagcatatgtttgaaactttgccatcacctccattgttagacatgggtcgagttctgcttccagatctctactgcaccggatattggtatatgtgttgcattgagcaatctgtgttattatatccctgatttaaagctatttaagtaattatgctggtttaaaccaa

SEQ ID NO: 22118 - DNA, 352 bp, Gossypium hirsutum
  Clone ID: LIB3146-051-Q1-K1-A7
tctgaaagtacataatcctcagttttactggaggatcatgaaagaagctgatataggccttgcagatgcatatatccatggagatttttcttttcttgatgaaactgaaggccttcttaatcttttccggattcttgttgccaataaagagaactcagctgcctcagggtcgaataaaagaaggacttggtggtcacctgctctgttaacagctagtatatcatctgcaaagtattttgtgaagcatctcttgagacaaaatactattacacaagctcgtcggaacatttctcggcattatgatctgaggaatgaacttttcactctatacttgggcaaaatgatgcaatac

SEQ ID NO: 22119 - DNA, 232 bp, Gossypium hirsutum
  Clone ID: LIB3146-051-Q1-K1-A8
cggacgcgtgggtgacggtgtaaccaatctggttccataagaaattagctgctgtgcatgtttagctgcttaagataatggatactaaaattctctggcttgactaggtttgttagtagatttctccgatgtagttgatgttgaacccgattgggaaaatgtgttttagacttgatgttatggtctgcttggttggtttgaaattgaaattttcattcctcttgttgctttc

SEQ ID NO: 22120 - DNA, 322 bp, Gossypium hirsutum
  unsure (1)..(322): unsure at all n locations; Clone ID: LIB3146-051-Q1-K1-A9
acgagatcaaagcgaaaaaatggggctgccctgtttgtcgtgccaagatcgagcaggttataaagctatatcgtgtttgattgaattttgcatctgaaatttgtataagctgtaaatgattttcagtgatttctgcgcgttgaagaagtttatttctctttatttgagcattggcgctgttagtttttgtaaaatatttaacatatatcttttaaagaaaatacatttaatatatagttgcaataaaagagtttgtattttcctaanaaaaaaaaaaaaaaaaaaaaaaaaaaaaaaaaaaaaaaaaaaaaagggcggncgg

SEQ ID NO: 22121 - DNA, 347 bp, Gossypium hirsutum
  Clone ID: LIB3146-051-Q1-K1-B1
gtcgaagttgcggcatatcctttttagtactccctactgtaaagatgaacaaggagaggctcatgaaaatggctggtgcagtccgcaccggtgggaagggtagcatgagaagaaagaagaaggctgtccacaagacaactaccaccgacgacaaacggttacaaagcaccctcaagagaataggagtcaatgctattcctgcaatcgaggaagtcaacatcttcaaggacgatgttgttatccagtttattaatcccaaagttcaagcatctattgctgccaacacctgggttgtaagcggttctcctcaaacaaagaaattgcaagatattctccctggaatcatc

SEQ ID NO: 22122 - DNA, 419 bp, Gossypium hirsutum
  Clone ID: LIB3146-051-Q1-K1-B10
ggtaaagtccaagacttggatctcttgagtgcaaggtattgtctttctcctgaaactgggaccactgttgatttgcttcaactttcaacacacctccaaagagtggagcaacagaggaactccatgcaagtaaagcaggaaaatgaggatctgttttatttcctttccacttaattggtacaagagggagaaaggctttcagggagagttgcaaaagtgctgcattaaactcttttttttataacctcattggtgcattttcacaatacgctgttaggagactcgataccattggtagtacatctcgttttccggtcagtacataacagagcgaattctggaactgtacattggtgcaatttcagtaggatttgttccttttctagaactcttgttctctggtgatattatgtagttaa

SEQ ID NO: 22123 - DNA, 426 bp, Gossypium hirsutum
  unsure (1)..(426): unsure at all n locations; Clone ID: LIB3146-051-Q1-K1-B11
gcaagatatgcaccggatctcgtaaaagctttagaactctctgagcaagttgttcctgatgacctgaaagctctcgcagatggctttatggcaaaagtcaatcagggacttgagcaggctcatggaacaggttatggtggaagtggttttaaattcaatgaagaggaggatgaaaagagaaaagcagcaaagaaagcacaagcaaaagaatatgggtttgaggaagacaagtcagactctgaagatgaagatgaaggggtgcggaaggcaggtggtgacatctcacagcagacagcacttgctcagatagctgccatggctgctgcctccaaagctagtactgctttgatgcanaatcctctatcatctggccaactgcttcccaatgctgnatngcctatttctcttcctggtgtacttggtgtc

SEQ ID NO: 22124 - DNA, 411 bp, Gossypium hirsutum
  Clone ID: LIB3146-051-Q1-K1-B12
gcgtccgtaataggtgggatcaaggtagtcctattctggtattcattggctcatggatgtacatgggctggtatgcacttggcggagtactaccatcgctattactatcagagttatttccaataaatgtaaaaggttcagcaggaagcatctgtaattttatgggaaatttcactggttgggttgtcgcatactacttcaacttcctaattgaatggagctcaacaggaatattctttatatcttcagcctttagctctgcaaatttcatcctaacagcgacaatggtacccgagactaaaggacgaacactggaggaaatacgagcatcaattactcattcttcagattgaaatagcaatttgatttaaatattgatcactctagctgctggtgttactagacactgat

SEQ ID NO: 22125 - DNA, 372 bp, Gossypium hirsutum
  Clone ID: LIB3146-051-Q1-K1-B2
cccacgcgtccgcccacgcgtccgcaatttcttccaaatcaaaaggtgcatctttggttgcaatttggaatcctgaatggaatttatggtttcgcacttttatgctgcatttctttaattatacataatcctagaaaataggggaaaaggttgaatttgcgttctatggataaatctttcccctgaaatatgccaacctaattttatcatatcaggtaatttctcttaaatctgaactctgatattagaatgcttgcattatttacgttaatacttgatgtgagagggagatgagtacaaatacatacaagtgtcgatcgaagtgataagtagtaatcgcgtcgcttagcatgcttatatttcttctctttt

SEQ ID NO: 22126 - DNA, 89 bp, Gossypium hirsutum
  Clone ID: LIB3146-051-Q1-K1-B3
ttttttttaagataaaaacagtatgatgagcttgattgagaaaacaacaaattatcctttgcagaaacaaaacttcaagcatttatact

SEQ ID NO: 22127 - DNA, 393 bp, Gossypium hirsutum
  Clone ID: LIB3146-051-Q1-K1-B4
gttaacaccaactcatcttgccatagtcatggaatatgcagctggtggagaactttttgaaagaatatgcaacgctggtagatttggtgaagatgaggcaaggtttttctttcaacaactgatatcaggagtgagttattgccatgcaatgaaaatttgtcatagagatcttaagctggaaaacactctattagatggaagcagtacacccagactaaaaatatgtgacttcggctactctaagtcgagtgtgttacattcccagcccaaatcaactgtaggaaccccagcctatattgcaccagaggtcttgtccaaaaaagaatatgatgggaagattgcagatgtttggtcatgtggggttactttgtatgtcatgctggttggcgctta

SEQ ID NO: 22128 - DNA, 262 bp, Gossypium hirsutum
  unsure (1)..(262): unsure at all n locations; Clone ID: LIB3146-051-Q1-K1-B5
cgcgtccggtctaaatcgcgatcnacccttcttagtttttttttcttaaaagaaaaacaangtgagtgctgcgtttataaaacaaccagtcctcccccgcagaaacaatactttaagcatttatactaaagctaaccacaaaacaactaccaccgacaacaaacagattacaaaacgccctcccgataataagaatcaatgctattcctcccatccatgcaaccaacatcttctaatacaatgttaccaaaacacaaattaa

SEQ ID NO: 22129 - DNA, 238 bp, Gossypium hirsutum
  Clone ID: LIB3146-051-Q1-K1-B6
cgccttcactggtttttgccggaatctgacccgtataccgtgtggatcgtgtcgacgcaggtactgcttcccaaattgctccaagcccggagatggttcaaatggctcaaatggtttgtggctctggccgccaattgttttcatatcctgaaggaactcggcaggctaaatgttcaagttgtgaaacagccaactttgcacttggaagaatggggatgattctatagattgacactgg

SEQ ID NO: 22130 - DNA, 385 bp, Gossypium hirsutum
  unsure (1)..(385): unsure at all n locations; Clone ID: LIB3146-051-Q1-K1-B7
cccacgcgtccgcccacgcgtccgcccacgcgtccgcggacgcgtgggttcgaaggtaaagtcgaattttttcgctgtaaaacgaagttttgagtttgaaaatggcattaaccaacttcatattaacagtagcaggtgttagcgcagtggttcttttattgcgaagcgacgttaaacaatccgctgcgatctttaggcgcaacgttaaacatataaggaattggcttgaagaagagtcttctgctgcttccaaggcagcagagaaggcaaagcccaaggaattggagtccaaggttcctcctaagaaggactagtttctttatagagagtttgggttatntatgatgatatacagtttacagtttttgaatatctggngttttat

SEQ ID NO: 22131 - DNA, 391 bp, Gossypium hirsutum
  Clone ID: LIB3146-051-Q1-K1-B8
gcacgaaggcctaatcgaccctgttcgaccatgaatccgagggttttgccattcttaagcctcacaatccctatttgagcttcgatttcttcaaagcaaacaaggattcgagggcctttatcacgataagtatcttccctctcctttatttttgtttttttactcctatgataacgaaaatcaaagagataaaagcaaaatgaaaaagaaaaatgatctttcaaattaccacttgaaaacagtcttttattcaccctttttggtaccgatttgtatgcgtaaatatgcgtgtatatttctgccaaaaaaaagatcccatttacatcatttttctggctttttatagctgatttacatcataaataaaataaaaattgtattttcttgctgt

SEQ ID NO: 22132 - DNA, 358 bp, Gossypium hirsutum
  Clone ID: LIB3146-051-Q1-K1-B9
aaactaatagatttatgcagttttgagaacttgagtaatttagacgtgaacaagacgggaaaacgacatgaagacgacgatgaggcaacgaacaagacgttcttcagaaaaggctaggttggagattggcaaaaccatcttacacccgagatggctaatcggctcgacaatatagtggagcaaaaactgagtggaaccggtttgagttttgaactcaacaatggatcatcttgatggactaaaatcatttgtcttttgggtaataattgtgtgttcatttgcaactgtgtttggtttggatgctttgaatttcttgttcaaagatccaaacatgttattgaaacctatttctctcaaa

SEQ ID NO: 22133 - DNA, 258 bp, Gossypium hirsutum
  Clone ID: LIB3146-051-Q1-K1-C1
cttccttgtccaacttgcaggccgtgaagttgtggagaacgaggggcatagagtatgggcgcaaacatggagcgaggcgcacggggatcgtgcgtggagtgccgacgtgggggttgcggcgtggggctgctgtgcaaaaggggaacttagggtctctaaaaccctaaaactttgggcctatcgggcgttgtaaaattttgggcttgtaaaccgaacctatttgatggactatttaattattgtgttatgattttggtt

SEQ ID NO: 22134 - DNA, 102 bp, Gossypium hirsutum
  Clone ID: LIB3146-051-Q1-K1-C10
aaaaaaaaaaacaaaaacaattaaaaccaattgattttaaaaaacaaaaaaaaaaaaaaaaggaaggagtaaaaaccccccccttgcggttttaaaacgaga

SEQ ID NO: 22135 - DNA, 411 bp, Gossypium hirsutum
  Clone ID: LIB3146-051-Q1-K1-C11
acggagggtatggtggtggtggccacggatgtatatggtggcggtggacatggaggaggtgataaaggaggctgcgcctatggctgctgtcgttcaaattacggaagaggctgccaaaggtgctgctcttatgctggcgaggctgtcgaagttgaaactcacgcctaatgtagccttttgcatttacagatggcatgtatgataataaataaatgggcatacgtcctaaatgaaaatgcttccttaatatagtgatgtaagtggaagtataaagcaataaaattgtgcttttactttaaaaaaaaaaaaaaaaaaaaaaaataaaaaaaaaaataaagaaaaaacaaaaattaaccaaaaactaagcattaagcttaaaacaaaaatataaacttgaccaactacttcaat

SEQ ID NO: 22136 - DNA, 410 bp, Gossypium hirsutum
  Clone ID: LIB3146-051-Q1-K1-C12
cacgcgtccggatcgtctcacccgagctatcatggacgattatcattctagcccgccaaaagagcggcgggggcgaggagcatttagttgatgccgtgcttacgtagcaagacaagtatgatcttaacgaggacactattattggacttctttgggacatgatcactgcaggcatggacacaacagcaatcttagtcgagtgggcaatggctgagctcattatgaatccaagagtgcataaaaaggcacaagatgagctacatcgtgtgataggattccaaagggtgatgtctgaacctgatttctctaatctgccttaccttcaaagcgtatccaaagaagcactacgactgcaccccccaactcctctaatgttaccccaccgtgccaatgctaatgtgaaaatctgt

SEQ ID NO: 22137 - DNA, 354 bp, Gossypium hirsutum
  Clone ID: LIB3146-051-Q1-K1-C2
cccacgcgtccgcttgaggaagaacataccaaacattgagaaagctgttaggaagatggagtcacataccatgtgagagcatcatccgtagacggacactgaaatgccggatttcaaatatgtaattttgaaacttaacctcagcatctatggtggctatgcacacacttgccacttccccttcccctttcaaaagactatatcactgtttcgatactgtaatgcttttgaatcccgttttggaatactgtggcagatctagcctgtcggaattcatgtgaattgtgtaatcgatgctgatacttatctagaatgtatgtgatatgctttggcaagaaagtttatattcataat

SEQ ID NO: 22138 - DNA, 283 bp, Gossypium hirsutum
  Clone ID: LIB3146-051-Q1-K1-C3
cccacgcgtccgcccacgcgtccggtcactttgttcatactttccttttttctttttcaggttgaggaaatttatattcttttgttccactttcccttaaacagtgtgacctattttatagtatctatttttaattaataaattgttgagcttaagctccaacttctaggagaaaaaaaaaaaaatgaactattgccgaacaaaagtaatataacgcaatgaaaaaattaaccgctctacagaaaggccatcataacaatgaccatggataaaaacaaaaatc

SEQ ID NO: 22139 - DNA, 274 bp, Gossypium hirsutum
  Clone ID: LIB3146-051-Q1-K1-C4
agacactctaggtttgactggtcacgagcgttataccattgatctcccaaacaaaatatgcgacataagacctggccaagatgtaaccgtcacgactgacaatgggaagtctttcacttgcactgtccgctttgacactgaggttgaattggcatacttcaacaatggtggtatacttccatatgttattagaaacttgattaaacagtaagtgcattggttgggagccatttctagatctttcatcaattgtgaaacgcgagatgcacataaa

SEQ ID NO: 22140 - DNA, 374 bp, Gossypium hirsutum
  Clone ID: LIB3146-051-Q1-K1-C5
gccacgcgtccgcccacgcgtccgcagaaagatcctcctacctcttgcagcgctggccctgttgctgaagacatgtttcattggcaagcaactattatgggtcctccagatagcccgtatgccggtggggtgtttctagtcaccattcatttccctccggattatccatttaaaccacccaaggttgcattcaggacaaaggtatttcaccctaatattaacagcaacggtagcatttgccttgatattttaaaggaacagtggagccctgccctcaccatatccaaggtgttgctgtcaatctgctcactcctgacggatccaaatcctgatgacccttttgtgccggagattgcccacatgtacaaaacgga

SEQ ID NO: 22141 - DNA, 390 bp, Gossypium hirsutum
  Clone ID: LIB3146-051-Q1-K1-C6
cttgactcaaaagctgcaggatggggagtgatggtcagccaccgaagtggtgaaacagaggataacttcatcgctgacctttctgttggtttagctagtggccagatcaagactggagctccttgtagaagtgagaggttggccaagtacaaccagcttcttcgcattgaagaggaacttggaaatgtccgctatgctggtgaagctttcagatctccttagaggagttaacttacaggaacaagtttgtgcaccaaattagtatggagaaacgttttaacgagctctagtaaagtgaggccgacctttagaaattttcaggaaccctaagagcttctcaggggaaaaaacataatttgtcatctaggatagatttagtttggggatctg

SEQ ID NO: 22142 - DNA, 277 bp, Gossypium hirsutum
  Clone ID: LIB3146-051-Q1-K1-C7
gccaaacctacactcacccattcatattcctaatgatactaatgacccaccaacagcgagggagcccaaatcaagcttgcggatcgtcaacaggatcaccactctatctacattctcggtcatacaacgtttcaaaaattaacttaccgcatgtatatactgcttaagatcaaaaaacgactacttgagtacaatatatacagttgatacccatacgaatatagcatatatcattatagtcgaactagattcacatatcatgcttaaaaacataaaa

SEQ ID NO: 22143 - DNA, 388 bp, Gossypium hirsutum
  Clone ID: LIB3146-051-Q1-K1-C8
gtcatgtttgggggaaaaagggttgttcgatacactcgtgaattaacaaacgtcgggcctgcaagatccatgtacaaagtcacagtaaatggaccatcgacagtagggatctcagttaggcccaagacactcatctttagaaccgtgggtgaaaagaagagatacacagtcacctttgtagctaaaagaggaacaagcccaatggctaaacctgaatttggttcaatagtatggggcaatgctcaaaaccaagttaaaagcccagtttccttctcatggtcattgatgtgagagtgtcccacagtttatatataattctgggtattctttccctcaatgaacctcacacaggacaagaaatctggtgcaaaaagggaccctcatccat

SEQ ID NO: 22144 - DNA, 413 bp, Gossypium hirsutum
  Clone ID: LIB3146-051-Q1-K1-C9
agttggtggagcagaccgattagtaccacaggagattaaagtaccaaaataagacagatataaacaggacccacaactcatcgtctggttttgaagagttcgctatctccgaagaagttgtgttctttccgtggataccttcatttttgagctcgtagggagcgagggagcctagaaagccttgcccagagaactcacttatagaagagcttagctaaaaagctgactgtaagaagaagggctccaactcttctagcatttcttttcccgtcccagaccacagaaagagaatagaaaaggcacggatcccctttctttcctttccctgagcctgaggcgagagcttgctttaccgagaactaggcttttgcttcatcagatgctatagacgagaccacttatgtcacttaatt

SEQ ID NO: 22145 - DNA, 251 bp, Gossypium hirsutum
  unsure (1)..(251): unsure at all n locations; Clone ID: LIB3146-051-Q1-K1-D1
ggtcagcctggtcaagctcctcgtccaggtgttgctgttcctgcccgtccttaaggcccggaaagttaaagataaatttctatttttgtatttgctttgaaatgggctgctttaattttgagaaaatttggatttgtgtagaaggtttttgattagttaaaagtttgatcgcatttgacaagctatgaatggttgagaatactggttggaatctcataatttctatttagttgcttattttatcccccnna

SEQ ID NO: 22146 - DNA, 413 bp, Gossypium hirsutum
  Clone ID: LIB3146-051-Q1-K1-D10
cccacgcgtccggggtgctgaccagcccgttatccttcacatgcttgatatcccacctggtgcggaggctttgaatggtgtcaaaatggagttggtggatgctgcttttcctcttctaaagggtgttgttgctacaactgatgttgttgaggcatgcactggagtcaatgttgctgtcatggttggtggtttcccaaggaaggaaggaatggagaggaaagatgttatgtcaaagaatgtgtctatttacaagtctcaggcttctgctttggaacagcatgcagctcctaactgcaaggttttggttgttgctaaccctgccaacaccaatgcattgatcctgaaggaatttgcaccttcaatccctgcaaagaacattacctgtttgacaaggctggatcataacagggcac

SEQ ID NO: 22147 - DNA, 345 bp, Gossypium hirsutum
  unsure (1)..(345): unsure at all n locations; Clone ID: LIB3146-051-Q1-K1-D11
ggccgaccgaggcgtccgaggatgttagcacaaattttatctaanttttttttataaacccacaaaaccccaccagggttgctttcctaaaaacaccaccccgcctaagctacaaagcaaaacgtatccatatcacccataggatttgctgcatcacaaaaacaagctatgtgtattctaaccattttgactatactatatcatattattgatattcaagttacattacataactcattttgagataatgaagttgaattacgcttttgtattgccaaagagaaaacaaaatctgaactttattatgtcaccaacaaaaaagaagtttatcaaaaaaacaaacaa

SEQ ID NO: 22148 - DNA, 411 bp, Gossypium hirsutum
  Clone ID: LIB3146-051-Q1-K1-D12
tcttgatttgcaagaacagggtgcacccgttggtttaattggaattcaaggacatatagggaggcctgtatgaccagttgtgtgtactgctcttgataagttaggcattctcggccttcctatctggtttacggagctcgatgtgtcttcaatcaatgaacacgtgagaggggaagatttagaagttatgcttagagaagctttcgcacatccggccgtggagggtgtaatgctgtggggattttgggaactgttcatgagccgggataacgcacacttggtgaatgccgaaagcgaagttaatgaaaccggtaaaaggtttcttgctcttaaacacgagtggttgtctcatgctcgtggacaagtagatgtaaaaggacaattcaatttccgaggctttcatgggaagta

SEQ ID NO: 22149 - DNA, 381 bp, Gossypium hirsutum
  unsure (1)..(381): unsure at all n locations; Clone ID: LIB3146-051-Q1-K1-D2
cccacgcgtccgcccacgcgtccggcattcccgatgaatttcccaaggggttatggagcagaaaagaaggtgagagcttggatggaggagtttcagaagcttccgtacatatctccgtatgaagattctcggcatattgatcctaatagtgagcttatggagaaaagggctgttggtgtattgcatgagtttttgagcttgacaattcataagaagaccaagaggaactacttgagaagcttgcgagaggagctgaacatcccgcataagtttactcgattgtttactagatatcctgggattttctacctctcgttgaagtgcanaacgacgactgtggctctcaaggaaggatacagacgggaaaactagtgaatcaca

SEQ ID NO: 22150 - DNA, 347 bp, Gossypium hirsutum
  Clone ID: LIB3146-051-Q1-K1-D3
aaagaaagaaaaaatggttctgctagacaaaatgtgggacgatgtagtagctgggcctcagacctgaacgtggtctcggcaggcttaggaagatcaccacccagcctttgtccatcaaagatgaaggagaaaagaaaaagtaccagaggtcgttgtcgctgccgaatagtccagtgtcaggtccgacacccgtgacaccgacgaactccacggcgcgtaaggagaacgtgtggaggagtgtgttccatccgggtagcaacctagccaccaaaagtataagttctgatgttttcgacaagccacaacccaactctcctaccgtctatgactggctttacagtggggag

SEQ ID NO: 22151 - DNA, 389 bp, Gossypium hirsutum
  Clone ID: LIB3146-051-Q1-K1-D4
cccacgcgtccgttcctttccgggtattgccaacaatcaaggagcttggtcgaacacgaatggaagtaaatgttaaggttaaaagtgtctttggagcaaagatgtttgctcttggagttgtcatcaaaattcctgttccaaaacagacagcgaaaacaagtttccaagtaacatcaggtcgagcaaagtaccaagctgctattgattgcttggtttggaagataagaaaattccctggacaaacagaaccaaccttgagcgcagaagtggagttaatttccacgatggcagaaaagaagtcatggacaaggcctccaattcagatggaatttcaggttccaatgtttacagcctctggcttacgtgtccggtttcttaagtctggaaaa

SEQ ID NO: 22152 - DNA, 296 bp, Gossypium hirsutum
  Clone ID: LIB3146-051-Q1-K1-D5
cccacgcgtccggacagtttgaagaatgtttacaagtcattcgtgactgattatccaatggtctccattgaagatccatttgatcaggatgattgggagcactatgcaaaaatgacaagtgaaattggtgaacaagtgcagattgttggtgatgatctccttgtcacaaatcctaagcgtgtggagaaagcaattaaggagaagacgtgcaatgctcttttattgaaggtgaatcaaattggttctgtgactgaaagtattgaagctgtaaaaatgtctaaatctgccgggtgggg

SEQ ID NO: 22153 - DNA, 356 bp, Gossypium hirsutum
  Clone ID: LIB3146-051-Q1-K1-D6
ggcaagtttacataatatttttacttgaatgattttcacattgctttttagctgtgggatttgttgaattcaggaataaagaaacattcccagtgaagattccagcctggaaacactgcaactgcataagatccagatgtgtgaaactttattgtgagtgctttgcagcagggatttactgcgataattgtgcatgccagaactgtttgaacaatccagattatgacgatactgttcttgatactcgacaacaaattgaattgcgtgaccctcttgcatttgcttcacctgttgttttcccatccaatgattctcctaatgttactggtcatggaaacttgatgaacgctggatca

SEQ ID NO: 22154 - DNA, 394 bp, Gossypium hirsutum
  Clone ID: LIB3146-051-Q1-K1-D7
tgctatgagaaaaaggtccgatacgagagcagaaagaaacttgcggagcagcgaccgagagtaaaaggccaatttgttcgtcaaacacaggtcgatcatcctacgcagatacaagcagagtgtcattatcacaattcacccgatggctagttacaacatatagaagtgcatggattgaagtttaccatggatctttagaattggttgcacttgcaatttcagccaaacactaaagattcttctgttcatatctacactcaaaatcatattagtagttattaacacagtaggttactatgtacttgtaaaaatcacattttgagcttagagtttacccttaacagagtttgcttccctggttttcattaggtttctctggggcattctctatttg

SEQ ID NO: 22155 - DNA, 388 bp, Gossypium hirsutum
  Clone ID: LIB3146-051-Q1-K1-D8
gtgggatgcaatcctttctccattacttctcaaggttggcagatatcaaaatttcaatcggatacaattgctcggagctacatcatctcaactcttgaagagtcgataaaactggtcaattcagccatgcaccttctactttgggagcgtacaactgagaaaacctttaaacacttccaatctcaagagcgtgagctagtgaacaagtataattatgttgtcagcttatggagaagaatttcaactattgctggtgaattgagatacaccgatgccatgaaactgctgcataccttagaagacgcaaccaaagggtttgttgatcaagtgaatgcaaccatagcccttcttcatccgattcattgcacgaaagacaggaaagtgcaag

SEQ ID NO: 22156 - DNA, 337 bp, Gossypium hirsutum
  unsure (1)..(337): unsure at all n locations; Clone ID: LIB3146-051-Q1-K1-D9
gtctacaaacatttctattgctgggtttaatggatgaaaactgtgcattagatcaacatggttgaccttgtaaatcctctgattgaagctatacttctttccatgatgagtatcctctttttaagctattgctacacaaatggcaagtcaaatgaagtcatggttcatttnaaaaaaaaaaaaaaaatgattaaaaaaaataaaaataaaaaaaaaatttttttttgggccgccccctaaaaaaaaacccaaactttatctcccggggggggcggcctgtaaaggtttcttatattgaaaccccatattgtgattttcttgggccgcttttttttaa

SEQ ID NO: 22157 - DNA, 396 bp, Gossypium hirsutum
  Clone ID: LIB3146-051-Q1-K1-E1
ccgttaccgaatcggagccggcaagaaagcggagcgccgaaaatcaaagaaatccggatccgtgtccacttcgttgtcttcctcctccatctacctccctccggtgcctttaaaagaggcgatttcaaatgggttgaaagtggatttcgggtttagcccatatggcgagagaataaacggacggatcgcgattctcgggttgacggctttggttttagtggaattggctacgggtaagagcgcgataagttatcatacgccagcaattatctttattcagatttattttgtagctgcagttggggcttttgtccgtaagtacgaagaagaaaaagttaggggttggctaccctctcaatctttttcacctcaaaattgaaaaaaaaaattgtactt

SEQ ID NO: 22158 - DNA, 308 bp, Gossypium hirsutum
  Clone ID: LIB3146-051-Q1-K1-E10
cccacgcgtccgcccacgcgtccgacgacgtttacaggggaaacaaacagaaacgaagaaattccaactctttattctctcaattttttcccacatccaaacagctacattgattgaatttgaaactcaaaagaaaaacaaaatgagtgtaatcgatatattgacaagagtagatgtgatctgcaagaggtacgataaatacgacgtcgaaaagcagcgtgaccaaaatgtctccggcggtgatgcttttgctcgcgcttacgccgcagtcgaagccgacattgaatccgctcttgaaaaagtggaac

SEQ ID NO: 22159 - DNA, 419 bp, Gossypium hirsutum
  Clone ID: LIB3146-051-Q1-K1-E11
tttatctgtatatttttgctagtgcattaccgaactctgtacttgtaggagaatgccatgtgcgggttgaggcatgtatttttgtgtgtattgctttttgtagttctttaggcccttgcatgggcttcttttttagatggattgaaggttgggacttcactagcactagatattggaaggtgtaccatgtcaagcatgttggccaatattaacactggaaatcaaggcctacaaggtgaactgtaaatctagctttgccaagtttcaagctttatgtccgaaagcatggttagacataagaggcaaaggatcaaagctttggagggctcctagtcgggatgatcatctcaaattcacatgcagtagcaggtctattcctggaagactactcattagttgctaatttgaagcaagagtta

SEQ ID NO: 22160 - DNA, 253 bp, Gossypium hirsutum
  unsure (1)..(253): unsure at all n locations; Clone ID: LIB3146-051-Q1-K1-E12
cccaaccattanaaaaattatacacagacttattttttcaaatctgccaccaacaactgagggggtttctttattgtgtacccaatttccacaatacaaacatttcctttgatccaatatgaaccttttataataaacaaattgctactcatcaatatactaacaagactctatgttatctacaccaattactataatatacaaccattaaaagcaccttcaccaaaaactctcctcatataattctttttct

SEQ ID NO: 22161 - DNA, 398 bp, Gossypium hirsutum
  Clone ID: LIB3146-051-Q1-K1-E2
ctttaattaatctgtgttttcattacttataccactaattgtcagatatgcatactcggaagatgtgggggaggaattcgatgatgaagaagctcaatctctaactagggggcaatcgaacggcgatgtgagtttagtcaagcaggagcaaaagaatggaaatgctggtatctccgatgaggaagatgaatctgaagaggataaaagggagtaaaatccatcgccggaacatgttttctatcaaaccaacttttgagcggatcccacgtgaagataagcgtgttatcctcagagcaatggtttttcgaatctgataacttaatattttgacttatgtctatgttttctgctggaggtaagagagaactagtagtttacatcatattttgtccatattt

SEQ ID NO: 22162 - DNA, 292 bp, Gossypium hirsutum
  Clone ID: LIB3146-051-Q1-K1-E3
cccacgcgtccggaaaccagagagagaaaaaaaagaaagaaaaaatggttctgctagacagaatgtgggacgatgtagtagctgggcctcaacctgaacgtggtctcggcaggcttaggaagatcaccacccagcctttgtccatcaaagatgaaggagaaaagaaaaagtaccagaggtcgttgtcgctgccgaatagtccagtgtcaggtccgacacccgtgacaccgacgactccgacgtcgcgtaaggagaacgtgtggaggagtgtgttccatccgggtagcaacct

SEQ ID NO: 22163 - DNA, 362 bp, Gossypium hirsutum
  Clone ID: LIB3146-051-Q1-K1-E4
gctttttcgagttggaacaatcgggaaacggaggagtgatcgtcgactgcgggacggccataacacggttgcaagcggaggcttacaacgcactccgtgacgcgttcgtgaaattaacgccggacttgccgacgaccggtgggtttgcgttgttcgacacgtgctacgacttgtcttcaagaaccagtgttagggtcccgacggttgcgtttcatttcagcggcggactgtcactggaattgccggcgaaaaattatttgataccggtggactcctcgggaacgttttgcttggcgtttgcccccacgacgtcgtctttgtctataattgggaacgtacaacagcaagggacacgtgtgagc

SEQ ID NO: 22164 - DNA, 395 bp, Gossypium hirsutum
  Clone ID: LIB3146-051-Q1-K1-E5
attagggtttctctcttcaggtaaattcttggtagtttcgttcgttttaagaacagaggtgtcgaagatgagtaagcttcagagtgatgcccttagagaagctatttcaaccattgtggctaattccaaggagaaaaatcgcaagttcaccgagaccattgaactccagattgggctgaaaaactatgatccccaaaaagacaagcgtttcagtggttctgtgaagctaccacacattcctcgtcccaagaataaaaattgcatgcttggagatgctcaacatgttgaaaaagctgaaaagattggtttggattatatggatgtagaagcattgaagaagcttaacaagaacaagaagttggtcaagaagcttgctaagaaatatcatgcatttt

SEQ ID NO: 22165 - DNA, 350 bp, Gossypium hirsutum
  Clone ID: LIB3146-051-Q1-K1-E6
gctgtgtctcaggtgaaaagaagttggttgaagaaggttcagcaagaatggagtattctagagaaaaaccttcctggttagcactttatcttactcttcataatgatttaaagtgttaactctgccttcattttgttggttaccattgtttaaattttgaaggcagttgctattttctcatgagactatgtttggcctgtgcagaaaccatctatgtccgtgtatgcgaggaaaggatcaatttactacgagcagcccttgttggtgctcctggcacaccctaccatgacgggttgttcttttttgacatttctcttccttctgactacccatatgaaccaccattggtg

SEQ ID NO: 22166 - DNA, 367 bp, Gossypium hirsutum
  Clone ID: LIB3146-051-Q1-K1-E7
cccacgcgtccgcccacgcgtccgggtgcctaaagatgtgaatgctgcagtggcaacaatgaagaccaaaaggaccatccagtttgttgattggtgtcccacagggttcaagtgtggcatcaactaccagcctccaactgtggtacctggtggggatttggctaaggttcaaagggcagtttgcatgatttcaaattctacaagtgttgctgaagtgttctcaaggattgatcataagtttgatctgatgtatgcaaagcgtgcatttgtgcattggtatgttggtgaaggtatggaagaaagtgagttttctgaagctagagaagacttggctgctcttgaaaaagattatgaagaatttggcttg

SEQ ID NO: 22167 - DNA, 422 bp, Gossypium hirsutum
  Clone ID: LIB3146-051-Q1-K1-E9
caaaggttaaagaaagaaagaaaacatgtctcttgtgacagaagagataaaagcgagtgcgtcagagatttaccatggagatgagatatgccaagagaaatccaagtttttgttggaggaagtaggcatgccaagggggcttttgccacttagagacatcgaagaatgtgggtacgtgaaggacacaggtttcgtgtggctcaaacaaaagaagagcatcacccacaagttcgaaaagatagggaagctggtttcctatgcaactgaagtcacggctgtcgttgagaaaggcaagatcaagaagctgactggggtgaagaccaaagagcttttggtttggatcacactgagtgatatccaagtggatgatcctcccactgggaagatcactttcaagaccccttcagggctgtttaggactt

SEQ ID NO: 22168 - DNA, 383 bp, Gossypium hirsutum
  Clone ID: LIB3146-051-Q1-K1-F1
ggcgaactctttctgttggaaccgtacagactacgttagaattcaggcaaacggagtggagactgaaaatacggtggggccgaaaacggaggcgatactgaaggaaagaggggttgaatcgttaccgtttggcgggaaacggttactaacggagactaacggagagagaatcgagtgctttgtgcaacgccttgttgctaccggcaaatgcagccttcctccaagtccttgcaaggaaataagccgtaagccaacttgccaacggccgttagttcctctttttttcaaaattacttttttgtccttaatttaactcttttaaccgcttgtaataaacctcctcaacctttttttttttttactctttaactgttccctacttt

SEQ ID NO: 22169 - DNA, 420 bp, Gossypium hirsutum
  Clone ID: LIB3146-051-Q1-K1-F10
gtgaactattagaagaaagagaagcagggaaaacttttgatgtatgcttccagcaactgaaggcttttgctgatgttgtacccagttgggacaatatagttattgcttatgagccagtatgggccattgggactggtaaggtggctacaccccagcaagctcaggaggtacatgtagctgtccgtgattggcttaaaaagaatgtttctgaggaagtggcatctaaaacgcgtatcatatatggagggtccgtgaatggaagcaactgtggtgagcttgcaaaagaagaagatattgatggatttcttgttggtggtgcttctttgaagggtcctgagtttgctacaattgtcaactctgtaacaaccaaaaaggttgctgcttaaatatatataaggtggattcaggtaaatgaataaa

SEQ ID NO: 22170 - DNA, 369 bp, Gossypium hirsutum
  unsure (1)..(369): unsure at all n locations; Clone ID: LIB3146-051-Q1-K1-F11
gacccacgcgtcctcttacccatttaaatacctattatcacgcttcttttttcaaatattctcccatcatctgagtgggttttttataatattacccagcccatacaacatangaaaaagcatatgacccaccttacatccattaaacactctttatgaatactacacaccaacaaactaactcttttcaatactctctacataaaaatcccacaaaaataatccttttttaattccaacacaaaacacaaatcataatttaaatcatttttaatggataaaaataaaaaaatctagctacctaactatatcttcttgaataccaacttgataaaacatcccttactcattcaaattttaactaccaac

SEQ ID NO: 22171 - DNA, 229 bp, Gossypium hirsutum
  Clone ID: LIB3146-051-Q1-K1-F2
cctatttttacttagaataatttgcaaattttttatcatccccgacatccggacccggggcaggattttttaaacggaggcttacaacacactccgttacacgttcttaaaattaacccctgacttgccaacaaccagtgggtttgcgttgttccacacgtgctacaacttgtcttcaaaaaccactgttatggtccccacggttgcgttttattttaacagcggactg

SEQ ID NO: 22172 - DNA, 358 bp, Gossypium hirsutum
  unsure (1)..(358): unsure at all n locations; Clone ID: LIB3146-051-Q1-K1-F3
cccacgcgtccggtgaaaggcaagagcttcaacccgatccacagattcaatcgccccaggggtcatcaagagatgacatgatttcctgggtggtggcgttagagacggctttgctcccctgcttgccagccagagagcttcaagctatcgaccgttctccgcacccttctcatcagattgatgtggagagacatgctagagatttcatggaagctgccaagaagcttcagctatatttccttggcttgcaacgcgaggatcatccaaccaaggctggaatgctcagaaaagagattgcaacaatggaagaagagttgaaaacgaagaccgagatgatgaagaatcangagagactgat

SEQ ID NO: 22173 - DNA, 386 bp, Gossypium hirsutum
  unsure (1)..(386): unsure at all n locations; Clone ID: LIB3146-051-Q1-K1-F4
cccacgcgtccggggagaatggtcgcaatctagctcgcttaagagagtcaaaatttgtgggtatttcgatgcgaaaggaatggcgaattcnaatcaccactcaacatcattgtacggttcaggtgcgatgaacatgcaacgaaacccagaagaggaggaggaggacgttcccggcggaggcggcggaggaggtgaagagtcggtggataaccctcagattggataccaagaaagcggcggcggggttgttacggttatgaataatggcatggaagaagcttctcacgccaatctttatggtcaaggatccgatttaaccgccgttcagggtaattcaagtgctgatcagctcaccctctcgtttcaaggggaagtttacgtctttg

SEQ ID NO: 22174 - DNA, 251 bp, Gossypium hirsutum
  Clone ID: LIB3146-051-Q1-K1-F5
actcactcttttacatactcttgctctttactctttccacaaaaaaaaaaaaacaaaagaagatttataaaaaaaataatattcaccaaaaaaaacataaaaaaacacattttatcccctacttatccaaccaaaaaaaataaaaaatttccacccttcttaaaacccccactttaactatccctttcttcaaacatactaaatattttatagtaaccctcaaaaaaattcacctctcctttctttacacc

SEQ ID NO: 22175 - DNA, 360 bp, Gossypium hirsutum
  Clone ID: LIB3146-051-Q1-K1-F6
cccacgcgtccgctgctttggaggactttttaggtgcctcctattttgtgccttgggaggggttgttaatgaggctttttagggccttcaattatgcataaggcttcaggagacattttctatgggaagatattcagatccggttgccatggataattccatgaatgttccaaagtagatgtcagatggagcagagagcgggttatgatcacaactgagtaacagataatccgaatatgcagagttatcaaggtaactgctacgagccttgtagcattattttgagtatgaaatttgtagactgggtggaccttctacgatttcatttcagcttccaccattcacctggcatatttgatt

SEQ ID NO: 22176 - DNA, 387 bp, Gossypium hirsutum
  Clone ID: LIB3146-051-Q1-K1-F7
cccacgcgtccgcccacgcgtccgcccactcgtccgcccacgcgtcccacagattgaggttaatgcttctaatggaagcattggagctcatcgtgctgttctttctgcacgatcgcctgtttttcacagcatgttttcacataacctgcaagaaaaagaattgtcaaccataaacatatctgacatgtcaattgaagcttgtcaggctttgctatgttacatttatggaaacatcaaacatgaagaattcctggctcaccggctggcacttctccgggcagctgataactatgatatatcggatttgaaagaggcctgccaccaaaggcttctaaaaaaatttggatccaaaaaatgtccttgaaagactccaaatggcaccttttt

SEQ ID NO: 22177 - DNA, 394 bp, Gossypium hirsutum
  Clone ID: LIB3146-051-Q1-K1-F8
cccacgcgtccgattttcttgttagcccttatggttagggccgccaatgtacctggtgagtatgacagtgatgatgagttcattgcaccaaggcaacaaatcagacagcctttaatcaacaggccaccagttccagctacaggtgttcctgttactggcagccttgatcaacgacccatcataaatgatgcttggagtgcacgaatgagggaaaagtatggtctggatacgtacgacttcacctacaacccttcggagtcaaacaggtaccagcaggcagctccgcaaccagcagaagaaagcagtcgttgcaccattatgtgatgatcatctggttggatggttggcttccgaacgaaagatattgcattgtcgatggagtgacaaacttcat

SEQ ID NO: 22178 - DNA, 223 bp, Gossypium hirsutum
  Clone ID: LIB3146-051-Q1-K1-F9
gttatatgtatatttggcttgggttattcagatttaatccaattctttttgttcgtcgcacttagtaagcattagttgttaagttgaagaattttttggttaaatgttagaaagggcttactgctttgaacactgtttgcaaaagtgactttgcaaaagtgatctgctttgaacattagttgtatgatggcaatatctaatcaaccataattcttctctaggc

SEQ ID NO: 22179 - DNA, 332 bp, Gossypium hirsutum
  Clone ID: LIB3146-051-Q1-K1-G1
gcgggaatgcatatctctttggaagatatacgagagacagatccatgcttgtatagcagctgcaagaagattctggagatggatgctgagtttattgattcagatgctttgggattgacatttgtcagagaagttgaggagttaggatccaggagacttgttgagctggttgctggtgggaaaaacattgttgtaaatagcaagaataggcaggaatatgttaatcttcttattcgggatcgatttgtaacgtccatttctgaacaggtagaccatttttcccaaggttttggccatattctttctaactcaaggctgcagaagttcttttt

SEQ ID NO: 22180 - DNA, 361 bp, Gossypium hirsutum
  Clone ID: LIB3146-051-Q1-K1-G10
gcgtccgcccacgcgtccggcaaactatgaggaagtgttctttcccttccgctttggttcttctttgcctgctcagtctcctctcagatcacctaaaaaaaattcaattaaatacttactgattcaatgcatcatataaataaatatattaccattcaatcaaaaaaaaaaaaaaaaaaaaaaaaaaaaaaaaaaaaaaaaaaaaaaaaaaaaaaaaaaaaaaaaaaaaaaaaaaaaaaaaaaaagaatttaaaataaaaaaaaaaaaaaataaaaaaaaggggggcccttttaaaaaacccaattttatcttcccgtgcctgcaaaataattactttttttttggggcccccaaattaaa

SEQ ID NO: 22181 - DNA, 416 bp, Gossypium hirsutum
  Clone ID: LIB3146-051-Q1-K1-G11
cccacgcgtccgcccacgcgtccgcccacgtttcctaaaaaacttaaaattctctctgaggggagaggagatagagagagagcttggctccggtctccgtcgagccgagcctcggtccttggcttcacgcgcccatgcgccgtcaccgactcctccccgttcggtggccgaagacccgaaaccccgatttttctacgcaaataaagggttcgacctttttcttttcattatttacagtatataagtacatatatgtaaaatattttacctttgtgtatctcaattaactgtagtatcctactttgtgtacgtatgtaaaaataagatttttattgcatctatgtatgtatttcagaaacctcaaaatcatccctttacatcctctcaatttgggctttgtatagccactgaaaaag

SEQ ID NO: 22182 - DNA, 414 bp, Gossypium hirsutum
  Clone ID: LIB3146-051-Q1-K1-G12
cgggctggagaaaaaaaccactagccttttttttgcctgagatgcatacatgaaacggtgctggattggttctataactaaagacgcctctattagtgacacgaacaatgcagactccaattcatttggtttcaagttgctgttaggcaagattgtgccgaagctgttatcatcacttaatgaaatcggagctgattgtcaagaattcaagcatctccagcaatcgtgatgtcgggtttctaaagacattaaaaaaactcaatatcccccatcaaaacaaaacaaacgtcagtgctggaattttcaaatgtaaatatacaacttcggtgaaacattcttctttcctgtttttttttttaaaaaaaggggcttatcaacatattacgagctggatgcactttcttggagcaaaaa

SEQ ID NO: 22183 - DNA, 392 bp, Gossypium hirsutum
  unsure (1)..(392): unsure at all n locations; Clone ID: LIB3146-051-Q1-K1-G2
gggagatgacttgaccgaagaagagcaaagaaaggcaaataaaggaacactatttattcgcttctcgcaacttccaccaaaaaaattgcgcaaggactgcttctatcacacaacaccagcgatgcagactccgacggcccttgagaatgtggattcttgcgagaactggttgccaaggagagtgataagtgtatggcgcatagctgggatactgcatgctctggaaggatgggaagagcacgaatgtggttacaccatgtctaacattgacaaagtttgggaagcatgtctcaagcatggatttcagcctctgaaggtcccaactcaatcaaagtcctagaagatatttggcgatttatctaattaatctactngatatctatngtttctat

SEQ ID NO: 22184 - DNA, 395 bp, Gossypium hirsutum
  Clone ID: LIB3146-051-Q1-K1-G3
cccacgcgtccgatccccctctactccgatggtggttggctctcccacaacttcaatctcgagaagtgctggtggtagtcccaggacaacaggttccacttcaactggcaacaaaggttgtcaagcatctagtttatcttctcagcagaccaagaactctccatcagtgcctagtcagatatcatctcccgttggtgggaggagtgtgccatcagtcttgggaaacccccatttaagttcgtcttcaagtatggggacgaagccccaatcagtgctacatcaacagcagctgcagcagcaaaagcatgcactacatccggcgcaactgttcttctcaaatgcttacattcaggcccaagctcaacactcaccaaccacaacagctgcaagtgggt

SEQ ID NO: 22185 - DNA, 299 bp, Gossypium hirsutum
  Clone ID: LIB3146-051-Q1-K1-G4
gacatattcatgttgaactacgcgtgaagactatgattaatcaagggatgggaatacaaggcctgaggatttaaaacacgttttgcctattttaggctctaatgaaatttggaattttgtttttttgggggatgattatgtttcgtgttccattatggtttccatatctctccatatttcagggactgattggttcagttggtcaaagacgctatcctgtgaattggatgttttgattgaaacttattttaattattttcaaatcaaatgaatcattgatatgtatattccattgtgtg

SEQ ID NO: 22186 - DNA, 165 bp, Gossypium hirsutum
  unsure (1)..(165): unsure at all n locations; Clone ID: LIB3146-051-Q1-K1-G5
agttggcgtaccagcatcttcatangtgagtaaatatctaatttatataagtagtcaaccatgaaatttttataaatatctattcaaatttaatataaaattgtttggatgagttttatatcactctttgtaaacactcatttaaattcgtcttaatttatgatg

SEQ ID NO: 22187 - DNA, 294 bp, Gossypium hirsutum
  Clone ID: LIB3146-051-Q1-K1-G6
aacttctccaagcgttatcttaagtacttgtaccaagaagtactcgaagaagcacagggtgcgggattggcttcgagtgattgcttccaacaaggacagatctgtttacgaactccgctacttcaatattgccgagaatgaaggggaggaggaagaatgaaaaatcagttccacattttttttctagtttactgctttattatttcttaggaacgtcttttatctatttaaggagtcatgttctgcttttttccttcagaccttactctaatttgcaatgaaattttgattgct

SEQ ID NO: 22188 - DNA, 379 bp, Gossypium hirsutum
  Clone ID: LIB3146-051-Q1-K1-G7
gaaaaaccctacaatccgtttcttgaaggttattatttccaaatatggaaataaatggaggcgtattaatagtagttttaattcgtacattcgagtgctgggttgggtttagctggtgatattgttcatcaagacgacgttgctccaaagagacctggttgtgctaataattttgatctggtaaaagtcccgacatggattaatggtttaaaagacaacgaatatgttggtgttggtgctcgttttggacctactatggagtcaaaagaaaaacatgcacaccatcccaggcttgcacttgcagatcctcctgattgtcgcagcaaacctaggaatcaggttttctaattctaatctttttaacaatgtattcatccaa

SEQ ID NO: 22189 - DNA, 362 bp, Gossypium hirsutum
  unsure (1)..(362): unsure at all n locations; Clone ID: LIB3146-051-Q1-K1-G8
gaaaaaccctanaatccttttctagattgtaattattcccaaatatggaaataaagtgcagtcttattaataaaagttttaatccccaccacnagtgctgggttgggtttaactggtgatattgatcatcaagacgacgttgctccaaaaagacctggatgagctaataattttgttctggtaaaagtcccgacatggattaatggttcagaagacaaccaatatgtnggtgttggtgctccttttggacctactttggagtcaaaagaaaaacatgcaatccataccaggcttgcacttacaaaccctcctttttgttgcatcaaacccaaaaatcaggtttttaaattcaaatctttttt

SEQ ID NO: 22190 - DNA, 421 bp, Gossypium hirsutum
  Clone ID: LIB3146-051-Q1-K1-G9
caaggatctccagaaagatcctcctacctcttgcttcgcaggccctgttgctgaagacatgtttgattggcaagcaactattatgggtcctcctgacagtccatatgctggtggagtgtttctagtcaccattcatttccctccggactatccatttaaaccaccaaaggttgcattcaggacaaaggtctttcacccaaatattaacagcaacggtagcatttgccttgatattttgaaggagcagtggagccctgccctcaccatatccaaggtattgctatctatctgctcactcttgacggatccgaatcctgatgacccattggtgccggagattgcccacatgtacaagactgacaagagcaagtatgagacaacggctcgaagctggacccagaagtatgcgatgggttaacgt

SEQ ID NO: 22191 - DNA, 135 bp, Gossypium hirsutum
  Clone ID: LIB3146-051-Q1-K1-H1
gtggatttctgaacaagataaaagaacttttcctttccaaattttggccccaatacttggaggcggcccgatttgggttttattattttcccccggaaaggttgtcttggtgaacctccacttgcgttaccaaaa

SEQ ID NO: 22192 - DNA, 386 bp, Gossypium hirsutum
  Clone ID: LIB3146-051-Q1-K1-H10
ccgttgcgaagaagaaaactgctggctctaagaagtctaaatcagctccttcacatcctccattgcttgagatgatttcagatgcaatcgtttcgttgaaagagaggacagggtcgagccaatatgcgatcgcgaaattcatcgaagagaagtataagcaattaccggcgaatttccgcaaagtcttacttgttcagacgaagaagtttgttgcttctggaaagcttgtcaaagtaaaagcctcttttaagctgccttcggcttctgccgcagctaagaaaccggccgccgtagctaagaagcctgccgccgcgaagcctaaatctgcagctaccactgccgcctcaaagtccaagccgaaagcgactaaaaccgcgtcgaaaccg

SEQ ID NO: 22193 - DNA, 155 bp, Gossypium hirsutum
  Clone ID: LIB3146-051-Q1-K1-H11
ctttttttttttttttggaggaaatattcttttcttttgttttgttatccttactgtgtattaattctttatttctaaaaaattcgtgtaattcttttaaggtcagacatttttcagtgtttcctgtttcttacaaggtgtattctcatcatttg

SEQ ID NO: 22194 - DNA, 423 bp, Gossypium hirsutum
  Clone ID: LIB3146-051-Q1-K1-H12
gttttagatcactataaattcattagagtattattttggcaagatcgtcctaaaattaactgggaaaggtctgttccaattcttgaacaaagtcgcgccaaaaatctacaggagaattagaagccacaatgacaaaacgccgaatctctaattctgaatcagaagaaagtggaagtgtaagcgaagaagaagaagatgatgataatgaagtaatcctcaagcaagaacaacaaggtatatccgaatacgagaagcagagactagcgagaattgcagagaacagagccagaatggaggctttgggtctgcccaaaattgcctcttctttgatgggtttgtcgccaaatacaagtcggacttcgagcaagattaaagggaaacgcaaggtcattgatgacgatgaagattacaggcccaatgata

SEQ ID NO: 22195 - DNA, 380 bp, Gossypium hirsutum
  Clone ID: LIB3146-051-Q1-K1-H2
cccacgcgtccgagcagatgcctgtaacggctagcaagttgcgccgattgttgaaatctgaacacccatatgtggagcgaaatattggtacagttgttagcatcatcaggcaatctatgcagaattctgttgtgtttgaagctgctgcccaacaacttagaatggggcacctgctaaatgcatctggagaacatgtagcagttaatgagggagcggaagccttacctcctgagactcctacagactcaaaaattgcaattgatacgacagaaatcatagatggtggcatgtgggggccggataagagaactgcacatcctgcttctactcaacatagagctgaattgtaaaaattggagcagtatttctggaccgacatg

SEQ ID NO: 22196 - DNA, 346 bp, Gossypium hirsutum
  Clone ID: LIB3146-051-Q1-K1-H3
gtaatagcaaggttgaaatggaagatccccttaaagccaatcctaaacgtggtcggccagagggttcaaagaataaacagaaaaagcttgctagtggagttgatcaaaacaatattgaaagctgagcaaacatgggtggttgtgctaccaagcccaaggttttgaagggtgacgaacccgagatccctgctccagcaccgtcgaaagaggcggttcccgaaccaaaggaggctgctcttgctgttgctgctgatggtgaaaagaaggtggaagctgatgaggttgctaaggacaaagatgttatcgatgatgatgccattgatgatcaatcaaacaagagacgatc

SEQ ID NO: 22197 - DNA, 289 bp, Gossypium hirsutum
  Clone ID: LIB3146-051-Q1-K1-H4
cacaaatttgatcttgccaccttactatatcgatctcttccagcttttgtcagtaccgacgatgccagctcgagtaagttttgtcactcgcaatgcgaccgtttcaatctcgaagatggaagaagccagccaaccggccaacttgtgaaccttaatgtgtctggtactcccacaaaactttccttcctcttagtgtagtgctcttagtccccttttcctttttggtaaaaaatgtaagcatgtccctaatgcaaatatatactcttcaccttataatatatattcaatg

SEQ ID NO: 22198 - DNA, 367 bp, Gossypium hirsutum
  Clone ID: LIB3146-051-Q1-K1-H5
gcattcgctagttataaatgccattcagcttcttgaccagtcgaggcggtgctaccgggtgattggaggtgtccttgttgagagaaccatcaaagaggttctccctgccgtgcaacgaaacaaagaagggcttgaggaagtaattgctcgtcttaacgagaccctggagaagaaaaagaaggaaattgctgatttcgagacaaaatacaaaattaggatcaaaaagtccgataatgactcgaaagatgaaagcaacaagaaggaaggctccgctcaaggagtccttgtcggccctgcaagttcgagtcagtaataggtatattccttcctatttccttccttatatgctcgaaactgctttttataa

SEQ ID NO: 22199 - DNA, 256 bp, Gossypium hirsutum
  unsure (1)..(256): unsure at all n locations; Clone ID: LIB3146-051-Q1-K1-H6
ccggntcggaataccggggcggaccacagccttccgacacagtnttggaacactaaggccatatatttataacgcggcacacaaacaaaagcgcggactctttatacactgtagccccaaaggggataatcaacggggagaagattcccaaccagggtgggcaggggttttggccaaatattaaaactaaatgaggaaccttcacctttgtaattgctagaagccggcgggtcctaacgggttatggggttaaaat

SEQ ID NO: 22200 - DNA, 301 bp, Gossypium hirsutum
  Clone ID: LIB3146-051-Q1-K1-H7
cccacgcgtccgaacataaactcagcttgaagcctatacatgatagcgataaccaccaagtggatggattaattagaccagagtcatctggacctacaacagtggcttgcatacctgtcaaactagtatttagtaggttacttgagaagatcaataggccaccttcaaaagcagctagtaaagtgattttctccactagtgatgcagtaagaggtccgtcatagattacattgtacattgatacgatgagacattaaatattgttagcaaaataagcaattgctaatttcctctttttgac

SEQ ID NO: 22201 - DNA, 392 bp, Gossypium hirsutum
  Clone ID: LIB3146-051-Q1-K1-H8
agcttatgctcaggatcacttctttgatgttatcacaaacatcattggccttgttgctgtgctacttgctaagtacatcgacgattggatggaccctgttggagctatcattctggctttgtacacaatacggacatggtcgatgacagtattagagaacgtgaactcattggttggaagatcagcagctccagaatatcttcagaaactgacctatctgtgttggaaccaccataaggccataaagaacatcgatacggtccgagcttacaccttcgggtctcactactttgtcgaagttgatattgtacttccggcaaacatggcattacaagaagctcatgacattggagaatccttgcaagagaaactggagttacttgccgacattg

SEQ ID NO: 22202 - DNA, 401 bp, Gossypium hirsutum
  Clone ID: LIB3146-051-Q1-K1-H9
cccacgcgtccgggaatggatgttgccgcgtctgaattttatggaacagataaaacttacgacctgaacttcaaagaagagaacaatgacggtaaacaaaagatctcaggagatgctttgaaagatttatacaagtcattcgtagccgagtatccaattgtgtcaatcgaagatccatttgaccaagatgattgggagcactactccaaactaaccaaggaaatcggagaaaaagttcagattgtaggagatgatcttttggtcaccaacccaaagagggttgcgaaggctattgccgaaaaaacttgtaatgcccttcttctcaaggtcaatcaaattggatctgttaccgaaagtatcgaagctgtgaaaatgtccaagcaagctggatggggtgtgat

SEQ ID NO: 22203 - DNA, 115 bp, Gossypium hirsutum
  Clone ID: LIB3146-052-Q1-K1-A1
cggacgcgtggggcagagtccagctgtggcagcagcgaccaagggtggcgcgaggtggtgacaccacaagcacaggggagttgtggggcgcaggataataataaggcggtggttg

SEQ ID NO: 22204 - DNA, 294 bp, Gossypium hirsutum
  Clone ID: LIB3146-052-Q1-K1-A2
cccacgcgtccgcggcgcgtgggatttgaccaaacgagcttggaaatccattggaaaaaatggcaatacaattgcgaatcggcggtggcgtcttcctctcacaatggtctccacagctagtgttggatagtaacaataggaatgggcggcggttggtaatcgggggcgagagctgggagagatcgcgattcatcggccttgtccattgcaacagcagaagcagcaataatggtagcagcgatgctaaaaagggagtccctaattcaaactacgttgtgccactcaacaagtcgt

SEQ ID NO: 22205 - DNA, 295 bp, Gossypium hirsutum
  Clone ID: LIB3146-052-Q1-K1-A3
ccgatggcggtcacttgcatgccaaggcagtggtatcgtgccctaacgaaggacttatcggttgcaaggaaatggaaggagggatcaccagcatcaaaacctgcaaggaagactaccctaatggcttccaaatgccagttcattatcctcgatactcgaaggccgattatgagaagatggaagaatggaggatcgatatgttgttgaaggaatatggattcagctttaatggtggcaccgtcgatgagaaaagggcttttgccatgggagcttttctttggcctgaccaacttta

SEQ ID NO: 22206 - DNA, 277 bp, Gossypium hirsutum
  unsure (1)..(277): unsure at all n locations; Clone ID: LIB3146-052-Q1-K1-A5
gcaggtttccggnaaccggaacttcccgggnntcgacccacgccgnntccggagatgaatgggaggtatgtgccatcggagagacgtacccaacttacgagaaggtcttaacgttgtgcgatgcatccacaaggncgatgtgcattgtttgtcacccggcaaaggctttttgtgtgccgtnntattgtggtttttgcggtcttgtaccagggacttaaagcaagattggtccctgtttgtatttgggtgtggccgacactcctttgggagggggcca

SEQ ID NO: 22207 - DNA, 225 bp, Gossypium hirsutum
  Clone ID: LIB3146-052-Q1-K1-A6
tttttttttttttttttttttttttttttttttttttttttttttttttttttttttttttttttttttttttttttttttttttttttttttttttttttttttttttttttttttttatttttttttttttttttttttttattttttttggaaaaaaaaaaaaatttttttttttaattttaaaaaaaaaaaaaaaaagggtttgaaaaaaaaatttttttt

SEQ ID NO: 22208 - DNA, 296 bp, Gossypium hirsutum
  Clone ID: LIB3146-052-Q1-K1-A7
gttcagagcacacagttgttgttactgtgaatatacaccaaggcttataaagaaattagaggatatcagggtcaaaagagttgcagctggcttgttgcattcagcatgcattgatggaactgggtctttgtttgtgtttggggataaagtggtaggtaatcttggatttggggaggccaagaatgcaaccatgccatccatgatcaatacattgccatattcagaagaagttgcatgtggtggctaccacacttgtgttgtaacaatcaggtgaccgggattctgtttaacaattt

SEQ ID NO: 22209 - DNA, 291 bp, Gossypium hirsutum
  Clone ID: LIB3146-052-Q1-K1-A8
cccacgcgtccgcccacgcgtccgcggaaaatggggcagattcaatactccgagaaatactttgatgatacttatgagtacaggcatgttgttctcccccctgaagtggccaaacttctccccaagaatcgcctactctctgaaaatgaatggcgtgcaattggagtacagcagagtcgtggttgggtccattatgcaatccatcgccccgaaccacacatcatgctcttcaggaggcctctcaactatcagcagcagcaggagaatcaggcccaacaaagtatgcttgct

SEQ ID NO: 22210 - DNA, 280 bp, Gossypium hirsutum
  Clone ID: LIB3146-052-Q1-K1-B1
gacgcttgagcagatcggatggcaccaaagaaagataaggcccctccaccttcttgcaagccagcaaagtctggtggtggcaagcaaaagaagaatgaagtggagcaagggaaagcaaaaggagaaggcgaacaacatggtgttggttgaccaggctacttatgataagcttttatctgaggctcctaaatataagctcatcactccctcaattttgtatgatcgtatgaggattaatggatcccttgctaggaaggctataagggaatagatggcaaga

SEQ ID NO: 22211 - DNA, 293 bp, Gossypium hirsutum
  Clone ID: LIB3146-052-Q1-K1-B2
gaataagatgttggttttagccgagaaagtgggttggaggagcaataaacaaaactgctgtacttcctcctcgtattggttatagatcctgcaacccacaagaagaggaggaaatacagaactttttgtgctgagtatggagtgaaaaggcaggtatgcaaggtttgaatgcttattaacagaacgtgaataagccgccaccggaattagagttgttaattctcatggttgctaaacgagtataatgacatgtgaaacatgtatatacaagacgcagcctggattaatgagac

SEQ ID NO: 22212 - DNA, 289 bp, Gossypium hirsutum
  Clone ID: LIB3146-052-Q1-K1-B4
caaccctggattccctttccagccctatagattatgtttgtcttcctcctgttgacttgagtgacctccctcaagacgcaaagattgaaaccgtgatttctttaacggtggctcgctctctgtcgttccttcgggatgctttgaagtcgctggccgcaaagacaaaactcgtcggtttggtggttgatctttttgggacagacgcatttgatgtcaccggagaattcaacctctcgccgtacatatttttcccctccacggccatggccttgtctctgtttcattacct

SEQ ID NO: 22213 - DNA, 295 bp, Gossypium hirsutum
  Clone ID: LIB3146-052-Q1-K1-B5
gtttcttttaataaacaataaaaaaggcataaaataaaaggaaagaacagaataagatgatttgtgaatgggaaagaaaaaccgaaaatcacctttcaagtttttatatttctctcgaattttttgtattcgaatccgtgtgttctttttttacaacgtttgtattggctttatatcgcccgaattacagaaaatcaaaaagaaaataaaaaatctcctcccccgaatccccctttttccttattttccccatttttgctgttgttttctgccttttctgctttgttgcgtttgt

SEQ ID NO: 22214 - DNA, 293 bp, Gossypium hirsutum
  Clone ID: LIB3146-052-Q1-K1-B6
ttttatttctgttatagtttccttttgtattttatatgataatttaaaaattattaaaatcttaaaaaaaaattaaaatttaaaaattaaaaattaaaaattaaaaaacttaaatatttaatatttaatattttagtccatatttcagttaaaaagttcaatattcaaaattaaaaaaaaattctaaaaaatgataatcttagcacaaaaattttgaaagaaaaaatagaaaaaaatatgttaaaaatggaaaaaaaattaaaattaagtaatagtggccataaaaaattaag

SEQ ID NO: 22215 - DNA, 294 bp, Gossypium hirsutum
  Clone ID: LIB3146-052-Q1-K1-B7
gctgagtttaagcttatcaataagcggaggaaaagaaacttaccaggattcccctagtaacggcgagcgaaccgggaaaagcccagcttgagaatcggtcgccatcggcgtccgaattgtagtctggagaagcgtcctcagcgacggaccgggcccaagtcccctggaaaggggcgccggagagggtgagagccccgtcgtgcccggaccctgtcgcaccaagaggcgctgtctacgagtcgggttgtttgggaatgcagccctaatcgggcggtaaattccgtccaaggctaa

SEQ ID NO: 22216 - DNA, 281 bp, Gossypium hirsutum
  Clone ID: LIB3146-052-Q1-K1-B8
attggaactgtccctttgggtcgtgttgaaactggtatcctcaagcctggtatggttgtaacctttggtccctttggattgaccaccgaaagtaagtctggtgagatgcaccatgagtctcttcctgaggctcttccaggtgacaatgttggcttcaatgtcaagaatgttgctgtgaaggatctgaaacgaggatatgttgcttcgaacttaaaggatgatcctgccaaggaggcagcttatttcacttgccaagtcatcattatgaaccaccccagggc

SEQ ID NO: 22217 - DNA, 295 bp, Gossypium hirsutum
  Clone ID: LIB3146-052-Q1-K1-C1
ccctttaattcaaatgaaccaaaattttgatttttgctagggtttcatttagcagccgccaaaccatcatctaacttgatgatcgatggtgcactagcagtgtccagatcttgccaacgaaggccacgcccatagagatctggtaagctattctttctttttaaaaaaaaacctttaaatccaacattattcttaaaaaacgtagcaaaattcgaagggaaatgcttcaacaccattcgaccctcgcccgtatctccatacttctgagatatttgggcttgcataggtatcgttt

SEQ ID NO: 22218 - DNA, 292 bp, Gossypium hirsutum
  Clone ID: LIB3146-052-Q1-K1-C2
ctgcttgtccatttgaagaagcttgtggctgctgggaagggggttaaagttaaggcttcgtataaacttccttctgctaggtcttcgaagacggctactgctgcttctgctcctgcaaaaaagaaaccggctactactaagtcgaagtctaagcctgcctcaaagcctaaggaagggaagagtacaaaaactactcctaaagcaaaggccaagacaaaaactacttcgaaggctaagagtaagccggcgcctaagccaaagcctacttctaaggcgaaggctgctccagcca

SEQ ID NO: 22219 - DNA, 294 bp, Gossypium hirsutum
  Clone ID: LIB3146-052-Q1-K1-C3
cccacgcgtccgtttcaccctcttcttccttttcttcttattgtttgcatttaatattgtgggtgcttttggtactaggaaaacactatccatggaaggctctaatgcaccaaacggtggttccaatggtgctactggttcagcccatggtcctaactgggactacagttggggatggggttcaagccctggtagtggatggggttatggttctggttcagggagctctcctaatgggttcgggaggggttacgggttcgggtttgggtctggtactggttcacgttctggttc

SEQ ID NO: 22220 - DNA, 292 bp, Gossypium hirsutum
  Clone ID: LIB3146-052-Q1-K1-C4
agcaaatgaaggaaatccttccccatatctatcttcattgggccgactaagaaatcaaaaccctaacctctcttgattttccctcaaccgatcctaacacccctctcttaagtaccgatctgcctctatcaatggtgacgaatagattcctgcttcgagggacgacaatctcgaccacgagattccttctacgcttcgatttcaacgaagaagacggaatctcttagcacatccgcaaggtaaatctcttgttttctctttgttttcaaatgcaaaagactaatggaatcga

SEQ ID NO: 22221 - DNA, 293 bp, Gossypium hirsutum
  Clone ID: LIB3146-052-Q1-K1-C5
cactgtctcaatcgtttcacgattttccttttcttttttgttttaattatcacattattatttacacaatcatcagtttgtttttccttttaaattttaatttaactcgccggaaaactcgtcgcctttttcaccgggataatttcatctccttaactatcttttttacttcagacatagtttgactgaaattgcaatgaacaagaatttgctctgaatttcatttttcgggctttgaagattggtgagtttttgtgctttagaagaatagcagaatggggtgtgttggatcg

SEQ ID NO: 22222 - DNA, 165 bp, Gossypium hirsutum
  Clone ID: LIB3146-052-Q1-K1-C6
ccacctcgctcggtcgactcattagacgcggtaatcagcaaccagcaaccttaaacagcaaagctcccaatgctacttttcaccacaagattaaccaagcctcgggacgtcaagctttaaatcacctaaggcgtgtctaactgcccttttgtattagattcaatt

SEQ ID NO: 22223 - DNA, 244 bp, Gossypium hirsutum
  Clone ID: LIB3146-052-Q1-K1-C7
cgtcggccgattcccggtcacccacctcggccctgatgtcatgtgcttgggagagaaacggtttgcaaacttttaagcggggtatgctggaagtacaagaggtacatttaatttagctttgtgcaaacgagctaaggactgcactcaaattttacccgtgtctaccgagcatttatctaaatgcagtaaggatcagtggggtctccacagaatccaatttcttccaatttacagctcaagggaa

SEQ ID NO: 22224 - DNA, 201 bp, Gossypium hirsutum
  Clone ID: LIB3146-052-Q1-K1-C8
gtgaggctgtggtcattcggcatttatactaaccgaaggatacagtgatgagaggggtcaattaagcaaattggtggtactttgcctaagcccaagaagacatccttgaacattgcatgctataggatgaagttattctttacccttgttgcatattcctcagtcaaccattcgatgaaattcttgactgctcattcagat

SEQ ID NO: 22225 - DNA, 293 bp, Gossypium hirsutum
  unsure (1)..(293): unsure at all n locations; Clone ID: LIB3146-052-Q1-K1-D1
cccactcttccggttctttcttaaccacgcaaagcaaaggagcaattttgtgcattttactctcattgncatctattgtaaattctcaaattacgttgggtatattgcagcttgtgcatgttgttcaaagtgagaaaactagggttgtttactgtaaaaataaaaatcatggcaaattttgttaatggtcgttaaaaattccacttgtgaaaataaacaataaaaaataaaaaattgttgtttaaaaaaaaacgaaaggtttcaaaaaaaaaatatcaatctttttccaaaaa

SEQ ID NO: 22226 - DNA, 291 bp, Gossypium hirsutum
  Clone ID: LIB3146-052-Q1-K1-D2
ggcaccgcctgaaactgctcggccatgggcctctgcttgcgctgcccagactttggacgcattaccctacattgacgacgactacgggaacccaatggtcaaggaagaggttgatcgattggtcgaagaagagatgcgaaagagtatcaagaagccggctgacttcctcaaggatttaccccctcttccctccttcaattttcagcatcacccaatgattggcaaagaatatgagcgcgtcagagcgggtaggccacccgtgacccttgatttttcttcacggtatcaagt

SEQ ID NO: 22227 - DNA, 198 bp, Gossypium hirsutum
  Clone ID: LIB3146-052-Q1-K1-D3
cggacgcgtgggtggcggtggcatggatgagtttgaggacagcagtgacgatgaagagcaagaagtgacgaagccagctgagcaagacatgaacaaggcagatggaaatgctaagccggaggagcaaggtgccgggactatggaaaagaaggaaaccgatgcaagcacatgatgtgattgttagctgcccgatataac

SEQ ID NO: 22228 - DNA, 293 bp, Gossypium hirsutum
  Clone ID: LIB3146-052-Q1-K1-D4
cccacgcgtccgcctacgcgtccgcccacgcgtccggaagaggaggctgccgaaaagttggcaccaatcaaactagaaaatttagggaccgcacgacttgtggttgatttcgataggtggtggactggtgaggaatctgtgaatgttctcttagaatccacaggtcaagtgactacagtaaagtctgctagacaggtcattgatgcactgaatgttgagggacctgacattgatataatacttactgaagtcgacctccaaatgacaaaaggaatgaagttgctaaagcatat

SEQ ID NO: 22229 - DNA, 294 bp, Gossypium hirsutum
  Clone ID: LIB3146-052-Q1-K1-D5
gatgttttgtaacatggatgtcttcccacttaataccaaaagttttaatattatactgaatggctggtgtaatgccatccgtagtccacgtgaagcagaaaggatttggagggaaatgagcaagcgaggtgttaggcatgatgttgtgtcatatgcaagtatcatgtcctgctactcaaagggttctaatcttaacaaggtactgaagcttttcagccaaatgaaatcaatgaggattgaaccagataggaaggtttacaatgcagtgatccatgctcttgcaaaggctaggca

SEQ ID NO: 22230 - DNA, 290 bp, Gossypium hirsutum
  Clone ID: LIB3146-052-Q1-K1-D6
ggacactttgcacgacaatgcaccactggtgcagcatctagcttatgctacaagtgtggagaaggagaacactctattcatgaatgcagttctgctatggttggtaaaagaaatcgtgagtcatctactccaaatctaagatctcgtttagaaaataaagatctcttgggatacaagtctgtacctcatgataatggcaagagccgctgcaaaaggagaaaaaatccagtttgaagaaaaaggcttcaatacaccacgaaaagaaaagaaaagaggtggttggattgcag

SEQ ID NO: 22231 - DNA, 382 bp, Gossypium hirsutum
  Clone ID: LIB3146-052-Q1-K1-D7
gcaggttaccgggaccggaacttcccgggtgcgacaccactgccgtccgcagtatattcggatgctttatattcaacgaactattacgtaattgcatggtataaacacaatcatgacgctgtactttggtgcagaactgaatgatatgtataccctatcgttcgtttcgtgaggtgtcgcgatacgcaatattgtatctttacacacatttaatatcttttaaaatgtttttgtttttgtgtgtaaaaagttacaaggtcaatcgttatacaccatatcgcggatatattgtatgttcggacatagtggttagagcaaggagggacacatgactactattcttggatttttattttttatttttgatcaaaatactactatt

SEQ ID NO: 22232 - DNA, 290 bp, Gossypium hirsutum
  Clone ID: LIB3146-052-Q1-K1-D8
ggctgctgcccggtcctttttaatttttccttgttatttaatggttatattgatgtaaaaaagaaaaaccaaaaaaaggaaagggatcaaaattgttgcaattgtcgttcatgtagaatatataattatagatttttatatatagattttgacgaaatatgtaggaaatgtgaagaaaaaaaaaagggggacaaaattatgaaagggagagagaaaaggttgtagatctatcgagatgaggtgtaataatttggtggggtctgcttaagaaaaggggcaggtcttgaccg

SEQ ID NO: 22233 - DNA, 294 bp, Gossypium hirsutum
  Clone ID: LIB3146-052-Q1-K1-E1
cccatttcttcattacattgttcaagaacaaacaaaaaaaaaaagaagcaaaaaaacatggccaaagttctgttgttcattgctctatgtgtgcttccagctttggttagtgctacacgcattctgaataaccaattggtggttgaaggctatgtgtactgtgatacttgccgtgctggttttgaaacccctaagactagaaggctagctgatgccatggttaagctggtatgctccgacaggaagaccggcggagttgttttcgagaaggagggatataccgacaaaaccgga

SEQ ID NO: 22234 - DNA, 206 bp, Gossypium hirsutum
  unsure (1)..(206): unsure at all n locations; Clone ID: LIB3146-052-Q1-K1-E2
ntacgacctcacgttngtccgcccactgctgtccgatttggtgttcttcattttacttatattttaccctgtggggattttttacattttgctatgttaacgctcggtcgaacgtgagtatgtggtgaattcgtgttcgctaattatcgatgtatttgaaaatttgacaacgaatttgttgtctttaaatgttattgatgtgtttg

SEQ ID NO: 22235 - DNA, 289 bp, Gossypium hirsutum
  Clone ID: LIB3146-052-Q1-K1-E3
cccacgcgtccgcccacgcgttcgatcgaatgggtctttctgacaaaaatattggggcattatctgggggtcacactctgggaagggctcatcctgagagatcacgttttgatggcccttggaccaatgaacccctgaagttcgacaactcttactttctggagctgctaaaaggggaatctgaagggcttttgaaacttccaacagacaaggctttgatagatgaccctgagttccgcaagtatgtagagctctatgccaaggatgaggatgcgtgcttcagagatta

SEQ ID NO: 22236 - DNA, 291 bp, Gossypium hirsutum
  unsure (1)..(291): unsure at all n locations; Clone ID: LIB3146-052-Q1-K1-E4
gcaatgagcactgccggtcaggttattcgttgcaaagctgcggtggcatgggaggccgggaagccactatctatagaagaagtggaagtggcaccaccccaaaaacatgaagtccgtattaagattctcttcactgctttatgtcacactgatgtatactactgggagtgtaagggttacactcctctgtttcctcgtatacttggtcatgaagcctcanggatcgtggagagtgtgggtgagggtgtgaatgatttgaaacctggggatcatgtgcttcctatcttcacc

SEQ ID NO: 22237 - DNA, 59 bp, Gossypium hirsutum
  unsure (1)..(59): unsure at all n locations; Clone ID: LIB3146-052-Q1-K1-E5
gcaggtttccgagacccggaacttcccgggtgcgaccccacgcccgtccgtnctttttc

SEQ ID NO: 22238 - DNA, 290 bp, Gossypium hirsutum
  Clone ID: LIB3146-052-Q1-K1-E6
gttcgaggctgtggtccattcggagcatattcatcaactaaaccgcaaaggataacagttgattcggaggaagtggagttcgaatatgaaggcaaatctggtttggttacttttgcactaaaagtcccagaggaagagcagtacctctggaacattgtcattgagctataaggagattcgaaagttttattcccttttcagcccttgtttgtcgatgatttcctacagttcgaaccatttccgaatgagaatttccctatgagctgacttcatttcaagaatgaaatgtg

SEQ ID NO: 22239 - DNA, 236 bp, Gossypium hirsutum
  unsure (1)..(236): unsure at all n locations; Clone ID: LIB3146-052-Q1-K1-E7
cccacgcgtccgggaagaggcaaaggtgttggaagctaaagaaggaaccatttccgttgcctctgcttttcctggtcatcaagaagctgtacaggatagaaatcacaattcttacacancaattggaaacatataaggggtgatgtaaggatgaggcgttgggcattgcgtcgaatgacaatcgtgtggtgtacaacatggttgaaaaactgccctctgacatgcgaggtactgta

SEQ ID NO: 22240 - DNA, 288 bp, Gossypium hirsutum
  Clone ID: LIB3146-052-Q1-K1-E8
gaccaggcagctttacaaggtggattcatcttggaaaaaattatgggtccgatctcaacaggccatttggagctccaaacccgtaacccagacgataacccatccgtcaccttcaattatttccagcatccactagacttgcaaagatgtgttcaagggattcaaaccatagggaaaatcgttgaatcggagtcattctctaaattcagatatgattacatgtcttggccaggactcgttaacatgacagaacattccccaataaacttgctgcctagacattacaac

SEQ ID NO: 22241 - DNA, 268 bp, Gossypium hirsutum
  Clone ID: LIB3146-052-Q1-K1-F1
cggacgcgtgggcgtactcgtggggtttttgtcatttcagatgttttagctagttgcaattgttgaagggaatgggagatcctaatattttgggtttgaagtagtaaaaggacatcggttttcattcattttcttcccttttctctattatattatgtaataggccaactttaatcaatttttattatattccattaattatgtggaaaaattctctttttttttttaattattattaccgaaaatgagtatcaattcattttcttca

SEQ ID NO: 22242 - DNA, 290 bp, Gossypium hirsutum
  Clone ID: LIB3146-052-Q1-K1-F2
cccacgcgtccggctaaaccctagccactctctgctcaagtcgccaatgggggcttataagtacgtgtcggagctatggaggaagaagcagtcggatgtgatgaggtttttacagagggtgaggtgctgggaataccgccagcatccgtcaattgttagggtcaaccatcctactcgccctgacaaggcacgccgcttgggttataaggccaaacaaggttatgtggtttaccgtgtccgtgttaggaggggtggtcgcaagaggcctgttcctaagggtatcgtgtatg

SEQ ID NO: 22243 - DNA, 294 bp, Gossypium hirsutum
  Clone ID: LIB3146-052-Q1-K1-F3
cccacgcgtccgggtaatttcagtgcgcaacattgcagcttgacttccaacttcctgagcgcttcaagttggagtactcagcagaggatgaagccaagagggagaaacctgttatgatacatagagctatcctggggtccgttgagcgaatgtttgctatattgttggagcactataagggcaaatggcctttctggcttagtccccgtcaagcaattgtttgccctgtgtcagaaaagtctcagcaatatgcaatgcaggtccgggattggattcatgaagctggttattatg

SEQ ID NO: 22244 - DNA, 291 bp, Gossypium hirsutum
  Clone ID: LIB3146-052-Q1-K1-F4
gagaattagtcggattttgagagagtgaaacaaaatgagtatcagctgcgcgttgaaggtggttccgattgtgcttctgttggttcttttcgcattagcgaatgccaagaaatcagctgatgtgaccgagctgcagatcggcgtcaaatataagcctccatcatgtgaattccaggctcataaaggtgatagagtaaaagtgcactatcgggggaagctcactgatggaaaggttttcgattccagttttgaaagaggtgatcccattgagtttgagcttggtagtggaca

SEQ ID NO: 22245 - DNA, 293 bp, Gossypium hirsutum
  Clone ID: LIB3146-052-Q1-K1-F5
tgcatttcaagtgattagtggtgttctgagtgtgtgcacagccttcttgtctggtgaacctgccacaaggttgcgttctcaggagctacagcaacttattgctgcactccttgaatttatggctgtttgcaagcgggcaattcgtgtacacttcagactaataggagaagaagaccaagatttccacacacaactagtgaatggatttcaatctctcacagcagagctatctcattacatccctgcaattctatcagagctctgataatgttgtaagcattacttgctccgat

SEQ ID NO: 22246 - DNA, 287 bp, Gossypium hirsutum
  Clone ID: LIB3146-052-Q1-K1-F6
cccacgcgtccggttatatccctctttattttcctggtttgcagtcagcttcccctttatggaatacattctacgacgggcgctgatccgttttattggatgcgtgttatccttgcatccaaccgtggaaccgttatggaacttgggattacccccattgttacttccggtttggtgatgcaactcttggctggttcaaagatcatcgaggttgacaacagtgttcgtgaggatcgtgcactcttaaatggggctcaaaagctgttggggatcctaattgctgttgg

SEQ ID NO: 22247 - DNA, 290 bp, Gossypium hirsutum
  Clone ID: LIB3146-052-Q1-K1-F7
cccacgcgtccgtttacgcgtccgatcccgccttctgtgctccaaattttctctagaaacgtacttcgagatggcatttctcatgccttcacctgaaatttccaccgcctctgcaaaaattttctctaaccctacccctcgccataaattcctcaagagctgcgcgatttcgaagaacgacgacgagaaagtttggtcaaggaccaacgctagggtcggtgttaaagatgccggcagtacggtttcgggtttgagccaaaacttgaggttgtacgtacaattttcggctc

SEQ ID NO: 22248 - DNA, 289 bp, Gossypium hirsutum
  Clone ID: LIB3146-052-Q1-K1-F8
atttatttcaagagtttttacctgcaatggtcggtcatggaacatcatccaaaacatataatgttaacctgtgtgtatgcggcctataagatagaagaaaatcatgtgtcagcagaggagcttggtaaggggatttcacaggatcatcaaatgattctcaattacgagatgatagtgtctcagagtctggaatttgatctcattgtttatgcaccctatcgttcagttgaaggttttgtcaatgacatggagaagcttcacctgtagtacatgaagagacaggtccatc

SEQ ID NO: 22249 - DNA, 296 bp, Gossypium hirsutum
  Clone ID: LIB3146-052-Q1-K1-G1
ctcattcatgcaaatagggatatcttatataatgatttaggagggacaacaaacggtgaaattgcggtggaactttcatgcagtaagtcagttccatgcaaaaatatccgcatgaaagacatacagttggattacggaataaatggtaaaatgtatgatgggcaccccaaatctcattgtttgaatgttgttcaaagttgggacgaacgatatgtttatccaaatgttccttgtttaacaaaaaaattaagttactaaactttattattttggatgtaataattaggttgtatcaa

SEQ ID NO: 22250 - DNA, 291 bp, Gossypium hirsutum
  Clone ID: LIB3146-052-Q1-K1-G2
ctttttaatctctattaattcgtaatgtagtgtcttatgtggtcaaaatatataaatttaaattgataattctctaaatatggaaacctgataagaaattgggagtaaaatatacgtggaatctatggtgtagtttgttatgggtgacagattaaaatgcatgtttctagtttccaagtaatatcatcttgccatttttatgttagggtgtgaggtaagtgtgcttttagttttacttaagcatcagcataagatagatgcatctggaggtgctatgacatagtttgtagc

SEQ ID NO: 22251 - DNA, 294 bp, Gossypium hirsutum
  Clone ID: LIB3146-052-Q1-K1-G3
atttaaaccattcattgttagtagctgcaccaagcagtgtgctagtctgtacgtccattcttgaagaaacaatctataggtgctttacaaattgtcatctgcaggctgacaggtgtattatttggcattacattagttgaatgttatgactttcaacagtcacctactggtctatgatggaggaaattccatctatctcttattactcagatgagtgaattatttatgtatttgagtctctcaattggcctttgtgcaactacattatattactcagtataccagtcctttgac

SEQ ID NO: 22252 - DNA, 292 bp, Gossypium hirsutum
  Clone ID: LIB3146-052-Q1-K1-G4
agaggccagtgactggcctccgactatatctagaaggtaaaaggagtaatcgcttggccatccacttgcagcatctttcctctcttccaaaaatcttccaacttgtagatgatccaaatgagaacttcagccaaatgtctcgtgatcgtaaatactatgagaaagtttattggaagaactactctcatgtatgcactgctcctgtcgaggctgaagaggatctttccatagtaactggagcacaactgcaggttgagaatcatggttttaaaaatattctctttttacggct

SEQ ID NO: 22253 - DNA, 291 bp, Gossypium hirsutum
  Clone ID: LIB3146-052-Q1-K1-G5
cccacgcgtccgggttccattggagctgacatgggcgagaggcgacgtaggggaagccgacgtgggcgcgcgaacgtggaggacatgcgtgggaaggcttgcggcggctgcaacagaaaagggtgttagggtttttcttttcttttttttatttagggttaaatatttcggtctaggattaatttagggcttgggtaatttgggcttcaaaattgggttaattttattttgtttttgatttgattttgggtctatttttggtctttgaagtttgtttttggtttaaaaatt

SEQ ID NO: 22254 - DNA, 283 bp, Gossypium hirsutum
  Clone ID: LIB3146-052-Q1-K1-G8
tagaaaagaaaaatgaaagggaaactatgacacacttcggtctagttcatggtatgtgtcatggagcttggtgttggtacaagattgtgtcgctgctcaaatcaggcggccaccgtgtcactcccttggatcttggtgccagtggaatcaaccccaagaccatcactgacttggcttccttgtccgattatgcggagccattaatggcattaatggcctctttgcctgaagacgagaaagtgatactagtgggtcacagttacggtggggttatcatttcctt

SEQ ID NO: 22255 - DNA, 242 bp, Gossypium hirsutum
  Clone ID: LIB3146-052-Q1-K1-H1
gaaaaggttatggtgggatgaaccgacaatgaaagagctgggggtgcacaatatccaccatctggtgtgggtgagggccaactacttggtgcttgactattgagccgacattgttatgatgcgtgccatgcctgaggagtgagacatcaccaccactagtgacggccggctacgatggatcggtggggtacattgtaaaatatgtggatggggtgatgataaggaagaaaagtcatcatata

SEQ ID NO: 22256 - DNA, 290 bp, Gossypium hirsutum
  Clone ID: LIB3146-052-Q1-K1-H2
cccacgcgtccgcggacgcgtgggttttgttgttttcatatttatggccggacaagaaaagataattattattattattattattattattattatgaagaactcagaaaaataataataataataataataataattatcttttgttgttttcatatttatggccggacaagaaaaagcctcttttgtatctcttttcctttttttgttgttttatttttcccggcattgttagaacatggagggggtactacgcccttggattccaacaaaagattgtgattttgttt

SEQ ID NO: 22257 - DNA, 220 bp, Gossypium hirsutum
  Clone ID: LIB3146-052-Q1-K1-H3
aggacattgcctaatcacaatggaaactatttttttttgggggacaatattgggggccccttacattaatgggcacttttttatatttgatattaactaaggaagggatgtagttccaggaaattcgccatatgagaattaggatttttggtagtaattgtaaattccataattttctgtagaaatctttagtttcgacctgtattaaatagttataatg

SEQ ID NO: 22258 - DNA, 293 bp, Gossypium hirsutum
  Clone ID: LIB3146-052-Q1-K1-H4
gcggaattcgccgttgaggagtataacaagcagtcaaatgggagtttaaagttggataaggtggtgaaaggcgagactcaggtggtggccgggacaaattaccggctgattttgcaggcgaagaaaggggcagtcgataacacgtatcaggctgtggtgtgggagaagttgtggctgaatctcaggaatctcacctcctttaacctcgtcaagggttagattggattataatgtaatttatgttcatatatgttatcctcgtccttttctattacttaactgagtggagaaca

SEQ ID NO: 22259 - DNA, 266 bp, Gossypium hirsutum
  Clone ID: LIB3146-052-Q1-K1-H5
ttcttttgcttggtggctgctactgtttgcgtgtgggttcttatttgcaagtgtcagagggatcagatacacgtgaaggccggtgatagcgtgagggaaaagccctgctgacgtgcggcgcgcatggggcagagtggcggctgaaggcagaggtggctagggttcttttgctctctgaaaatgttaagagtgggctagggttgatttgttttgggctttgtaattgggttttaattgggtttgggtagttttgatttgggctatgc

SEQ ID NO: 22260 - DNA, 288 bp, Gossypium hirsutum
  Clone ID: LIB3146-052-Q1-K1-H6
agcaaaaccactagtagaaggttgctgctactgaaggagcaggatttgcatgtaaatatatatatcgctctttttaaaagtttttcaatgggtcaattaagtagtagtagtagtaagtaagatgtttaaaagagtaagcggcagcgcagggtggtcgatgaccttatgtcattcaagattccggccgtgagcggcggcagctgctgctatattaaattattattaaataaagggaaggggtattgtacgaatgatgttgcgttagtatgtgatttgaacatcaattta

SEQ ID NO: 22261 - DNA, 139 bp, Gossypium hirsutum
  Clone ID: LIB3146-052-Q1-K1-H7
acacaatggcttattacgggcatgctccacctccacgggggccttttgcacccccaccgccagggcatccggcaccacctccgccagacccctttgctccaccaccgccagggcatccggcacccactcctgacagtat

SEQ ID NO: 22262 - DNA, 197 bp, Gossypium hirsutum
  Clone ID: LIB3146-052-Q1-K1-H8
cccacgcgtccgcccacgcgtccgtgaatgtgtcgaaggtgtacttagattgacaaagtcagatttcctcaaagctaagaacaatttctgccatctcattcatgctgaccatgtaatcacttccaatgttcggcatgattgagatggcagaaattgttcttagctttgaggataaaaatctttgaacgggctcagat

SEQ ID NO: 22263 - DNA, 294 bp, Gossypium hirsutum
  unsure (1)..(294): unsure at all n locations; Clone ID: LIB3146-053-Q1-K1-A1
cccacgcgtncnnngactcttgggcggactctttttttcgaatacgangatgtnccactgacggggtaaattctcagcataaactaancaaaaaccattctatccccaacaacaagtaaaggaagatgcataaagacaccattgtggaattgcttttaataggcaaagcaagctccttttttttgtcgaagcttttcaattactgctacagaangnggcttcttcccactcagggttttcagaatattatcctatactataccttattttggctatcatcaatccattgttaat

SEQ ID NO: 22264 - DNA, 398 bp, Gossypium hirsutum
  Clone ID: LIB3146-053-Q1-K1-A10
cccacgcgtccgcccacgcgtccgttccaggtaaaatcaagaatgatgggagactctgggtgcaaaaacactcttgattgtttcattagaactttgaggaatgagggattccttgccttttataaggggtttgttcctaattttactcggctgggatcttggaacgtggttatgttcttgactcttgagcaagccaagaaagctttccggggggaattatattatgattgattttagtttgcaatcaggaagacacaccttttacttgcatattgtgtcttcgatctcaaggagaatattttttgatcaaagaaataaggtaggagcattgcccaaatctctttttcgtataacttaccatttttcttagacaaaatagtattactgtaacaatcaat

SEQ ID NO: 22265 - DNA, 402 bp, Gossypium hirsutum
  Clone ID: LIB3146-053-Q1-K1-A12
cccacgcgtccgcccacgcgtccgcccacgcgtccgcccacgcgtccgcccacgcgtgcgtgcatcgatagcattgttaatggcagcactagcgggaatggtaaggaaccatctgttgctgctgctttggctgtgcaatgtggaaattttgggtcaaaaattgaatcatccatcgatccatcccatatgaccttcggtgggatgaaaacaaaagagggtcccaacaggtgtaatgcatgccacaagcgtgttggtttgacaggatttagctgcaggtgtggaaacatcttctgtgcagcacataggtactctgacaaacacaactgtcctttcgattataggacagctgcccgcgatgctattgctaaagccaacccggtagtgaaggctgagaaacttgat

SEQ ID NO: 22266 - DNA, 389 bp, Gossypium hirsutum
  Clone ID: LIB3146-053-Q1-K1-A2
gacccacgcgtgcgtacaaaaaatttttgccgctcagcgatggctaattctgctcgtcttctcgttttaccggggttcattgcactgtcactttcatgcatgaatgttgctcaaggggcggggacggctcgccgtctcttgcaggcaacaacgacgaccccaccaatatttccaaatttgcctccctttcgtggcttccagtttcctccttacagcggacctttcccggaatataggttgccgccatttccaggtatttcaaacgtccctccttcagcacctggctttcctggctcttcagcacctggctttcctggctcttcagcatctggctttcctggttccttcccttcgttccctgctccaccaacattgcccaacactacccc

SEQ ID NO: 22267 - DNA, 297 bp, Gossypium hirsutum
  Clone ID: LIB3146-053-Q1-K1-A3
acttgctaccaaggccgcccgtaaatctgccccaaccactggtggtgtgaaaaagccgcgtggataccgtcctggaactgttgctcttcgtgaaattcgaaagtaccagaagagtactgagcttcttatcaggaaattgccttttcagaggcttgttcgtgaaattggccaggatttcaagactgatttgcgtttccagagccatgccgttcttgctcttcaggaagctgcagaagcataccttgtgggtctctttgaagacaccaacctgtgtgcgatccacgccaagcgtgttac

SEQ ID NO: 22268 - DNA, 308 bp, Gossypium hirsutum
  Clone ID: LIB3146-053-Q1-K1-A4
ccaaccactcttccgccaactcttccatccactttttctttttcctgcgccgttcgcaaaagctgcaaactttactaaactgttgcataaaattggccccaatctatgtgatcaggtcgccatccgcaccaataataaacaagacaatgttttcaatccattgttcgagaagcgtccaaaacagatttctattcgaagctctttaccttcatacaaggatttgcatccacttatgaagcacacaaacgtcttctccattcaaaggaaatacacgatccttaaacatatattgcatgtcccaccttcat

SEQ ID NO: 22269 - DNA, 381 bp, Gossypium hirsutum
  Clone ID: LIB3146-053-Q1-K1-A5
ggtggcgcgaaaaaggttatcatttctgctcccagtaaggatgctcccatgtttgttgtgggtgtcaatgagaaggaatataagcctgaccttaacattgtctccaatgctagctgcaccaccaactgtcttgctccattggctaaggtgatcaacgataaatttggcattgttgagggtcttatgaccactgttcattctattactgctacacaaaagactgttgatggtccttccatgaaggactggagaggtggtagagctgcttccttcaatatcattcctagcagcactggagctgccaaggccgtcggcaaagttttgccagcactgaatggcaagctgactggaatggctttccgtgttcccacttgtgatgtc

SEQ ID NO: 22270 - DNA, 372 bp, Gossypium hirsutum
  Clone ID: LIB3146-053-Q1-K1-A6
aaaaacgtgtatggcttgggagcgaggaaaattggtgttacttctcttcctccgttaggtggcgttcccttagcaagaacattgtttggttaccatgagaagggatgtgtgagcaggttcaataccgacgctcagcaattcaacaaaaagctcaacgcagcagcaaccaatctccagaagcaacaccctgatctcaagattgtggtttttgacatttacaaggcccttcttgatgttgttaataccccttcaaactatggtttcgtagaagcgacgagaggctgctgtggcacagggactgtagagacaactgaattcttatgcaatccgcatacactgggaacttgtcccaatgccttccagtatgtgttt

SEQ ID NO: 22271 - DNA, 357 bp, Gossypium hirsutum
  Clone ID: LIB3146-053-Q1-K1-A7
acaaagcacccatgcctctaagcccaccaccaaaccaaccaacgaacccaccgtcgtggcggcactctctacctcttctctcctttggatccattcgcccaaaccgatttctcccaaactcgctcttttcactgctacacgctttttcactccaaagaagtccacctccattgttatggctgctccccctacgactactgctaccgaggtggtgccagcaattattgttggtggtggaagagtgggaaaagcattgcaagatatgggcaagggagatgatttgctggtgaagagaggtgaagcagtaccgcttgattttgaaggtcctatattggtttgtactaagaatgatgatct

SEQ ID NO: 22272 - DNA, 239 bp, Gossypium hirsutum
  Clone ID: LIB3146-053-Q1-K1-A9
acaggcttacttacacgctttcgctgtttggactgacactaagcaaccctataattgtggggctattcctgaaaggaacacattaaatttttgcataattaaaaccattggtgacaataggaaaaaaagaaaagtcgtgcttatgtcaactaaaattgcagttcttgagctgcaatgtccaatcaatgtaaacactatgagggcggacctaaactgaagaaacattttttacttattta

SEQ ID NO: 22273 - DNA, 340 bp, Gossypium hirsutum
  Clone ID: LIB3146-053-Q1-K1-B1
cgcgtccgcccacgcgtccgcaaaattcagagcagcacctttttgagttccaacattttcccacttctgggggtcggcttgctgcacatcgtgttgctcaacattatgggctggtaactatggtttatgataatggtttaaatggcctaggaaacagaatcgtggcgaataaagcaggggaaatcaaatggcctggtgtttgtttgtctgaaattcctgccaaatactctgaaaatgataaaccagagcaggttaaaattgctattaatcctaggccaaataatggatctgtaaatgaagctaatcaaatcggcatcaaaagaagtcctgtgagaaagtg

SEQ ID NO: 22274 - DNA, 392 bp, Gossypium hirsutum
  Clone ID: LIB3146-053-Q1-K1-B10
cggacgcgtgggttcgaaatctatggagatggcagcgtcaaagcttacttcgttgcaggggccgatataggaaaattcaccatgaaaactgttgatgacattaggaccttgaacaagtcagttcattttaggcctgcctgcaatttctataacatgaacgagcttgcagctttgtgggaaaggaaaatccggcgaacactccctcgagttaccgtcactgaggaagaccttctctcggctgcggcagagaatattatcccacaaagtgttgttgcatcattcacccatgacatcttcataaagggttgtcaaatcaacttcccaatcgaaggcccgaatgaaaccgaagccttcagtttggacccgaatgagccattccgaacattggatga

SEQ ID NO: 22275 - DNA, 368 bp, Gossypium hirsutum
  Clone ID: LIB3146-053-Q1-K1-B11
cccacgcgtccgcggacgcgtgggtgcagctgatgatgtacaacaacatgtacagaatgaggttcgacacaagattcgagagtgaggatgatcctttgtttgttaggctcaaggctttgaacggggagaggagccggttggctcagagttttgaatacaattacggggattttattccaatcttaaggcccttcctcagaggatacttgaagatctgtaaggaggttaaggacaggaggttgcagctcttcaaggaccatttcgtcgaagagaggaagaaacttggaagcacaaaaagcatgaacaacgatggattgaaatgtgccatagatcatattttggatgctcaacaagaaggggaaatcaat

SEQ ID NO: 22276 - DNA, 358 bp, Gossypium hirsutum
  Clone ID: LIB3146-053-Q1-K1-B12
cagtgggaagggagtgacaacaattatcggaggaggtgactctgttgcagctgtggaaggggctgggcttgctgacaagatgagccacatctctactggtggtggtgccagcttggagcttcttgagggcaaacaacttccaggggtccttgctcttaacgacgcttaaacttttaattttgcacctctttgctttttttgaacattgttcactgctgtaatggtggctagtatttttatccaagagtgaattttagtagagctgaggttgtagaggctgatagggtggacttgttataaataaattggtttctcctcatcatccatcagagatgcatttggattggatgtctttttt

SEQ ID NO: 22277 - DNA, 368 bp, Gossypium hirsutum
  unsure (1)..(368): unsure at all n locations; Clone ID: LIB3146-053-Q1-K1-B2
ccggtaagaattgcccggtcggcccattccggggaaggtccttccattgatggttgcaagggtgactgtgcttacctgtcagtggcttatgggcgacatgcaagggtaattctgtggatcttcctgatggaacctcttacaatagcggtgtttatgttgagagatgcaagtacttagaggaaagtaagtgcgtanggatttgtatcaatacttgtaagcttccaacacagagtttcttcaaggactacatgggggtccctctgctgatggagcctaacttcagcgattatagctgtcagttcaaatttggggttagcccaccattgccggaggatgataacaccctaaaagagtcctgcctggatgta

SEQ ID NO: 22278 - DNA, 402 bp, Gossypium hirsutum
  Clone ID: LIB3146-053-Q1-K1-B3
cccacgcgtccgcccacgcgtccgcccacgcgttcgcccacgcgtccgcccacgcgtccggggcaaacccttaattccagaaaataaaaaactcagatacttggtcgaggaagaaggcaaagcacagccaaaatgtcgtcgtttttgcaatcacttttggatccgaagaagagctggttagcttctttgcatatgaaagcccttaccacacgcctccgcaaatacggccttcgttacgacgatctgtacgatccttactatgacttggatatcaaggaggcgttgaatcggctgccccgtgagattgtcgatgctcgtaaccaacgccttaagcgtgcaatggatctctccatgaagcacgagtatctcccaaaagatcttcagaaaatgcaaacaccattt

SEQ ID NO: 22279 - DNA, 375 bp, Gossypium hirsutum
  Clone ID: LIB3146-053-Q1-K1-B4
ccaatcgttgctgtggaaagtgaggcatctgcaacaaatgatgcatggtgcaattccacattagagggacttaaagaagcttcaccattgagcttgaaggtgtctttgagatcggtacgagaaggcagatttcaaacctttgaccagtgcttggttcgtgagtatcggatgtcccttcaagggatatcgaagcgaatctctaatgacttctgcgagggtgtcagagcacgagtggtgcacaaagactctgctccaaagtgggaacctccaagcttagaaaaagtgtcggacgatatggtggatcagtactttgcacccctcagtgaatctgagccaaatctggagctccccacaaaacagagagaagcatttaac

SEQ ID NO: 22280 - DNA, 367 bp, Gossypium hirsutum
  Clone ID: LIB3146-053-Q1-K1-B5
ataacccatcactcctatattcatctttcagcataaacgatgtcttcggttggcgaagctgcgggctcttatgctgctttgattctctatgatgatggcatccccatcaccgctgagaagattgccgcgctagttaaagctgccaatgtctctgttgagtcttattggccaagcttgtttgctaagctttttgagaagtgcgacattgagaatctcataaccaatgttggtgctgctgctggtggtgctccggtcgctgcagctgcacctgttgcagctgctggtggaagcggtgctgctgctcctgctcctgcagaggaaaagaagaaggaggaaccagaggaagagagtgatgatgatatgggat

SEQ ID NO: 22281 - DNA, 361 bp, Gossypium hirsutum
  Clone ID: LIB3146-053-Q1-K1-B6
cccacgcgtccgcccacgcgtccggggtttcggcgcagcaacctttatcccctagggccgtgtaatcatcaattcacccttaaaattggtgagtgacgtaaaaccttcttttgtttcattcaaatccacccttaaaaacccttttccactcgcttttttacccccacttttaccgaaaaaaccaaatcttattgattccttcaccaaaggaaaattctcggttctctttcttttttttttcaaaaatgttcttaaagaaaacaaggtgcatgcgcagaaaaaatattgaagacgaaaactattcaaatcaccttttgattttttgctgggtctttgtattgaaaatgtgtagtatgcgcgc

SEQ ID NO: 22282 - DNA, 280 bp, Gossypium hirsutum
  Clone ID: LIB3146-053-Q1-K1-B7
gatgcaagatgtatccagacctgaacgctgccgagatgaccacaactgagactctgggggggggtgtagcaccccagaaagcacactttgagggagctgagatggaattcggggctgagaacggctgcaagtgtggagacaactgcacctgcaacccttgcaattgtaaatgattagagaccaaagccaaagctccctggaagcagaggcgcctttgtcttaaaaataatatgttttgttggttatgtgtttttagaataaagtagccatggcttgtcgt

SEQ ID NO: 22283 - DNA, 271 bp, Gossypium hirsutum
  Clone ID: LIB3146-053-Q1-K1-B8
gtttccccaacttgaaagaagttcaaatttcttttgctacgaaacttggtgaaaaggggagcttgtggacaagctgatttccaatcagtagattttgcattgaactcgtggcctgaaacgcctgagacgatgccgttgtcgttcttggtcaacaaattttgtggggattacatttatgaactgcaataacatataatggcatcacaagcttatcatcttctcttaagggagttaggtactgaatgcttgtaagcacaaaaaccatgggaga

SEQ ID NO: 22284 - DNA, 315 bp, Gossypium hirsutum
  Clone ID: LIB3146-053-Q1-K1-B9
agcagtcacgggtgggactgtcacggtagtttgatgcggaacaagtagtttacaggggggggtaaaatttgccgaggttcttgaaataattggtgctaaagtcacctggaccaagaatagtgtaactgtcaccggacccccaagaaatccctcagggaggaaacacttgcgtgctattgatgtcaacatgaacaaaatgccagacgttgctatgactctcgctgttgttgccctttacgccgatggtccaactgccataaaagatgtggcaagttggagagtgaaagagaccgaaaggatgattgctatatgcac

SEQ ID NO: 22285 - DNA, 386 bp, Gossypium hirsutum
  unsure (1)..(386): unsure at all n locations; Clone ID: LIB3146-053-Q1-K1-C1
cggacgcgtggggtcttgcttgattcgaactacaatgcaaagctttctgatttcnggctggccggagatgggccaacaggtgataagagccatgtttctaccagggtcatggggacctatggatatgctgctcctgagtatttagccacaggtcatttgactgctaagagtgatgtctatagttttggagttgtgctgctggagatgttatctgggcgtagagcagttgacaagaatcgaccgtccggagaacacaacctggtggaatgggccaaaccatacctggccaacaaacgcaaaatattccgtgtcctagataaccgtcttgaaggccaatattcaatggaagcagccttcaaggccgcagcccttgctttacgatgctt

SEQ ID NO: 22286 - DNA, 402 bp, Gossypium hirsutum
  Clone ID: LIB3146-053-Q1-K1-C10
gcaaaacctacgatggcggacgacgactataatgatatggacatgggatatgaggatgaggcaccagagcctgagattgaagaaggagctgaggaggatttggaaaacaataacaacgatgatgttcctctagaacctatcgaaactgaagacaatgtagaccaagatgctaaagacaaaactactcgtaaaacatcaaagtatatgaccaaatacgagcgtgctagaatcttgggtacccgagccttgcaaatcagtatgaatgcacctgttatggttgagttggaaggtgagaccgacccacttgagattgccatgaaggagcttcgagagcggaaaataccctttaccataagacgctacttgcctgatggaaagtatgaagaactgggagtcgatgag

SEQ ID NO: 22287 - DNA, 389 bp, Gossypium hirsutum
  Clone ID: LIB3146-053-Q1-K1-C11
cccacgcgtccgcccacgcgtccgattctttcgttatttcgtagggtgaatgtttctgggggggaaaaagaagatagactgatgattacagggttgcacactgtagcagatatcttctgcattgggtgtggatcaattgtgggatggaaatatgaatttgcccatgagaagagccagaagtacaaagaaggaaaatccgtacttgaacggtttaaggtgtctggtcctgatggaagccattattgggttagccatgaaacacatgttggtggaagtgatgcagatgatgtttgattaaataatcaaaaatgctggtcaaattccaattgtacattctttagtccctggaatctctcattcaactcatctgaattcttaaaaaactgggc

SEQ ID NO: 22288 - DNA, 375 bp, Gossypium hirsutum
  unsure (1)..(375): unsure at all n locations; Clone ID: LIB3146-053-Q1-K1-C12
aggagacagacaaaattcttggagtccatattatggcaccaaatgcgggagagctcagggatgaagcagtccttgccattaattatgatgcatcaagtgaggacatcgctcgagtgtgccatgcacatcctacaatgagtgaggcattgaaggaagctgcaatggccacctatgacaagccaattcacatctagaaatatggatttttacatgttattcttcattttgatttatgtttgaaaattttcgagattgactcggcagcagtcagcacaaactgttcattttcttgtttgtccttactcgaaacagatggcgtgcttgaatagacatttgccattcatcngttacattttcccaaatgcatataataac

SEQ ID NO: 22289 - DNA, 396 bp, Gossypium hirsutum
  Clone ID: LIB3146-053-Q1-K1-C2
cccacgcgtccgcccacgcgtccgcggacgcgtgggtccgaattcagggtatcgaaccagagtgagagatacccttctcttgggtagcaaacaatttattaaacccggactattttcttcacgtctgtgtttgtgtcaaagttgcacaataaaatcccacatgaaggggatggatatgtgtggatatgtttctcctgttgtgacaaggaggttagggtctcttctttttattcattttacactgtgaatatgttgattgcatcaatgtcttagcaaaaaatgaaaagaaaaagccactgtgatacttagaggtaacactgaactgagctaggataggcttggcatgggtttattccagcccagttgatcacttagttatttttttttattaatatg

SEQ ID NO: 22290 - DNA, 433 bp, Gossypium hirsutum
  Clone ID: LIB3146-053-Q1-K1-C3
gaaaacccgggccgaccgacgcgtccgcccacgcgtccgcccacgcgtccgcaggtttcgtgtggctcaaacaaaagaagagcatcagccggaggttctaaaagatagggaagctggtttcctatgcaactgaagtcacggctgtcgttgagaaaggcaagatcaagaagctgactggggtgaagaccaaagagcttttggtttggatcacactgagtgatatccaagtggatgatcctcccactgggaagatcactttcaagactccttcagggctgtttaggactttccctgtatcagcttttgagattgaaggtgaacaagttaagggttctaagggtaaggatgaagagaaacaagtgaatggagctgtcgaaatgaacgaagtctagagtcctttttcaattcccaacagaagaaagccttaatgtac

SEQ ID NO: 22291 - DNA, 372 bp, Gossypium hirsutum
  Clone ID: LIB3146-053-Q1-K1-C4
cggccggaggcgtccggagacctaaaataagctagaaggattgcctggtgttctctttgtgctcccagattcttatgtcgatcccgagtacaaggactatggtgctgaattgtttgttaatggggagattgttcaacgatcaccagaaagacaaaggagggtggaaccacaaccgcaaagggcccaagacagaccaaggtacaacgatcggactcgttatgttcgtcgcagagagaacatgaggtgaaaagtataattagaaagaaagaaaatgatttatagaactccttttaagtgtttcttgagatatgggagcattactattatgaagataagacatggaaaagaaaagcttatgttgatgttttttaa

SEQ ID NO: 22292 - DNA, 389 bp, Gossypium hirsutum
  Clone ID: LIB3146-053-Q1-K1-C5
ttaacacctttggcaacagaatccacaggatgctgaaactcggcttgagcattgacgagggggcaggtgaaggtgaagctgatgctgatatgcccccattagaggatgctgatgctgaaggcagcaagatggaagaagttgactaagcaccactcttcttgttggaactttttactagtttttttttaattattattgaagttatccttaggtttaatattttgttttgtgcctttttgggaggttttgttagtgattttggagaaagttcttaatgataattgctgttctgtttctggtatatttatacattttatcggtgccttatctttggtgcttgcttagaatggttgctgttgccatatgttttcttaaatggttattataca

SEQ ID NO: 22293 - DNA, 361 bp, Gossypium hirsutum
  Clone ID: LIB3146-053-Q1-K1-C6
gaggcgtccgcccacgcgtccgcccacgcgtccgcccacgcgttcgttttcctccgccgttcgtaaaagctgggaagcagactaaagtggtgcaaaaaatgggccccaagcgaggtggaaaggtggccgtcccagccaagaagaaacaagagaaggttgtcaatccattgttcgagaagcgtccaaagcagtttggtattggaggggctttacctccaaagaaggatttgcatcggtttgtgaagtggccaaaggttgtccgcattcaaaggaaaaagaggatccttaagcagagattgaaggtcccacctgcattgaaccagttcaccaagactcttgataagaaccttgcaacaagttt

SEQ ID NO: 22294 - DNA, 295 bp, Gossypium hirsutum
  Clone ID: LIB3146-053-Q1-K1-C7
gatcgaacaagaacttgggactgaaattaagcaaatccctccacatatcgaccaggctgtgtactgccggtgatttttgtgggatgtttccttagcctactatggtaacaacggtgagcaaccatgctcatctgaattttagattacatgcacaaagtaatttctttgtgatctttttccatatccagaatgttctctgattttgctctttgctatttataccggcgtttgttaagttaatgatgctggtctttcaaggtctcggtccctagtcatgggtgtgcattctaaaaac

SEQ ID NO: 22295 - DNA, 345 bp, Gossypium hirsutum
  Clone ID: LIB3146-053-Q1-K1-C8
cttcctctaaccatgttcgtaccagaggccgagcttcctgtttgggttatttgttatgtggctgtttttatgtcattcctcaacattcttccatcccccaaatcgttccctttcattgtcccttatcttctatttgaaaacaccatgtctgtgaccaaattcaatgcaatggtatctggattattccagttgggtagctcctatgagtgggttgtgaccaaaaaggctggcaggtcatcagaatctgacttactggcttctgctgagatggaatcgaagataatgaaccaactgcaaattcagagaggagcttcggaaagtgaactcactgaattaaaccgattg

SEQ ID NO: 22296 - DNA, 299 bp, Gossypium hirsutum
  unsure (1)..(299): unsure at all n locations; Clone ID: LIB3146-053-Q1-K1-C9
cccacgcgtncgcagctatttccaagcaaagctttcttttcggagttccaggctatgggcgtctgccaatgaagaagcaaaatgagatcttgagtttggagagagagatagagtccctaatctgggaaacagtgaaagagcgggaaagcaaatgcaaagaggcatgttcatcagagaaggatctattgcacttgatactggaaggggcattgaatgaccaaagtcttggtgaggattcatccaagcgcttcatagttgataactgcaagaatatatattttgctggccacgagtctact

SEQ ID NO: 22297 - DNA, 340 bp, Gossypium hirsutum
  unsure (1)..(340): unsure at all n locations; Clone ID: LIB3146-053-Q1-K1-D1
cccacgcgtccgcccacgcgtccgcccacgcgttcgcccacgcgttcgnccacgcgttcggaagaaatgtgagagtaatgaattttatggtttggtagctgttctttttttttttttgtaaataaaaaatatttgtgtttgatatttctgttagagcatttggttatgagtgtgggttttccgatacttgcctctgaaatcagatgccatagcctgttcacaccgtatactttttctccgataaccattttaagcttgtatatgtttacgttttgcttcattggacatggtatatgaattttgagctagtatggtaaatgaaggtggtggttgatttcac

SEQ ID NO: 22298 - DNA, 200 bp, Gossypium hirsutum
  Clone ID: LIB3146-053-Q1-K1-D10
taattgaatacctattcaataactaaacttcattgcacaagcctgctcagcacattacaactccttatctgcaaaaaccaattccttactcaacttaaattaaaccctgctcataatgcttaacacagatatgctgatcacatactaaactcaccattactgcgcttaaaacagatctacacccatgatgtcaaatcata

SEQ ID NO: 22299 - DNA, 92 bp, Gossypium hirsutum
  Clone ID: LIB3146-053-Q1-K1-D11
gctgtacattatattttggggtatgtggcatgttgtagctttatgaaaattgctaacgtgggtttatattatccattgagatgtttgtttgg

SEQ ID NO: 22300 - DNA, 386 bp, Gossypium hirsutum
  Clone ID: LIB3146-053-Q1-K1-D12
atgaaaaccacaacagtttcggtgtttcttcttttcatcatcttctcaatcacaccgggggcctttttgtttggtgtagccaacgctacaaacgaacctgtgctcgacattgatggcaacgaggttcaaacaggcaccccatactacgttgtgtcgtcgatatggggtgctggtggtggggggctttccctaggcatgcctagcagaaaaaaatgcccggaagtagttgctcaaaggggatccggtgacgatggtattccggtgatattttctaattcggactccaacgatggcgttgttcgcctatccactgacataaacatagagttcattccccttagacccagactttgccaaacaacaacagtgtggaaggtcgatgatta

SEQ ID NO: 22301 - DNA, 371 bp, Gossypium hirsutum
  Clone ID: LIB3146-053-Q1-K1-D2
gtccgttttagacccatttaaaggtcaaaaaacctttgcagccaaattttctctccttttctctgccgtcctcattctccgggaaaaccagaaaaaaaacccctaaaaccatgcaaacagcccaacccccaaaaccccatcctctctacgacataatcatcttaggagcctcaggttttactggcaaatatgtagtaaaagaggctctgaagtttctcaacaccccatcttctcctcttaaaactttagcacttgctggccgtagccgtgaaaagcttgttaaaactcttcaatgggcagcccatcctagttctcctcccaatgatgttagtgttatcactgccgatactaccgacccatctaagttttta

SEQ ID NO: 22302 - DNA, 394 bp, Gossypium hirsutum
  unsure (1)..(394): unsure at all n locations; Clone ID: LIB3146-053-Q1-K1-D3
attaacccaatccaatattttggatccagcttacggcaatacatgccttcagcaagtcaggcggaagctgaagtgcagaggttaaaataccaaatggctcanatgcaagtgaccacaattgaggttcaaaagaaatatgaagaactccgctgcaacttaaagcaaaggcagcaacgagggaagcagaggcagccgcgagggaagcaaagcagaacacaaagtacgatgaactccaacagcagctttagaatacgatgaagatgtttcatcaatcgtgacatgcaccgacataatgtactatataaatattattatcattttaacttttaacatttttggtaaaataatatgaatgatattgtatttattgatatgaatattattccattcggtt

SEQ ID NO: 22303 - DNA, 387 bp, Gossypium hirsutum
  Clone ID: LIB3146-053-Q1-K1-D4
gtcgacactgaagagaattggggatgttcttacagttgttgttgtagcaggttgttgctgtgaaatttatgtcaaggcagtaatgcgagaagaagctaggaacaaggcaaaggctggtggtggaagtaaatgaggctgtgcaagctttggcctgtgtgtggaaacgaaaaagtggatgtcagcatttcatcttgtttttggcaatgctgttttagattttaaagattttgcctagtgataaataagcaaaactgacatatgttatgacattgttgaagaccctagtctgcaaatttccatcatgttctcatcatatgaattctgtcataaaaaaaaatgatgattccaataattatagaaactagcccggtaatagggtttgggagt

SEQ ID NO: 22304 - DNA, 438 bp, Gossypium hirsutum
  unsure (1)..(438): unsure at all n locations; Clone ID: LIB3146-053-Q1-K1-D5
ggccggaannccgggccgacgacgcgtccgtcagagagctggattctttgccgcgggagtgttgtctttcggagactgttgccttgggggtggggaagcctccatttgaaccgtgggttcaggttaactttgatgttgggatctatggtcatctacatgctgcaagcgcaggagttgttgttatatatttagaggggttgttgcttggatcagtctgtttctggagtgagtatgtactggatgtggtggttgcggaggctttggcttgtgtgcatgctattcggtttgccagggatctggggcttcggcgagtggagtttgaaggggactcagcagtggtcatttccaagctcaaatctggcgtgattgatagatcaaacattagtgggtatatctgggatgctcgacagttgttattaggctttaagcatttcaaat

SEQ ID NO: 22305 - DNA, 405 bp, Gossypium hirsutum
  Clone ID: LIB3146-053-Q1-K1-D6
ggattatgcacctaaccatgctgcatattatcctttcggagttgatgtattcttatccgggcgaaaaatagatcacatggctagatttatcgaactccctgttattagtcattccgagaaactaccatctatccttgtcgtaaatgttcagattcccttgtatcctgctgcactttttcagagtgaaactgatggagaagggatgagttttgttctttactttaagctttctgacagttactcaaaggagcttccgctccactctcaagaaaacttcaggaggttaattgatgatgaagctgaaaaggttaagggattccctgtggatacaattgtgccatttcgtgaacggttgaaaatattaggtcgtattgcaaatgtggaagatcttcacatgggtgcggc

SEQ ID NO: 22306 - DNA, 337 bp, Gossypium hirsutum
  unsure (1)..(337): unsure at all n locations; Clone ID: LIB3146-053-Q1-K1-D7
caaaggccaaatcgtattatctttttgatggttatgcccatctttcctctggtcttgctgggggacttgctgggctttcagctggaatggcaatcggaattgttggtgatgctggtgtcagagctaatgcacagcagccaaaactttttgttggaatgatccttatcctcatctttgctgaagctttggctctttacggcctcatcgtgggcatcatcttgtcttctcgggctggccaatctagagcagagtaaagcgctggtagagctgttttagtagtattcttttattacttatcgngtttattatgattggacatcaagtggtgggtttaatg

SEQ ID NO: 22307 - DNA, 297 bp, Gossypium hirsutum
  Clone ID: LIB3146-053-Q1-K1-D8
aaggagattaccataggtacttggctgagttcaagactggcgatgacaggaaatctgcgggcgagaataccctcactgcctataaatctgctcaggacattgcagtagctgagctagccccaactcatcctatccgtttaggattggctctgaacttttctgtcttctactatgagatcttgaactctcctgatcgtgcttgcagtcttgcgaaacaggcttttgatgaagccattgcagagctggatactcttggagaggattcatacaaggatagcactttgataatgcaacttc

SEQ ID NO: 22308 - DNA, 115 bp, Gossypium hirsutum
  unsure (1)..(115): unsure at all n locations; Clone ID: LIB3146-053-Q1-K1-D9
ctgatctaatgcaagatttcaagaccggtttaccttactctatcatcanccaantctatgtgtgtgagccagttactgggaacagccatgggatgtgtcattgctccactcacat

SEQ ID NO: 22309 - DNA, 346 bp, Gossypium hirsutum
  unsure (1)..(346): unsure at all n locations; Clone ID: LIB3146-053-Q1-K1-E1
tccgcggacccgtgggtggatatccgttcgtgtactagttggtttcttgagtaccatattagccatgaggcatagcaaaagagtcgactntactcttcggacccttgcaggaataccgagggcattgtctgaatatgtgagagcagtcttcatccctcgaacaacaacaaaggcaacgaacgttcgtgagcacccttttactcctaaggtttataagcgtgggcagataattccaggagatacgccaaactgtaattgcgatttttgtatgaagttgtaggctccagagtttgctgtaaaatttttttgattcagtctgtaatataatactactaggatctagtaa

SEQ ID NO: 22310 - DNA, 440 bp, Gossypium hirsutum
  unsure (1)..(440): unsure at all n locations; Clone ID: LIB3146-053-Q1-K1-E10
accggnnccggaataacccgggggcgaccgcacgcgtaccgcccacgcgtnccgcttggctcgtaccccttcaaggtaatttcggtatctnttgaataanccaggtgtctcctccaagggcaagttgaagaactcctgtgtatcggtcttcattttctcaatcacttcatctgctatcccatggttgattaactgttgcacccaacagtaagaatgaactactgaatccatagacgtaaaaaaagtataattgtgtttcaattaggtacctggaagaaaccccagtctttgcaagcctggtggagttttttctgttcagcatcatggtctagtttgctcatgtcaattacaggaatctgctgggattcatctatggaaaccacatcgaattcgacctctggtctgatgtatctggatgggattctgttgaagttcttgga

SEQ ID NO: 22311 - DNA, 417 bp, Gossypium hirsutum
  unsure (1)..(417): unsure at all n locations; Clone ID: LIB3146-053-Q1-K1-E11
ggaaaaaccgggccgaccgcacgcgtccgcggacgcctgggttccatttgagaatttttagtccattcaaatactacactatnaacagcntcttttttatgagccacatttccattattttcatgacaaagctaatcaacagctcggtggtcaccgtattgctactgtactgatgtatttgtctgatgttgagagtggaggggaaactgtgtttccaaatgcagagggacgactttctcaggtgcaggatgaaaattggtcggcctgtgccaaaaatggatatgcagtgaaaccccgaaaaggtgatgcattactgttcttcagcctacatcctgatgcgacaactgatacagccagtttgcatggaagctgccctgtgattaagggtgaaaaatggtcagcaacaaagtggatcca

SEQ ID NO: 22312 - DNA, 414 bp, Gossypium hirsutum
  unsure (1)..(414): unsure at all n locations; Clone ID: LIB3146-053-Q1-K1-E12
ggaaaacccgggccggccgcacgcgtccggggaaacagtggcgggattccggagaatgttcattgtgctgagtgtggacctccgggcgcnatgtatttcatgtatcgctgctctcttgagtgagctagacaaagccaaaaaattacttttgggagggaccaagtaaaagactagaaataaaaataacaatcatcatagtttgatgtttgtttagagttatttatgattatcatatctaaagtctacgatgtagtgatgtttgtgcggcttctaataatgtttagggatcttttattagcccacaccggctatcaaagagccttagctgattttatatgattgtgtgttttgtttgtaagattacttttgccaaatatagtgttttccaagtttatggcttggatttatgttttc

SEQ ID NO: 22313 - DNA, 121 bp, Gossypium hirsutum
  Clone ID: LIB3146-053-Q1-K1-E2
ccattgtaaaccggggcgaatcgaagttttcctctctgcttttttctttcaaattcaatggtcttccagcctgttttcgtgtaaaaaaaacaaacttaatacctcaaacaacaacaaattt

SEQ ID NO: 22314 - DNA, 372 bp, Gossypium hirsutum
  Clone ID: LIB3146-053-Q1-K1-E3
cccacgcgtccgcccacgcgtccggaaatggcgagcggaggaaaagtgtcatttaaagtcgctgttacctctgatcctaagctccctttcaaagtgtttagcgtgcctgaagcagccccttttacagccgtcttgaaattcgcagccgaggaattcaaagtccctcctcaaaccagtgctatcatcaccaatgatggtgtgggaatcaatcctcagcaaagtgcaggaaatgtgttcctcaaacatggatcggaacttcgcctgattccccgtgacagggtgggagccttttgaaataacaaaaacttcatttgttatctctgagtgagaagactggttatgactttgtttggttatggatccctttgtttg

SEQ ID NO: 22315 - DNA, 386 bp, Gossypium hirsutum
  unsure (1)..(386): unsure at all n locations; Clone ID: LIB3146-053-Q1-K1-E4
cggaatnccgggtcgccgaaggcgtccgcccacgcgtccgcaaatactttgatcagtttcataaaaaagaaagaaatcaaatatgggtggggagtttccaagagtttccttctccttgctcttctagctgctgttgttcttctcatttcttcggaagtggcagctcgagatcttgctgaaactaccactgaaaacaacaatggtgaggtggctaccgaaacaacccagcctgagctagaagataaacgctcagcttataatggaagaggacacggaggtaaaggagggtatggaggtgggcacggagggtatggaggtgggcacggagggtatggtggtggacacggaaggtatggtggtggacacggaaggtatggtggtggaca

SEQ ID NO: 22316 - DNA, 282 bp, Gossypium hirsutum
  Clone ID: LIB3146-053-Q1-K1-E5
gttcatccaagttttggagagcgttacttgtcatcggtcctgttccaagaactaaggaagggagctgaaaacatgcagccagttgcagtcgactaaatgccttttcaggggacatgttaggaagctccctcgggaaacaaaagccctgtctgttaataccaaatgtttccaccgaaacattggtatccattgttattatgaatccgctgtgcacccatttgttttagtttcaatgtttaactctgtctgaaatgaaatcagtaataattggaatttgcattg

SEQ ID NO: 22317 - DNA, 427 bp, Gossypium hirsutum
  unsure (1)..(427): unsure at all n locations; Clone ID: LIB3146-053-Q1-K1-E6
gagcgaggcgtccgaaagcttaaagttgaaaagattcatggagaagctgacatgatacttgggaatattgttaacgagcacaaagaaagtagagcaaaaggcanaagtaaagatgaaaacaaggaaaatctggttgatgttcttttaaggattcaggaggatggtgaatttcccttgactgacaacaacgtcaaagccgtcatcttagacattttcagtgccggaagtgagacatcagcaggagctgtagagtgggcattgtcggaaatgattaaaaacccaagagttatgacaaaagcacaagcagaggtaaggcaagtattccaaggcaaaggaaatgtagatgaaacaggcattcatcaacttaaatatctcaagtgtgttataaaagaaaccttaagactgcaccctgttatacctttattga

SEQ ID NO: 22318 - DNA, 303 bp, Gossypium hirsutum
  Clone ID: LIB3146-053-Q1-K1-E7
tggtcttccggtccttctattcttccttctgacccctgtgaacgtgctgtcgctcgggggggggctgcatatcttgacgacaagtggttcccagcggtgaaaagtataggagtcgctaaaggagacgaagcaaagaaagcagcaatagcgcaagtggaagaagggttggctttgatggaagaagcatacgacaagtgcagcaaagggaagggttactttggtggggatgaagttgggtaccttgatatagcttttgggagcttcttgggatggcttagagtgacggagaagttcaatgcgatg

SEQ ID NO: 22319 - DNA, 358 bp, Gossypium hirsutum
  Clone ID: LIB3146-053-Q1-K1-E8
cggacgcgtgggtccgggactgttttcctcttatgtactggtttcttcttccggttatacggatgggaatttctacatgaggcattgctataccatcttactcgcacggatccaagacataatttttccatctatttctaccatatctatcttaactatgaacgcgagctttcggttcttgaaaagctcatctcctttttgcctcagtttatagtgcagctagtcctcattttatgcttcgcaaaggatcttgtattctgcttctttgtacagacaagggcatttgtagcattcaataaagtacggtacgcgaatttaacttccctaacttcattttattgacaattgtcgttttttt

SEQ ID NO: 22320 - DNA, 70 bp, Gossypium hirsutum
  Clone ID: LIB3146-053-Q1-K1-E9
aaaaaatccaagcgggcgtacacatacatgcgacgtcataactcttctatagtgacacctaaattcaatt

SEQ ID NO: 22321 - DNA, 376 bp, Gossypium hirsutum
  Clone ID: LIB3146-053-Q1-K1-F1
cccacgcgtccgcccacgcgtccgcccacgcgtccgtgaaggagcacctgatgtgaaaatgggggtgcagaaatacaaagatggctgctggtatccaccccttgttatcgacgaacaacctaatgttccaatgtggaatcctgtgctatttaaacttccatccgaggagttgttgttattctataaagtaggccaagaggttcaaaagtggagtggatgcatgaagcgatcatatgataaaggtgttacttggacaaagagagagcaactccctactggcatactaggaccttctaagaataagcctatcttgcttgaaaatggggttttgctctgcggatcgtccgtagagagttggaattcttgggggtcatgg

SEQ ID NO: 22322 - DNA, 412 bp, Gossypium hirsutum
  Clone ID: LIB3146-053-Q1-K1-F10
cccacgcgtccgtcaataagtagcgtaggttataatctaagttcaagattcgaagatggggggaagaggaaagggaggcaagggactgggcaagggaggagcaaagcgccatcgtaaggttctccgtgataatatccagggtatcacaaagccggcaattcggcgtttggctcgtagaggaggcgtcaagcgtatcagcggtctaatctacgaggaaacccgtggggttttgaagatcttcttggagaacgtgattcgtgatgcagtaacctacaccgaacatgcgaggaggaagactgtgactgctatggatgtggtttatgcactgaagaggcagggcaagacattgtatgggtttggtggttagatgatttagggattagatctttctgcgatgttggcggatctggac

SEQ ID NO: 22323 - DNA, 409 bp, Gossypium hirsutum
  Clone ID: LIB3146-053-Q1-K1-F11
gccacctgtaacactttttggtcgggcaatgcttaacctccatgatcctaattttcgcgcgtgaggaaaaatgcatatctacaacaaacaaccctctttatgttgtcaatgaaatgaagcaagtagtcataatccaaaacaccaatgaagattctgagaatagattgcaaaatgaactgatggcagaaggctctgcactgcaatgtaagaagttggtgactacggaaactttcgaggaaagattagagaacaagttagatgcagttcaaactgttatgcaaagtgaggagatgagatgggatacttaccatcagtacagatatgaaagcaaacaggctgatgagactacaatgcaatgtgagaatctgacaaggaaggaaattaacaagtgttcttactctatcggata

SEQ ID NO: 22324 - DNA, 134 bp, Gossypium hirsutum
  Clone ID: LIB3146-053-Q1-K1-F12
cccacgcgtccgcccacgcgtccgggaatggatgttgctgcatctgaattttacgggacggataaaacttacgacctgaacttcaaagaaaagaacaattaccgtgaacaaaagatctcatgagatgcttttaa

SEQ ID NO: 22325 - DNA, 298 bp, Gossypium hirsutum
  Clone ID: LIB3146-053-Q1-K1-F2
gttatgttgaacaacaattactcgaaacccgaccccaatgccccacccaagcgtggacgtggacgtccacctaaacccaaggttcctcttccacctggcgtcgtcgtctctcctcccagacctcgtggtcgtccgcctaagccgaaggacttattggctccccccaagcccaaacccgtcagcaccggaaggccgcgtgggcgccccactaagaaggccaagactggtaccgccgccgctcctccacctcctcccggcgtgaagcgaggccgcggtcgacctcccaaaatgttaccgt

SEQ ID NO: 22326 - DNA, 330 bp, Gossypium hirsutum
  unsure (1)..(330): unsure at all n locations; Clone ID: LIB3146-053-Q1-K1-F3
cgtccgcccacgcgtccgcccacgcgtccgcccacgcgtccgttcacgtgaaaaacgaatggtttcgtgacgccggtgccggagtgattgctcatgttgcanacactctgaaacaacaagaatcgtcttcctcgtttatttcctcgagcttgtaagtgcactattgctagtaatgctttgaaagtatattgtataaaataaaacgacaagatgggatgaagaaaaatgaaaatgtctcccatttccattgatttgcacattgttcatctataggcaccggtttaacttgatattttctgaatatatgcatcggatttcaatgttttgccg

SEQ ID NO: 22327 - DNA, 432 bp, Gossypium hirsutum
  Clone ID: LIB3146-053-Q1-K1-F4
cgaatcccgggcgacgacgcgtcgtcttatttttggtaggaaagattggatcactggagctaggtgagagacgagacatgcgcagcctttgagaacatatatcctgtacttacagagttcaggaaaaaccagcaatgatatattttggtggcaaaacacaaccttcctcaactcgtttgtggatattaggttttcctctgccatgttcaggagttggatttcaagtatgaatatacaatgaatagagattggcaaagtaaaggaggggagtcggatacatcggatcggtacctggctttttggctgtggttgtcatatggggtttcctttcccttaaagtcagtatggtgcttaaatgcttggcatatgctgtaattagtaaattcagaaggaagaactaactggaaacaaaaaaaaaatggaaggaacaac

SEQ ID NO: 22328 - DNA, 330 bp, Gossypium hirsutum
  unsure (1)..(330): unsure at all n locations; Clone ID: LIB3146-053-Q1-K1-F5
cggaanncccgggccgacgaggcgtccgggagacagtancgaaaaagagctgtcggtattaccccgtcatactaaggtggtcgtgacgggcaataaccgtactaaatcggtgctcgttggtctgcaaggcgtggtcaagaaggctgttggacttggcgggtggcattggctggttcttaccaatggcatagaagtaaaactacagagaaatgccctcagtgtaatcgaagctcctactggtaatgaagaaaacgacgacatcgaatttgaaaacgtgcaatggaatggatcagacatggcatctgatgacactcaaaagtctcacagatc

SEQ ID NO: 22329 - DNA, 309 bp, Gossypium hirsutum
  Clone ID: LIB3146-053-Q1-K1-F6
ggaggaaagatttttggttgctctctactgtaaataaggttttgaaggaatttatccccgaggtctctcatgaggcagatggccttatttttcagggctgggatgatccttatgtacctcgtactcatgaaggtcttctgaagtggaaatatgctcggctgaactctgttgactttctatttgagattggtagtgacgatcgtgaacagctttttctgtttgaacgggggagaaagaagttgatggaaaggaataaaagtgaatttagagatgttccagatcccccttcttctttctctgggaaaatta

SEQ ID NO: 22330 - DNA, 344 bp, Gossypium hirsutum
  unsure (1)..(344): unsure at all n locations; Clone ID: LIB3146-053-Q1-K1-F7
cccacgcgtccgcccacgcgtccgtcttaaccttactacattacgccgtatcatggctttggctagcaattttcaggacactttcatggcttccggtttcccctccggcgaaaacgactccttcctcatctattttcctgttgggagctataatggctttcgcgtccggtcttgctaataccagcttaaagtataacagtgttggtttctaccaaatggctaagatcgcggtcactccgaccatcgttcttgcggaattcgttctcttccggaaaaccatatcattcaaaaaggtgcatcggcaaacacccttcggctctctccgattatccggncttatactc

SEQ ID NO: 22331 - DNA, 314 bp, Gossypium hirsutum
  Clone ID: LIB3146-053-Q1-K1-F8
cccacgcgtccgcaaaattggaaggatctcctctttatctgccttatttacaaccaaaagagaaagggtggaaaatgaaggaaaacataccatctacctgggttgttcatgtagggtaagtcagttgagaacctagtagtttttcttttttgtttagatttcatttactcttttctccataaggtttggaggaagatttgaaaggagagggaagaaggctttatcctttactctcttagtatttgcatcagggaatgttatatagatttcatgaatttttttttcttttttggaactcaaacatatgtgttgac

SEQ ID NO: 22332 - DNA, 359 bp, Gossypium hirsutum
  Clone ID: LIB3146-053-Q1-K1-F9
cccacgcgtccgcccatttccttttgagttctagtcagactgttatctcttatgacatgtggcaactcagaaatcggtaaagaagaatgaggacaaagcagaaagaaaataagggagaactgaaactgaaaatagaattttaacacaaaagcaactatggcctacgctgcaatgaagccgaccaagcctggtttggaggagccccaagaacagatacacaagatcagaatcactctctcctccaagaatgtgaaaaaccttgagaaagtttgtgctgatctggttcgtggtgccaaagataagagactgagagttaagggacctgtgaggatgcctaccaaagttcttcacattacaac

SEQ ID NO: 22333 - DNA, 366 bp, Gossypium hirsutum
  Clone ID: LIB3146-053-Q1-K1-G1
gttccttaccttcttttcgagaataccatgtcggtgaccaagttcaatgctatgatatctggtgttttccaactcggcagtgcatacgagtgggtcgttacgaaaaaatccggacgatcttcggagggtgatcttgtttcattggttgagaaaaagccaaaacaccatcgggttggatcagaacccaatcttgaggaaatgaaagctgatctccagcaagaacaggaacaaaaggctcgtaaaaagaagcataatagaatatacacgaaggagctctctctggcgttcctcctcctaacagcttcagctaggagcttactgtctgcacagggtatccatttctatttcttgcttgttcaaaggata

SEQ ID NO: 22334 - DNA, 413 bp, Gossypium hirsutum
  Clone ID: LIB3146-053-Q1-K1-G10
cgcgtacgccaaagcggtgaatccacaaccggcgatcgtttgggcttcgtcgagctccatttatgcagtcaacactgaaaacccattctccgaacatgatagaactgaccgtccggcgagtctttacgccgcaacgaaaaaagccggtgaggaaatcgctcacacttataaccatatatacggcctttccctcaccggacttagatttttcaccgtttatggtccatggggaagacccgatatggcttacttctttttcactaaagatattcttcaagggaaacccattgatatctacagaacccaagatcaaaaagcggtggcgcgtgacttcacttacatcgacgacgttgtgaaaagttgtttaagagccttagacacggcggaaaaaagcaccggtagcggcggaaaaa

SEQ ID NO: 22335 - DNA, 343 bp, Gossypium hirsutum
  unsure (1)..(343): unsure at all n locations; Clone ID: LIB3146-053-Q1-K1-G11
acgtccacgcgtncgagcttaactgtggaggtaagtaaatatgctcgtttaagacatatgggggctttcattcaccgctccttcaaaagattcattccaagttatggtgttgtttagaaacttcgggtaatgctggagatcacaaccttgatttgagcttagggaattcaacctcgaagcaaacgaatctcgagttaggtggtgataggcaaattgctatgagcgatcagcacagtctgccacctgaagctgattggcaatatagggaatttaggtctaaggtaaatctgcaccaagagccttgtagaagcaatggtgctactcatggaagatcggatggata

SEQ ID NO: 22336 - DNA, 344 bp, Gossypium hirsutum
  Clone ID: LIB3146-053-Q1-K1-G12
caaatttcggctcaggactgtttcttttgattcaagttgtgcttttacttgactttgttgatggatggaatgacaaatgggttggataccatgagcaattctggtatgttgctctttttattgtttcacttgtttgctatttggcgacatttggcttttcgggacttctctttcactggttcactccatctggacaggattgtggactcaataccttctttatcgtgatgaccttgattcttgtcattttgtttgccatagttgcattgcatcctgaagttggtagtagcattttaccagcatcagttatatcactgtattgcatgtacctctgctacagtggg

SEQ ID NO: 22337 - DNA, 347 bp, Gossypium hirsutum
  Clone ID: LIB3146-053-Q1-K1-G2
ggaaatgttcatgctgcggtggaacggttactgggaaatcctggtcagtaacctattaccggcgatctagttaatgtagaaaactgagagtttgaagtttgaacatgagtaggatgttgctgaaagtccaatgtgagggaggaactagcttagattatgaaaaatggtgtaaatgaattgggttgtgaaatgtgtttggtttcataggtccattttccttgaaggaggtaaggcaatgagtcaatgtgtgtatgttttcactatagtccaccctttgctgagtgtgttttgtgagccacaaatctgaatgagcaaaaacaaaatactataaagagatgatatttgcg

SEQ ID NO: 22338 - DNA, 208 bp, Gossypium hirsutum
  Clone ID: LIB3146-053-Q1-K1-G3
cccactcattcggactattattgtacctcgggtaatacttagtgaaatgattagtttgggggaggttttgggtgaaagtctgggatttagttgcacctatgtatacaccaacgaaattcgggactcccttctacaatccttctgaccctgcgtcttctgctgtatctgttgaaggagctggcgaacgaacccacattcattcccgttg

SEQ ID NO: 22339 - DNA, 375 bp, Gossypium hirsutum
  Clone ID: LIB3146-053-Q1-K1-G4
gaaaggctccaaaattgttgaatcccaagcgaggataacatacctacaaccaataacaagagaggtcctttgagtgcggatttcttcggttcagcttgctatacttttcagcatgggcagtttcgtaagctatatttcgatctaactcgagttgatgctcgtttggacttatcttcactctcatcttttgccaaaagaattttccagagttctagtgcaaacaaatctctatcatcccccagactaaatttgatatttcaacaacaggttgcagggccaatagtgtttcgagtggattcaaagttgctgctcgattctaaagctgggaaactaggccctcatatcgaagatgtcatatacagcttgagctactcg

SEQ ID NO: 22340 - DNA, 424 bp, Gossypium hirsutum
  unsure (1)..(424): unsure at all n locations; Clone ID: LIB3146-053-Q1-K1-G5
cccacgcgtccgaacaaattgaaggttgttttactgccatttctgcacaggggccattggacaagaataaccgagccagtaggtggtaggctttcctataaacccccgatttttgacataaatgcaccagatttatacatcccatttatggcatttggtacctacgttgttcttgctggattatcgctcggccttcaaggaaagtttagtcccgaagtactcaactggttgtttgttaagggattatttggctggtttctgcaagtcatgctgctgaaagtaacattactctcattaggcagtggtgaggcacctttgctcgacattatggcatacgcagggtatactttcacgggactctgtttggctgttctaggaaggatcgtatggagatattcatactancttttgatgccatggacgt

SEQ ID NO: 22341 - DNA, 379 bp, Gossypium hirsutum
  Clone ID: LIB3146-053-Q1-K1-G6
ccgggaaagaccgggccggccgacccactcgtacttccacccattccaaattaaatctggttgtaatcaagtaatgcttttacttgactttgctgatggattcaatgacttgttttccaataacaacaaacaattctggtatgttgctctttttattgtttcaactggtccaccttgggatgcatttggtgttggtcttttgaagtggaaaatgcaaagtgcagattaatcaatggtgcccttatccatcaactgctagacttcagtttctgcaaatgaaacttatgtcagcattgagtatgaagcttcaaccatgtttgatctgcaaaaccttgtgatatctatacctcttccagctcttcgggaggcaccaaatgtc

SEQ ID NO: 22342 - DNA, 392 bp, Gossypium hirsutum
  unsure (1)..(392): unsure at all n locations; Clone ID: LIB3146-053-Q1-K1-G8
cctgcattctacgaagcctttggacttacagtggtggaagccatgacatgtggccttccggcgtttgccacattgcatggtggtcctgcanagattattgaacatggtatatcagggttccatattgatccataccaccctgaccagaccgctgaactcctggcaactttctttgaacgttgcaaggaggatccaagccactggactaaaatatctgatggagggcttaagaggatttatgaaaggtatacatggaaaatttattctgaaaggctgatgacattggctggagtatatggtttctggaagtacgtctcaaaactcgagaggcgtgagacccgaagatatcttgaaatgttctacatcctcaagttccgtgaattggtaaaatc

SEQ ID NO: 22343 - DNA, 318 bp, Gossypium hirsutum
  unsure (1)..(318): unsure at all n locations; Clone ID: LIB3146-053-Q1-K1-G9
acgattggttgatagggttggccgcaagcagtctatggcaattatgttcggcttancatttatgcgcctttcaccactgctaatccagcagcctgctgtgttaactacttgcttattatttggagctcgtatgaatgccatgggaacctttacagttgcctccatatattcccctgagttatatccaacctcggtgcggacaacaggggcgggagttgcaagtgctataggaagaattggtggtatggtatgtcctcttgttgcagtgggattggtgaatgaatgtcatcaaacagcagctgtagcgctatttttggt

SEQ ID NO: 22344 - DNA, 372 bp, Gossypium hirsutum
  Clone ID: LIB3146-053-Q1-K1-H1
cggacgcgtgggccatggccggttttcttcaagagagagttcaaccggacctggcccttcgttgttggtttcgctgtaactggaaccatcatcaccaagttctccctgggtctcactgaggaagatgccaagaactcgcctttcgctcagaagcacaagaggtgatcaactgatttcaaatgctcatctggtttgaggcttttgtttgttttcattcttttctttttaatttcaatgaactatacaaataacaataaagaaatcatcagttctgagttctcgaagtgtgaaatatgattcttgggggctaagtggcttctcatgaatttgcccttggacaatttaaagcgcctttacaggttccttggtctt

SEQ ID NO: 22345 - DNA, 418 bp, Gossypium hirsutum
  Clone ID: LIB3146-053-Q1-K1-H10
gtacactatcattatacgttctttctttctttctttttttaaattcccgggccttattggctactgtaaacaaaaccctgtttgtaaaagaaatgaagctcgttttggtgacattcctgctggtttctcttgttctcagctcctttctctttgaggagtcgatggctggttcaggtttctgtgcgtacaaatgcaaggcaaggtgcgcaaaggcagattttaaagagaggtgcttcaagtactgtaacatttgctgtcagaaatgcaattgtgttccgtcagggaactacgagaacaagcacgaatgctattgcttcagggacatgaagaacttcaaaggcttgcctaagtgcccttaaatactggcttaaatacatgctattgcttaacttgttgtaaaggccaattttaacttttg

SEQ ID NO: 22346 - DNA, 317 bp, Gossypium hirsutum
  unsure (1)..(317): unsure at all n locations; Clone ID: LIB3146-053-Q1-K1-H11
gaaaacccggtccgacccacgcgtccgcggacgcgtgggtttcagttgaaatgggtttgaaggagcttgcatccttaaaggttgagggagccattgtgaatgcattggcccaacaganaanagcaagttctgttagaatttcattgtctgatatcaagtcaccacgtgatacaaagtttatggaggcatttgaattgagtccagaggagtctgaggatgttctcttcaaggaggcatggcttacatatatttggagaagagccaaatcccatggcatagaggaggatacagccaaagagcgacttaaattttggatc

SEQ ID NO: 22347 - DNA, 212 bp, Gossypium hirsutum
  Clone ID: LIB3146-053-Q1-K1-H12
tcgccaggagttcgtcaaagtcatgatggccaagtaaaggacctctccaactataaccaggatggaaaaatggggtttaaaaaaaaggaagaaagtaacagggcagataagtttgctaaaatatctattaatgaataggacatcaatgtttttaagttacaagcttttgttggatggttctttgtttcatgtttgcatttttttgtggaccg

SEQ ID NO: 22348 - DNA, 301 bp, Gossypium hirsutum
  Clone ID: LIB3146-053-Q1-K1-H2
cccacgcttccgcggacgcgtgggtggcggtggtaccggtgccacgcttagcatgatcgtgggtaagtaccccaccataaaaggcattaacttcgatttgcctcatgtcattgaggatgctcctagctgtcctggtgtggagcatgttggtggagacatgtttgtaagtgtaccaaaaggagatgccattttcatgaagtggatatgtcatgattggagcgacgaacactgcgccaagtttttgaagaactgctatgaagctttgccagacaacgggaaagtgattgttgccgaatgcatt

SEQ ID NO: 22349 - DNA, 301 bp, Gossypium hirsutum
  Clone ID: LIB3146-053-Q1-K1-H3
tgattataacgctaggcccgcctccaaaagatgaaaggaaaaaggatgaccgtttgaaatgcgagggcatacaaagctgtgacacatcaccacaacgtaattcatgaccaaccggctcttttccagaaaacaatttgtcatcgatgatttacattctaagaagcccaatttttcctacgcctatcttaacgataatctccatacgatctatgacgcgaaggaccccacttcgatctttgttttaaagttcacgactcattttggaggtggcaaaactactgaatcagggttgatttatgat

SEQ ID NO: 22350 - DNA, 389 bp, Gossypium hirsutum
  Clone ID: LIB3146-053-Q1-K1-H4
cccacgcgtccgaaagccctctttgcagagttcccacaagtaatgcagcagggttttatgtgcgtacaaggtggcatttgtttatcaagcatgggaagagcagtctcttatgaaagagcagtggcttggaaagtggtaaatgatgaagagaatgctcactgtatctgcttcatgttcataaactggtcttttgtatgaaaattctaaatatataaaaatagggtctagatagcagcttagattagaaaaatctccccctttcaactgttttcttttagtctttttaaaccttttaagtgatatgatacttgtacaatgatgttgaaccaaatggtgtaataagggcctccattttgggttaccctcattttcttttggatttggttcat

SEQ ID NO: 22351 - DNA, 184 bp, Gossypium hirsutum
  unsure (1)..(184): unsure at all n locations; Clone ID: LIB3146-053-Q1-K1-H5
gtccgatttctagcacttcggaccgtatattcccctgtagctttaccactccaagtgcgagcatccgtnttttaaaaaaaaaattggcccaaaaaaaaaaaaaaaaaaataaaaaaaatttcattgaataaaaaaaaaaaaaaaaaataatccgacgtttttggaaggttttttttttcttctc

SEQ ID NO: 22352 - DNA, 390 bp, Gossypium hirsutum
  Clone ID: LIB3146-053-Q1-K1-H6
atttacttgaaattatgggagaatttacaccagagcaacagcgggccttctgccaatttgttgggggtgcgcctagacttccacctggtggtctggcaatgctgaatccaaagcttacaatcgttagaaagcattcgtcgtctgcaattgctgctacttccaatggaagtggaccctcagaatcagcagatgatgacttgcccagtgtcatgacttgtgctaattacttgaagcttcctccatattcttccaaggaaattatgtataagaaattgctatatgcaatctacgaagggcaaggatcttttgatttatcatgagtgagtgttcgcaaccaaaacatacaattgtggagtatagttctgaacaacacaatgtggggtcaactta

SEQ ID NO: 22353 - DNA, 217 bp, Gossypium hirsutum
  Clone ID: LIB3146-053-Q1-K1-H7
cttacccttaaatcaacccacactttacactttatcatcactcgcctttacctcaatacgcgtcttttattcctacacttatacctatcaacttacatactctaaattcaaaactcactgtcattaataaactttcatcaaatcctattacagctccttacaatactagtaaacacctatatcatcataaaatcacttgtctattctcatgacttgt

SEQ ID NO: 22354 - DNA, 344 bp, Gossypium hirsutum
  Clone ID: LIB3146-053-Q1-K1-H8
cccacgcgtccggtcagcagctgttctaccaaggaccgaagggaaaaactctctagatacgaggaataagaagacgaagaggaactttggaaggaaaatcaagtatgcatgcaggaaggctcttgctgactgtcaaccgaggatccgtggaaggtttgcgaagactgaagaatccaacaactcaaagaggcaatagctgttgattaatcaagcaagtaccaagtaaaacaggaatgaagtagctagattgaatgatgcaatgctaagaaaagaaagttttcgagtagtggtgtcaacttcgacatatataagcctttgtggagatcatcttatgacattaaaat

SEQ ID NO: 22355 - DNA, 392 bp, Gossypium hirsutum
  Clone ID: LIB3146-053-Q1-K1-H9
cccacgcgtccgcccacgcgtccgaaaataattgaaagatggtttgtatagcttgcctggggccgctcttcctcgtcccgatcgtcaacattttgcctcttcttttcgatttcgtcatgggtaaaatttacaggcttcttggatgggaataccgtaaaccagagagagcaccgccggcgtgtccgtataaaccggctgccaaactggaaaacaatagtaaagtgaccccagaaacagaaccaggtgcaccagagtctagttcgaaacccgttggtatgaccaatggcaagcaagattgatactgaaagcttttccatggtactaaaatcagacataaacctttttgaagatgtacttcttaaggttgttaatgggtaggggggaaagatcac

SEQ ID NO: 22356 - DNA, 408 bp, Gossypium hirsutum
  Clone ID: LIB3146-054-Q1-K1-A1
ggaaaagtgagagcatatgttttaggagctttgtaagcatttcaagaaatcaataaaaaatctccctcacggagaatttccagtaaaactattctcaggaggcttatagccaaaatctaggatttaggagattcaaagagtttctgaaaattttcagagatcttttctggaggcgttgatacggcttggtggtaagacccgagaggcggcagtaaattccagtagccatccgcttgaaaagagaaaatcagcagaaacaggagaatcattccaaccaaacaaatccagaagaacgatggaaggtataaaaaacttaaattttatacaggagtcatatctgaggattcagagtaatctgaaatatttatctgaggaacggcagtgccgtactatctctatgataaacta

SEQ ID NO: 22357 - DNA, 228 bp, Gossypium hirsutum
  Clone ID: LIB3146-054-Q1-K1-A10
acatccatatttatatagctctatatacgtcatccaagacttaacatatatcattcacgcaggggacaggtgtaagttcttacatattgagataataacccttttgtcatatatgacgttacatgtatctgccaccacgtgcctgcagtgaggcttcagtcattgagcagaaatccgtataattttttatttggttaaatgaatatgctgctgcttgcaaccattgaa

SEQ ID NO: 22358 - DNA, 316 bp, Gossypium hirsutum
  Clone ID: LIB3146-054-Q1-K1-A11
ggggaagccaaaatcgtgatgcatcattcgaggaatgcgtgagctcggattgtttaagttcaatggaatgcatgcaagaagctgcagacgagcctaattttctggatttcactggaatggatttggatcctgtttacggaatgaggagagcatttagtgaaggcgatatacagacacttggcaacggtgatgtgagcgttatccattcttccgtcaagtggccattaattgtcagaagctgttcttctgaagatcgaagggaaaagctttctagatacaggaacaagaagactaagagggattttggtcggaaaat

SEQ ID NO: 22359 - DNA, 295 bp, Gossypium hirsutum
  Clone ID: LIB3146-054-Q1-K1-A12
aactgtttccctctaggcttaaagaactaagaataacagaccgttggaacttaaggttcattccaagtgtagagggtggtatctcttttcttcaacaacttcatgtgatgtggtgtaaaaaattatgtaaaataggagagggactgctcacctccacatgtctaacagatgtggacataagtgaatgtcctaatttgaggtctgctcctttcaatggccaatctcaatctcttttgagtcttcgattacgcaactgtgaagaattactggagatagagggcggattatctgcaag

SEQ ID NO: 22360 - DNA, 384 bp, Gossypium hirsutum
  Clone ID: LIB3146-054-Q1-K1-A2
tggaagaagagttgaggaggaccaagaaaactggagatgcaacatccatcatcaatcgcaccaaaaaactatccctcaacggctgcaatcggaagagcgtcgctgtgaagaacccaatagcaagtacatttcctaccgtccctgcaccatagcttttcaacttttttaactagttaagatgtgcgccgggggtttgggggtggggggggggggctctgttattcagctttctgctttaaaaatctaattctatgatgcctgtcttttttttttaaactgcgatggcttattagctgacgaaggagtgaattcgaattagcatttgctgagagatttttaatgtctgaaatagttacaaatgctttggttaacatctgctgtgcc

SEQ ID NO: 22361 - DNA, 405 bp, Gossypium hirsutum
  Clone ID: LIB3146-054-Q1-K1-A3
cttggcaattaaattgatgtaccagggtggtcagactgaagtagtagccatggatgtagctcaggttgggtctgcaaactggaacttcatgagcaggaaccatggggcggtatgggacacaagcagagtcccaaatggagccctgcaattcagatttttggtgacatctgggtttgatgggaagtggatttgggcaaaaagtgtgcttccagctgagtggaaaactggagttatttatgattctggagttcaaatcactgacattgcaaaagaaggttgctctccttgtgatgacagccactggagatgagatcttagttgccaattacacatatagtgaatttgaatgttttagaagattaaagaaaatgaatatatagatagattttccttgtctctgtaatt

SEQ ID NO: 22362 - DNA, 400 bp, Gossypium hirsutum
  Clone ID: LIB3146-054-Q1-K1-A4
cccacgcgtccgctgaagtttaggaatgttacaattgatatcaaagtggacaccagctccaataacatcatactgcttgggacctgtcctatttggcggaaatgcttttcaattgaaggatctctttggttgattatttaccaccataacagttgatgaacctgcacccgtgctaaatgcaatctttggcttcagagtccctgatcagaggtctgacaagattgaactccagtatttgcatgagtatgttgggataagctcaagcattggattgactgtcaacccgatagttaacttctcggctgtgcttggaacaaatgttattgcacaaggtactaaacttgagattatatcatttggaatgttcagccgtagataggtatatagagtccatcgataa

SEQ ID NO: 22363 - DNA, 395 bp, Gossypium hirsutum
  Clone ID: LIB3146-054-Q1-K1-A6
ggaacaacttcaaggttcgagtgcgatggtattaccgtcctgaggaatcacttggaggaaggaggcaattccatggagcaaaggagctgtttttgtctgaccactatgatgtgcagagtgctcaaaccgttgaagggaagtgcattgttcattctttcaagaactacactaagcttgagaatgttggggctgaggactactattgtagatttgaatataaagctgctaccggagcctttacacctgatcgagttgctgtgtactgcaaatgtgagatgccctacaatcctgatgatcttatggttcaatgtgagggttgcaaggattggtatcatcctgcttgtgtaggcatgacaattgaagaagcagaaatgttggaacactttgtctgtttt

SEQ ID NO: 22364 - DNA, 391 bp, Gossypium hirsutum
  Clone ID: LIB3146-054-Q1-K1-A7
cccacgcgtccgcccacgcgtccggttgccacaaaatgggcactgcaatcagagatcgaatccaagagcggttaagggggcagctgctgcaaaacggcaagggtgatgacgatgatgatgaagaatattattacgatgatgattattatgatgatgaagacgacgacgacgaattctactatgatgacaacgaatataatgatgagaaagatcagaaaaatgagaaagaacagaaataaaattgtttctgcttccagtttttactaatattatggggtaccttaaaagttctaaatagtagtgttgagggatgtgtgatatgtcgatgttgtagctaaatcgagccaggcattgagcagaagctgtgatatgtactttgattattgatgct

SEQ ID NO: 22365 - DNA, 394 bp, Gossypium hirsutum
  Clone ID: LIB3146-054-Q1-K1-A8
cggacgcgtgggtgtgtctcagatattggtttagcagcagtgatgagcccgatgcctgtgcctgtaatgcgtgctgcaggttaccgtgccccggaggtaactgatacaaggaaagcaactcaagcatctgatgtatacagtttcggggtctttttactcgagctattaaccgggaaatctccaatacatgccaccagtggggaggagatcgttcatttggtgagatgggtgcattcggtagttcgagaagagtggaccgctgaagtgtttgatgtagaactcctacggtatccgaatatagaggaggaaatggtggagatgctacaaattgcaatgagttgtgtggcgagggtagtggagcagagaccgaaaatggccggactagtgaaaatgg

SEQ ID NO: 22366 - DNA, 93 bp, Gossypium hirsutum
  Clone ID: LIB3146-054-Q1-K1-A9
ggacatgcctggggctgactaccagctcaccaagcttttaggcctccgcccctccgaaaagcgcctcatgatgtaccaacaaggttgcctcac

SEQ ID NO: 22367 - DNA, 404 bp, Gossypium hirsutum
  Clone ID: LIB3146-054-Q1-K1-B1
gggaggcaatatttcggggccgtatccgccggcccaagtgaagccatggagttcatgcacataacacatgaattattttggctcttaggtgtgatctatttgggggattatttgcccatttggaggtgggtggatccttatggatgtgagaaaaggatgagggaagtagagaaaagagtggatgatttccataaaaggatcattgaagaacataggagggcaagggaattgaaaaacaaagaatatggaaaggatgatgattatggtgaagaaatggattttgttgatgttttattgtcattacctggtgaagatggaaagcctcatatggatgatactgatattaaagctctaattcaggatatgatagctgcggcaacagatacatcggctgtgaccaacga

SEQ ID NO: 22368 - DNA, 320 bp, Gossypium hirsutum
  Clone ID: LIB3146-054-Q1-K1-B10
tccttctgcagttagtgttgtttgcatggcgctgggagggagtggccttgctgtgttttggaggaaccgaccaattcccgtggatgataaggatgatttcatggaatgagtgtttttccaatctcatttttaggcaacttttctttttcttttgatttcaaggggaagccccttgttgcgtggatttaatataatatatttttactctcaggtgaattttgaacatggacatatcaacttttctttttcatttagagaatactaagtgaaagttgggaaattaattttcaattggtattttctttttgataattcagctg

SEQ ID NO: 22369 - DNA, 132 bp, Gossypium hirsutum
  Clone ID: LIB3146-054-Q1-K1-B11
agtaaaatggttattcttttcatgtaatcgagcataaaggccatctccatctgaagtagtcctattgctcatttcttatatgtaactggggaaagagaatgcagtttccctatgcgcatactgaaaagttgc

SEQ ID NO: 22370 - DNA, 159 bp, Gossypium hirsutum
  unsure (1)..(159): unsure at all n locations; Clone ID: LIB3146-054-Q1-K1-B12
ctatttttcnaaaattcaccatttaaaaggggtcaaacaaaagtcctttgcgtacacactaaataccgcctgtgaggtcgaggctcaaccgccggaaaacctgcgaacaatgcctgcacagagccaaacttaccgatgagaggtgccagggctttcttc

SEQ ID NO: 22371 - DNA, 217 bp, Gossypium hirsutum
  Clone ID: LIB3146-054-Q1-K1-B2
gtgaaagaataggaactaggaacacttgttgatttagaaaaaggaagattgtccatgtgaatagctttgctttagtgagtggttcaacgaataatcaatcagactgtaaaaaacatatgtataaatgttttgcatttaatttgaacttaattcattgctggttgggtgggcaaaaaaaaagaatgatttccataaaaggatcattgaaaaacatagg

SEQ ID NO: 22372 - DNA, 366 bp, Gossypium hirsutum
  Clone ID: LIB3146-054-Q1-K1-B3
ctctgaacttgtaaatgcgttttcttgcatgctcagcgccaacccaaggaggaaacgcggccgtaaagggtttaaacagcccttcatcatatgagctaagcttatattgaagattctgcaaaggttcctatgaagtattcagctttttgcatgtgttgaaagaaaaccgagtacgaccacagggttgctgttttggcactacctagcaagctatgttcataccttggattatatactatatagtcactatacgtaacatagctgtgttttggcagttaggtctgctgtcagcttgttatatccgctttctagtttaatacatacaaactccaattatatctatattgatatatatttccattgagc

SEQ ID NO: 22373 - DNA, 400 bp, Gossypium hirsutum
  Clone ID: LIB3146-054-Q1-K1-B4
attttgtttgacaagaagactggtactcatttgcttcagtggccagtggaagaaatagaaagtttgaggttgaagagttacgaatttaaccaggtgaaagtccaggccggatctgttgttcctctagatgttggtccagccacacagttggatatcatagcggagtttgagatagataacgaggcgttagagaaaacaacagggtccaatgtaacattcagctgcagcagcagcggtggaactgtagaacgtggggcattgggaccatttggtctgttggtgcttgcggatgacagcctcagtgaacagacacctgtatacttctacatcgccaaaagatccgatggcaaactcaagactttcttctgcaatgatcaatctcgatcatctgtagcatctg

SEQ ID NO: 22374 - DNA, 401 bp, Gossypium hirsutum
  Clone ID: LIB3146-054-Q1-K1-B5
cccacgcgtccgaacgtctataggttagcttgagttttgatgtgctatcggggtaagacatagtcttcaagtcaccttggatgtagtacctgtgttaaaacaagataaccatgattgtccttttatccatgggtgcaggaatcaagtgcagccaaaatggcagaaagcaagctgcaggaaaatttgagaaagttgcagggaatcagcttgaagactacagagatgcaagataatgcaaaatcattctcttccatggcaagagaactgctgcgcactaaagaaaaagaagataaatgatatctcctatatagcctataatattgttttggattaaaaaggtttgattttttacatatatgtccatgtttgtatagcagtgaaaatcaagagtacttgactga

SEQ ID NO: 22375 - DNA, 379 bp, Gossypium hirsutum
  Clone ID: LIB3146-054-Q1-K1-B6
gctagttattgcattagttgttgttcacgctagtgcaagaaatgtgcccacagctacaactgtgcccactagcactactcgcagtagtgtaccaagtggtgctactggtgttggcgaccaaaagaactttctcacttacggtggcgttgggggctactctggaattggctctaatggcttgccatttggtggagtggggggtctgggtgggattactcccctcggtggtgcaggtggacttggaggtggagtcgggggcattggtggagtacgttgacttggaggaagtaatggactcggtgggctcgggggatttggtggctttggtggcgagcggggtgcttgttgtggatttggaggtggagtcagaggtgctgtt

SEQ ID NO: 22376 - DNA, 399 bp, Gossypium hirsutum
  Clone ID: LIB3146-054-Q1-K1-B7
gttgaaaagactggaggtccgacagagagctatgatgatttcgcagcctcattgccggagagtgactgccgctatgcagtttatgacttcgattttgtgacttccgagaattgtcagaagagcaagatcttttttattgcgtggtctccttctgtttcgaggatccgttccaagatgctttatgcaacatcaaaggacaggttccgaagggaattggagggcatccattacgaaatccaggcaaccgacccgactgaaatggatcttgaggtgattagggagcgtgcacattaagtgtccgctcccagaattcacatgcttaggaaaacttcctagaggtacctttagggttgttttatggttcaattaaattgcagaattaagtcgagttacccgact

SEQ ID NO: 22377 - DNA, 334 bp, Gossypium hirsutum
  Clone ID: LIB3146-054-Q1-K1-B8
gtttaaaatactacctgttcaacttacttttatgatgatttcacagccatatggcgggtgagtgactgccaatattcattttatcacttatatattgtgacttaaaataattgtcagacagaaaacatctttttgcttgcgctgtgtttttcttgtttgaggatccaggcaagaatgcttattccaaaatactatgacatgttatgacaaaaatagatgcacatacattgacagaactattcaaccgatccgactaaaatgaataaccatgtgattatttagcattcacaataaagatgcactaccctaatgtacatgcttaataaaactttat

SEQ ID NO: 22378 - DNA, 296 bp, Gossypium hirsutum
  Clone ID: LIB3146-054-Q1-K1-B9
catggacgagatcagcaatgctgcggtggtgcacttcaacgggaacatgaaaccatggcttgatatcgccatgaaccagttcaaacctctttggaccaaatacgtggactatgatctggagtttgtccaggcctgcaatttcggtgtttaaataaaacatcatcattgaaggttctgcactggtaaatgcttcaaaatctagtttttgttacagcaagagttttcaccataccatctgcattattatatcttcttgcacgttaaaattcaattgtctctaattctgcgttgaagaa

SEQ ID NO: 22379 - DNA, 329 bp, Gossypium hirsutum
  Clone ID: LIB3146-054-Q1-K1-C1
gcaaaaaaaatcactcaaaactgcagtctcgaattcatctaatactttctcggcatctgatcatagggttacagaatcaactgtaaaacccctatacaattagtggaactggattaaaagttactctgttacttgccaatctccataagcggcaaaaataccggaaatattacatgcttctctaccacctgaaagggtaagaacttttcaactgatttctgtactagtcaccaaaactggcgaacagttgagctactaattgttcacgggttactaccattattccttttggtccaagggctgaagttgcacatgccgacaaggtcttt

SEQ ID NO: 22380 - DNA, 321 bp, Gossypium hirsutum
  Clone ID: LIB3146-054-Q1-K1-C10
agagccatgctgttctagctctccaggaagctgcagaggcataccttgtgggtctttttgaagacaccaacctttgcgcgatccatgccaagcgtgtcacaattatgcccaaggacatccagttggctcgtaggatcaggggagagcgtgcttaatttccagaagtgtggatcagtcgcttagaagaaactattgtttatttttaggcaaatgtattggttttttgttttttctaatcatcttttaagccatgatggtagtggtaggttcaatgtgatgtgatgatgaagtggggcgtctgatatgttaatggacaataac

SEQ ID NO: 22381 - DNA, 307 bp, Gossypium hirsutum
  Clone ID: LIB3146-054-Q1-K1-C11
gaactgaggatttagtggtgacagctgatgttaaaaggctggaaagttgggttcgagcggaggcagaaaagtctgccaatgtgattgagaaaagacatcatttggaactggatgcatttgctgaacaaatgagactgaaagatgagaagttagagggttttcgctggcgactgttgagcatggaactagagtcggagcgggcgcaggcccatgttgatggactgaaccaggatgtatctcagctcagacaagacaacatgaaattggaggccatgctattggagagagaggagaattaaattccttg

SEQ ID NO: 22382 - DNA, 235 bp, Gossypium hirsutum
  Clone ID: LIB3146-054-Q1-K1-C12
ggtgcttggcgagcttagcctggcagcaagcgtgtccaaggcatagcctggactgtccaatcacagcacatcgcgactactgcgctgcgcgcatgccaaggctatcgaactggtggctcatggacgtacagttggctcttatgagcacgctggagctggcgctgttggaggtcgtgctggtcggtctccaaatagaaacgctagtgcatgtggaggcagatattctagggagcgg

SEQ ID NO: 22383 - DNA, 180 bp, Gossypium hirsutum
  Clone ID: LIB3146-054-Q1-K1-C2
gcaaaaaaaatccctcacaactgcattctcaaattcatctaatactttctcctcctccgaccatagggatacaaaatcaactgtaaaactcctatttaattaattaaactggattaaaagttactctttttcttggcagtctccataaacctccaaaattctgcaaattttacatgcttc

SEQ ID NO: 22384 - DNA, 404 bp, Gossypium hirsutum
  unsure (1)..(404): unsure at all n locations; Clone ID: LIB3146-054-Q1-K1-C3
ctcagatgagaagcgccacgagacagcctataccaaaatcgttgaaaagctgtttgagattgatcctgatgaaacagtcctggcatttgctgacatgatgaagaagaaaatcgccatgccggctgagttcatctatgatggcagagattataacttatttgaccactactcagctgttgcccaaagaatcggggtttacactgctaaggactatgttgatatagtagagcacctggtggatcgatggaaggtgaaggagctagctgggctttcagccgaggggcgtaaagctcaggactacttgtgttcacttccttcgagaattagaaggttagaggagagagcgcaaganaaggccaaggaagcacccagtgtcccattcagttggatatttgatagagaag

SEQ ID NO: 22385 - DNA, 346 bp, Gossypium hirsutum
  Clone ID: LIB3146-054-Q1-K1-C4
ctcatatgagaagcgcctcgagacagcctttaccttaatcgttgaaaagctgtttgagattggtgcctgatgaaacagtcctggcatttgctgacatgatgaagaagaaaatcgccatgccggctgagttcatctatgatggcagagattataacttatttgaccactactcagctgttgcccaaagaatcggggtttacactgctaaggactatgttgatatagtagagcacctggtggatcgatggaaggtgaaggagctagctgggctttcagccgaggggcgtaaagctcatgactacttgtgttcacttccttcgagaattagaaggtttaaggaaagagc

SEQ ID NO: 22386 - DNA, 234 bp, Gossypium hirsutum
  Clone ID: LIB3146-054-Q1-K1-C5
ttacctattctttttttttttttttttttttatttttttttttttttttttttttttttttttttttattggatttttatattattttattttttttattaaattataattaaaataaaataatttccattttatttataatttataaacaagaaaaaacctaataaatcaaaaaacaactaaaaaaaaaataatcaaaatcaaaacacaaaaaccccatgtaataaaatagaa

SEQ ID NO: 22387 - DNA, 393 bp, Gossypium hirsutum
  Clone ID: LIB3146-054-Q1-K1-C6
cccacgcgtccgcccacgcgtccgcccacgcgtccgaaaaactgtctgaagacaatgtgaaggacttatcaagtgatttgcagaaactcacagatgagtatatgaagaagattgatagcgtctacaagcagaaggagaaggagttgctgacggtctagtgtttgtttgtacaaagatgtaacgtgttgatcttccatttctatcgagatgaaaagaaaaataaactggttgtctttgctttactttggtgcatagtatttatatcttacttgcagaagagcatgttgaaagttaatatgttatgggtagatatcttgttttggatcgaagtgggaaaaaaaaaaacaaaatgcatcacctctgcttaaaattttttagtgtttatgagagctc

SEQ ID NO: 22388 - DNA, 364 bp, Gossypium hirsutum
  Clone ID: LIB3146-054-Q1-K1-C7
catataagtaaataataaaaattatagataatgttacttacaagtgtgttatttatactaaggatgtggatggagaggaggaggaggaggaaaaatatatgaacgacttgtgtataaattgataacatgcttgattatagttgataaacgttaaattagaaatgatataatgttttatttgtatttctataatccgaacttaatatttaattgctaaaattattatctaatatgtatggtaagtgcattgggatgattatttgaattggagtgaacattggttgaaattgaaaagtgaatttaattatttgctagaaaaaaaaaagaaaaggaaaaaaaaaaaaaaaaaggcataaaaagggcc

SEQ ID NO: 22389 - DNA, 389 bp, Gossypium hirsutum
  Clone ID: LIB3146-054-Q1-K1-C8
tgcctgagacaaccacaaagaaggggaaggattatcctgttggtcctgtgcttcttgggttcttcatattcgtcgtcattggatcatctctcttccagattatcaggacagcgaccagcggaggtatggcataagtctgcacttctggtgttaaggaattgcgaggagactggtcttgcattgggcttttcttttctgttagttttgtagggaaactgatgatatatttactagagatatgcttacgttgtgaaatgttcggaatttgaataagacctcccctttctttgtctggtcattgtgctttgtctgctacttttttcatttatgcaatgagatggacaaaaaactgatatattagtggttgaaccgagttacccgagtaactt

SEQ ID NO: 22390 - DNA, 320 bp, Gossypium hirsutum
  Clone ID: LIB3146-054-Q1-K1-C9
ttaccgtactcgccatagctatgctaccaaatccaatcaacaccgtgtcgttaagacccccggtgggaaattagtctatcagactactaagaagagagcgagtgggcctaagtgtcctgttactggaaagcgaattcagggtattcctcacttgagacctgctgaatacaagcggtctcgattgcctaggaaccgtaggacggtgaatcgtgcctatggtggtgttttgtctgggagtgctgttagagaaaggataattcgggccttcttagtcgaagagcaaaagattgtgaagaaggttctgaaaatccagaagacta

SEQ ID NO: 22391 - DNA, 401 bp, Gossypium hirsutum
  Clone ID: LIB3146-054-Q1-K1-D1
gaagagggagctttgatcaacaaaattccatcaatggcgggggtttctttgaagtgtggggactgtggggctctgttgaaatcggtggaggaagcccaagaacatgccgaactcacctcccattccaacttctcagagtccactgaagctgttctcaatcttgtttgctcttcttgtggcaagccatgccgatccaaaatcgaaagtgatttgcatacaaaaagaacggggcatacagagtttattgataagactttggaggcagtaataccaatcagtttggaggttccaaaggtagctaaggagtcagaggaggctattgctgcaggtagcaccggtgagcctgaagagatggttgttccagaggttgacaaaaaactgcttgaagaactggaagcaat

SEQ ID NO: 22392 - DNA, 324 bp, Gossypium hirsutum
  Clone ID: LIB3146-054-Q1-K1-D10
aaagagttgggaagtattgactcggcaggagcgaagggagaagggaggaataaggaggtgacaactccactgaggcgatcatgccagaatccaaaatcgtgcagacattgtatccccatgaaggcgagagtgaagagtataatttgaataattgtgggcattatcagaaacagcatctctgctgtttcatgttccagaaaagtaatgtaacgtatgtagaattagaaattgttctactctaatcttgtaggaaatgatcattataaggctgactaattgttggtcacttccaattttatgttaactatcagtttatcaccttta

SEQ ID NO: 22393 - DNA, 280 bp, Gossypium hirsutum
  Clone ID: LIB3146-054-Q1-K1-D11
agtccctcttcgggggttcttcttgtatagcgccctcatcgaactctgcacctgatccgttgctgtcttcgtttattttgcctatcgttgatgattctgttagtgtgcagcctcagttatctagcgaaaccaacacagctacgaaaagttcagatgtgaataagtcagagagaaatgtgcagtcatctcctctttcagtcaaggatcaggaagagaaggcaaaaagatgtgaatttgttaaaagggctgctgttatccacaattcttgatgatggtttat

SEQ ID NO: 22394 - DNA, 59 bp, Gossypium hirsutum
  unsure (1)..(59): unsure at all n locations; Clone ID: LIB3146-054-Q1-K1-D12
gcactggccntccgtatacaacgttcggtctgggcaacccctgacactaccccacataa

SEQ ID NO: 22395 - DNA, 304 bp, Gossypium hirsutum
  Clone ID: LIB3146-054-Q1-K1-D2
cccacgcgtccgcccacgcgtccgcccacgcgtccgtgacatgggaaataacacgaaggttcatacttctggttttttaacatctatcttaccaatttccacgctgtctagtttctcatgtcatgcatattattaggctgcgattataagatttggtctgagagagatgagagagttctgcaagctgttattttcatccgttaaggatgataccttctttgaaagctgtggagttgctgatgttatcacaacatgcttcggcggaagaaacagaaaagttgccgaggcatttgctaggaatgga

SEQ ID NO: 22396 - DNA, 153 bp, Gossypium hirsutum
  Clone ID: LIB3146-054-Q1-K1-D3
ccgcggacgcgtgggcggacgcgtgggcacaaattcagttactttatatgtattcccactgccgctccatttgatctcttttagagatcaaacattttccaaatgcttaaaccatttttgtgtgtaaaatttggactgctacagttgggtttc

SEQ ID NO: 22397 - DNA, 385 bp, Gossypium hirsutum
  unsure (1)..(385): unsure at all n locations; Clone ID: LIB3146-054-Q1-K1-D4
cccacgcgtccgggccggccacctctgccgtcaccgcgagccactgtcgtcggccgccgtacacggcgaccgaaaaaaggtatggcgaggatcacggagcccgtaggttgcgcgagtaacggcgtacgatacggaggtgggtagcagcgtgtgggagggggctgcttcgggtgtgcagcgctggagagatgttgctgctagggttttttcattaggtttaggtgggttttggggtattgggttattgggtgtattgggcttagagattgngttaggtttaattagttaattgttttgggttttaaatgtattgggccctgggcataaattgggcttaagacgagtaatgttaataagagttattgaaataaacaatgttatgatt

SEQ ID NO: 22398 - DNA, 394 bp, Gossypium hirsutum
  Clone ID: LIB3146-054-Q1-K1-D5
cggacgcgtgggtttcaatgacaagaagatcatactctcttattgctctcacctttctcaccatttcctttccatgtttagaaaatgccaatggttgttgcaatgtatacaaaggtaagtgggtgtatgacagctcctatcctctctacgattcatcagcctgtccattcatccacaaggagtttaattgcctcaagtatggccgccctgatcatctttaccttaaatatcgatggcaaccaagcaagtgtaatttgccaaggtttgatgggacgcatttgttgaggagattaaagggcaagaagataatgtttattggggactccataagtataaaccaatggcaatctctgttatgcatgcttcacgctgcagtgcctgctacatctggtat

SEQ ID NO: 22399 - DNA, 231 bp, Gossypium hirsutum
  Clone ID: LIB3146-054-Q1-K1-D6
atgattaagtttctaaatgtttgcccctttcttttttgttttgttttccatcttttctccattggtggttgtgccacaataagtcataagatggtagagaaatttctaaattatgcactactctcttgtaattttgttatataaaacacaagtcctttaccgattcagtcaactattagcttttaatttatagttaaataaactctttaacatcaattgttatttctcttg

SEQ ID NO: 22400 - DNA, 278 bp, Gossypium hirsutum
  Clone ID: LIB3146-054-Q1-K1-D7
cggactcatgggttaacccacgcctcctttttcgcttgttctgaaatcccggggtggtacattcttgtttcaaacacaaaccatcctaagataatagtatacatccatatatcatacaatactattttaatattcaactctttgactcacaacttctataaacttttagacaactataagaagataatccaccgattactcaactaatccacatttaacagaattgctctgaaagagtgaaaaagaagatctccacgcgctagatgatccaagaatgc

SEQ ID NO: 22401 - DNA, 353 bp, Gossypium hirsutum
  Clone ID: LIB3146-054-Q1-K1-D8
ctgattcagatactaactatcttttcctttaaaaatggttactttcaggttgcatcggtaccaatttgatgggagggctcacccaacagagagcgatgagcattccatgatctataggatgaagctctgggccaccaatgaggatcgggcaaaatctaagctctggtacttctcgatgaaactgaaaagggtccataagagcattgttcaaggactttccctcaatgagatttctgataataaccctaccgagagcaataattacggaatcctactccgtttccaaagacgaactggctaccacatcatgtacatacagtaccgtgacactactttgaactgagctgcttaac

SEQ ID NO: 22402 - DNA, 195 bp, Gossypium hirsutum
  Clone ID: LIB3146-054-Q1-K1-D9
gggcatttcggattggaactcgctcttttggatcgctcaccccggtggtccagccatattggatcaggttgaggcgaagctagcccttaaatccgaaaaactcctagccactaggcacgtgctttcagaatatgggaacatgtcaagtgcttgtttgctgttcatattggatgagatgaggatgaaattaattga

SEQ ID NO: 22403 - DNA, 402 bp, Gossypium hirsutum
  Clone ID: LIB3146-054-Q1-K1-E1
cccacgcgtccgaaccccatattccgaggctaaacttcccatcaagagtgatgttcccgaaggatgtgtgataatacgagaacatgttccgattaccaacctcttttcttgtctttggttcaatgaagtcgatcgttttacttcccgagaccaaattagtttctcaaccgttagagacaagatcgcggcgaagacaggttggatggttaacatgttcttggattgtgaacgccgtaactttgtcgttcagcaatatcataaggaagttttagcgtatttggctcaaatggctcctccggttattaacccgccaccgccgccgacgtcgtcacggtctttcgtccgatgatccaccaaggattttcgcactcaaaacttcggatgaaaggaacaagaacatgg

SEQ ID NO: 22404 - DNA, 285 bp, Gossypium hirsutum
  Clone ID: LIB3146-054-Q1-K1-E10
gattggacgttctggtcaattcggacgaaagggtgttgctattaatttcgtgaaaagcgacgacatcaagattcttagagacatacagcagtactacagtacccagattgacgaaatgccgatgaatgtcgcagatctgatatgagaaatgctttcataagtgcttggaccggaacttgaagggtacggttgaacattttccatggtgttggtgtaatcgaatcatctatcttgttgcatgtttgtgtgtgattgggtttggatgctacgcggaggtcgattaac

SEQ ID NO: 22405 - DNA, 210 bp, Gossypium hirsutum
  Clone ID: LIB3146-054-Q1-K1-E11
ctgatgacgatgtcttcattaaacgaatagtagctatggaaggtgatactgctgaggctcatacttgaagacttttcgttacttggattggacctactgtacagatcatgactgaagctccatcaaatgaaagggcaccaattgaagtaccctagaattcctgctttgtggtgggcgacaatcgtactgatagctattattcccacgttt

SEQ ID NO: 22406 - DNA, 246 bp, Gossypium hirsutum
  Clone ID: LIB3146-054-Q1-K1-E12
atggtgaggattgtatctataatgaaatctacttttagctttaagggatagtgttaaattttattaatgatgattggtttgaccttcgtggtcaaagagggtaggttagtttgcgaagctttgatgtgtaagctgatagaagaacagatgatccagtaacatttatagctaaatacaatgaccaagaatatgagttgctctatagactgtgcgatttaactattgacatttacaaggattcacgag

SEQ ID NO: 22407 - DNA, 380 bp, Gossypium hirsutum
  unsure (1)..(380): unsure at all n locations; Clone ID: LIB3146-054-Q1-K1-E2
ctcatctagttggaggaaatctctacccttttaagctgaaggcaaatgaatatgggggtactatagtcatctaaatggtaacccgggagacagtcccttttggttgcttagcttagtccacatgttattctcttaatgtcatatattcatccaaccttatattcccatggcatggtgactctcgaggaggagggaaccttttgactattattgagagatcataacanatggaagaacaaattgatttggtggggaaggcatttgcggatcattactaccatctctttgataatgatcggcctgcattgtcttctctctacaagccctcctccatgttgacctttgagggccataagatacaaggtgttgaagacatcact

SEQ ID NO: 22408 - DNA, 364 bp, Gossypium hirsutum
  Clone ID: LIB3146-054-Q1-K1-E3
caatttttctcaaattgtgagcttgcagagtgtgatggatccattaatccgagcttgactatgtgctttgcttcaacagtgataaatgccaagttttctgaaatatatctaaggattccttgttgtagaaaatacgatttaattttctcagtttcctgttgctttagttttctaaagattaggatttatatgggatcaacttttatttttggggtttaaactttaaagtgatgaccaaactgtttaggaagacagcttcagttggaaaaaaaaaaacatcaatggcaacgtgtctggtcacaatgtgatatgtgtttgtactttggcttccacttcccattaatggtaaactagtcttttggtt

SEQ ID NO: 22409 - DNA, 374 bp, Gossypium hirsutum
  Clone ID: LIB3146-054-Q1-K1-E4
caaaattcctacctgcaaaccaagatggtcaagaattttggtatcaatgtatctgttgagaggagactgaattctcttcctgatttagatccaaatgtggttcatgaggaagggagtgggagaagtcaagtagatgttcaggcagtgtctagaaaggggaagaagtcgcaaaaccgtttgatgaatggaaaaagagtggggaagaagaaaatctcatggcaagttcaggtggcatttaagatctaatgagtaatgagtattcttttcactcattgttttagcagttaactgaggtaggcacaagaattaaccgtctccctgtaataacttctgattggcattgctacagatctttatatcattgtcttacactt

SEQ ID NO: 22410 - DNA, 214 bp, Gossypium hirsutum
  Clone ID: LIB3146-054-Q1-K1-E5
atttttttctttcctatttgttaaatgttacacttaacgcatttgggttgggcatgtgaattgagtttccttgtctttgacagttgacacatgtgaactggatttatgcgcaatttatgcttgtcttggaactgagttgtactttggtctttctataaataggtgaaacacttaacaaaaaaaaaagggaaaaaaaaattaatttaagggagtt

SEQ ID NO: 22411 - DNA, 393 bp, Gossypium hirsutum
  Clone ID: LIB3146-054-Q1-K1-E6
cggacgcgtgggttgttctggaagtagtgaataagatgctatccttgcaacgcagccttgcatcttatatgaccgaccaagacatcgaaaagggcatcttgtatccatctatcaatagtattcgagatatcacagctaaggttggggcatcagttgtgcgagctgctgttgcagaggaagtggcggaaggatatggaaaggttgatcctgaggaactggcctacatgtcaaaagaggagacggtggaatacgtacgtcgaaacatgtggtaccctaattatagcccgctcgttcaaaagaagtagtctttattcctttttgtcacaattttgatttggagttttcgggttatttctttgtggactccgaccccaagttctgcggcagaaaaat

SEQ ID NO: 22412 - DNA, 392 bp, Gossypium hirsutum
  Clone ID: LIB3146-054-Q1-K1-E7
cggacgcgtgggcggaaacacccttagatagtcggtccctcatccacctcctagacagatcacccttcaccttcgagtcatcttatctctcacctcaaccggtgctgttcaggcagaactcactctctccactcgattctcagccggcagccgctacaacccatccctcacagcctctttccgtcactcaactcaacctttgcaatcgacagtcagtcgcgcggctcgcaagcagtgcaatcggtagtcagtcgcgcggctcgcaagcagtgcaatcggtagtcagtcgcgcggatcgcaagcagtgcaatcggtagtcagttgcgcagctcgcaagcagcaagctcgtcgccgccgtctcacaccctgaggtttctgcaaatttattaata

SEQ ID NO: 22413 - DNA, 391 bp, Gossypium hirsutum
  Clone ID: LIB3146-054-Q1-K1-E8
tctcgctctggcgggtataggcgatgcgcttgttcaaggtgggctcattggagcggctggggaattgcctgaacgctacatgcaggctatcgttgcgggatccggcggttctggggtccttgtttcaatgctaaggatcctaaccaaagctgtatttccacaagatggtgatggcctgagaaagagtgcctacctttacttttttactagcattgtgtttatggtcatatgcatagtcttgtacaatgtggcacacaaacttccgattatgcagtactatgaggagttaaaggctgaggctgttaaggaggaaaaagcagagaaaggtcccatgaccgggcctgtttggagagcaaccttgtggaatatagtaagaacagtcaagtggtat

SEQ ID NO: 22414 - DNA, 238 bp, Gossypium hirsutum
  Clone ID: LIB3146-054-Q1-K1-E9
gatgacagggtctttgaaaggggtggagtaaaattgatagttgataacatatcctatgattttgtaaaaggagcaacagttgattacattgaggagttaattcgttcggcgttcctcgtaacaacaaacccaagtgcagttggagggtgcagttgtaaaagttcattcatggtcaaagagtagcctttgattttcagctttgccaaaccagttagtaaatcatttttctaccattttt

SEQ ID NO: 22415 - DNA, 328 bp, Gossypium hirsutum
  Clone ID: LIB3146-054-Q1-K1-F1
cccacgcgtccgcggacgcgtgggtaaacaccttgggggtccattgcttttaggtaattaggtaattttattccagtttcagaaagtatattattcatttgaattgtgaatcattcttgaaagtattatagtgcaagttccctggaaatatcttttgttgatttgactgccaatacatatatatggcaatttatggatcatgatagttgatggattttactcacaaatatatatgttgcttagactcgaatcttaattgtcctttagcttatttatttatttatttattttcattcactatgaaataataatattttgtttgagtggt

SEQ ID NO: 22416 - DNA, 240 bp, Gossypium hirsutum
  Clone ID: LIB3146-054-Q1-K1-F11
catgtgcgtaatgtggaactcccctatccaggtaaaactcttctcctgttctcaatgatcctgtcgctatgatatgagctagaccatttgcggatctaggtatattctgaaatctgatgttttcaagtccatagatttcctgttgaatgtcaaacttgtatactcctcccatagatctatcttgactctgcgatttacattttttgactattgctagggagtctcctcctttgatcaaat

SEQ ID NO: 22417 - DNA, 308 bp, Gossypium hirsutum
  Clone ID: LIB3146-054-Q1-K1-F12
ggggactttgaaaccgctttgaggttttgtaaagaaagaatggagaaaaattgggttccgaatttttcgactatgaaagctcttgtgaaaggacttgctagcatatttaaagatgaggaagcaaaggaacttataaagaatgttaaggagaagttctccataaatgcagatgcatgggatgaaattgaaaatggattgccccaatatagaatgtaagcagggtgtcctatctaagaatctgatattaaaattaatcaggtcatttatgcttggatatgatataagtagggggctttttacctcatgca

SEQ ID NO: 22418 - DNA, 360 bp, Gossypium hirsutum
  unsure (1)..(360): unsure at all n locations; Clone ID: LIB3146-054-Q1-K1-F2
ctcaaaattctgttttgctttgtctcttgctattctttcaatctgggccgttgatgctgcccaacaccatgctctggcgccctctccttcttcccccgtggactgctcctctctgattctcaacatggcggattgtttgtcctttgtgtcgagcgggagcaagacgtcgaagcctgaaggaacctgttgttctggcttgaaaactgtgttgaaagctggaccgcaatgcttgtgtgaggcttttaagagcagtgcttctctgggtgtcactttgaatgtcaccaaggccatgactttgcccgctgcttgcanagtctctgctccttctgccactcggtgtgcattgtctctcagtcctac

SEQ ID NO: 22419 - DNA, 360 bp, Gossypium hirsutum
  Clone ID: LIB3146-054-Q1-K1-F3
cccacgcgtccgctcaaaatttttgtatcccttgccccaacttctattttttaacaggccctcatatgcgggcccgcgctattctcacaggcccaacccttcttcataattagaatgctgcttcaccattctcaatattaatcgaaccatttctctttcaacctatcgctactattttgacagaatctcaattacattgccaaaagaaaaactttatttggtagttagcaccaccatcccccttatcagctggtactatacctcacgggttaatccttacattccatcctggattattttgattgacaccgctggcctactatgtgagatcagaactttccaaaattatatattttttgt

SEQ ID NO: 22420 - DNA, 387 bp, Gossypium hirsutum
  unsure (1)..(387): unsure at all n locations; Clone ID: LIB3146-054-Q1-K1-F4
atgacatactacctaagttgatgacgtccactggctcctatgaggatcttttcaggaaggagatagcgaagtatgatcacatttgtgaggaaattgcccaaaacattgaggcacaagaacaattattgatgcaaattcaggttcagaatgaagagtttggtgctgtctttaatcttgaagattataaagcatcacgagagaagtgttacaaacaaattcaagcagctttagccaagtgtaaagaaatcaaggaaaatattaacgagggcctaaagttttatgttactcttcaggatgcaatcaataatatcaagcagcaatgtagtgattntgtgatgactcgaaacatccagtgtcgagaaatgatggaaagatgttcaaaggcaa

SEQ ID NO: 22421 - DNA, 303 bp, Gossypium hirsutum
  Clone ID: LIB3146-054-Q1-K1-F5
agatcagttactttttgaaagatttaaaaagttacaagacttccattgataatgataaagactttatattgcaactgctcaaaataatcgactaagagaatagctaatctaaaaaaaaaccaccttaggaatcctaatcatcggggctatatattttcactccatttactgatagcctgcataactgcttgtttcaccatctgagcatttatgccttcagcattactttggttttctcctccaatggcttcaagctggaaattctcttggcaagaaaccctatcgtcgagcacgtcaaggcca

SEQ ID NO: 22422 - DNA, 369 bp, Gossypium hirsutum
  Clone ID: LIB3146-054-Q1-K1-F6
cccacgcgtccgcccacgcgtccgcgactgttggcttgtcatcgatggccgagttctgaacgtaacaaagttcctggaagaacatccaggaggagaagaggtgttgttggaatcagcagggaaggatgcgacgaaagaattcaacgatatcggacatagcaagtcggctcagaatttgctcctcaagtatcagattggtgttctccagggtcacactttaaagaataatgaacaggttggttcaaccgaggagcccaaaaagaaagagatgagtgcattcgttatcaaggatgacctgacgcctaaatatgctgcagtcgtcgagttcgccgccccactcctggttgctggttcctatttcttgttaca

SEQ ID NO: 22423 - DNA, 394 bp, Gossypium hirsutum
  Clone ID: LIB3146-054-Q1-K1-F7
aaaattgttttgatgacactatcgatgaagtttcaacagccaatcatcctcctacacccgatgaggagtacagtggaaacgagggttcattatcagcatccgggtgcaccaatagccctctccacggtaccatttccagtgcaaccaatagctacttctttgacagaatctcagctacatggccagaggaaaaacttcttttggcagctcggaccaggagcccccggatcagtttggactatacctcaggggttaatccaaacattccagcctggggtatggtgattgtgactgctggcctacgaggtgagatcagaacttaccaaaattttggattgccggttcgaatttgatgaaccaaaaaaaagaaaatggtaggtagcatcaaagtgtt

SEQ ID NO: 22424 - DNA, 384 bp, Gossypium hirsutum
  unsure (1)..(384): unsure at all n locations; Clone ID: LIB3146-054-Q1-K1-F8
caccatcaccatcttcaaggccgccctctttcctttaacagtcttaatctccctaacctcaatctccttctcacgggtaattgtctcttcttcaggatgcagcgcttttggatcggaaatgggatcaacaaaaacaaacaaatggtggagcatttgcagcgttacggagtgatttcgtcaatgaaagtagctgaagtaatggagactatcgatagggcattatttgtaccggatggggcttcggcttatgctgatagtccaatggcaataggttacaatgccaccatttcagcaccgcatatgcatgctacctgccttcaattattggagcaaaatttgcagccccgcatgcacgctntagatgttggctcangaactggatac

SEQ ID NO: 22425 - DNA, 289 bp, Gossypium hirsutum
  Clone ID: LIB3146-054-Q1-K1-F9
ggcggtcgcgtaagtaaggttaaggatccatacggatatgtttggctcatctgctccccctccaacaaatgcgccccagtggaagcttaaaactgccatcggctcttttgatgtaatactgctgtttgtgtgtgttgtatggaaatggtttttgtcgttttcttttgacagcagtggttaatcgttggtggctgatgttaaatgataagtctacttgtaatttcttttcttttcttttcttaaagaactacttgggtttacctatttagcattacatcaaggatttaat

SEQ ID NO: 22426 - DNA, 293 bp, Gossypium hirsutum
  Clone ID: LIB3146-054-Q1-K1-G10
atgttaagttggattgagcctttctgattagaatttcggaattagatcatgtaatcattttttatatttaataaatttcgagtctggaattgtgaaaaaaaaacaaacaaaagcacaaaaaaaagtaacaaaagaatacgccatgactgaaaaaatatgacagaggattatatcatgcttacaccatctttctttatatttctggtcgcctgatttatttttttatgtaatggggggggccccctttatgggtcccaattttcctccccgggccttgcagttttttatttttt

SEQ ID NO: 22427 - DNA, 319 bp, Gossypium hirsutum
  Clone ID: LIB3146-054-Q1-K1-G11
agggtatgcggttggccaaattctgtctgcatcctgcaagggacactacatcatcgtgccgactattggatgcgattgtgagccattgtgtacctgtgatagtcagcgacaaaagcgagtttccctttgaggacgaaatcgactacactaaatcctcaattgtcttctctatgaaagaggcattagaaccgggttatttggtgaatcagctgcgccaatttccaaaggatagatgggttgaaatgtggaagcggcttaagcaggtttcccatcattatgaattccagtaccctcccgaagaggaggatgcagtctatat

SEQ ID NO: 22428 - DNA, 277 bp, Gossypium hirsutum
  Clone ID: LIB3146-054-Q1-K1-G12
gtagaattgttctcaaaaaaccaggtaaaccagtccataaactccatgtataatactgaatctggccaaatccaattcaattgatgccatatttcttttgtcatcggacaatcacgcgaatcatgttctcaggattccacctttcctgcgcatcttgggcatattgttgtatttgttaatcttttatactttagattacatagagtaggattttttttttgagaaacaccaaattgtaatcttcaatttcaatggtagattcaagccccataatttc

SEQ ID NO: 22429 - DNA, 398 bp, Gossypium hirsutum
  Clone ID: LIB3146-054-Q1-K1-G3
cccacgcgtccggacccacgcgtccgtgcttcttgagttgctgagcggaaagaaggcactcgatatgggtgatgagaaccaacctttagtggctgattgggcatggtcattggtgaagaacgagaaagctttagacgttatcgaagatggcatgccggagttggggtcgccggacgttatggagaaatacgtgttgatagcggttctttgttctcacccggaattacaatgcagaccatctatggatcaggttgtgaaaatgttggaaacagacatttcagttccttcgatccctgataggccaattcctatcgtagctcgtattgatgagattgagagatctataagaagtaatggctcaggtcagttcatcagttctggtggtcatcagatgtttg

SEQ ID NO: 22430 - DNA, 227 bp, Gossypium hirsutum
  unsure (1)..(227): unsure at all n locations; Clone ID: LIB3146-054-Q1-K1-G4
cccacgcgtccgactttatcggttggagataatgcgaattcaattgttctctgtatatggtgcccaggcatgtaatttactctctctatcacgaaattgtaagatttgattcataatggtggtgaattggacatacatagttcaaatgaacagaagcagggatgaaaatcttgttttcttctataaagtgattgccttgnaaaaaaaaaaaaaaaacaaaaaattac

SEQ ID NO: 22431 - DNA, 341 bp, Gossypium hirsutum
  Clone ID: LIB3146-054-Q1-K1-G5
cccacgcgtccgcccacgcgtccgcggactcgtgggttcatcttcgagcaaccgagtgcttggattcacattcttgctaatctccccatctccccccttttaaataatccctgcatgtttgctttctgttttacttttaactttcagttttcttttttcttctattgttgcaagtgttttccatttttgtgttgaatactatttgtacaattaacttttccatctttttcagagagaaaaaaaaaactgaacatatgtatttttacgctgttcaaaaaataacattctggaagagccaagaaccaaaaggaaaccaaaattgaacaaaaaattataaacac

SEQ ID NO: 22432 - DNA, 389 bp, Gossypium hirsutum
  Clone ID: LIB3146-054-Q1-K1-G6
ctggggctggaagttttcttaaggttttttttaagaactttgatgttcttgctgggccagttattagtcttctgtatcctctttatgcctcagttagggcaattgaatccgagtctcgtgccgatgaccgacaatggcttacatattgggttctctattccatgattacattgctggaactcacctttgccaaagtcattgaatggatcccaatctggtctcacgcgaagttgattttcacctgctggctggtcatcccgtacttcagtggtgctgcttatgtttacgagcattatttgagacctttctttatgaacccacaacagacaattaacatctggtatgtcccgaggaaggacttcttcagtaaatcagatgatattttaact

SEQ ID NO: 22433 - DNA, 396 bp, Gossypium hirsutum
  Clone ID: LIB3146-054-Q1-K1-G7
cccacgcgtccggtactcccccatgcgccgttcgaagaaccagccgctcagagacctggctacctctcgcccaactccgataatagcggagtgaccgacagttcggcaatcaggtacctcatttccctctaatctcttattttttataaatatatatacttatatatgtattaataacaaaaacaaagaacaagaggaagaagaacgattggaaaaagaacagaatcacaaagagagaaaaaagaaaacctttgttgtattgcttttcttttttctttacaatctgtgtatgtgtttttgtattgaatcccccatttacagattctcgaaaatggctttatatagccaagataaaacaaacaaacattacaatgaaatatgtatttttatttgctg

SEQ ID NO: 22434 - DNA, 101 bp, Gossypium hirsutum
  Clone ID: LIB3146-054-Q1-K1-G8
aaaaaaaaaaaaaaaaaaaaaaaaaaaaatttaaaaaaaaaaaaaaaaaaaagaaaaggaaaaaaataaaaaaaaaaaaaaaaaaaaaaaaaaaaaaaaaa

SEQ ID NO: 22435 - DNA, 230 bp, Gossypium hirsutum
  unsure (1)..(230): unsure at all n locations; Clone ID: LIB3146-054-Q1-K1-G9
ggcatgtaatgaagggcagagggatgtgttcttcacctattagctagattttacagtaattatgtatgaaataaatgcttatacattttctttatgttacaaaaaaccaaagaaggcagagaagtctagccttcttattcgtgatgtaatttaactctcttgggggtttttatcaaanaaaaaaaaaaaaaaaaaaaaaaaaaaaaaaaaaagaaaaaaaaaaaaaagaa

SEQ ID NO: 22436 - DNA, 404 bp, Gossypium hirsutum
  Clone ID: LIB3146-054-Q1-K1-H1
agtatcaggtctcaccctattcatttattcttcttaaatgcaattaatttagtgtctttttctccaaaaaaaaaaaaaaaaaaaaaaaaaaaaaaaaaaaaaaaaaaaaaaaaaaaaaaaaaaaaaaaaaaaaaaaaaaaaaaaaaaaaaaaaaaaaaaaaaaaaaaaaaaaaaaaaaaaaaaaaaaaaaaaaaaaaggggggccccttttaaaaaaccaaagttaacgaacccgggcttgcaaaataaaagttttttaatggggccaccaaaataaaattaactgcccggcttttaaaaacctgggaatggaaaaaaccctggcgttcccaaattaaatcactttgaaaaaaatcccctttttccaaattggcaaaaaaaaaaaaaggcccccacaaaacccc

SEQ ID NO: 22437 - DNA, 145 bp, Gossypium hirsutum
  Clone ID: LIB3146-054-Q1-K1-H10
actaggatatctgccttttattgatttataaattatactacaaacttgtatatatttttatatccgggttgcttgaatattttatttttgtttatttttaacatcaattaaattcatagactgttgcttgcctaaaataacataa

SEQ ID NO: 22438 - DNA, 278 bp, Gossypium hirsutum
  Clone ID: LIB3146-054-Q1-K1-H11
tataccattcagctaatgatagcttactgtgatcggaaactcgagagccgtcgctctgtccccgctctcggtttccctcggtttaggtttttccgccaccggcgattgcggtaacccttgtctcactctccaacctaaaaaagcagcgaagagaagctttatttatttatttatttatttaagatttgaatcactgtataatataccacggtcgatcatttcaatccgatgaggaattcaaaaaatacccgtagggacccggaaatgagccggagggt

SEQ ID NO: 22439 - DNA, 398 bp, Gossypium hirsutum
  Clone ID: LIB3146-054-Q1-K1-H2
ttcagacgttttgaaagccaaaggcaaaggtgcagatggatcctggctttggtgcactacggatgactctgtgtacgatgctgtgaaatcgatgactcaacacaatgttggtgctctggtggttgttaaacctggagagcagaaatcaattgcgggtatcatcacagagagagattatcttaggaagataatagtacatggaagatcatccaagtcaactaaagttggggacatcatgactgaagagaacaagctcatcacggtgacacctgagaccaaagttctgcaagcaatgcaattgatgacagaaaaccgaatcagacacattccagtgatcaatgagaaggaaatggtaggcatggtttccattggagatgttgttcgtgctgtggtgagcg

SEQ ID NO: 22440 - DNA, 402 bp, Gossypium hirsutum
  Clone ID: LIB3146-054-Q1-K1-H3
cccacgcgtccgcccacgcgtccgccgaagagtaggcacaagggaaaacttaataccgagagcttactggagtcgagggatgttaactggacatctgtgagaccagtctacatatatggacctttgaattataaccctgttgaagaatggttcttccaccgattgaaagctggtcgccctattccaattccgaactctggagtgcaaataacccaacttggtcatgtcaaggacttggcaacggctttcattgaggttcttggtaatgaaaaggccagcaagcaggtgttcaacatttcgggagaaaagtacgtgaccttcgatggattagcaaaggcttgcgccaaggctggtggatttcccgaacctgagattgttcactacaacccaaaggagtttgac

SEQ ID NO: 22441 - DNA, 393 bp, Gossypium hirsutum
  Clone ID: LIB3146-054-Q1-K1-H4
cccacgcgtccgcccacgcgtccgcggacgcgtgggttggcatacattctcttggctaataaaactaatacgaaacatgttgggcaaggtttgctggacccagaagtgcgtactttaacttttggctatataggactgaacggaaagaaacctataattgtagcaagatctggagaaaatcatgatggacaagcatcggataacagtctactacctggtcttaatgatgacatggcactgaacattctggctcggagcagcagatctgactacccaaatctttcctgtttaaacaagaaatttaggtcactgatcggcagcggttatttatataaactgagacgtcagcttggcataagagaagactgggtttatctagcctgtaatatgatg

SEQ ID NO: 22442 - DNA, 394 bp, Gossypium hirsutum
  Clone ID: LIB3146-054-Q1-K1-H5
cccacgcgtccgattatccgcgaacaaagacctttccttcaactacacaccggttcgcacacatgaagagattcttatttggaaacaagctccatctgattcaacgagaaagctcccgctttcagtcccgacaacatccgcaaaacaaagggacagtgaggagaaaactttggttggtgtcggaagatgatgtagttaggttttctgccatttccattgcccagtgtacattcttacagtataattggagttgcagggcagtttggatttattttttggatcctagccctgcatgattcaagggtaagtttgaagaccaaaactagtgtgaatatttttgagggtgtcattttaatgttcaagggaaaaccccttttgtgaatctaaaaacctt

SEQ ID NO: 22443 - DNA, 393 bp, Gossypium hirsutum
  Clone ID: LIB3146-054-Q1-K1-H6
gccatttatggtgctataaagccaactgccatatacattcctctcgaagaaattttaaagccagctaactatgagcttgtaaccaaagaaattttcgggccatttcagattataaccgattataagaaggatcaattaccaatggtattggatgctttggaacgaatgcatgctcatctaaccgctgctgttgtctcaaatgatcccatcttcttgcaagatgtgatcggaaaaacggtgaatgggacaacctatgctggattgagagcaaggactactggagctccacaaaaccattggtttggaccggctggagatcctagaggagcagggatcggaacaccagaagccataaagcttgtttggtcatgtcacagggaaatcatatatgat

SEQ ID NO: 22444 - DNA, 392 bp, Gossypium hirsutum
  Clone ID: LIB3146-054-Q1-K1-H7
cacaagttggactttctgggtagtcaaaggtatatgattgctgagtgaggcttaagacaggcattgtcaaggctatttgatcgaccatgcttgctttagcttctaattgcctacgcacaacatcacttgtctatcgatctgtctgctgaaactataacctggcttgctactaagttgagatgggtgcttgataacttgcacggtgcgtatgaagatagttgggtaaagcctttaggactctggtgatgtatgtatgaggtaattgttgtgatgggtgcttgatgggatcttttcttttgtaaaaagaaaaagcgaggtaggctagtgggattaattctttcttcttgttctcccctttttgatcggtttgatttacatgtattcttggaaaa

SEQ ID NO: 22445 - DNA, 292 bp, Gossypium hirsutum
  Clone ID: LIB3146-054-Q1-K1-H8
cacagtttgactctatggatactcaaattttatcattgctctctgaggcttaagggaggcatttaaaaaggtatttgatcgaccatgcttgctttaacttctaaataccaacgcacagcataacattgctaacgaccagaaagctgaaactactaaccagctctgctactaaatataaatggcatgcttgataattagaacatcccatctgaatataatgggggaaagcctttacgactattgtgacgtaccaatgaagctaactgatcaaattcttgcttgatgaaacaaa

SEQ ID NO: 22446 - DNA, 326 bp, Gossypium hirsutum
  Clone ID: LIB3146-054-Q1-K1-H9
agcccaaaaccatccatatgctaacccaaatcagtttattggctaattatttagctttcaaagaggcccctgaagacttgttcaagttgcaaacaagcccctccataattggtggctttatagatttgccccaagcctaaattagcaaagttgaaaccatcaaccttgccacatgtgtggccagccaagggagggctctttggctgataattttagctatttttagcagcactctttagctataaaaaccccctttaggctgggcatctgaaacacatctcaagcattcacatctttttctctcttctctcttctctccactttct

SEQ ID NO: 22447 - DNA, 345 bp, Gossypium hirsutum
  Clone ID: LIB3146-055-Q1-K1-A1
caatcagagtgatcaaaaactgcaaagatttgggagtgaggttcccattcaaccaaccagggaagatgtactccagcttatggaacgcctatgactgggccacaaggggtggtctagaaaagaccgactgatccaaagccccattcattgcctcatacattagctttcacatctacggctgcgagtcgtcaccataagccaagttctgcgccacacaagacaagcggtggtgtgaccaaaaggcattccaggaccatgacgcctatcagtgactcagattgtgtattgtccacactaagctcaccatttacaactatagcaactatagggtgaggaaccccacga

SEQ ID NO: 22448 - DNA, 405 bp, Gossypium hirsutum
  Clone ID: LIB3146-055-Q1-K1-A10
caaaaactcagtgaactcagtgaagttactttaaaaaaaaaatcatgcctatgtttgattatgttgaatttagtgtgtagtgtgaaggtgattgtggcttgaaaacagtattcataaaaggaacaaaaaaaaaaagatggggaggacaccatgttgtgacaagaaggggttaaagaaagggccatgggcacctgaagaagatgagatccttacaaattatatcaagaaacgtggccatggaagctggcgatcgcttcctaaacttgcaggtcttcttcggtgcggcaagagttgcaggcttcgatggacgaactatttaagaccagacataaaacggggtccctttacccttgaagaggagaagcttgtcattcagcttcatgccattcttggaaataggtgggc

SEQ ID NO: 22449 - DNA, 345 bp, Gossypium hirsutum
  Clone ID: LIB3146-055-Q1-K1-A11
gaatcgtctaggctcgcaaggtacaacaagaagcctaccatcacttccagggaaatgcagaccgctgttaggcttgtacttcccggtgagcttgcgaaacacgccgtttctgaagggaccaaggccgttaccaagtttacatcttcttgaaaaatgtgatttgtggttagggttagggttttcattttaaaagtagatcgcgttgtttttctcttccgttgtgaatcattctgctcttctgttatatgattccgtgtgtatcttgaagatggatctgctcgatcctgatttgaacatgttagaattgaatgcaattaaatactaaaatttagcgtattttcttgg

SEQ ID NO: 22450 - DNA, 204 bp, Gossypium hirsutum
  Clone ID: LIB3146-055-Q1-K1-A12
ggttgtaaaaccagggggaaaactttctttaattggcccgtgccccccacattgggggtgtcgtttctttgcagacgcctggatgctttttcctccggaggaagaatatatatagtggtttgaaaaggctggatttaatgatgtccaactcaaaaggattggccctccctggtatcgtggagttcgccgacctccactgatcat

SEQ ID NO: 22451 - DNA, 244 bp, Gossypium hirsutum
  Clone ID: LIB3146-055-Q1-K1-A2
gaaaaattcccaagcgaagctgggaatcatacttgtatattaataaatcatacccttcaggctggaaaaggcataacagtaaccgccctatgaaagctgggaagaaaaaaaggaaagtgcgagaataattccctttccctaacatcatgcagacaaatacataaagtctcctgtaatagaattacgaccagtgagggaaagggatgctaaatacccaacaccacatttgttgtctagatcgcga

SEQ ID NO: 22452 - DNA, 369 bp, Gossypium hirsutum
  Clone ID: LIB3146-055-Q1-K1-A3
acggacactattattggacttctttgggacatgattactgcaggcatggacacaacagcaatgtcaggcgagtgggcaatggctgagcttattaggaatccaagagtgcagaaaaaggcacaagaggagctagatcgtgtgatacgattcgaaagggtgatgtctgaaactgatttctctaatctgccttaccttcaaagcgtagccaaggaagcactaagactgcaccccccaactcctctaatgttaccccatcgtgccaatgcaaatgtgaaaatcggtggctacgacatccccaagggatcaaacgtgcatgttaacgtatgggcagtagcccgagatccagctgtgtggaaggaccctgaagag

SEQ ID NO: 22453 - DNA, 257 bp, Gossypium hirsutum
  Clone ID: LIB3146-055-Q1-K1-A4
gtggttttcatgacagatatgctggagagaagatgtgtgcgatgactatgcgtggaagcagcagtgtgggaagcgacgtgctgcgatggaggtgcgcgagcagcgcgatctgcggagcgcaaggagaaactgctagggttttccatttttgggctgatttgagtcagaaaatgggctagggttaattttattgggccatacgggttgttgggttttgtatatttatttgggtccgggcatatttgggcttgtacatt

SEQ ID NO: 22454 - DNA, 210 bp, Gossypium hirsutum
  Clone ID: LIB3146-055-Q1-K1-A5
cggacgcgtgggtagttctagatcgcgagggccgcccttttttttttttttttcgtcaaggatataataattattattgccttagtgtcaagatacctataagcacacatttaagggctattattaagtttcaatctttcttttttaacactattgagagtaggtggaatatgcaattgtagaaaaacttcggtcacattctttaaatga

SEQ ID NO: 22455 - DNA, 431 bp, Gossypium hirsutum
  Clone ID: LIB3146-055-Q1-K1-A6
gaaacagacattggaaaattggtgtacatccaagccatagttaaagagacattaagaatggatgcacctgcacccctttcagcgccccgtgagctcagtgaaagttgttccattggaggctatgacatccccaaaggcactcggttaattataaaccttcacaagatccaaagggatcctaaaaaatggccagaaccatcggaatttaagcccgagaggtttctcactacccacaaagatatcgatgttaagggtcagcattttgaattgatgccctttggtagtggtaggaggagctgtcctggtacatcgtttgcacttcatatgttgtacttgaccatgtctaatttcttgcacgccttcgatttctcaacgccatccaatggtttgattgacttgactgggaccgatggattgaccaacattaaatc

SEQ ID NO: 22456 - DNA, 142 bp, Gossypium hirsutum
  Clone ID: LIB3146-055-Q1-K1-A8
gacccacgcgtcgcacctcgaggcagagcgagcttctgacactaagtcggtttactacttataatgaagaacacttataggcccccaggcacatgataaacgtctaccttccaagatcaacctcattgacttagagcagctg

SEQ ID NO: 22457 - DNA, 350 bp, Gossypium hirsutum
  Clone ID: LIB3146-055-Q1-K1-B1
cccacgcgtacggtcctttgaaacttgaaagcgaaactctcccttcaatcattattcatggaccagttcctttataagcggtttttcattttctcaattgaactccccccctcttctctgatggaacaggtaatggcatcaattcctgattttgaaatggttgaacctggaatttcgaaagataatagtgcggaagcggagcagttcaaattccgggttgatgaaatctttcaaaaggttgacgagcttgagcaaaaggtgaatgaagtggaacaattctacttgagttcaagtaaaaagcaacagagcagttctaaaggaagctccatgggaaaggaacgagataagga

SEQ ID NO: 22458 - DNA, 401 bp, Gossypium hirsutum
  Clone ID: LIB3146-055-Q1-K1-B10
aatatgtggagattactgatgttacagatgactcatttacaatgagaccttttccgatagataaacctgcttttgaagaaagtacagaacctgcatcgattgccaaaggatcgaagacagataggatacaggaaaactttctggatgagaagggaaaatcaaaatctgatcttgtcaattgggctgtacaccatgatgtgcaagttgcatgcaatggatacgaagatcagaaatcaaggaggcaggtgggtgatgtctcaggatcaagtacacctatcaaccataccttgactgatgaagaggatatatacttgaagaagagttcatcaaggagcaggaaatatcaactaggcttgtctagctctgatgcagagattgactataggagaggaagaagctta

SEQ ID NO: 22459 - DNA, 406 bp, Gossypium hirsutum
  Clone ID: LIB3146-055-Q1-K1-B11
cggacgcgtgggcaagagtgaaaagacgaatttgcttgaagatatcatgaagttgtcaatggatagggaaattttgattagattcgttgggggcataggtgacaggatcactgagttattcaggggagaagcacagctaatgggatttagtgcaggcttttgacaataaccattcagattttaaaggcagtgatgaactctttgactcactaaaagcgaacaagactagtcttcttctttcattagaagaagaagagcacaaaacaagagaagtagaagcagttagctgtgcaaatcagaatatacaggagaaactgctatcacaagaaaagttcctgtctgattcaaaacatctagcattgattattgaagatgaaatggaagcaaagcaactggaaatgaagaa

SEQ ID NO: 22460 - DNA, 378 bp, Gossypium hirsutum
  unsure (1)..(378): unsure at all n locations; Clone ID: LIB3146-055-Q1-K1-B12
ttttagtggatttcgaccatagttggagttaccttgcaattgttggctcggatgtgagagcaacttgtgtcaaattcggctcanatgcaaagtacttggcagtaggatcaatggatcgtaacctctgcatgtttggcgttcccgaaggcgatgcttcaatggaatcataaaaaggctccttctgttcaacttatttggcaagttggttgttaaaacattctttaagattgctaattgcgactgtcatgttttgtggtcggcataatcggagatttcgaggattggtcattacacaatccctaaagagatgaatgaagtctgcaattggcttacagcaaggttggagctcgagggataacactaaatatagcgaaaagt

SEQ ID NO: 22461 - DNA, 260 bp, Gossypium hirsutum
  Clone ID: LIB3146-055-Q1-K1-B2
gttctagatctcaaccatcttaaatccttttttttttttttgttgggctactgggatcagagggggtaaagaatatcttaatttctgttgcacaccaaattgagatctttactatgtcaccttaccaagctaatctatacttatctgtaaaagttatccctaacaatggcattgctcagaaaaaaaaaaaggatccaaattaatatacacatgcatgcaacgccgtctcttttatatagtgaaacctaaattcaactcac

SEQ ID NO: 22462 - DNA, 345 bp, Gossypium hirsutum
  Clone ID: LIB3146-055-Q1-K1-B3
gcctcaccgtttcaggccaggaactgtagctcttaggggaatcaggaagtaccagaacagcacggaactgttgatccgaaagcttccgatccagaggcttgtgagagaaatcgctcaagattttaagactgatttgaggttccaaagcagtgccgttgctgctcttcaagaggctgctgaagcttaccttgtcggactgttcgaggatactaatctatgtgctattcatgctaagagggttaccattatgcctaaagatatccaacttgctaggaggattagaggagagagagcttaggtctgttaatatctagttgattgattcctacaattagaaatctgcac

SEQ ID NO: 22463 - DNA, 335 bp, Gossypium hirsutum
  Clone ID: LIB3146-055-Q1-K1-B4
aaaaaaccctaattctataaaaagatcgaattaaagtagaatcagaagcaagaatcgccgaggaaaacaagatgtcggggcagcaagaagaagataagaaacccggcgatcagtccgccgctcacatcaacctcaaagtcaaaggccaggacgggaatgaagttttcttcaggatcaaaagaagcacacaattgaagaagctcatgaatgcatattgcgaccgacaatctgtggatttcaactcgattgccttcttgttcgatggtcgccgcctgcgaggtgagcaaactccggacgagcttgagatggaggatggtgatgagatcgatgctatg

SEQ ID NO: 22464 - DNA, 406 bp, Gossypium hirsutum
  Clone ID: LIB3146-055-Q1-K1-B5
aaagaaaagaaaaatggttctgctagagaaactttgggatgatgtagtggccggtcctcagccggaacgtggccttggccggctgaggaagatcaccaccaccccacccttgtccaccaaagatgaggcttcatcaatggcgatgccgacgagtccgacgacacctgggacaccatcgacgccggtgtcggctcgtagggacaacgtgtggaggagcgtgttcaatccaggtagcaaccttgcaaccaaaggtattggcgctgaagttttcgacaagcctcaacctaactctcctactgtttatgactggctttacagcggggagacccggagcaagcatcaccgttgattaggcggtggctgacggcggcggatggtagcaaaaccactagcagaaggttgcagc

SEQ ID NO: 22465 - DNA, 372 bp, Gossypium hirsutum
  Clone ID: LIB3146-055-Q1-K1-B6
cccacgcgtccggtttcagtaacatcaatgcttgctgaagcttgaatcaccatcttcatggtattctaaatatagtttcttgacagtaaccgtggccgacaaggggatcttatctgagtgaagaacgcaattttcaaagtcgaaaatcctgaaccgtgggcagctaaggaaaacttgctccacgtgttaccacccactatcggaaacgattcaagccgggcggtctcgagacatggaaagcaaacacggacgtcggtcgggattttgtcgactaggacccctttaaacaagtttatagttttgagcttctggcacgtaaagatcgcacgaagtaaattaatggaatagttgagaggtatatcaatatgaaac

SEQ ID NO: 22466 - DNA, 277 bp, Gossypium hirsutum
  Clone ID: LIB3146-055-Q1-K1-B7
cccacgcgtcctccacgcgtccgtggacgcgtgggttcagattgatccaagtgtgggggtgtctgcattagtgggaactgcaatagcctctgcatgtttatcaggagctgctatgttagcaaagcgcagagagtaccttcaccttgggggcttgctttcatctggtgtgtccatgcttctgtggttgcattttgcttcctctatctttggtggtagcgctgccttctttatgtttgagatctacttcgggcttttggtgtttgtgggctacatggta

SEQ ID NO: 22467 - DNA, 151 bp, Gossypium hirsutum
  Clone ID: LIB3146-055-Q1-K1-B8
cccactcgtccgcccacgcgtccgaaaaaaaaggcaactttttgtcttgggcactgaaaggaaaggttactgtcctatatgtgaattagcaaacaactatagttgattgatagatataaaactactgttgttgattgttgattggatatat

SEQ ID NO: 22468 - DNA, 376 bp, Gossypium hirsutum
  Clone ID: LIB3146-055-Q1-K1-B9
acctagcagagatgaaaaatcttcaaatctgaaagaaattctagatgataattgctctgaggtttttacccttctccatgaagcaaactgctcctccatgtcttctgtgaacaagaattttataccaacatcaacagcgcttagaaattcttgccctcttagggagtttgtaccttcactaaaggagacaattaataaagatacaagtaagccttcaaacttggagaattcttgcacttcatatgagaaaccagctcaagttcagagaaaagatgatatggacggtgctacatgtacagatgagatgcaagccactcataataatcctcaacatgttgctgtgcatgtcctagatggaagcccaggaacatgtgct

SEQ ID NO: 22469 - DNA, 310 bp, Gossypium hirsutum
  unsure (1)..(310): unsure at all n locations; Clone ID: LIB3146-055-Q1-K1-C1
cacgcgtgcggctaaggaacaactgcgaccgatgtgttatgcttgctgatgggaaagcgagggtgtccatcaacggcaagcctatctaccagtttgctggaacctcgacttttacccaatatactgccgaccatgtcggccatgttgccaagatcagtacatccggcccgcttgataaagcttgtcgcataagctgtgggatatgcacaggttttggcgccactgtaaatgtctccaaacccaaaacgggtcaaactgttgcagatattggactgtgtgccgatcggcttgccatcgctgaangtgcaag

SEQ ID NO: 22470 - DNA, 381 bp, Gossypium hirsutum
  Clone ID: LIB3146-055-Q1-K1-C10
atgctcctttccttttagagcaaggatttgccgtaaccaatgcagtgctcgatgctttgagcaaagctggctacggtaacaagacagatcagaaagtcatgattcagtcaagtagtagctcggttctaatgaagttcaagagtcaaaccaactatgatctcgtttacaaggttgacgaagatattggtggtgctcaaagttcaacgattgatgacattaagagttttgctagcgctgtcgtcattagcaaggattctgtatttcctgaaaattctgcattcatcactagtgctacgaatgttgtaccgaggctaaaagctgctaatctctctgtatatgttcaaaccttcagtaatgagttcacatctcaagcatgggact

SEQ ID NO: 22471 - DNA, 424 bp, Gossypium hirsutum
  Clone ID: LIB3146-055-Q1-K1-C11
cccacgcgtccgaccaaccatatccgaaaacctaaagattctctctcccaaaccaaacctgcaaatttcagcaagagagagagagagagagaacttacatagctcagatttcgatcatcaatttagggtttcttagttcgatccccgattacccaataccccaattttacagatcaggtctgagtgttctagttgttcggctgtttctatcctctaagtttcatgtctgatcttgacatccagattcctactgcctttgatccgtttgctgatgcaaatgctgaagacgctggtgctggtgccaaggaatacgttcacattcgtattcagcagcggaacggtaggaaaagcctgaccactgttcagggattgaagaaagaatttagctataacaaaattctcaaggacctcaagaaagaatttt

SEQ ID NO: 22472 - DNA, 417 bp, Gossypium hirsutum
  Clone ID: LIB3146-055-Q1-K1-C12
gtcgtttttaccagcacgaaaggggagacacagacaacggtaccaggatcatctcagactggttgctggatgcattccatacagactgcagaaggatgtcgaggatagaaacagcagtgtgacgagcaggataaatgttcttatgatttccacaccaaaccgtgatgatcttgtgttccctaagggtggatgggaaaatgatgagacggttcatgaagcagcatgtcgggaggccctggaggaagccggagtgaaaggaatacttgatgaggatccactgggagtctgggagtttagaagcaagagtagacaaaactgctgcaacatggaaggtggttgtagaggttatatgtttgccttggaggtgactgaagaacttgactcttgggcagaacagacaagttacaagaggaaatg

SEQ ID NO: 22473 - DNA, 335 bp, Gossypium hirsutum
  Clone ID: LIB3146-055-Q1-K1-C2
acacctacggccacgcgtccggatgtggcatacactgaagggaggatggctggtcatgcaacatgctatcgagagccagaacaatcagcgcctttacctttccacctcatcagaagtttgatgagaagcttgaagaaagaacactatgttagtgacactgcggatgttgtttactaccaaactgacccagaactcaaaaagaatgcttcataaaatagctcatccccacaacaatggctggaattcaagctcttggcttcagacttgctagcttaaccataatagacctgtgcaatcatctttcattgccatagcagaagacaattggagtttca

SEQ ID NO: 22474 - DNA, 364 bp, Gossypium hirsutum
  unsure (1)..(364): unsure at all n locations; Clone ID: LIB3146-055-Q1-K1-C3
cagcgcgtaccgcgctctgacacactctcgtaagtatttgggtaatcttctagccttatgtacctgctatantgaaatccagtggttcgtgaaatatgaggaggcagtgaattgtggcacccctctaataccacttggtatatgcgtacctgcgtgcactgtatattcacaaggtcggtttagtttctcttccagattggataactgtannggagaagtctttcttttgtgcaatatgcaagtgataccatatatatagtcccatttattaatgagtgagtattgacagagctggtggtacgtattaatgttacactggaagctcgcttgtgattttcggataagtggccatttcgctcgtttc

SEQ ID NO: 22475 - DNA, 69 bp, Gossypium hirsutum
  unsure (1)..(69): unsure at all n locations; Clone ID: LIB3146-055-Q1-K1-C4
cccacgcgtccgnnaaaaaaaaaaaaaaattaaaaaaaaaaaaaaaaaaaaaaaaaaaaagggaaggat

SEQ ID NO: 22476 - DNA, 436 bp, Gossypium hirsutum
  unsure (1)..(436): unsure at all n locations; Clone ID: LIB3146-055-Q1-K1-C5
gttgtttttaaattaaaaaattattcgtttagaatctggtttagaatctagtggtttcttttggggttctttgttacctgctcgggtggttatgntgcatgtccgatctgcagttcgtaaaaccgtttcaatgattttagattttctatgaactctatcctcatgcgtcgaatccgtattcttcactcgttctcggttgtcttcctttactggttctacgttttctcatgaattagcacctctttgttcatcaatcttcttattttgatctaacctgactattgaaaacttcaaatctctaattgtcattcaatttgttaattccaatttaaatactcttcccggataaaaaaaaaacttttctcctatggctgctgtgcaaaggccagcgagttcttctgattccgacgagaggaaaaggaagagaatgctgtcg

SEQ ID NO: 22477 - DNA, 406 bp, Gossypium hirsutum
  Clone ID: LIB3146-055-Q1-K1-C7
gtgggttccacgttaaaccgacggctttgtctctttatttgggttacttaggatggagtgtggcttggcatccgactgtgctttggatgggagctagctgggctgggttgcttgtgagtttggcgatggttgggaccttggtcgggtgttcaagagattttggaaaggtgaatccgattgctggtaactcggttatgccttgtttggcttgggctgcgtttttggcgactgtaaatctaaaacttgtcttcctttgaagcatataccaccatcttttgttctgcaagaaatagtattgttttttttttccctcttatgaataagatcaagttgttggtttgttcattagacagcttagaaagaaacacatggccttttgattttcctgttgcttcttacattatca

SEQ ID NO: 22478 - DNA, 402 bp, Gossypium hirsutum
  Clone ID: LIB3146-055-Q1-K1-C8
ggagactgtcccacattggtttgcacggacttggctgctagagggctggacttggatgtgaatcatgttatcatgtttgatttccctttaaactctatcgactaccttcatcgcactggaagaactgcacgaatgggtgccaaagggaaagtaacaagtttggtggctaaaaaggacttattgttggcagaaaggatagaggaggcaataagaaagaatgagagtttggaatctcttacagttgataatgtccgaagggatactgcaaggactcggattaccgagcagaaggggaagaatgttaaactgtttaaggcatcaaatcagaaaaacaagaccaaagctgtgtctgcatctgtgcgcacatcagggaaaaaacccacaattgcaaagtcggtaaaa

SEQ ID NO: 22479 - DNA, 329 bp, Gossypium hirsutum
  Clone ID: LIB3146-055-Q1-K1-C9
cggacgcgtgggcggacgcgtggggccgattagaaaggaaagtttgatgaattaggtgaggacaagggcgtcaaaatattaattgatccaaaagctttgatgcatgtgattgggaccaaaatggattttgtagatgataaactgaggtctgagttcattgttatcatcccaaactccagatggcattgtggatgtggcgaatctttcatgacaacagatggttgcacagctaatcacggtggtaattgacgatttcatcacccatgtcataagataagactttaattaaccttgatgataccaggatgcttgctttcctaaattcacca

SEQ ID NO: 22480 - DNA, 377 bp, Gossypium hirsutum
  Clone ID: LIB3146-055-Q1-K1-D10
ggcagagataacctctgggaaagagaagtatatccgtttacaagctgattttgataattatcggaaaagatcggagaaggagagacttacggcaaggtctgatgctaaaggagaagtgatggagagtctgttgcccatggttgacagttttgagagagccaagcaacaaattaaacccgaaacagagaaagaaaagaagatagatacgagttatcagggtatatacaagcaatttgtggagatcatgaggagcttgcaagtggctgttgtccctacagttggaaagccctttgatccctctctacacgaagcaatagcacgcgaagagtcgcaagagttcaaggaagggattatcatccaagaattttgtcgtggat

SEQ ID NO: 22481 - DNA, 420 bp, Gossypium hirsutum
  unsure (1)..(420): unsure at all n locations; Clone ID: LIB3146-055-Q1-K1-D11
gttgcttgcagcatgctttagtgttcgtgtgagaggatcagagtacattccgcttgtagggtccagcgatccaagttctttcttagtgggagtatctgatggggaattatgaaattgttgaccggaggagatgtttcctgctcaagattcaaaggtttgggagtagttgaggaaatgtttgcaccaatattgaaagatctttgaggcatttttggactgcactttgttaaagttgatgtaactaacttgcatgctagactcttcaaattcttcatgggattaaaaatcatctatcgtctctttgagatctttcatatggccattggctatttgctcatttagttgatgggaagttgacaatgaagctgagaaatagaaaacttttgaaaaaaaaaaaannannnnaaaaaaaaaaaaata

SEQ ID NO: 22482 - DNA, 180 bp, Gossypium hirsutum
  Clone ID: LIB3146-055-Q1-K1-D12
gcgtcgacccacctctattgggccttgctaggatgcgcaggggtcaccgtctaaacccaaatgggggggacttcgcctcttaaatgccttaagacgtggtttcaacgtattacacccatttaaactggttgcctatcgtttgacctgagtaccgctgtttaagcttttttgtgatttagg

SEQ ID NO: 22483 - DNA, 380 bp, Gossypium hirsutum
  Clone ID: LIB3146-055-Q1-K1-D2
cggacgcgtgggtggagatctgtatcgtggtatctaccttgggcaagatgttgctgtcgagaatggttagatctgagcatttgaatgatactcttgaagatgagtttgctcaagaggtggcaatcctacgggaggtccagcacagaaatgttgttcgttttattggtgcctgtacaaagtttccacagttgagcatagtaacagagtacatgcctgggggaagcttgtatgactatttgcataagaatcataatgttttgaagctctctcagttgctgaagtttgctattgatgtctgcaaaggaatggagtatttgcatcaaagccacataattcatcgggacctgaagacagcaaatttgttaatggatacagacaat

SEQ ID NO: 22484 - DNA, 429 bp, Gossypium hirsutum
  Clone ID: LIB3146-055-Q1-K1-D3
cccacgcgtccggtttgttattcacctattggctatggttatgcgaagggtcgtcaaacgtaatgttccgaggagtgaaaaagtagcagagcaagcagctcctcatcccagtgaaagagttgggaatcctcctgttgatcagagagctggaagaaaatctgagagaaaccatggtgtttacaatgaaagagttgatacgcagaggaggaaccggcctaatgaaaaccggcggaatgacaaggaaattgagaggcagcagcggcaggagaggcagccatcacctgagacctggcgtaagcctgcggaacagcctaaaccagtctctcctgaagctgctggtgtgcgctatggaaaagcagcatcagcttttgagcttgctcaagccttttccaaatcattctcagatcaaaaaacagatgatcgatatgc

SEQ ID NO: 22485 - DNA, 425 bp, Gossypium hirsutum
  Clone ID: LIB3146-055-Q1-K1-D4
tctaaatcggtttatgtatgccaagccatatactaggagattatggtacagaaaaaaaaggaaagaggaagccaatagatcagaatcattgtgttcacacaatagataaaaattttcaatctagtagaaagcaagtttctaaatcttcatagtaacgattaaaaacaaatattgttcacaaacaagtagagaatacttatatatactcaatttacatgcatgaataagaagacatctacatgagagagagaaagcaagtgagtgcctaattaacttgaagcaccagcagaatctaactagtactgcaaccaaaatccagtggtttgatttgaaattaactaagtcattgcattaacaattcctttcttcatgtagttcactatccatccaatccccgtcccttccttttacctttccacaaatgt

SEQ ID NO: 22486 - DNA, 427 bp, Gossypium hirsutum
  Clone ID: LIB3146-055-Q1-K1-D5
gacccacgcgtccgggggaagtacagtgtgtgaagggaataactcaaactataggagtagggagaatgaagttagaggagctacaactccttcctctgatcatgatcagtccgatgatgatgacgacgatgtagaagaagaagatgatgatgatgatgatgaagatgaagaaggaggagaaggagaaggagaagtagaagaagcagatgctggtcagtctgaacagagcttagacccctctcatttgaaacgcctccgcaggaagctttctaatagggagtctgccaggcgatcaaggaaaagaaagcaagagcaactggcagaacttgaattccaggctgaacaattaaggggagaaaatgattccctatgcaagcagcttaccaatgctcatcaactaattcgtgatgttggcactaacaatcga

SEQ ID NO: 22487 - DNA, 401 bp, Gossypium hirsutum
  Clone ID: LIB3146-055-Q1-K1-D6
gttcattctagtgtttgtagggacgttcgtaggtggtgtgtcaccctattttctaaagtggagcgcagggttttttggtgctgggaacacagttcgccggtggggtttttcttgggacagccatgatgcatttcttgagtgatgcgaatgaaacttttggagacttgacgactaaagaataccctttagcctttatgttggcatgtgctggatatttgttgactatgctagctgattgtgtgatttcttatgtgtacgggaaagggaagaattcatgtaacaatggtgatttggagcttcaaggggctgagcggagcaaaacgaatcctcatggtcaaggcgatccaccatcttcatctctcacatctgcaagttctttcggggatagcgttctgttgatc

SEQ ID NO: 22488 - DNA, 386 bp, Gossypium hirsutum
  Clone ID: LIB3146-055-Q1-K1-D7
cggaatatcccgggctcgagcccacgccgtcaccgcccacgccgtcacgagaaaaaatgctactctcatgatatcttaagtcgtttgacgtatcttgttagtgttgagagtctcttctgatggtttgcattctctatcgttttcatgcttaatgtgttcatgagctttcttgccaattggctgtcaaattcccccaataaatcacaagtttgtattatttgatatgccacaaattcacattgccattttgcttctttttctctcgaactctgagcttaacatattaccgattccgacataagctacgtgttgtggatgcatgatgtaaaaaaggaggagtaaatgatgcagttcacttgaaatgagaatggaatattaattattgc

SEQ ID NO: 22489 - DNA, 371 bp, Gossypium hirsutum
  Clone ID: LIB3146-055-Q1-K1-D8
cggaaaagtattttgagaaggttcttcgcttagcaatcaatagacgaggaacgggggaaggagctcttactagagttgtttgcactagggctgaggttgatctaaagatcatagcagatgagtaccagcgaaggaacagtgtcccactgactcgtgccattgtcaaggacactcatggagactatgaaaaattgctgctggtacttgcaggacatgtggagaattgaatctgatatcttgagacaatttcctggtgaataaatgtttatgaccaaactataatggtctagtgtggttacgaggttttcctgtttttctatgcattaatgcgagttatatgctatccaagaattcgaagtctacttaacacc

SEQ ID NO: 22490 - DNA, 412 bp, Gossypium hirsutum
  Clone ID: LIB3146-055-Q1-K1-D9
ggcatggaagctcgagatgtgcaccgggaaagccaaatgactgtgcccgagaccccatctgctgaccagccctgtgatggagtaaaagttgatgttggaccaagaaaaagtattgcaagaataggcaatagaaatcctgaacaattgatgaaagttcataatggcggtagtcttttatttggtaatggagattgtggttcaagatcagcttacacagaaatctgctcattagcagcacaacattttgcacggatacgtgaagttcttgtcgagcgcagtgtgacatcaactcttaactctggatttttgaccccatgccgagacaggcttgtggtggaacttgggtggatctgtttgctgaaatgatgagaaattcatgacatgtttgttctcctgccgccattgagtactg

SEQ ID NO: 22491 - DNA, 373 bp, Gossypium hirsutum
  Clone ID: LIB3146-055-Q1-K1-E1
agagagagaaaaaaaagaaagaaaaaatggttctgctagacaaaatgtgggacgatgtaggagctgggcctcaacctgaacgtggtctcggcaggcttaggaagatcaccacccagcctttgtccatcaaagatgaaggagaaaagaaaaagtaccagaggtcgttgtcgctgccgaatagtccagtgtcaggtccgacacccgtgacaccgacgactccgacggcgcgtaaggagaacgtgtggaggagtgtgttccatccgggtagcaacctagccaccaaaagtataggttctgatgttttcgacaagccacaacccaactctcctaccgtctatgactggctttacagtggggagaccaggagcaagca

SEQ ID NO: 22492 - DNA, 420 bp, Gossypium hirsutum
  Clone ID: LIB3146-055-Q1-K1-E10
cccacgcgtccgccacgcgtccgggatcctgaacatccctattctttggaagagcggaaagtaataactgaagatgctattgaagttgataacgagcgaagttatgttagggtcacatttactcctacggttgaacattgtagtatggctacggttattggtctttgcttgagagtcaaacttatgaggagtcttccttctcgctacaagatggatataagggttgcacctggaactcatgcaactgaagctgcagttaataaacaactgaatgataaagaacgtgttgcagctgcgctagaaaaccctaaccttttggatatggttgatgaatgtctggctccatcctatgcttgaattttttattattaccagacgtggtgaactagatttgtttttcttcatacaataaactttact

SEQ ID NO: 22493 - DNA, 119 bp, Gossypium hirsutum
  Clone ID: LIB3146-055-Q1-K1-E11
ggaatctgataatgagtgttgttttgtcttgtaatgaagtcattgggggggggatgcatgtttgtattggaactgttgttttgtgtgtttttaatgcaaatcttgtagttgtaggaccc

SEQ ID NO: 22494 - DNA, 363 bp, Gossypium hirsutum
  Clone ID: LIB3146-055-Q1-K1-E12
cccacgcgtccgccaagccttcgcttcagttccatctttgttaagaagagccattggttggctagattaaccactcctgtggatcaattgaaacatacccttggagctcagtgaattggcagcacactgattccggtattcctcatcaatgacagcgactgtatttgttataggatcatacagtgtctccccagcttcgcgcctacggaggcaactgaaaactgttgcatgtatggctgccacacttttgtcaacatttgtgttgtttattttggggacaaaatgcttgtcagctcgtttacatagataatcttgtattgtcctgatattccttatatacttcacatacttattttttagcag

SEQ ID NO: 22495 - DNA, 123 bp, Gossypium hirsutum
  Clone ID: LIB3146-055-Q1-K1-E2
cccacgcgtccgtgcttgcatgttttttttgttgatgttgtgtttgctatgtgtgcaacaggttgtttaaatgaatccttaaagaattattttatctaccaagtaattgtcaaattggaagct

SEQ ID NO: 22496 - DNA, 370 bp, Gossypium hirsutum
  unsure (1)..(370): unsure at all n locations; Clone ID: LIB3146-055-Q1-K1-E3
ataacattataagacacctaatttactataacattataaaacaatcttaaaaagttgaacggatgtacttatctttgccatgttcactatggtttgaacagattaagttacttttattttcatgcagagcatgtaggaaccaaatttgcagttcaaattcaaagccatgctcaaaagtttttctgtaaggctcattgctttgagttcattacaagatttccttgattaagtaaatgtattatatcttttattaccaagatttacttgattaagaaaatacattgtataatttattaccttgcatacgtattatttattttaaaaaaaaaaaaaaaaaaaaaaaaaaaaaaaaaaaaaaaaannnnnnnaa

SEQ ID NO: 22497 - DNA, 84 bp, Gossypium hirsutum
  Clone ID: LIB3146-055-Q1-K1-E4
gttagggaacggtttctgacctagcattaaatatgtgtaacacactcaagttaatcatggtgaagacagcattctatttcttgt

SEQ ID NO: 22498 - DNA, 356 bp, Gossypium hirsutum
  Clone ID: LIB3146-055-Q1-K1-E5
cccacgcgtccggacccacgcgtccgcccacgcgtccgctggtactcgatcacaaaggccttttgcattgctttcgtgatgacattcttcagtgtgtttgatgtgcctgtcttttggccaatactccttttctattggataatgttattcatcctgactatgaggaaacagatactgcacatgatcaagtacaaatacgtccctttctcattcgggaaacagcgatacgacagcaagaaggcatctccaacagaaaacacaaaccttcccagggattaagttcctcaggtgcatctgggaaagtttagcctagataagaaaaccaaagttaccagacaaagaacactttgtattga

SEQ ID NO: 22499 - DNA, 424 bp, Gossypium hirsutum
  Clone ID: LIB3146-055-Q1-K1-E6
gttaaagaacaaattgtctctagttctacaattttggttcttctggattctcaattcatggatgacactgctaataaataaaatgaagatttttggtgatgttgctaaatgacattgtcatccgacatttgtgacatacaaataagattgaaataggatcagattttgggaccaatctcttgaccatgtgatgtgtagtaactgaatgctgcaatttcttcatctcttttcataatctcttctcagaaaaccaaagctttcccctttcaatttcccaaattttacacagtgattttcagatcacaggctcctgagtatgtctggaataaaaaggaagcgacagctaacagcagaggcagctgttttttctccgcctcaaagtactgtaagcaatgaagtttattctcaatatatagtcgcacgt

SEQ ID NO: 22500 - DNA, 438 bp, Gossypium hirsutum
  Clone ID: LIB3146-055-Q1-K1-E7
gagaaattatgctggatggtgcctgacaccttgttaccaaggggatatgactctgagaaggatcttcaaaacctgctttctaattatggtagcaatccaagagatattgacacagagttgtctactgctgcaataagtccccagtcatttggtgtgccaaacatacctttcaagactggatgttcaaatgatgttgccataaacgatgcaggagttttaaatggtggattgtgggccaaccaaactcaacggatgcgaacatatacaaaggtacaaaagcgtggctctgtgggaagatcaatcgatgtgacccgctacaaagggtatgatgaactcaggcatgatctagcccgcatgtttggtatcgaaggacagatggaagatccacaaagttctgactggaaattagtatatgttgaccatgaaaatgacatatta

SEQ ID NO: 22501 - DNA, 433 bp, Gossypium hirsutum
  Clone ID: LIB3146-055-Q1-K1-E8
cggacgcgtgggcggacgcgtgggcggacgcgtgggatctgtatcttaaatgtctggatggcatgggttccgttttctctttcaagtttaaattgacgataattaatactttttccttgcagcggttggaatttctaggggactccgttttagattatcttattactctgcatttatataataaatatcctgggatcacgccaaaattattaacggatcttaggtcagcatctgttaacaacaattgctatgcattatcagctgtaaaggctggatttcataagcacattctccaaagttcacagaagctttacaaggatataaaagaaaccgtcgaaagttttcaggaattatcattggaatacactttcggctgggaatctgaaaaatctttcccccaggtacttgctgacgtgatggagtcacttgctgg

SEQ ID NO: 22502 - DNA, 336 bp, Gossypium hirsutum
  Clone ID: LIB3146-055-Q1-K1-E9
attaccatatctagaacatccttcctcgtatatgctttatctgaaatcagaacaaggtcgtccactattgggacagaaacttcctcatacttgcatgctaataacatggctgtcatgccaaccaattgaagcttctttcggatcacagtgcaacgctctaagaatctgtctatgagattgatagtaaggaacaatgtttcttccataagatcaaatttgtagtgaacctgctcaaaatgatattgttagtaatctctagacatactttgaacaacaattaagtacaaatttttcaaatcaatagtagtagcacatctttcttaaaaaaaaaaccga

SEQ ID NO: 22503 - DNA, 361 bp, Gossypium hirsutum
  Clone ID: LIB3146-055-Q1-K1-F1
gaaacaaccagaaaacccagaaactgtgacattggaagctaatgggggagtggagaaagagaatgcaaatggagcagtccctgtatctgagggagaagccaaagagacacaaggtttacaggaggtggctggcaagtgtagtgttgaggtcgaggacaaaggcaaggcagtagatgcggaggtgattgaaaatggtaaggttaaagaaggtgggcaagctgataccccacaacctacaggatctgcgcctgcaagcaactaatatgacaaccagtatcctagccaccctgtggtattctagtttattgtatttgcctgtaacctctatgatgattccatggatgacttgaacattaatgat

SEQ ID NO: 22504 - DNA, 322 bp, Gossypium hirsutum
  Clone ID: LIB3146-055-Q1-K1-F10
cggacgcgtgggtggacgataacggacgtgttaagcttgcggatttcggcgtttcggcggcgttctataagtggagttcggtttacagattaggttcttcgccattttcgcaatattggattgccccagaggtgattcattcacataaagattatagtttcaaagctgatatatggtctttcggtataactgctcttgactccaccaagaagttttcagaaacttttcaagacatggttgcttcttgtctccgtaaagatcctgcaaaccgaccctctgcagacgagcttttgaaacatcctttctttgagagttgcaatgg

SEQ ID NO: 22505 - DNA, 384 bp, Gossypium hirsutum
  Clone ID: LIB3146-055-Q1-K1-F11
gaagtagagaaaaatgcattatcaaaagatgagaagaagaatgcagaagacggcctgctgaggattggactaggacatgcgaaacttaaggccagccgaactggatttaaaccttacaaaaggtgttctgtggaagccaaggaaaatagagtgatgaacactggcagtcaaggtgaagagagaggtcccaagagggtacgcttagaaggggaagcttcgacttgacttttacgctattgcatgcaattaacaaatgcgatgtttgtttgttgcatgcaatccctaattttttttccccatatctctttccttttcatatgttgatcttaaagacgagcattacgagaccctttcgtgtaggtggtgttgtactatctaatatct

SEQ ID NO: 22506 - DNA, 407 bp, Gossypium hirsutum
  Clone ID: LIB3146-055-Q1-K1-F12
gtcatcagtctcgatctgatctgtttctgggtggaggatatgaagaatttgatggagacgaggatttcaaggcggagtttttatgtccgttttgcgctgaggatttcgatattgttgggctttgttgtcacatcgatgaggaacatcctgttgaagtaaaaaatggggtctgcccggtttgcgcgaagagggtcgggatggatatagttagccacattaccatgcagcatgggaattttcttaaggtgcagcgcaagcgaagattacgcaaaggtggatccaatttgacattttctatgttgagaaaagaaccgagagatggaaacttgcatgcccttctcgggggatcttcatgctttgtttctccctccaatgtcgaagctgatccattattgtcatcatttatg

SEQ ID NO: 22507 - DNA, 211 bp, Gossypium hirsutum
  Clone ID: LIB3146-055-Q1-K1-F2
aaaaatttttcatccacaacaaaagcaaaaaaaacccaaacctcacctatcttatttttaacactaaaaaaaacctccacattctaaacctaatccatccattccacctttatatacaacaccaaacttaaaaaatttaaaaaatataccaccacattatcatccttatctacattatccaccatacaatcacattactaaaaatctacct

SEQ ID NO: 22508 - DNA, 438 bp, Gossypium hirsutum
  Clone ID: LIB3146-055-Q1-K1-F3
cccacgcgtccgcccacgcgtccgcccacgcgtccgagcctggaaagcggcatcaaatttgattgttataaaagggacttccggtggcctgcacctctcgcaccccaccttggtgacagaccaaagagaccaaactgcacaaacaatctttcgacagatgccaggtttcaattgcaaacggacagttgcgaaaaccatcctccaacgtctcctcacttctcaagcattttgggcaagtcgctgctccaaccaatcttttattgtacgaattataggaatttggaattagattattgaaaatacgccagaaaatgattttgaccttttctggcaaattaagctgccataatttgttgtaataaggtatataggaattgtccccttctattgtatttgcatactcgaggccttcttacctatacccactccgaacgatat

SEQ ID NO: 22509 - DNA, 81 bp, Gossypium hirsutum
  Clone ID: LIB3146-055-Q1-K1-F4
cccacgcgtccgcccacgcgtccgttttttgacaacgtattgattgcaatgctgatcaatgaagatcctgttttagcatgt

SEQ ID NO: 22510 - DNA, 298 bp, Gossypium hirsutum
  Clone ID: LIB3146-055-Q1-K1-F5
cccacgcgtccgggtggaaaagctcagtaagcaacggcgacaagccggaggaagtcagctcgccccggagaggaaaactaccgttcagccaaacatggctgaagaatagaataccgaaaataccactttgaccgaactccgttcaaggtataggaaatgttaaattaagacgtctaattcaagagtgcggggcgttacagagcggggaagctattggtggctgtttgagaaccaacttggctttcatgccaaggtacatatgctaaaatcactggtcgagattaagagagagactaat

SEQ ID NO: 22511 - DNA, 400 bp, Gossypium hirsutum
  Clone ID: LIB3146-055-Q1-K1-F6
cccacccgtccggccttttcaagcgggggtgatggctgtaagaactaaaggcggcaatgaaggtgtgtttgagtcattgtaccgtgctcgtgaagtgtacagaactaagctgcaagagagcacggcagtttatcagctggcttctctgtttgttgagtgtgcaatagctgaagcacagcctttgaaaacagaaccagtaccatgcaaccccaatgatccaacggttgcatcagatgctcacgggacttctatacttgctgaaacaggtagaatgcaaatcgtactggacgcattctcggatggaagcagctttatctgtttacagtgcggtggtctcgttagtaatcatcgtaaagatgagcattatgcatactggtgctgcaatatgtaaatttgctca

SEQ ID NO: 22512 - DNA, 430 bp, Gossypium hirsutum
  Clone ID: LIB3146-055-Q1-K1-F7
aacaaatgtgggatgccaagaacattatgtgcgctgctgatccacgccatggaagggaccttacagcatcggctatgttcaggggcaaaatgagcaccaaggaagtcgatgagcagatgctcaatgtccagaacaagaattcatcctactttgtggaatggatcccaaacaatgtcaaatcaacagtgtgcgatatccctccgaatgggttgaaaatggcatcaacattcattggaaactcaacttcgatacaggagatgttcaggcgtgtgagtgaacagttcacagccatgtttaggagaaaggctttcttgcattggtacacgggcgaaggtatggacgagatggagttcacagaagcagaaagcaacatgaatgatctggtgtcggagtatcagcagtaccaggatgcaactgcagacgatgagga

SEQ ID NO: 22513 - DNA, 431 bp, Gossypium hirsutum
  Clone ID: LIB3146-055-Q1-K1-F8
cccacgcgtccggtcaagctggaggcaaggtgaagggtatgggtgagaaacaaatggaagtggacaaacgtatcttacgtactcaaattggagttcttaaaaaagagcttgaatctgtcagaaaacatcgaaagcaatatagaaaccgccggttttctgttcccgttcctgtagtatctttggtaagcacttaacctgttttttttaaaaaataatacaaggacagttttattgtgttgcttttatgtctccgacatataatacatttgaaagcattataggttgggtacacaaatgcgggcaagagtacacttttaaatcaattgactggagctaatgttctttcagaggaccgactgtttgctacccttgatccaacaacaagaagggttcagatgaaaaatggaagtgaatttcttcttactgatact

SEQ ID NO: 22514 - DNA, 426 bp, Gossypium hirsutum
  Clone ID: LIB3146-055-Q1-K1-F9
gcctgctattgcaacatcttcatgtgaagctgatgtgccctcaattccattaggggactgggcattccagaatcctctgtatggttgcatgcaagactcttcagagctgcagaacagagggcaagttgacccaccgaccccaactccaacatttgtcaaggtttataaatcagggtcagtgggacgctcgttagacatctccaggttcagcagttaccatgaactgcgagaggagctggctcagatgtttggaattgaggggaagttggaagaccctttaagatcaggctggcagcttgtatttgtcgacagggagaatgatattcttctccttggagacgacccatgggaggcatttgtgaataatgtttggtacataaagatactttcacctgaggatgtgcagaagatgggcgagcaacgggc

SEQ ID NO: 22515 - DNA, 411 bp, Gossypium hirsutum
  Clone ID: LIB3146-055-Q1-K1-G1
gaggtgtccaacacagaagcaagcagctagcagtttcctttgaattatactactataactgcaccactttccaccagatttacattgcagatggcttcatcaatgctgtgggcttcaagggcggcttcttacctcaggatctctgtcttccacagaggcttttccactgttctaaaggatctgaaatatgcggattctcatgagtgggtgaaggttgagggtgactctgccactattggtattactgatcatgctcaagatcatttaggtgatgttgtgtatgttgaattacccgaagtgggagctgctgtaaagcaaggtgaaagttttggagcagttgaaagtgtcaaggctacaagtgatgttaattctcctgtttcaggaaaagtggttgaagttaatgatgagctc

SEQ ID NO: 22516 - DNA, 419 bp, Gossypium hirsutum
  Clone ID: LIB3146-055-Q1-K1-G10
gccgagttgagttgcacttctacacgcaattgcctcagcagcaaaggctgaggcgactggattgtggatttccgagcatgccaagagaacctttcctttgctgttcctggccacaattccgagtgccgcatgagaagatctcacatcatatgcaacatcaaaattgatcttcacaaactgatcagcttgcccataaagtgcagcagaaaatcctacactggactggattactctgctcaaagacccagactagccactctgggaactccaaattatattcagatagaaaaatctggcatgctaattctccccatactgatactgaaaccgggcattctataaataagtgattcatcatctctgtcccactcccacacctcgggcaaattgtaatgtttgtcaatctccttttgtgcatg

SEQ ID NO: 22517 - DNA, 429 bp, Gossypium hirsutum
  Clone ID: LIB3146-055-Q1-K1-G11
aaaaccgggcggacccacgcgtccgaggggaacccgtgctgatctcacttttgttcaaggttttgggaggactaggcaaggtgaggtctttttgaaagtcaatcaactccgggataagtttgaatatgatagagagaacagaatgagagagaaagcatttgctccaataaatggacaagatacctcgagcagctacaatacaaactctaagaatcagccgtttgacactcagagatacttttctgatagtgactaacagtaagatgaaagaaagggaagtaggaagtgataacatcagaaatctttagctaactgcaaagaatcagttttactgtttgctttggtcaccgttgttaggcatgctgcttcagattccgactactaccctcaagcagccgttgcctgtcaaataaagatgcaaaggttttt

SEQ ID NO: 22518 - DNA, 399 bp, Gossypium hirsutum
  Clone ID: LIB3146-055-Q1-K1-G2
ctatacgattatctttgattacggagtgctttgggtaaaattgagacattttccaagatagaagatatatgattacggagtgttgggtataaaaaaaaaaaaaaaaaaaaaaaaaaaaaaaaaaaaaaaaaaaaaaaaaaaaaaaaaaaaaaaaaaaaaaaaaaaaaaaaaaaaaaaaaaaaaaaaaaaaaaaaaaaaaaaaaaaaaaaaaaaaaaaaaaaaaaaaaaaaaaggggggccttttaaaaaaaaaaaaattaattaccgggtgaatgaaaaaaaaaaattttttaaaggggcaacaaaaataaaattaatgggcggggtttaaaaaaaggggaaaaggaaaaaaccttgggttaacaaaaataaaaggcttgaaaaaaaaaccctttttcc

SEQ ID NO: 22519 - DNA, 393 bp, Gossypium hirsutum
  Clone ID: LIB3146-055-Q1-K1-G3
cccacgcgtccgacaacttccatttaagtatagctgctctcgatagatcattcaaccaagcaaagaaacgcgggctgaaagtgcgtggggttataatatcaaacccatcaaatccggctggcaatcttctaaaccgggaaacactttacagcctgctagactttgccagagagaagaacatccatatcatctccaatgaaatactggctggttctactcttggaaacgaagaattcgtgagcatggcagaaatcgtcgaccaggaagatactgacaggaaaagagtccatatagtatacggtttgtcaaaagatctctctcttccaggtttccgggttggtgttatctacacttttaatgaggatgttctggctgctgctagaaagttatcga

SEQ ID NO: 22520 - DNA, 416 bp, Gossypium hirsutum
  Clone ID: LIB3146-055-Q1-K1-G4
cccacgcgtccggaaagagaaggaaagttttacgccataaatgtcccactcaaagatggggttggtgacaatagcttcactagattgtttaagataattatttccaaggttgttgaaatgtatcaaccaggtgcaatagttcttcaatgtggggcagattctcttgctggggatcgcttgggctgtttcaatctctcaattgatggacatgctgaatgtgttaaaattgtgaagaaattcaacctacctttactggttaccggaggtggaggatatactaaggaaaatgttgcacgttgctggactgttgaaaccggagttcttttagatacagaacttccgaatgaaatcccagaaaatgagtatatcaaatattttgcaccagattgcttgttgaatattccaaatgggcacat

SEQ ID NO: 22521 - DNA, 373 bp, Gossypium hirsutum
  unsure (1)..(373): unsure at all n locations; Clone ID: LIB3146-055-Q1-K1-G5
cccacgcgtccgggtttatcggcgtagtttggtatgtggtgttggaaatcgttggggacggatggatgctttagtccctaagatctctaaatgtgtttatatatgaatagaaaatgagggaatgcggttttattcatatcccggaactttgatatgttatttttatatattatagagttgatcatggtttaaaaaaaaaaaaaaaaaaaaaaaaaaaaaaaaaaaaaaaaaaaaaaaaaaaaaaaaaattaaaaaaaaaaaaaaaagaaaaaaaaaaaaaaaaagaaaaaaaaaaaaaannaaataaaaataaaaaaaaaaaataatattattaaataaattaattaaaatattaaattgggggggccctttt

SEQ ID NO: 22522 - DNA, 436 bp, Gossypium hirsutum
  Clone ID: LIB3146-055-Q1-K1-G6
accacgcgtccgcccacgcgtccgcccacgcgtccggatctacaaatgggactgttgtattcgggtgcgggggtgggcattctggggaattaggatcatcaagtgaagcactagatgggatactaggatttggacaagcaaattcttctataatttcacaactggctgcatctgggaaagtaaaaaaatcgtttgcacactgtttggataatatagagggaggtggaatctttgcgattggtgaagtggtatctccgaaagtcaaaaggacacctatggttcaaaaccaggcacattacaatattgtaatgaaggatattgaggtcggtggtgatctactgcgacttccaagtgatatttttgatagtggagatcaaaagggaacaatagtggatagtggtacaaccttagcatatcttccatcatcaatttatga

SEQ ID NO: 22523 - DNA, 432 bp, Gossypium hirsutum
  Clone ID: LIB3146-055-Q1-K1-G7
cccacgcgtccgtgcctttatcaatatgctgtctccttcacacattataccatttgggggggcatttaatggaaagaagtgggagaagtttaatagcgagaaagttgcttctttggcatatgctcgaatccagggaaaggcagctcttgttgcccacttccagaattcaagcttgatgaatgaagataagcgctgccgcccaattctctttcactctgaaggtccagatggtggcgatcagaccatcccagagcatttacactctagtttgaatatcatccgccagccaaacgggttaccctcgggtgattcttcaagtagccccaaaaagaaagatgctggcgaggagcttgaaaccttctagcagcttaatatcaagagattttgcccttgtaccaaattcatggggcagtgaaggctaacatatttcgt

SEQ ID NO: 22524 - DNA, 425 bp, Gossypium hirsutum
  Clone ID: LIB3146-055-Q1-K1-G8
tggaagaaggattgttgatatcccaccaagtgccattgctttcaatccttccactggggctggcaccattattgattctggtaccgtcttcacccggctagttgagccagcctatgtagctgtccgggacgcattccggagacgagtaagggtggcgaacgtgacatctctgggtgggttcgacacatgttactcggtcccaatcaatgcaccgaccataacatttatgttttcgggcatgaacgtgacactgccacaagagaacctactgctccacagcacagcaggcagcatcacatgtcttgcgatggcatctgcaccagcgctgaatgtgatcgccaatatgcagcagcagaaccatagggtggttttcgatgtgccaaattcgaggatgggggtcgcccgtgagcgatgttcgtaaaaag

SEQ ID NO: 22525 - DNA, 423 bp, Gossypium hirsutum
  Clone ID: LIB3146-055-Q1-K1-G9
cccacgcgtccgcggacgcgtgggtaaatttgtagagcagagacaatgagaggaacattgacgttgacttggattctgatggtctgcctctcccaagtagcggtgcagagccaatactactcggagagcttaccatatgatcccaggccggttaaggtcactaatctttacttctttttgcatgaaactctccgcggtaagaacccaacagtagtcatggtagcccaagctaacaacacaagcaacgacaactactcatcagtgccatttggcaccctatatgccattgatgatcccctcaagataggtcctggggacaactcagaggtgattgggaatgctctgggacttgggatcttgtccggcaaaaattcaacgaccgtggtgatgtacttagattttggattactgccggaaagttta

SEQ ID NO: 22526 - DNA, 526 bp, Gossypium hirsutum
  unsure (1)..(526): unsure at all n locations; Clone ID: LIB3146-055-Q1-K1-H1
cgagcgcgtccgnnagagcgcgaaaggccanacnnggatcaannnatgaatctgcagtgtaggctttccaactnnntaaaccanngatcaagaggatcgggcgataagaatcccctganngagatagnnnacgccannccgcgcccattaaannaaaaanntggagtnntcgagagaaattgcngnngaacgcngnngaaatnnggaatnntgcagggctttangnntagagganngctgagannaatgaaaanntacgagcttaagaaagggggnntaacgagacgctttcaacgatatctnnntttcgaaccacnncaaaacaccatttacgtcaactacgnnntgaacagannaagaagaaactgggcgtcgaaaggtattctttagaactgcaaagaagaatagnnggaagcagggacccagtcctttactttaaatnnttgatgaatttcctttagtcccattgaagaaaaagctccaaacaatgannaacagcatatacttcggacttggcaattatgat

SEQ ID NO: 22527 - DNA, 388 bp, Gossypium hirsutum
  Clone ID: LIB3146-055-Q1-K1-H10
cggacgcgtgggcggacgcgtgggttaaaaagcaaaaattgggtcgatcagattcctctgaacaagcttcgaaacaagtggatgttgcaccaacttccccaagcgatctcactgtgaagaaagttgccgacaaacttgctagttttgttgccaaaaatggaaggcagtttgaacatattactcgtcaaaaaaaccctggcgacacacctttcaaattccttttcgatgagagttgttctgattacaaatactatgcataccgccttgccgaagaggaaaaagctcttttagagaataaggaagaacaaactcctcaaagcggcatttcagcttctaagtccacaagcagctctagtagggcagctccgcagcaatcaagttatcaaat

SEQ ID NO: 22528 - DNA, 290 bp, Gossypium hirsutum
  Clone ID: LIB3146-055-Q1-K1-H11
cctcccctctccaaactgggagggcttcatataaaatcttctccaaccccaacctcaatattttctccactacaactgatttaaagatcatctcaaatggaaatcctctcacctctccccactctccaacataaacccttttcaaacatacctttctcgtaccaaacacttctccaaaatttcttcttcttcatcatcaagggataaaacttcaaaatctgattccatgcgtgatgcacgtaaggaatataaagagaagattattcaaaacactgtatatctcagccgtc

SEQ ID NO: 22529 - DNA, 414 bp, Gossypium hirsutum
  Clone ID: LIB3146-055-Q1-K1-H2
tgagttcatagccactctcctcttcctctatgtcactgttgctactgtaattggtcacaagaaacaacaagatgcatgtgatggtgttggtctcttgggtattgcatgggctttcggtggcatgatctttatccttgtttactgcactgccggtatctcaggtggacacattaaccctgcggtgacttttgggttgtttttggcccgtaaagtgtctttcattagggctgtggcttacatggtgtcacagtgcttgggtgctatatgtggagttgggttggttaaagctttcatgaagcatccatacaactcccttggtggtggtgcaaacaccgtggcttctggctacaacaagggaactgccttgggagctgagattattggaactttcgtacttgtctacacttgtttctc

SEQ ID NO: 22530 - DNA, 419 bp, Gossypium hirsutum
  Clone ID: LIB3146-055-Q1-K1-H3
cccacgcgtccgcggacgcgtgggttcgccttcaccagttccttacatatttggccgaggaggagaatgcagtgcaaatttggagaaagtagttgagagaaggcaaaggagaatgattaagaacagagagtcagctgcaagatcacgagctcgcaagcaggcctatacattggaactcgaagcagaggtggcaaagcttaaagaaatgaaccaagaattgttgaagaaacaggaagaaatgatggaaatgcagaaaaaccagatgctagagaaagcgaatcgaccatggggacgtaaaaaacaatgcgtgagaagaacaataacatgcccttggtagaaaatctcggctggcggtacgaacacgaggggattgcagcgtgcatcgatcatcgatcatctgtattgatgctgcaaaaggg

SEQ ID NO: 22531 - DNA, 423 bp, Gossypium hirsutum
  Clone ID: LIB3146-055-Q1-K1-H4
gagaaaataatgaaaactgagaggtttaaacctgacaaggcgtttgctggtacttctgagaagagtggtccaagagacaggccagttgagtttgaaaaggaagttgaagaagctgatccattcggtcttgaccagttcttgacagaggtcaagaagggcaagaaagccatggacaaagtgggtagtggagggacaatgaaagcaagtgcaggttcgtccatgcgagatggctatgaaggaggatctaatagatctcgcattaatttcgaaagaggacattaatatacatggttctgtagcttgtttatttgctcatctttgttacccagtgaaatcttaaaccctgaaatagcagtctggggtgagattttctctctcttcggtacgtggaatgttgttttattttcccttgtagacttttaa

SEQ ID NO: 22532 - DNA, 423 bp, Gossypium hirsutum
  Clone ID: LIB3146-055-Q1-K1-H5
ggagaccatggataggagatcctgctgatgttattcttgatgacagctcgtctggcacaggcagtgcctcatgaatcacaccttgaactgtgttttcagttcattcctgaagctcggggttactttgctcgaaactctatcccgacctgaccatggagcaattctattacaggattatttgtatttattaagtacagggatggacatggagcatgaggaactgacttgcctcactgttaattatagtaaatacaaagagctgcccaaggagaaaaacgaaattggctatagaccatgtatctcacagatagtgatgatagattataagctggtcatatattatttagataagagatgaatatggtcatttatatgtaactttgtacaaattggacatcacttaattaattattaattaagtat

SEQ ID NO: 22533 - DNA, 431 bp, Gossypium hirsutum
  Clone ID: LIB3146-055-Q1-K1-H7
acggagactttctcggcggagggatttgaagttgatccgttgatcgaacaagtagcggacggtcacgaaggagccgagccgcagctgctgacggcggagcatcacttctcgctgttcaagaagcggttcaagaaatcgtacggatcacaagaggagcacgattataggttcaagatttttcaggttaacctgagacgagcggcgcgtcatcagaagcttgacccttctgcgactcacggggtgactcagttctccgatttgactccaggcgagttcagaaaggcatatttgggattaaggagactgagattgcctaaagatgcaactgaggctccgattttgcctaccgataatttgcctcaagattttgactggagagaaaaaggagctgttacacccgtcaaaaatcagggttcatgccgatcatgctg

SEQ ID NO: 22534 - DNA, 341 bp, Gossypium hirsutum
  Clone ID: LIB3146-055-Q1-K1-H8
ggaccctgagagtggtaaagctgctgagctgaaacgtgaagctgcaagaggagctgtgagggctgccttgtaatggcactgacagactagcagcagtgagatatacagtaaacctcgtgctacttctgcttatatgctctttgccttggaaagagtaaaaactgagcttgttatttgtctatccttgtttttgttgcacatatctttttaacttgttctcagagctacattctgtaaagtttttttttttcttattgtggagtttgattagcgaacaaaaatatgatatttcatgtatgaattgataaaatatatggatacagaattgcctcttgtgaatt

SEQ ID NO: 22535 - DNA, 284 bp, Gossypium hirsutum
  Clone ID: LIB3146-055-Q1-K1-H9
actggaacaaaatagccagcggtcaacacgattgctcgacgtgtgttgactcacctgaaggcaccttggatatttacgtttgcgttggaactatggacatgtataactttgattatgcacatgagctcgctttggccctcgtagtatcagaggctccaaatattaatgatgtgctgcaaccgaacgacttatatggagaaggtggttcgttaacaaaaagacctgtgaactacttgatgtggaggggactcattatctgaggatgtacgcctccctttatgatt

SEQ ID NO: 22536 - DNA, 292 bp, Gossypium hirsutum
  Clone ID: LIB3146-056-Q1-K1-A1
aaatccttgaggcggcggtccaatggcggagaaacctcaaccggtcgtcgttcaatactggcaagtctgcggtttacccgccgaatactgcgaattcggatccgaattcgataaatgtaagccctggttgatccaaaacgcgcccgacctgtacccggatctcctcaaagaagcgaatgctaaagaagctgataaagtttctgatcaattacaatccactggcatctcttctgctgattcaggtagtagttcagaagctaagcaagaggaagttaaacgtcttcctggtggg

SEQ ID NO: 22537 - DNA, 424 bp, Gossypium hirsutum
  Clone ID: LIB3146-056-Q1-K1-A10
caacgtgccaaatccatgaagttcaaagacggatacatgatttcttctggtcacccagtgaacgagtacattgactctgctgttcgacatgttcttctgagacagggagtactgggcatcaaggtgaagatcatgcttgactgggatccaaagggtaagcaaggcccaacaactccactcccggatcttgtcaccatccaccctcccaaggaggatgaagttatcaaggtggaagcacctgtgccgaccgagattgaacttccgccagtggcttaaagccaatgataactgttatgatagtcatctatttgatatttggagcatgttaagtgtcttagattttgtagtttttaagtttggcacctaaaatgaacttatgctggatgcttttttctgaattttccttttgtgtttctcaaatttt

SEQ ID NO: 22538 - DNA, 360 bp, Gossypium hirsutum
  Clone ID: LIB3146-056-Q1-K1-A11
caataacatgtgcgaactgcttaggatcaactgcgaccgaggtgttatgcttgctgatgggaaaaccagattttccatcaacggcaagcctatctaccactttgttggaacctcgacctttagccaatatactgtcgtccatgttggccaggttgccaagatcagtccaaccgcccctcttgataaagtctgtcccattagctgtgggatatgtacaggttttggggccactgtgaatgttgctaaacccaaaaagggtcaaactgttgcagtttttggactgggtgccgttggtcttgccgccgctgaaggtgcaagggtttgtggggcttctcggatcatcgctgttgatgtgaaccc

SEQ ID NO: 22539 - DNA, 420 bp, Gossypium hirsutum
  Clone ID: LIB3146-056-Q1-K1-A12
cccacgcgtccgcccacgcgtccgtgcttctcaagttgattactacgaaatcaatgaagcctttgctgttgtggctcttgcaaatcagaaactgcttgaccttaatccagagaaggttaatgtgaatggtggagctgtatccttgggacatcctttgggttgcagtggagctcgtatcttggtcacacttttgggggttttgaagcagaaaaatgggaaatacggagttggtggtgtttgcaatggtggtggaggtgcatctgcactcgttgtagagcttctgtaagcggttttaaagtaggttcgatattacgatgttgcgaccatttctttttcgggggataaattcatgctctgccaaaacacagtttgatgttgtgcaatttttattccgctctcaaataagttatgtaacgaatg

SEQ ID NO: 22540 - DNA, 409 bp, Gossypium hirsutum
  Clone ID: LIB3146-056-Q1-K1-A2
gcaacccgctgctgctgctgcgttgttcgttcaacaacagcaagcgatgggagaagcgtgggcgggtagggtcggcaattatcttcctggtcacctaaacttgttagcctcgttgtcaggtgctccgggaggatcgggtcgaagagacgaggatccgcattaaaatttggtggaccattttacccttcctgttgttgggagtatatatagattctataaatatttgtgtatggttgttgcttttttgtgtgtgcgaggatgtggaagatgattgctagttggaattcttagggttagggaattagggttttgaggcagataatttggagtatggatgatgaatggattcagattagggtttttccgtagcacttctatttgatgattagttaagggtttggagcaattg

SEQ ID NO: 22541 - DNA, 414 bp, Gossypium hirsutum
  Clone ID: LIB3146-056-Q1-K1-A3
cccacgcgtccgagcccgagttccatgaagcaagttagcgttgtttgggatgcctatgcggcaacaaaggatgctcatgggatttgcattctgacagagtgggatgagtttaaaaccctggattaccagaagatttatgataacatgcagaagcctgcattcgtcttcgatggccggaacatcgtggatgtagctaagctgagggaaatcgggtttattgtctactccattggaaagccattggatgaatggctaaaggacatgccagcggtggcataagactgtattctggaccatggttgagctacaactttataatctcgaggaaaacattatccgatagtatactttataacattcatttcttttagaattaagattatggtatttcaacttatattggattacttggga

SEQ ID NO: 22542 - DNA, 381 bp, Gossypium hirsutum
  Clone ID: LIB3146-056-Q1-K1-A4
cccacgcgtccgggcatcttcatatataataaaaaaataaattattttcgtaattaattaggttgttaaggatatttttataaaaaaaaaaccataagaatgacaacaatcatgaaaaagaaaagggcttcaggccagaatttttcagcccggtccgatccgattttattaccctaaattttttttccgtatttcctctcagacccagtccctcattcggtcattcccctttctcttccctatcagttcttatttcttaaaagagaaaaccgatagctctaagtgccgctctccacctccacggctccaccagtggcctccagcgccgctgcccgtccgtctgtctgcccgtctcgctgcagcccatcaacgttgcttttt

SEQ ID NO: 22543 - DNA, 295 bp, Gossypium hirsutum
  Clone ID: LIB3146-056-Q1-K1-A5
gttgctgtaagtgagggtaagaaagacgaagacaaagacgcgcacagacactgctgaactcgtcgacgggttgagtgtgtggagaaattgaacgcgatggtaaagaagatacgtgtcgctgcctccagcaccaaggaagccgcctgcgatgaagcagagccctaggaagataagaaagatgaggctgcttcataagcattgacctgaaagagaaagcgacactatactcgcgtaagtttattatatctaattaatatgtagtgggttaaggagaaaattatttatatattcccac

SEQ ID NO: 22544 - DNA, 405 bp, Gossypium hirsutum
  Clone ID: LIB3146-056-Q1-K1-A6
cccacgcgtccgcccacgcgtccgcccacgcgtccgcaccaattgatgccatctgtagtggcctggcttgtttctaaaaaattagggaacaggattgctgacaatcactgggaacttagagattttactgcaaagttagttgcttctatatgcaaaagatttggccatgtttataacactcttcagacgcgtcttacaaaaactttgctcaatgcacttctggacccaaaacgggcattgacccaacactatggtgcagttcaagggttggctgccttaggaccaaatgtggtttgtctccttattctaccaaatcttgagccataccttcgactccttgaaccagagttgttactagagaagcaaaagaatgagatgaagagatatgaagcttggcggatttat

SEQ ID NO: 22545 - DNA, 416 bp, Gossypium hirsutum
  Clone ID: LIB3146-056-Q1-K1-A7
caaagcatccggggagttcttgtctgcattctccaatgctgaagcagatcgggatgtttcagtctcggcttcttctgtcaacagtaactgggtctcttcaactctacttcctgcaaataatgctttagagattgcatccttcaactctttcaactgtcaaatgcccaggttctcgtctggacatggtaccattggtatgtatgccggcacaggcggcccgacttgccctgttggtatttagcttcctatgctgaggaagactgaaggtataaatcaaacacaaaatttcacatcagagatcagagatctatagagagccaccaccaccaccgcactacaatcagaaccaccactcaaccgttactcgtaatcatcggcaatactatacttactaccatacaaaatgcgtacataaa

SEQ ID NO: 22546 - DNA, 333 bp, Gossypium hirsutum
  Clone ID: LIB3146-056-Q1-K1-A8
cggacgcgtggggtacccaattgacactgtgcgtagaagaatgatgatgacctctggtgaagcagtgaagtacaagagctcactcgatgcattctctcagatcttgaaaaatgagggagccaagtctttattcaagggtgctggagctaacatccttcgtgccattgctggcgctggtgtgcttgccggatatgacaagttgcagctcattgtgttcggaaagaagtacggatccggtggtgcttaatatctctttttcattttttacttgtttatgtttagatggtgatgaaaagctcgactacccaaaaatttatttcggccaaaaacttc

SEQ ID NO: 22547 - DNA, 394 bp, Gossypium hirsutum
  Clone ID: LIB3146-056-Q1-K1-A9
gaggaactgctgcccttcagttcatcaaatagcccaacaatctctacaatctcgggtgcgcaaatactctgggttggcaaacaagaaaacggtaaccattcatagtgggggaacagaccagtctgtgctactagctaccaccaagactaagaagcagaacaaaccgtctaccttgcttcacaaatctgccatgaaaaaggagtttcccaggatggccaaggctgtcaaaaaccaggtgacagacaactactacaggccagacttaaccaaagcagcccttgcaaggctgagtgctgtgcataggagtcggaaagttgccaaatctggtgtcaagaagaggaacagacaagccttgaagatccatggcaagaagtaagctagacagttaagttgt

SEQ ID NO: 22548 - DNA, 351 bp, Gossypium hirsutum
  Clone ID: LIB3146-056-Q1-K1-B1
cccacgcgtccgagaaaatttcgactatcctgtagccatggatatacgagaactcattaggttggatgatgtgatggaggagcttggcttgggtccaaatggtggccttatatactgcatggaacatcttgaagataatcttgatgattggctgaatgaagaattggacaattacttggatgacgactatctggtatttgattgtccaggccaaatagaacttttttcacatgtaccagtgctccgtaactttgtagagcacttgaagcgcaagaactttaatgtgtgtgctgtatacttgcttgattcccagtttatcacagatgttactaagtacgtaagtggatgcat

SEQ ID NO: 22549 - DNA, 283 bp, Gossypium hirsutum
  Clone ID: LIB3146-056-Q1-K1-B10
tgtcagtccaacgaggaaagataaccattttcctggaccatcccatattgcaccagaagggggttcttcttcttctacgttatcattaactggttcttcaacttcaatcatcgagcaagggcaatgggcaaatttgccttcggaattacttttagatataatacaaagagtggaaacaaaggaaaaatgtttgccgcgaaagagagatatggttgcttgtgcttccgtttgtaagtcatggagggaaattactaaagagattgtttaaacaccggagcaatgt

SEQ ID NO: 22550 - DNA, 98 bp, Gossypium hirsutum
  Clone ID: LIB3146-056-Q1-K1-B11
cccacgcgtccggagaaaagaagaacaacactacaatatcatcaggtttttctttgtttgatcattttaccctttaatggatcgaaaacagattaatc

SEQ ID NO: 22551 - DNA, 468 bp, Gossypium hirsutum
  unsure (1)..(468): unsure at all n locations; Clone ID: LIB3146-056-Q1-K1-B12
tctactcnttttcaacccacactttcttttacacgtcctacatgatccatcattgcatgttatttatctatctcaaactcaaaaaaacatattttttaattatataaatattatatttttttttaaacttttttttttttaatattttcatttttacttttaattttatttttacattctttatctttttatatattatattttttattttattcttttattctatatttaattatatttaatttatatttataaatattatttattatcttaactttatttattttttttatttaatattttttttattttttcatatttatttttaatattatattttatatctgattaatatattatttttattatacattataatttttatttttttatttaaattcttctaatattatttttttttcttattatataaatttttttttttaatctttatctttcctttttata

SEQ ID NO: 22552 - DNA, 300 bp, Gossypium hirsutum
  Clone ID: LIB3146-056-Q1-K1-B2
cccacgcgtccggggaggaaatcatttatactttctttctttttttttttatctgcaaaagtcatggtgggtaaactctatacattttgcagataaaaaaaaaaagaaagaaagtatacatgggaggaaatcatttatctggagaaattttcatttctgaattgaaggactgcaattattgtttatagtggtattttggcaattagttagaagatgaatggcatgttgatggtaaccaagatgagaacaaacatttgtcaacattaattatttaatattaattaaaatatatttaatatt

SEQ ID NO: 22553 - DNA, 425 bp, Gossypium hirsutum
  Clone ID: LIB3146-056-Q1-K1-B3
cccgagtccatcctcccccacgcctacaattccttctatcaagtttataccacgttaaccgaagattatttggtgcttgagcagcctgcttttttcaaggcacttatgacgttggaacttgtttaccaactccctctcgctttgcttaacatctatgggttgttatactctaagccctggttcaacaccacctgcctcctctttggtgcctctatcgttgcctctacgacagctatggtgggagacattctcaattcccagaaggcatcagccaatttgatggccatgtattatccaccgtttcttccattaggggttctggctatagtgcgaggggtggttggacaatcgagcaaggctgctccatccattggcaatggaccttcgtcggctgtgaaaaagagggcttaaagttgatccccgat

SEQ ID NO: 22554 - DNA, 314 bp, Gossypium hirsutum
  Clone ID: LIB3146-056-Q1-K1-B4
cccacgcgtccgggaaaacaggaaagccacactaaaggaagtcgttgggtatgttgttaggaacatcaaaacagcaaagcgcaagagaacctgaggcaaaggatgcaaataatcttcaactgtttcggaatctaaccaaatctactgggacagtatgcgtatggagctgaatattattactgggtttgtaaatttcattttcagctaccaaattaatcctgaacttgggagtttattctgttttagtttggaactatcagcggtctagatctgtggtaccttttttttatcctaattataagtgtttggttcag

SEQ ID NO: 22555 - DNA, 331 bp, Gossypium hirsutum
  Clone ID: LIB3146-056-Q1-K1-B5
acggattgggaacccataacgtgctatccgttgcagtcggtgcatgccatgccatgtgtttagtgtcgagatcacgttgttaacgatgatgtgataaaacaaattcacatacgaaactttaacaatagggtctgcaattttgttttgaaggacacaatgagttccaaggttgagtccatggcgaagtgattcccaatgagggtaggcaaacagcattaaagaagctaacattaatctccattgttacatatttaagccttctgagatttgctgcctactcgatttaataataaaataacaaaatcaacatcgagccttgaatcttggctgc

SEQ ID NO: 22556 - DNA, 373 bp, Gossypium hirsutum
  unsure (1)..(373): unsure at all n locations; Clone ID: LIB3146-056-Q1-K1-B6
ctcaagagggccttattctttttctctgctggggctcctgcgccgatcatgggtccggtcatcggactgacgtcatccgccgcgaggtcgctgtccagaaaatcgaaaaggcgcaagtggaggcactgactaggactgtggagtaggtggccgactggcatgggggatgggacagaggtcagaggcggcagcagctgatttagggtttttttgtttcacctttgattcgggctattagggttaatttgggcttggggtttaaatttagctgggtttagctatttgggtctgggtctgatttgggctttttgggtngcaattttagattgtaaaaaaaactgaacttttaattaaattttggtttttgtttatt

SEQ ID NO: 22557 - DNA, 331 bp, Gossypium hirsutum
  Clone ID: LIB3146-056-Q1-K1-B7
cccacgcgtccgcgagtttatttcttgagctctatatgatccacaaatcgcaacagagcaggcgacactgttgatgagtactattctgaaagatccagggcattgctggaaaacatgcacacagtcttcttttccattccccgcatcaaggacataaagcactattaatcactcgcttgtattttagatttgcaaaattcgaaatcaagcatttaaattgtggtaacggccgcgttttcgttcgtgttgcgtttatcgcagttgctgacataagggatcggttgtgaatttttttaaaatttgcacaatttaaaaaaatcacttttgaatg

SEQ ID NO: 22558 - DNA, 432 bp, Gossypium hirsutum
  Clone ID: LIB3146-056-Q1-K1-B8
gatgccttggagaacaagataaaccgaacccctttatccacctgtgaatggttcagagatttcagccccttaagggcacaccacaaccaccatgccctggcacaacaagcatactattacgtagcggtgaaattcaaggaactatattcatcgatatgcggccaaaaactgtttgtttggcaaactaaagggcgagaacgcagatcaatcgatgaagcattcaaatatatcagggaagtactgaaatgggacgaagagaaaaacgagaacatgtacgaaatccatggggacgattcgttttacagtacagaaatgagttcatctccttatataaggcaagaataattgcagatttgatttatttaaaagatttttaacttggcaaatttatcatagattttgcagcagattgaatatctgtatagtttattt

SEQ ID NO: 22559 - DNA, 434 bp, Gossypium hirsutum
  unsure (1)..(434): unsure at all n locations; Clone ID: LIB3146-056-Q1-K1-B9
cccacgcgtccgcccaattgaagttccagcgcagcaagcggtctgttgctgaggagcgtgctggccgaaagttgggaggtctcagagttgttaactcgtactggatcaatgaggactctacttacaagtactttgaggttatcctggtggatgttgcacacaatgctatccgcaatgacccaagaattaactggatctgcaatccggttcacaagcacagggaacttcgaggacttacatctgctggtaagaaaaacaggggtctccatggaaagggtcatttgcaccacaagaaccgtccttctcgcagggcaacctgnaagagaaacaacactcttttccttcgccgctaccgctgagttactgtgttccttagactttttatcctagttgattttagaagtcattgttttgagtttgaaatttttggaagt

SEQ ID NO: 22560 - DNA, 258 bp, Gossypium hirsutum
  Clone ID: LIB3146-056-Q1-K1-C1
gttaaaatgaaaatgaggttttgtattgtaattggcagctttttgggagaacatatcaggttcattgtgtgggtttttggtccgtgtaaagatggttagaatcatgaagtaggtgtatggttttttattatttgtaatgcgccaaacttgattcaggtgtaaagatggtatttttgttctttctgagaaatatcttgttatttttcccgttctcaacttggttaattgtgtaaggctgttagtgaaaattttctggtt

SEQ ID NO: 22561 - DNA, 429 bp, Gossypium hirsutum
  Clone ID: LIB3146-056-Q1-K1-C10
cacagaccaggaaatccccaaaaccctaaccctatagttgcaatttcgacgtttctcgctcggaaaagaaaaagcgtcagaaaaaaaaccaaacccagttctgaaaccaaagaacccgaccaagatttcatggttaaaccctaaaccaaattgtataacccaaacgacgatactcctaaagcgtgttcgatgcctgccgatggggattctatggttgcaagtattgctgcttctgctgacccgcttgcactctttaacgatagtactcctaaagagtggttgagaaatgttgtgttgcctgatggttgggattctatgttggaaaagaagattgtagtgatggaaatggaaaggaagaaatcggatgaagcttgtggtgatgagaaaaatgaagttgaagttcaagtgaagaagaaaaagaaaaagaaa

SEQ ID NO: 22562 - DNA, 410 bp, Gossypium hirsutum
  Clone ID: LIB3146-056-Q1-K1-C11
cttaaagaaactattgaatggggtggccgaaacatggacaagaaaaagagcaaacttgggggcattgtagacgatgatcatcaaactgataatagatttaaagatattcgcattgaaaggacagatgaatttggtcgaattgtgactcctaaggaagccttccggatgctttctcataaatttcatggcaaggggcctggcaaaatgaagcaagaaaagcggatgaagcaatatcaggaagagttgaagctgaagcaaatgaaaaattcagatacaccttcactttcagtggagaggatgagggaagctcaagctcagctgaaaacaccctaccttgtccttagtggtcacgtcaaaccagggcaaactagtgatcctgcaagtggctttgctactgttgagaaggattt

SEQ ID NO: 22563 - DNA, 425 bp, Gossypium hirsutum
  Clone ID: LIB3146-056-Q1-K1-C12
gcaatattttctaaagcttatgttgaggctgccactaagatgaatatgactagagtagaaactgtggctccattcggactctgctttagttctaaagggccattggtgcctgaaattgatctagttttgcaaagtgagatggtgaagtggagaattcaaggtaggaattcaatggtgaaagtgagcgaagagagcatgtgcttgggttttttggatggagggttggagcaaagtagcccaattgtaataggagggcttcaaatggaggataaccttttggagtttgatattgggagttccatgttaggatttagctcttctttgttgttgaaggaaacaacttgttcttcatccttacaggattccaagctgaagcaatttatctgatttatctttatcctttttctacttttctcccttttctt

SEQ ID NO: 22564 - DNA, 422 bp, Gossypium hirsutum
  Clone ID: LIB3146-056-Q1-K1-C2
cccacgcgtccgttctcttcgcagtttagctccgtatgtcgtacagtggctattagacgcgcatagcacccagatacttcttatggtgttcatgggtgtagtttctctcttgttagcgggtttcttcgcatatcacgctaatctttgtctcacgaacacaacaacaaatgagaccttcaagtggcaagactacataagctggcagaagaaactgatcgaagcacgagcgagtacagcggcactgaaagcgaacatcgccgggatgactactgaaggaaagcctcgagagagcaaatgtaaatccttcttcagacagtcccttctacaggatactgaagccattgtaaagaagaatgtgtatgataaagggttctttcacaatctctacgaggtcgttttcccagtttcaacaagagcatcat

SEQ ID NO: 22565 - DNA, 356 bp, Gossypium hirsutum
  Clone ID: LIB3146-056-Q1-K1-C3
gcagacccgaacgagtaaggcacagctgagctgcacaaaccaactcatcaacctgaatgtgtgcgcaccctttatggtgcctggtgccaccgagacccagcctaattccctgtgttgtggtgcactccaagctgtgcaacatgattgcctctgcagcactctcaggattgcttctcaacttccttctcaatgcaatcttccacctctctattgtgccacctgacatatatgcatgcatgcaagcaagctggtagaatatatatatatggctgcagttttatttttcttttggaatgtgtgtcatcatatgtgacaaagcaaatgcaatggagatcaaagttataattagtacttgg

SEQ ID NO: 22566 - DNA, 401 bp, Gossypium hirsutum
  Clone ID: LIB3146-056-Q1-K1-C4
aaacgatgcgttgagatcaatagtgaatgcagagaagagaggcaaagcagcaaagctacggtggaattgaagccgatctccaccgtcatatcttcctttctcactatcatgaaatatcgaggatacatcaggaactttgagcttttcgatccgcatggagttgggaagatcacagttgaaccacaaggcagggtaaatgattgccaagcacgcacttaccggcaggacatcaaagtgaaggatatcgagaagtacacaacatttaaacttccaactcggcagtggggttatgttgtgatttcaactcctgatggtattttggatcacggagaagccattagaaggaatgtgggtgggcaggttcttggttattttcattagacttcattttttatgcacac

SEQ ID NO: 22567 - DNA, 335 bp, Gossypium hirsutum
  Clone ID: LIB3146-056-Q1-K1-C5
tccgcccacgcgttcgaaaagggcttgattactgttcacattttcatacttacagcctatccaaggtgaggggctctcaccagtttcctcctttatggattattcttttgtttaaaggaaaactatagaaatgatatagaggaagtacgaaattgatgtcttaaatctgaaagctgatacaagcctagtagctctgctgaaagccggtttaaccaatgcttagagttgcatgtagtgactagagccttgggacgaaccaaagtaccattcatcacattagatttacatcttgatccaagcgaagaagtagcattcatttgggttgttcactttgg

SEQ ID NO: 22568 - DNA, 431 bp, Gossypium hirsutum
  Clone ID: LIB3146-056-Q1-K1-C6
gattgaaccaaaccaagttgactctgaagatggataaagcgtatcatctctcttactttttcttttcatttatccttttctcctcattaaggaattcttacagcttttaccatcttgaactgtaagaatgaaacaattgtttggtacaagcggctgtgattgaaccaaaccaagccgaccctgaaggctcatcaacttgagaggtatggttgtttatatgaaatgatcatgatggatggttttctgggtttgctgttaataatgatttgaaggaattaactgacaattagaacgcaattgagagttagtagtgttagctgttgttacttttctaacaagggaacggttaaaaagcagaactgatgagtggtgccccgcctactgctgtagaccaaaatttcataactacgaagcttcttgtcgggatgatg

SEQ ID NO: 22569 - DNA, 422 bp, Gossypium hirsutum
  Clone ID: LIB3146-056-Q1-K1-C7
cccacgcgtccgatcaaatccagacacccttatctctgcatttacagcctaactgggtggagtttcagaccatcaaaaagaaatgttgccttgtgtgggaagtaaagcaacactcctttacagaatccataagaatatttcttttggcaacttttccaatttatctctttttaaacacacaaaaaagccttttgtttttgaagataaatccaatctcctcatcgttagctatcctgtgtgaaggttctttccatttctcagtctgcacataatacaagagatggagaaaccttaaattttaaatacccttttgcctggcagcattacttggtgctctttatagaagaagaaagggcaatctagtactaagcattttcatccttgcattgtttttatgctttgtgtgagcacagtaaattgtg

SEQ ID NO: 22570 - DNA, 141 bp, Gossypium hirsutum
  unsure (1)..(141): unsure at all n locations; Clone ID: LIB3146-056-Q1-K1-C8
gaattacccgggctcggacccacgccgnntccgcttgtcctttcgagtgtcncanctccaggctttgctgtagattncaatggctannctacatnnccccaaagaacacgcatgtgctgtagtnngtcaacaaaatttggg

SEQ ID NO: 22571 - DNA, 425 bp, Gossypium hirsutum
  Clone ID: LIB3146-056-Q1-K1-C9
cttgttgaaattcctgaaactgtttaaccagcagcagcagaacctgttaaagaagggggagctgatgaagaatcagagcctttagacagctaaacctttctcgatggcagaatctcgtgttattgaccattcaaagtcgtgtcaaggagctgtcccactgaacacggtattttttgcttaaaaattacgtattccatgatcagtagtttcactgcctaggagatgaaataatcacagataaaacttccgtcaaatgccggccgggcatacaggcgaaaattcgaagcagtagaaggcaattctttcatgagcattagaaaggaaaaagtggacaactatgtggcatgcatgtaaatgctttccctgtgttgtatgtgaaaatataagttgcagatacggggagcatgctatttacagcaatgtga

SEQ ID NO: 22572 - DNA, 502 bp, Gossypium hirsutum
  unsure (1)..(502): unsure at all n locations; Clone ID: LIB3146-056-Q1-K1-D1
cacgccgnntccgggggatgtaaagggaggagnngagatgtaagtggtgtaggtataggaagaaggggagaaaanttggggtatgagagaagagcagtagctgaaggctatgggtttgcctggtgaatggtgaaggtttgtaaaggaaagagaaagacttctctccacactctgtttgattttgaaagcttaaacctttatnnttccacctcttccaaactggatgacaaaggggacaaaaatattgtcnccttctcaaacctttgatcctgctaaagcctccaccttgccaagggctcaagttgtgggaatgggccaccggtccggtcatttccgaaaagaacatgttagccacccaaaagagcagcgccagcgaggacagtggtgagaaggccgcctttgtgaaagttagcatggacggcgcaccctatctccggaaagtggacctgaggatgtacaaaacttaccaacaactcttcgatgctctagctaaaatgttcag

SEQ ID NO: 22573 - DNA, 381 bp, Gossypium hirsutum
  Clone ID: LIB3146-056-Q1-K1-D10
attgaggtggccaaagttattttcgccattgttatgctcttgttccagtctcggcataagaaagttggggaaaaatctcttctctcagtttctgcactagttcaggctgctcgaaataatgttcttcttgcagttccagctctactttatgctattaataattacctaaaattcatcatgcagctttatttcaatcctgcgacagtgaagatgcttagcaacctgaaggttttggtaatagctatcttgttaaagataattatgaaacggaagttttccattcttcagtgggaggctctcgctttgttgcttattggaattagtataaatcagttgcggtctttaccaaagggtgagcagtaaatcttggtaataataata

SEQ ID NO: 22574 - DNA, 117 bp, Gossypium hirsutum
  Clone ID: LIB3146-056-Q1-K1-D11
aaaaaaaaaaaaaaaaaaaaaaaaaaaaaaaaaaaaaaaaaaaaaaaaaaaaaaaagaaaaagagaaaaaataaaaaaaaataaaaaaaaaaaaaaaaaaaaataaaaaaaaataaa

SEQ ID NO: 22575 - DNA, 421 bp, Gossypium hirsutum
  Clone ID: LIB3146-056-Q1-K1-D12
agagcaagcacttggtggtatttacagtgttcttaaccagaagcgaggacatgtgtttgaggagatgcagaggcctggtactccactatacaacatcaaagcataccttcctgttatcgagtcatttggattctcaagcaccctgagggctgcaacttcaggacaggctttcccacaatgcgtgtttgaccactgggatatgatgtcatcagatccattggaacctggttcccaggcagccaaccatgttgctgagatccgtaagaggaagggattgaaggagcagatgaccccgctctccgattacgaggacaagctgtaagctaagcaacaaaataataattaattgaagaggttacgttacccattttatgcaatgctgctagttagttccttctatattttgtttactgttggactt

SEQ ID NO: 22576 - DNA, 383 bp, Gossypium hirsutum
  Clone ID: LIB3146-056-Q1-K1-D3
tgaaatataggaagtaggaaccatttatgtgggctttgatatttgggattgattctttggctcgattattaaaaggggaagctatgtaggttggcatggcatctcaaaacattaatctactacaaactacaaatggctgaagaagtttatccttttccctttttgatgcactgagtaccacttcatttggcttcagaggttttacattcttttaaacatttaataatgtctgttttcgtcttcttgaagaatagtgtgaattttagcactgactttagccttgagttgtacatgactcaagcaatggaatgacattaagaatcatactagataaaatagtacaggaatagatgatgaaacttatactatgcaacttcttgaat

SEQ ID NO: 22577 - DNA, 380 bp, Gossypium hirsutum
  unsure (1)..(380): unsure at all n locations; Clone ID: LIB3146-056-Q1-K1-D4
cccacgcgtccgcccacgcgtccgcccgagttggaatcgggaaaccaccgagtcaagtatacatggtactcgacacgggcagtgacgtcaactgggtacaatgcgcaccctgcgccgattgttaccaacaatccgacccaatcttcgagccatctttgtcgtcttcctactctccgctaaagtgcgacacccaacaatgcaagtaccttgacgattccgaatgtcgaaatgaccgtacatgcgtctacgaggtgtcctacggtgacgggtcttacactgtgggtgactntgtcaccgaaaccatcaccctcggctcggattctgtcaacaatgtagccattggttgtggccataataacgaagggttatttgttggagcg

SEQ ID NO: 22578 - DNA, 69 bp, Gossypium hirsutum
  Clone ID: LIB3146-056-Q1-K1-D6
agattctggaaaccatggcagttcctttcaaaaaaaaaaaaaaaaaaaaaaaaaaaaaaagaaaaggag

SEQ ID NO: 22579 - DNA, 262 bp, Gossypium hirsutum
  Clone ID: LIB3146-056-Q1-K1-D7
cccacgcgtccgcaataagcggaggaaattatacccgaacctgaagaagagtctggggacgatatgggattcagtctcttcgactaagtttatttgtgttaaagcataaacatataggattgttgacaggttacattatctgctttattgtttctcatagttctcgttgatgtactttgattgctctaagttttggatgatttgtgaagtcttaatttagtcttttcgcctgttctatctacatctcagtttccattttgtg

SEQ ID NO: 22580 - DNA, 303 bp, Gossypium hirsutum
  Clone ID: LIB3146-056-Q1-K1-D8
ttaaaagtataagtgattttggctattggcgcctatatgtttgaaatgtattgagccatgagatttggcttgtttataatgtgaggtttgatatgtagatggccttataattggtatgtaattgtggttatgtggtaagctttagtaaagttattgatgcattagtggaagtgtccaaattgatattcatgattgatgaataatggtatttacgtgtttgtttatattggtattgagaggttaggttgtaattgagatgatgaaaaaggaatggagtattttaggtctaaaagacattgattt

SEQ ID NO: 22581 - DNA, 420 bp, Gossypium hirsutum
  Clone ID: LIB3146-056-Q1-K1-D9
cccacgcgtccgagaagatgatgaaccaagaattcaggcttggtgataatgctccggatgtgagctgggctgatcccaaaaatgccgattcttctgctgcttctcaggtgaaagcaatttatgtaaagaacttgccaaaggatgtcacacaagatcagttaaagaagctatttgaacatcatgggaagatcacgaaagtggttctacctcctgcaaaacctggacaagagagaaatagaattgcttttgttcattttgcagagagaacttgtgccatgaaagctctgaacgactcagaaaaatatgaactggatggtcaagttgtggaatgttctcttgcaaagccactaacagatcaaaagactcctgggggttcaagttctcagaattcacgttttcttcctaattatccacctcacg

SEQ ID NO: 22582 - DNA, 407 bp, Gossypium hirsutum
  Clone ID: LIB3146-056-Q1-K1-E1
cccacgcgtccgcccacgcgtccgcccacgcgtccggtgcaattaatgacttaagtggaaagtggctcggcagtcggcagattcgttgtaattgggcaacaaagggtgctagtagcaatgatgacaagcagagctctgatgccaaaagtgtggtggaacttaccaatggctcatctgaggatggtaaagagacaaccaatactgaggctcctgagaataatcctcaatatactactgtttatgtgggcaatcttgcttcagaggtcacccaacttgaactccatcgtcatttccatgctcttggtgctggggtgatagaggaggttcgggtccagcgtgataaggcctttggctttgtgagatacagtactcatgctgaggcagctttggctattcagatggggaat

SEQ ID NO: 22583 - DNA, 405 bp, Gossypium hirsutum
  Clone ID: LIB3146-056-Q1-K1-E10
gatgagaaatccctcatgtcaagggtgaattctctgtgttgtcttttgcaaaaggacaatacaacaggcacaagctcacaggcaaatggagaaaattacgatggaggtgatgatggaaaagatgttcagctaaacagaagtcatgggtttgagtttaatattacgggcaaggatgatgtgaaggcttttgaaggggaaacaaaggaagtgtctagtagcaggcaggcgccaggcatgtcaagaaaagactcgtttagtgagttgctgcttcatcttccccgaatcgcatcgctccccaagttcttgtttaacatttcagaagaagatggagagagacaagctagataagatagttttcttgtttatagactgtgtaaaacaaatgataagaaaaaatattaagcg

SEQ ID NO: 22584 - DNA, 337 bp, Gossypium hirsutum
  Clone ID: LIB3146-056-Q1-K1-E11
cttataatcaaaatcaagaacatatacaaaatatgagcaaaatgggaaggaagcttcatggcttataaagagcagattgaaaaagagtgccaatctgatccatttcaacagttgagaaagtgacctttgcttcaagcacaaccagatgtcttttacctcttgcctcttgggcttaaactccggagtatcagtgaatgaccaagtttgatgctttttggatttaaatgattgtgatatataagcatgttttgttatactgaatactggtaatgagtgctataaatccgaaaaattttgtattttaaatttgaagaacggagtttcattttcttctttt

SEQ ID NO: 22585 - DNA, 98 bp, Gossypium hirsutum
  unsure (1)..(98): unsure at all n locations; Clone ID: LIB3146-056-Q1-K1-E12
gcaaaattttttgagcggtttccctttgaaagtttttcacaattacctctgtcttgcacgtcttgttaatgttatcaatgagatcagaaaccgtanct

SEQ ID NO: 22586 - DNA, 364 bp, Gossypium hirsutum
  Clone ID: LIB3146-056-Q1-K1-E2
atttgtgtagtttcaggaactggattcttttgaacccatttacgaatttggatatagcacagcgaagggaaaaggtttttgtttagagttataacttttttaagtgcaggaggaaacgaaggttttgaaggagctggtgggtttgggtcagctagtaatatcgggattggttgaggaatttttgcagagtaatcaacaagatttaagttcgttatgatccatgctatctatccagccatcaaagcgatcatatgcacataactcacacgtacagttaagagcccatggacaatgtcctgttttgggatctctgaacatatagtgtggtttcccatcagcagtaaagctttcagtaagctttttt

SEQ ID NO: 22587 - DNA, 350 bp, Gossypium hirsutum
  unsure (1)..(350): unsure at all n locations; Clone ID: LIB3146-056-Q1-K1-E3
atgattcaaaagaaaaaattcgagaagtctatgatgctttagatgcagtgaattctgaactggcagaagaacgggagaatgtagcatctttgttaaggagagttgagtccttggatcttatcgaaggacagcggctcctgctgcagaaagagctcaagaagtgcaaggaaaatgcttgagggaagccgctaagtctcaaatacagttcaaagagcaagctntgcagatggaaaatgaatccagagagaaacttanggaagtttgtgatgctttagaaacaacgaaatctgaattaaccgaagaacaagagagaacagcttcattgatgataagtgtcgagtttttagatc

SEQ ID NO: 22588 - DNA, 425 bp, Gossypium hirsutum
  Clone ID: LIB3146-056-Q1-K1-E4
cggacgcgtgggcggacgcgtgggcttggctgattataacatccagaaggaatcgacccttcaccttgttttgaggcttcgtggaggcatgcagattttcgttaagacattgactgggaaaacaatcacattggaggtggaaagttcggatacaattgacaatgtgaaggcaaagattcaggacaaggaaggtatccccccagatcagcaaaggctcatctttgctggcaagcaattggaggatgggaggactttagctgattataacattcagaaagagtccacccttcaccttgttcttcgtctccgtggtgggcagtgagaagttaattcttcttctgtctttggtctagcttaagatggtcacaaataagcctttaggaaagtgcctattttcttatctcttaatgtaacatgttaatcta

SEQ ID NO: 22589 - DNA, 372 bp, Gossypium hirsutum
  Clone ID: LIB3146-056-Q1-K1-E5
cccacgcgtccgcccacgcgtccgattttggatgagatgaggaagaaatcaagggaagatgggcttcagaccacaggagaaggattggagtggggagtgctctttgggtttggacctggcctcactgttgagactgttgtgctccatagtgttgctgcttaaagttaaacaaacatgccttttaagtaattggtcgtgctccacttggcttgcagttttatcttcttcttttttccttttttagaatcctatgaatttgtgtgtttattgttaaagactagaagcctttgatggtgtgggcgggaagcttaacgcctattcagttcatgtatcaacttatattaaatttatggcaataataagttactttgc

SEQ ID NO: 22590 - DNA, 351 bp, Gossypium hirsutum
  Clone ID: LIB3146-056-Q1-K1-E6
gaacgagtgggttatttgtagagtattacaaaagagtcccaatggcacaaaggtacatatgtcaggtttgcctccactaatggatccctcggcggacaccagcgaaacatgaaccgtggtgggcgccggcgagacgtcaaacgtgacctgcttctccgatccaatagaagcaccgagagcagtggaagaaatgatggacagcttcgacacttacattgcaccttgttcattatgctctgtgaattctatttaaaaagcttcctacaccacctaccaaatgacgtcgatcatgggaaacttgcagtacccggattggttttggattcaacaaccgtccttattgaagacatt

SEQ ID NO: 22591 - DNA, 419 bp, Gossypium hirsutum
  Clone ID: LIB3146-056-Q1-K1-E7
ccagactcccccaaaaccctcaccacaaaagaaatctcttctatttttccccactctactgcaaaaatgtttcgatccgttgctagatcggccgccggtaagagcctcctccgacgaggatatgcaaccgccgtacctgaacggaaagtcgctgtcttgggcgcagctggagggatcggccaacccttggctctcctcatgaagcttaaccctcttgtttctcaactggctctctatgatatcgctaacactcccggtgttgccgctgatgtcagccacatcaactctagatctgaggttgccggatatgtaggtgaagagcagttggggaaagctttggagggatgtgatgttgtcatcattccagcccgggtgcctagaaagcccggtatgactcgtgatgatcttttcaacattaa

SEQ ID NO: 22592 - DNA, 419 bp, Gossypium hirsutum
  Clone ID: LIB3146-056-Q1-K1-E8
cccacgcgtccgattttttttttttttttttttttttttttttttttttttttttgtttggttttttttttttttttttttttttatttttttttttttttattttttttttttttttttttttttttttttattttaatttaaattttttttttttatttattttttattaaaaaaaaaaaaaaagctcttaaaaaaaaaaaaaaaataaatcttcctaaatagaaaagtataaatttttaaaaaatgccaaaaaaaaaaaaatttttgccccttttattaaaaattttaaaaaaaaaaaaattttggtcaaaaaaaaaaaaaaaaatcaaaaaaaatatttttttttgaaagttttaaaaaaaaaaaaaaaataaaaacaatccttatttaaaaaaattttttaacattaatttaaa

SEQ ID NO: 22593 - DNA, 304 bp, Gossypium hirsutum
  Clone ID: LIB3146-056-Q1-K1-E9
attcatccaggatagctccaatgggcatgatatttattccatgttacaaaggatatagtcataagccagaggagtatgcgtcacctcaggatttagaaaatggggtgaaggtattagcgctaaccttggccaagttgtctttgcgttgatgtgttgttgtatattgtagtttttattaggctggttaatgccactctttgtcaatattttcaataataacaactttggcatttatgaaaactttgtatcatgtttgagaatccaatctcaaagataatggaactcctacaatttggctttcttc

SEQ ID NO: 22594 - DNA, 279 bp, Gossypium hirsutum
  Clone ID: LIB3146-056-Q1-K1-F10
cccacgcgtccgcccacgcgtccgcggactcgtgggttacaattgaatttccaaggttgtgatatgtttctaaaaggaattttagttacatttttctttagctttaccaattgccttttctgccttgcccttacaggcattgcggttttgttgtcacggactgtcgtcataagaactttaagtttgggtttaaattgagcttcatgtgattatattttgctacatactattattttactactcaaactcgagtgaatagcgaaggaaaattactgctgt

SEQ ID NO: 22595 - DNA, 430 bp, Gossypium hirsutum
  Clone ID: LIB3146-056-Q1-K1-F11
aaaaaaaaggggggggtttcatcaaaaaaatgggttctttgttctcaaaacaatttgaaaggcgtaaaaatatcaaggctgaaaagaaaaccctttgtgatctcaatgaaaactgcggtgaatcgtatcccggaagtgattaccggccagcggataggaagaattggatggccggacttggggttgataaagtttatataaacaagattgtatggccgggaactcatgattcggcgacgaacaagatcggtattccgtttattactcgtccttttgcacagtgtcaatcgctatcggtataccaacaactcgttaaaggtactcgggttttggatattcgggtcaacgagaaccgtcgtgtgtgtcatggggttttaacgacgtacggtatcgatgttgttatcggcgatatcaagaagttcttgtcgga

SEQ ID NO: 22596 - DNA, 451 bp, Gossypium hirsutum
  Clone ID: LIB3146-056-Q1-K1-F12
ggaaaacccggcccgacccacgcgtccgatgcaagcaaatctatggaaaagttttatttatttgaaatcacatttagataacgggttggatttcttttctactgtttagaatatgtattgtagtgtgcgtatctcatccccaaaaaaaagagagactttacaatcgaaatacacagggctttatagccaaaatccgaaaagatcaaaacataaaaaataaaaaatacaacttttctttgtttttctatttgctactgctgcggtttgactgttcttcgcaggtacggtgtgcgttggcatcgtacggaggctgtgctggcacttgcgtagctgctggagggtactgaggcggtactgaagctggtgctgctgctgcgcaaacagattgctaaggttctgccttatttttaatcttgggccacttgggctgatataaattggactagtttta

SEQ ID NO: 22597 - DNA, 368 bp, Gossypium hirsutum
  Clone ID: LIB3146-056-Q1-K1-F2
caagaagctgctaccaaatttggaaaagacccaagatcctatgaggttttgactaagaggtttagaggagatgataatggaaatgtgaaaggacttgaggtggttcgtgtgcgttgggagaaggatgccagtgggaggttccaattcaaggaagttgagggctcagaggaaataatcgaggctgaccttgtcctgctagccatggggttccttggccctgagtcgacactggcggaaaaattatgtgtggagcaagacaatcgatcaaacttaaaggcagagtatggccgcttcacgaccaatgtggatggagtctttgcagctggagattgtcgacgcggtcagtcgttagtcgtgtgggcaatctc

SEQ ID NO: 22598 - DNA, 416 bp, Gossypium hirsutum
  Clone ID: LIB3146-056-Q1-K1-F4
gctgtgaagacgttggatacaagaattccaattatttcgctcattggatcattgtctaaggcgaaattttgaaacacctagggcattcccggaagagatcgtccatcgtttccactactgattcacaccgggggcaaatgacattagtaattagctttttgtattgcatgttagctcgtgtaggcaagtaattcaaggaggttttccaaactgtaatcttaattttggagggtagatttaatagccatagttttttatagaaactacttagtcagtttttaaagcataaacactaggatcttccgacctttgtaatagtttataggcactacggacaaagtattctctcgagagttcaccattccaagccagaaaatcatcacgaggtgctttcgcaagaggaatatgcaaaatct

SEQ ID NO: 22599 - DNA, 427 bp, Gossypium hirsutum
  Clone ID: LIB3146-056-Q1-K1-F5
cggacgcgtgggcggacgcgtgggcggactcgtgggcggacgcgtggggttttaggaaagggggctggtttcacatgggaagaggctaagatgcaggctgctgaaaaggcccttggaagtctaagatcaatgctcggtcaatttactcagaaacgtcaaggttctccaaggtcattgcaagatatgccaagtaaacgcctaaagcctgagtttccacgtgttctacaccggatgccctcttctggtagatatcacaagaatgctcctccggttccttgaagacacctcgatatggtagatttttcctcattttatagtgtagcaattcttgtgacatctgtacagtacgcaatatggactacaagtgcacaacgggtgaaggccatcaagacctgcaacccacgttgactgttaaaaacttcgagtg

SEQ ID NO: 22600 - DNA, 422 bp, Gossypium hirsutum
  Clone ID: LIB3146-056-Q1-K1-F6
gagagcactagcattagcactagcactagtagcaaccatggcctccgccgcatgtttcttgcaccaccacgcactcacaaccaatggcagatcatcatcattatcgccgtcgctgcgccaggtttcaaacatgaagcctacccagcaggtggtgtgcaaggctcaaaagcaggaagatgatggaagccttgtgtcccgtaggttggctctcactgtactcattggtgctgccgctgttggctctaaggtttctcctgctgatgctgcctatggtgaagctgcaaatgtatttggaaagccaaaaacagacacagacttcatgccatacagtggggatggattcaagctctcgataccatcgaaatggaacccaagcaaagaggtggagttcccaggtcaagtgctgaggtacgaagacaact

SEQ ID NO: 22601 - DNA, 373 bp, Gossypium hirsutum
  Clone ID: LIB3146-056-Q1-K1-F7
aatggaattggaaggacctggaaagggcaacttgaaaaacgtacgtgagcaggcacaaaaagggtctgaaaagatcggaaggttgcagttcgaggtgcagagcattgagtacgttatgctgaaactagaagatgaaaggaagaacaaagggaaaacccgaaccggtgtcctcttaagggactttatctacaatggtggaagacggggtggaagacgaaagaagggttgtttttgtgggtgtgcaagaccttcttccagtatagactgaggctaagcatatacagaaaaaaaaaggccctgttgttgcttgataagattcaaagcatgcctaattttcaaggaatttatatgcttaggaaacttgttttagagc

SEQ ID NO: 22602 - DNA, 424 bp, Gossypium hirsutum
  Clone ID: LIB3146-056-Q1-K1-F8
cccacgcgtccgcccacgcgtccggaattaaattccctataaaatcgtttctcgtaaattgccttttcgttttaaatcaaacccgatttcctggtttctttttcttcatcgatcgtcgccggcggaaaaacaagaaaaatcaaaagcaaaaagcttgcagaattagaaaaaaaattatgggttctgaacagaatgaaggaacaagctttccaccatcggagccaaagctttgtgccaacggttgtgggtttttcgggacggcagcgaatatgaatttatgttcaaagtgttaccgggacctccgtgttggggaggagcaagcggcgaaggcgaaagctgttatggagaaatctctcagtatcaaaacgaagcatgaacctgtcgttgtgagacttttagcctcatgtggttcttcgtctacatc

SEQ ID NO: 22603 - DNA, 421 bp, Gossypium hirsutum
  Clone ID: LIB3146-056-Q1-K1-F9
cctttgtggaggacatgaaggttttccaaagggagaggttaaacggccactatggtgtaactgcatttgttatagggaatacactgtcagctatgccattcctcataatgataaccttcatctctggaactatttgttactttatggttcgtcttcacccaggctttgaacattatatgttcttcgtgttgtgcctttatgcgagtgttactgtggttgagagtttgatgatggccattgccagtatcgtccccaatttcctcatggggatcatcacaggagcagggattcagggaatattcatgcttgtttctggctacttcaggctcccaaacgacatcccaaaacctgtgtggcgttacccaatgtcctacatcagcttccatttctgggctttacagggacaataccaaaatgatct

SEQ ID NO: 22604 - DNA, 432 bp, Gossypium hirsutum
  Clone ID: LIB3146-056-Q1-K1-G1
accgagctgaaattatccgagatttggcatggaaggtagggctgcttcatgagcttccatgtgaaattaaggagaagttcagtgactcagaggaacagtatttcaaagatcattctaaatctttgaaaatgtacatgtcacagctgagtcttgatgtaaatgtggatatggtgcctccgaaagatccctacatcaaggtaagagtgcttgaagatttgggaagtggaataattcttagtgataaatctgccaattttgctagccactcaatgcactttctgaaacgaactgatgcagagcaatacattgcacggggcttaatggaggaattgataagctgagcctgaaacagttgtttatatgatgtttcatatcttcagcggccaatgcggttagcttaataccgaacctgtttattcactcttaagtgca

SEQ ID NO: 22605 - DNA, 385 bp, Gossypium hirsutum
  unsure (1)..(385): unsure at all n locations; Clone ID: LIB3146-056-Q1-K1-G10
gctcagcaacaatcctcaactcatacggtgtaccatcagtttattcctcaaaaaggagtgactgaagatcgtacggtgaacagatcangtgcaaacaaatgtactgcaggatggctttgatcctttctaacccattaccactgcgtagctgcaagacattcttcattataattcttatcatatttggggaaaaatataaattaaattaggatgcatatgtaccttttctacatatatatttatatacattacagtgctatatgtctttaaaagattaatactgtctagacgtaattaataacccatggaatgaagaatccttgtaaactatatatttttggcagtaaatttgttaatattgcaacatttataatctatttttatt

SEQ ID NO: 22606 - DNA, 369 bp, Gossypium hirsutum
  unsure (1)..(369): unsure at all n locations; Clone ID: LIB3146-056-Q1-K1-G11
attgtcttcctanatgtttcctttttcttttccttagttttgctttttggagagcactgcctattttagatttcttcaaccaaactccctgtatttcgtccataagaatgcctttcaagatctttccggaagacttgctgctggtttagcattcatgggagttcggttccctcctcgttgcttaaactattattctccatctgtgatatcttagcaacttcttaggatctttcattccttgggaactgttacatcagatcttttcttagtatggcgtccttatttccattacttttatactctgcgtataatgtttactcctataaataacaaattcatagtatgttcgtttatttttcaacattttta

SEQ ID NO: 22607 - DNA, 301 bp, Gossypium hirsutum
  unsure (1)..(301): unsure at all n locations; Clone ID: LIB3146-056-Q1-K1-G12
acccacgcgttccaactgtatatcttcagctaaaaattttgattattatacttatctaggttcacgagacagggttgaatttgttcactgctcggaacaacananaaagtgccactgatgacgaacgctgccttattgaggcgaatggtcagtatcaccttcgcgaatttgtaaatacgttccctcattgactccttagcatgccgatcccaatactcttacctagccagattcaaacctttatttttttcaccttcaatggtccaattgacatgattgcttcacttccacatgatcagta

SEQ ID NO: 22608 - DNA, 444 bp, Gossypium hirsutum
  Clone ID: LIB3146-056-Q1-K1-G2
gcctccagcaagtcaagcaccacatcgtagtccaaactcagcttccccaccaccgatctcatcatcttactaccctgcagctcctcacatgcttttagccctttcaggtggtttagctggtgcattagacaacaaccaccatcaaaataactctcatttacaaggcttaggaacccttaccccaaacaccacaaatctgggttcccactcaaagaaaagattcagaacaaagttcactcagtttcagaaagataagatgttggaattcgctgagaaagttgggtggaagattcagaaaagagatgaacaagctatccaagagttttgcagtgaagttggggttgatagaggggttttaaaagtttggatgcataacaataagaacacttttgggaagaaagatcaagccattaatgaaggagaaactgggattaacaacaatac

SEQ ID NO: 22609 - DNA, 413 bp, Gossypium hirsutum
  Clone ID: LIB3146-056-Q1-K1-G3
cccacgcgtccgcaggattttattgttactttgaatgagatgaaggcagaagtttcttgtgtatgccgcttgtatgaatacaaaggatatctctgcaggcacgcaatggtagttctccaaataaacggccactcagccatcccttctcaatatattttgaaacgatggacaaaagaggcaaagagcaggcatttcatgagtgaagaatctgaacaggttcaatctagggtgcagaggtacaatgatttatttcaacgagggatgaagttgattgaggagggttcattgtctcaagagagctactatattgcattccgaagcctggaagaagcttttgggagctgtttgagtgcaaacacttctaataagagccttgcagaagctgtggcatctcccacccagggtatgatctg

SEQ ID NO: 22610 - DNA, 428 bp, Gossypium hirsutum
  Clone ID: LIB3146-056-Q1-K1-G4
gcaggatctacattcatttccattgcggcagtcgatcgattgggtcgaagagttttactgatcagcggcggaatacaaatgattatatgtcaggttatagttgccataatcttgggggtgaaatttggggacaaccaagaactatcaaaagggtactcaatattggttgtgatagtgatatgtctgtttgttttggcatttggatggtcatggggtccattagggtggactgtaccaagtgagatattcccactggaaatcaggtctgcaggccagagcattacggttgctgtaaatctcctcttcacattcatcattgctcagtgttttctagccatgctttgccatttcaagttcgggatcttcttgttctttgcatcgtggatcacggtaatgaccatcttcgtttactttttcttaccggaaac

SEQ ID NO: 22611 - DNA, 423 bp, Gossypium hirsutum
  Clone ID: LIB3146-056-Q1-K1-G5
aaaaatactatattggtgagattgatccaaaaactgtcccggcaaagcgcacttacattgcacccgagcaaacgccttacaatcccgataagacccctgagtttgtcatcaagatcctacaatttcttgttcccctcttgatcctgggcttggctattgcggtacgtcactataccaagaaagagtagcttattactatacaggactttacctgttacgagggaagaatcagtgtgtctcatctgttagttgaaatagcacagtcatatcttttgtttaatttccttttagcatttgtgtgtcgaactaaatacctgttgatgatatgctccattgtcaaaagacaatatatttgagcatctttgagcccccatttaagttagcagggaaaccagacaatgtttaatattgttggaatttaaa

SEQ ID NO: 22612 - DNA, 290 bp, Gossypium hirsutum
  Clone ID: LIB3146-056-Q1-K1-G6
cggacgcgtgggtgaatgcattcattactttgagaaacgtggaagagtttggtttgagtggaacggacaaaagggtgtattaagagccaaaactgattatattgacaccaaatttgagaaacagtgaactgcaacaacatcattgtttgatttaaagaccacacagacactgcattgtgcatatttggacctagcagcagagagaagcaaaaacaagcaagctgagctggtagatgcagccagacccctgctgataacctgttaagctcaatggcgcaagaaggaacctt

SEQ ID NO: 22613 - DNA, 407 bp, Gossypium hirsutum
  Clone ID: LIB3146-056-Q1-K1-G7
cggacgcgtgggtgcttttcatactcatttagcccctttcattagcatcaaaatggctcgagttttctttatcactgaaaaatgtcttgctgtggtggaaactgtggctgcggtactggctgcaagtgtggcagtggctgtggaggatgcaagatgtatccagacctgaacgctgccgagatgaccacaactgagactctggttcttggtgtagcaccccagaaagcacactttgagggagctgagatggaattcggggctgagaacggctgcaagtgtggagacaactgcacctgcaacccttgcaattgtaaatgattagagaccaaagccaaagctccctggaagcagaggcgcctttgtctttaagaaataatatgttttgttgtttatgtgtttttagaata

SEQ ID NO: 22614 - DNA, 374 bp, Gossypium hirsutum
  Clone ID: LIB3146-056-Q1-K1-G8
ggaaacccggcccgacccacgcgtccgcccacgcgtccgcccactcgtcctttcactcttccgcccacgcgtccgcccacgcgtccgtgaacatctacaggcagattgaaattagagtaattgagaaaaacgcaatggctcaaaagatgttgatgatggcggtccttgtgatattggggacgaagatagcgacatttacggctgcggatccgacttgtttgcagagcttgatgtcttgtgctccttacttcaacaacgccactctccaactgaaaggcgattgctgtaaccctctcagacaagccgtcgctactgaacttacttgcctttgcagcctcattaataactctactttgcttaattctttcaacatc

SEQ ID NO: 22615 - DNA, 403 bp, Gossypium hirsutum
  unsure (1)..(403): unsure at all n locations; Clone ID: LIB3146-056-Q1-K1-G9
gttctagatcgcgagcgggccgccctttttttttttttttttttttttttttttggtttggttttttttttattttttttttttttttttttttttttttttttttttttttttttttttttttttttttttttttttttttttttttttttttttaaaattattttttttnaaaaaaaaaaaattttaaaattttttttttttaaatttttaaaaatattttttttttttttttttttttaaaaaaaaattttaaaattttttttaaaaaaaaaaaattttttttttttaaaataaaaaaaattttttttttaaaaaaaatttttttttttttttttaaaaaaaatttttaaaatttaatttatttttttttaaaaaaaaaatccccctttttttatttggg

SEQ ID NO: 22616 - DNA, 433 bp, Gossypium hirsutum
  Clone ID: LIB3146-056-Q1-K1-H1
cccacgcgtacgggctgacatggcacatattagcgggttggttgctgcaggtgttattcgatctggttttgaatacgctgatgttgtgacaaccacaacacacaagtcacttcgtggtccacgtggtgctatgattttcttcaggaagggactcaaagagattaacaaacaagggaaagaggtaatgtatgacttggaagacaaaattaatcaagctgtctttcctggtcttcaaggtggaccacataatcacaccatatctggtttagcagttgcattgaagcaggtcagaacacccgagtacaaggcttaccaagagcaagttcttagtaattgctcgaaattttctcagaggttgctggagaacggctatgaactagtatctggtgggaccgagaaccatttagtcttggtcaatttgcgaaacaagggt

SEQ ID NO: 22617 - DNA, 358 bp, Gossypium hirsutum
  Clone ID: LIB3146-056-Q1-K1-H10
ccctgatccccatgcatgggagagtcaaccttggggcaaagaacatgctttgggggtatggtaagaaccgaaggaatagagaagaaagcattttgaaagccataaaaaatggagcagagacattgtttgacataaatgctaatgtgtattctggggtagactgcactttgtggactgctgctgcatcaaaagtgaggctatatgtgggtcatatctacccccacaagagactctataaggggtcttctatatggaaaactatattgacagtgtgtcagcattagagagccttgtggttgcttatgaaccgaactttgaagagctttatcattggaccactattctactacctgtcttt

SEQ ID NO: 22618 - DNA, 242 bp, Gossypium hirsutum
  Clone ID: LIB3146-056-Q1-K1-H11
aaaccctaataactgggctctgttcttatcatattcaaaaatagcttcctctgatggattgattctacaaagcaccattcgtgcccacaccgacatggtgaactccttacaatctcccatctataactcctacatgatcgacacttcctcccgcgaacaaaacatctttctttggcacttaaccaaggacgaaaagacctacgaagtccctcgactatcacttacccgtcactctcactttg

SEQ ID NO: 22619 - DNA, 276 bp, Gossypium hirsutum
  Clone ID: LIB3146-056-Q1-K1-H12
gtttggagcttcttgaagttcaagttggaactgcgtccgctaacccttctcttttcagtgcgtgattcatatttaaaagttgtatttgtttccatatctttgtcgtgattttgttcctctcctagttttcgacgttgtaggaaaacaaagttttcttctttttctgtttgtctatataataaccttggcgattagtgaacttttgctcttcgtttctttcgaatctgtcatatttgtaagacattagcatcttgctgttgaatttttctttcattc

SEQ ID NO: 22620 - DNA, 441 bp, Gossypium hirsutum
  unsure (1)..(441): unsure at all n locations; Clone ID: LIB3146-056-Q1-K1-H2
ccgggccggaccaagcgttcggccacgcgttcgatgacatcaaaaagcttgcctcagctgtatatttgcaagtgagcattgtgaagtgaggccctaatatttgtaactcgatctanaagttggtcctttgttgagcgtccgggtttactactattggcggcctttgtcatagctcagttgattgctactcttattgctgtgtatgccaattggagctttgctgcaattgaagggatcggatggggttgggctggtgtgatctggctttataatattatcttctatatcccacttgatttcatcaagttcttcattcgctatgctttgagtggccgggcgtgggatcttgttattgagcaaaggattgctttcacaaggcaaaaggatttctgaaaagagcaacgtgagcttcaatgggcgcatgcacagagaacattgcat

SEQ ID NO: 22621 - DNA, 413 bp, Gossypium hirsutum
  Clone ID: LIB3146-056-Q1-K1-H3
gttggtatttgtgtatactttaacttaaaaggctatacttcctctaattagctatcttaggttggaagataaggaagcttgatgactctgagtttcgaaatccatttagccaggcttacatacgggtatgtttagatgcattttaagtcttagatctatgcttctgcgacattacttgatagcgtatctaactgtcttttttttcaggtggagtatgattcaagatatgattctaggcgcagctactttagaagtcctagtcgtagcccatatagtcgaaaccctaatctagaattgaatctatcaatcctttttcaacagttaattctgcccatttgcaaacatattctatcattgtaacatgcttacgcatatctgctggctggtttattttatctcagctgtatttagat

SEQ ID NO: 22622 - DNA, 421 bp, Gossypium hirsutum
  Clone ID: LIB3146-056-Q1-K1-H4
gtttttcttttatcaactgttccaatccaaactcatagattcaatggccgaggatgacggggtagctaaggatcgcaaaatcctggtggccgtcgatgaaggtgaggagagcacgaacgctctctcatggtgcctcaagaacgtgatttctcacacttcgaaagatacccttgtcctcctttacgctaaacctccacgagccgtatacacttccctagatggcacggggtatttgttttcttctgatattttggccaccatggacaagtacagcaacgatgtggcggattgtgtcatcgagaaggccaaaagggtgtgcagagagcaaggtgatcctgaggttaaagtagaggtgataatagagagcggtgatccaagggacgtgatttgccaagttgccgacaagacaatgctgatgtgc

SEQ ID NO: 22623 - DNA, 218 bp, Gossypium hirsutum
  Clone ID: LIB3146-056-Q1-K1-H5
gcgagtctcagttcaatcaagttttgaacaaagaacttgatcaagttattgaggcttgcgggttgcttgacgagaattggaaccctaagtttgtggttattgttgcacaaaaaaaccatcataccaagttttttcagcagggatctcctgacaatgtgctacctgttactggcattgacaacaaagtatgccattcgaagaacaatgatttttacctt

SEQ ID NO: 22624 - DNA, 193 bp, Gossypium hirsutum
  Clone ID: LIB3146-056-Q1-K1-H6
ctgcttttgctagattgtgggcttgaatgttctttgttttatgaataaacttgaaaatagcttcggttaccctgaatttcctgctttgtatgtcataaataatcgctccaagaaccggattaatcaattccattctttgggatttttggaagactggttttaaaatcccctttattggtggttttggtaaacc

SEQ ID NO: 22625 - DNA, 130 bp, Gossypium hirsutum
  Clone ID: LIB3146-056-Q1-K1-H7
tttcccccccaccacaacacacaatttactttattttccacattaatactattatttattttattaaatcacttaaatatattaacaaacaaaccaaatatctaatctattacttacaatacaaatataa

SEQ ID NO: 22626 - DNA, 410 bp, Gossypium hirsutum
  unsure (1)..(410): unsure at all n locations; Clone ID: LIB3146-056-Q1-K1-H8
cttcaccaagacactgacccctctctttcaaattctaaagtgaaccgccaccgagcaacgggttgtatgctttgtttcaacaaggtcctggcccgagatcccaacgacacttacgctagtaatgagttattggaggaatttttgaagttccttttggttgcagctactgcagctaatacaaccgcatgattagagcttgccaaatcatttacgagataagctcttttaaattctggctatattctttaaaatctgttttagcgatttgatttttaggaattatagatagtgctatattgcttgtatttcgattaatgaggtactaatactttcgtttaatggattttaagcagcatattgnctgtatctcgatctcattattggagcagttttatcaactgatgccacta

SEQ ID NO: 22627 - DNA, 417 bp, Gossypium hirsutum
  Clone ID: LIB3146-056-Q1-K1-H9
agcaaggaagctttttaccaatattcggtttaaaaggtggtgtttcgatgttgaagtaggtttcctttgcaaatggtttggtattccaatgctggagatatctgtaaactggtccgaaattccaggatccaaggtaaatccattgagtataccaaacatgctttgggagcttgccctcatgtccgtaggatacagaactcgaatctggaaaattaactcctgatgtcaggattttctctgatcaattgagcaaagatgaaaaattacacacggtgcagtactgattcgataaccttaggtttttcttatacgttctttgggaaaacacttattacaatcagatgaaaccagtttatcggagcttgttctttctggaatccgcggctggaacatgcagtattttacagttgtaatatt

SEQ ID NO: 22628 - DNA, 331 bp, Gossypium hirsutum
  unsure (1)..(331): unsure at all n locations; Clone ID: LIB3146-057-Q1-K1-A1
cccacgcgtnncggtgtttatatttccttctctcttttttntcgttttgcttcagcttatgtctctcaactaanaaaaaaaatgactgctcaaacagacaaagaggtcgaagagatcctcgccgctcatctcgatcaacaaaaaaatccattctgagcaacccgaacaacctgtagttgaagatgacgacgacaacgatgacgacgacgatgatgacgatgacaaggatgaagatgatgccgaaggccttcatgacgtagacggaactggtaggtcaaagcaaagcagaagtgaaaagaagagtcgtaaagcaatgttgaagcttgggatg

SEQ ID NO: 22629 - DNA, 430 bp, Gossypium hirsutum
  Clone ID: LIB3146-057-Q1-K1-A10
cccacgcgtccgattttgttcacctcaatctatttctaaaatctgaagctttgtacaaaacgggatcgaactccaagtggttgcttcctttctggcccatttctctgtgcaatggtggtctgcaaatgccgtaaggcgacaaaactatattgtttcgtgcacaaggttcccgtttgtggggaatgcatctgcttacctgagcaccaaatatgcgttatacatacttactcagagtgggtaatagatggagactatgactggccttccaaatgttgcaaatgccaagctgtgcttgaggagggggctggctctgaaaccacacgattgggttgcttacatgtcatacatacaacttgcttggtttcacatatcaaaagctttcctctgcacactgcacccgctggatatgtgtgtccttcatgttcgatat

SEQ ID NO: 22630 - DNA, 418 bp, Gossypium hirsutum
  unsure (1)..(418): unsure at all n locations; Clone ID: LIB3146-057-Q1-K1-A11
agcaagaccagtgagaagaagttgacagcttgatgatgaaaggtgaaccggaagtgtctcaattatctcgtttatatcgatttccaaaggaagttccttaagtagacacaatgttaaaccgaactgattcttagcaagtgacatcccagcatgattttatgtaccgtctgtcgtagccatggatttctgccattgttttactgtaaatgagagaatgcctttgattttatcccattacctcacaagtcacaaccaaaccaaacatgaaactatcaaaacccaaaaaaatataaacccaacccgaagctgtccaaacccacccaattgccacaagaatggcagttcgccaaattaattccattntaacagcaattgagttgtacatcgtcccgttacttttgtacctacttttataata

SEQ ID NO: 22631 - DNA, 432 bp, Gossypium hirsutum
  unsure (1)..(432): unsure at all n locations; Clone ID: LIB3146-057-Q1-K1-A12
cccacgcgtccgttgtcaagcagctaaagcattccaaaaagttgtatgaaggctatgttccaatgaagtacaaaggctacctgaagaagatgaaaaaatccggggaatggggagatcatgtcactttacaagcagctgctgaccgattcggagccaaaatttgtctggtcacctcttttcgtgacacttgctacatcgagatcatgcccaaacaagcaagtcctactagagaaatttggctgagcttctggagtgaagtacattacaattcattgtatgcaagtggagatgttcctaccagagcaccaagaagaaagcattggcttttttaggattgatataatatgacacattcccagnttattatatctattatatgtatatntttactcacctttatgtgccattcagaaatagtttgctattacaaaa

SEQ ID NO: 22632 - DNA, 440 bp, Gossypium hirsutum
  Clone ID: LIB3146-057-Q1-K1-A2
tggatttggggtcgccacgcgtccgccacgcgtccgaaagatccggacaaggaagagaagctcagaggtagacctggatatgagcacctgaatgatccgcttcacatcttaatcgaggccgatttgcctgctaatattgttgatacacggcttagacaggcacaggaaatcatagaggaattacttaaacctgtggatgagtcgcaagattttatcaagagacagcagttgcgggagctggcaatgctaaattcaaacttcagagaggatagtccgggtccaagcggcagtgtctcaccttttaattcaagtggaatgaaacgtcccaaaaccgggcgctgagaaataaaccaggaatcatctgaaattgtttctaccggcctggggtttcgtcatagccaagtatatcttctgatgcatattggttgggtgtaactttg

SEQ ID NO: 22633 - DNA, 351 bp, Gossypium hirsutum
  Clone ID: LIB3146-057-Q1-K1-A3
gtcgatacctccaaggaaaagaagaaacccaaagaaggtgacaatgttgtggaggagcctgctgctgatataccttcactattggagttgaagcgtatctactatgaactgatgattaggtattactttcataacaatgactaccttgaaatttgccgttgctataaggcaatatacgagattccatccataagagaagatccatctcagtggattccggtcttaagaaaaatctgttggtacttgatcttggccccacatgatccaatgcagtcaagccttcttaattccacattggaggataagaatctttctgagatcccaaaatttaagttgctattgaaacagtta

SEQ ID NO: 22634 - DNA, 364 bp, Gossypium hirsutum
  Clone ID: LIB3146-057-Q1-K1-A4
catttttgttgaaaccagggggttattttttcggttttactcctgactcatctaccatgggggcgttgtaccagaagaatgttgaagcataccacaacagaagtagcagcatgaagcccaacatcgttcccaattgcattcggtctgagaattacatgatcacctttgaaattgaggaagagaagtttccgttgtttggaaagaaataccagttgaaattctcgagtgatgttgctgctgagacccattgcttggttcattttccaagtttaatcaagttggctagagaagctggtcttgaatatgtggagattcaaaacttaactgaattttacgatgataacaaatcactgtttgcaggcat

SEQ ID NO: 22635 - DNA, 418 bp, Gossypium hirsutum
  Clone ID: LIB3146-057-Q1-K1-A5
ggaatggttcagggaagagttaacggaagctaatcaaaccattgctcctggctcagcagatgcttacactatcaatggtcatcccggagaaacatatggatgcagcaacgatacaacttttgagatgcaagtagattaccagggcctttaccttgttcgcgtaataaatgcagttgccaatgaaacaatgctgtttgacatcgaaaaacacagattgacgattgtcggacaaaatgggacatataccaatcgttcctttacaagttctttaaccctagccccaggccaagttattgacgtcttgttgtgtccaaaccaaaatgttggccgttattacatcactgctcgatcttcctccggcagacatattaccaatggaattctgcgatataccaccactactactagtttttaatat

SEQ ID NO: 22636 - DNA, 388 bp, Gossypium hirsutum
  unsure (1)..(388): unsure at all n locations; Clone ID: LIB3146-057-Q1-K1-A6
cagcacttcagggtcttgaattcccatcgaaccctgattttgattccgaggagttctaagaagtcgacaatcgggaaattggataaattttcttgtaattatagatacaggaagcactccgacattgcttccttgtttttgtacaggtattccggctctaactgttcgttttcatgtgacatttgtacatgctgactgaaaatatagaagaaaatggttttgtatttcaaatttgcttgaattgtttgtatttgtattaatatcgtttgtttttttttttaataattacattatagattctgatcaannnaaaaaaaaatatatnaccttttttacattactaatcaatttttcctcctcaaataaataaacaaaaaaaggggggggc

SEQ ID NO: 22637 - DNA, 162 bp, Gossypium hirsutum
  Clone ID: LIB3146-057-Q1-K1-A7
aaaaaaagaaaaggggggggggagaaattctctctgggcgtcccacctccggcagttggaccaccggccgtccgtcgccggcgaccgccgtgcacggcggccagaggtgtaaaaatggcccattttaatacttcggctctccccacctcagatctgagtctc

SEQ ID NO: 22638 - DNA, 314 bp, Gossypium hirsutum
  unsure (1)..(314): unsure at all n locations; Clone ID: LIB3146-057-Q1-K1-A8
aaaatagggtctttggttgtgtctggattttctaatgagattagtgaaagatggagagattccaagttcttaggcctctacacttgatttcatgctacgtacacatcacttgtatcgtaggggatttaggacaaaactctatcggcatgcctgcatgtgacagcgacatcatatctcattttgcagttgtaatcgttacgaggggaatggcttgtggtttaaacatatgttcttgtacaatgccctttttatcgtcttaannnanaaaanananatnaaaaaaatttaantttttttattatattttttttttt

SEQ ID NO: 22639 - DNA, 411 bp, Gossypium hirsutum
  Clone ID: LIB3146-057-Q1-K1-A9
cccccacctcctatgcgtggagcacctgcaccgcccccccctcctatgcgtggggcacctgcaccgcccccacctcctatgcggggggctcctccacctcctccaggtggagcaccacctccaccaccacctccggcaccttggaaaccatgaaaacgttttgatctttcttctgtccatgtgtgacttacagtctgatgattttggaattagtttttggtacgtaaatgaccttggaagtgtaagtaacgcaaaaaggcaagacaggagatgagtgatatgagacaacctggacaaaactcgtggtgtttggctgtcagattggagagtcagagaagcattcaaacattgataatttgtatatgaagtctatttggattttgtggtatacagacagacggagtgcatgta

SEQ ID NO: 22640 - DNA, 356 bp, Gossypium hirsutum
  unsure (1)..(356): unsure at all n locations; Clone ID: LIB3146-057-Q1-K1-B1
attcagtctcatttccatcatgctaagaagggaaagtactcatctggtggatcagagactggtcatttgatggctccatctggacctactgcagttgggttcaaccctggagttgctgctggtgggtttaaccctgctgctgctgcacctgctttaaacccagcgcttggacaggctttgactgcattgcttgctggccagggtggtttggggcttggtaatctgcttggagggcttagtggcgcccctgtgaaccaagggacacctgctgcagggtatgggaatcaggttgctggaggctatggagtgcanggtggatatcagaacccacagatgggtcanggcggtgcttgtaa

SEQ ID NO: 22641 - DNA, 371 bp, Gossypium hirsutum
  Clone ID: LIB3146-057-Q1-K1-B10
cactaatttcccattgatcttgtccgcgagatagccagacaactattggaatgtggagcgttcatgcctgatatggacctgatacacacggacttgaagccagaaaacattcttctagtctctacagagaccgtcaaagttcctgataacaacggggcatagctatctccaaaggacagttactttagaagattgccaaaatcaagtgctattaatgtaatacattttggttgcactacgtatgatcgtccagatcagaattatgttgtgtcaacaaggcattatcttgctactgaggttattctcggactgggatggacatatgcttgcgatatatggatggctggatgcattatagttgaattatgcac

SEQ ID NO: 22642 - DNA, 411 bp, Gossypium hirsutum
  Clone ID: LIB3146-057-Q1-K1-B11
ctcattgttgctaatgctggtgattctcgttgtgtaatatctagaaagggtcaggcttataatctgtctaaagatcacaaaccagagcttgagttggagaaagataggattctgaaagctggtggttttattcaagtgggacgtatcaatggaagcttaaacttggccagggctattggtgatgcggagttcaaacagaataaaactctgccagctgaaaagcagattgtaacagctaatccagacataaacgctgttgagctttgcgacgatgatgagtttcttgttttagcttgcgatgggatttgggattgtatgtcgagccaacaactagtggattacgttcgagagcaattaagctccgaaactaaactctcagctatctgtgagagagtatttgacagatgtttg

SEQ ID NO: 22643 - DNA, 237 bp, Gossypium hirsutum
  Clone ID: LIB3146-057-Q1-K1-B12
cccacgcgtccgcccaccttaaagatctgcgaaaaagttgtttgaaccgctaaacccagctcctcctttatttgcagatctttaaggtggggtttggtttctcttgtctcaatgttcaattttggttggggacgttaggtggacacgtgaaaatggtttactggtgatgactaatatgattaactttatggaatttgctttccatgtatttactaaagagtgatgtttttcttattt

SEQ ID NO: 22644 - DNA, 375 bp, Gossypium hirsutum
  Clone ID: LIB3146-057-Q1-K1-B2
cccacgcgtccgcccacgcgtccgtgaaaacggaactttcaagacaatcgaggagttttgggatggggaaatttgattacattttcattctaaaaaatagccttgagtcattatgttaacttggaatttattcttcatatttgttaaaataataaggatgtttgcttgaattaagattcaaaaatcttttaagatatttaaatatatttattatgtattaattagtatatatttttattaagtgaaactacattcaagatcactttaaaattagatttgtcttatttgtcttattttagttttttttttcaatttagtcacttaattaaaatgattgtcaaactaattagtatgttaaaaattatgttaattcac

SEQ ID NO: 22645 - DNA, 410 bp, Gossypium hirsutum
  Clone ID: LIB3146-057-Q1-K1-B3
cccacgcgtccgtgcaatagcaagtgctatagccgctgcattatacgggcttgacattcgggcagagaaagtccaggacgaggatgacaatgttaccaggtatttggtactcacaagagaacccataattcctggaactgacaggctttataagaccagcatagtttttactctagaagaaggtcctggcatgctatttaaggctttggctgtgttctccctaaggggtattaatttgtcaaagatagagtctcgaccacaaaaagggcgtcctctaagggtggtcgacgattctaacaaagggagtgccaagtacttcgactatcttttttacatcgactttgaagcttctatggcagaaaaacgtgctcaaaatgctttggaacatttacaggaatatgccagatttc

SEQ ID NO: 22646 - DNA, 408 bp, Gossypium hirsutum
  Clone ID: LIB3146-057-Q1-K1-B4
agatgtcagtgatatcgtgcttttggatgtgtccccgttgtcacttggtctcgaaactcgtgggtggtgtcatgaccaaaatcatcccaagaaacaccacacttcccacctccaaatcggaggtcttttcaacagctgctgatggccagacaagtgttgagatcaatgtactccaaggtgaaagagaatttgttcgggacaacaaatctcttggcagcttccgactcgatggtattccaccagcaccacgtggtgttccccagattgaagttaaatttgacattgatgccaatggcatcctttctgtaactgctgtcgataaaggaaccgggaagaagcaggacatcactattactggtgccagtactttgccaaatgacgaggttgatagaatggtaaagggaagct

SEQ ID NO: 22647 - DNA, 381 bp, Gossypium hirsutum
  unsure (1)..(381): unsure at all n locations; Clone ID: LIB3146-057-Q1-K1-B5
gcaaaatggagtgctgtaggaggcctaatttgagtgatgcacatttatcagtggaagaagaggcggaattgtttgagcagaccagggattactttgaccacacagcacctaaacgtcacactaagcctcaacgaagcgactattcttctaactacgtcgacgctcttgccgccgctgattccggtatccctgaatacctcgagtttcaacgtctagagaatgatccccagaaaatagtttacaatggaagtgaagtgagagaagaanttatggagactgaatattataaggatctcaattgcgtcgacaaacaccaccacacgacaggaacaggtttcataaaggtagagaacgacaatggcagaaacttttaaattgaac

SEQ ID NO: 22648 - DNA, 427 bp, Gossypium hirsutum
  unsure (1)..(427): unsure at all n locations; Clone ID: LIB3146-057-Q1-K1-B6
acgcccacgcgtccgcccactcgtccgcccacgcgtcctcccacgcgtccgcgggatgctaagtgcctgatgaatgaattgaagagacaagtggaatcccaggagcttgatttccctgaatcagatttggttcagtttatcacctttctgttgctaacgttggagagagatgccttgcccctttttaacatgttgagagtgaattacaaatctagcatagacagagaaccggcattcaatgagttgctagatgaaattgcagaaaagttctatggtgtacagcgtagaaatccgcttcaagggatgtttggcgacttattcaagatgatgtgatgaggaaaaacatggcagcaacctgaaattgttggaatttgtcagtgtctaggcggacctgaactgctgatttcattatgtcttcngtttgatg

SEQ ID NO: 22649 - DNA, 389 bp, Gossypium hirsutum
  Clone ID: LIB3146-057-Q1-K1-B7
cggacgcgtccgtttcttattaataatcactcataaattttttaaaggaattgagtatagtttaattaaaaataaattcatttataattatatttactatctttgaaaaaaagtaccaagttaatttaatacgatattaattgttttcttttgagtgttgttgtgatgaagagcaataggttttatttctgactttgaggagaggcctcttgatgcttgaacccataatctctatattccttgtggtaatgggatcgtttgttcaagtataaagaggtacctcttggcagaatcttgagataaaattttgtgctgctctccaatgcaataatattctgaagaaaacgatactttggtcttatcagtatgataacaaaaatagttttaaa

SEQ ID NO: 22650 - DNA, 431 bp, Gossypium hirsutum
  unsure (1)..(431): unsure at all n locations; Clone ID: LIB3146-057-Q1-K1-B8
cccacgcgtccggcggcgcgtgcgcgcaagagcgccactgaagccgaacgaaaagatcgggaagcacgggagaaagaagagcagtactggcgcgaagccgagggtcctaaatctaaggccaccaagaaacgcgaggaagaagccgagaaacgagctgaagccgccgctcgcaaggctgaggcacgccgtcaagccgaaatggaggagaaagagatcgaaaaggcgttgaagaaaccggataagaaggccaaccgtgtggcgattccggtgccgaaggtgaccgaagcggagctacagaagaggaaggaggaggagcaagcggagatggcgaagaaagcggaggaggcgaagaagagacagagtangaccgcggccgaagaggagtatgagaggatggtgttagtgacaaacatgaatagggatgattcgtt

SEQ ID NO: 22651 - DNA, 391 bp, Gossypium hirsutum
  Clone ID: LIB3146-057-Q1-K1-B9
cccacgcgtccgagcagaacccttcatttctctctgccaccagcggcacccaaagatgcagatcttcgtcaaaaccctaacggggaagaccataaccctagaggttgagtcttccgacaccatcgacaatgtcaaagccaagatccaagacaaggaaggcatcccacccgaccaacagcgcctcatctttgccggaaagcagctcgaggacggccgcaccttagccgactacaacatccagaaggaatccaccctccatctcgtgctccgtcttaggggaggtgctaagaagagaaagaagaagacctacaccaagcccaagaagatcaagcacaagaagaagaaggtcaagctcgctgtgctacagttctacaaggtggatgaatcgggt

SEQ ID NO: 22652 - DNA, 369 bp, Gossypium hirsutum
  Clone ID: LIB3146-057-Q1-K1-C1
cccacgcgtacggagaatttcgtggtcctctcagacgacagcttataacaatttgttgggggagcttgtcaacgatgtttttctcgcacagagaaaacacagtgagcactttgggacgaatggtggtgatcatatggctatttgtagttctgactattaactcgagctacactgctagtttgacatcgatacttactgtgcatcatctaacatcatggattcaagggattgatagctcgatctcaagtactgaacctattggaatccaagatggttcgtttgcattgaactatttgggtgacgagctcaatatagcacaatctaggatagttaagttaaaaaatgcagaagcatatcttacagccctta

SEQ ID NO: 22653 - DNA, 431 bp, Gossypium hirsutum
  Clone ID: LIB3146-057-Q1-K1-C10
tggcaataaaaacacgactcttttgaaagctgccataacaagtagcaacaggcgggaacttgatgaggcttcagctggcaagttaaggagcggtttgaagagcaagaagggtctgccattaaagataaagctggacactaaagtgaaagcaaagatgggagcactgaagacccccaaggttgggattagggttgtttgtgaagggattaaagctactgctcccaaggggaaatcagcaacaatagcttcaacttctaatgcaaagtgtaaggttgatttgaggctcaagatctggaaatggactttatgattatgagagctcaggattagaaagaatgaagaagaaaaaggtttgctttaagaaatttgggtttttcattttttgggtgattattatatcttgtgtaaatttggcgattgattgtaatgat

SEQ ID NO: 22654 - DNA, 337 bp, Gossypium hirsutum
  Clone ID: LIB3146-057-Q1-K1-C11
tttttattgatttgtacttcctttagtcaacaaagcgttcctgatgatactttgaagatgcagttattttcttattccttgtagggaagagctcgtacatggttttttgggttaaaaaaaaaaaaaaaaaaaaaaaaaaaaaaaaaaaaaaaaaaaaaaaaaaaaaaaaaaaaaaaaaaaaaaaaaaaaaaaaaaaaaaaaaaaaaaaaaaaggggcgggctattgggggggcccattttaaggaaccaggcttaggaacccaaaaatggtaacttaaaagacccctaataggaacccatataaccaattttttaaaccgtttttaattagaaaaac

SEQ ID NO: 22655 - DNA, 410 bp, Gossypium hirsutum
  Clone ID: LIB3146-057-Q1-K1-C12
tggaagagcttcttcaagtgataaaatcaacgaaaccagacaaatatacccccgaaatcgtggagaagaaagacgattacgtgcgtgttgaatatcaaagtcccatactagggtttgtggatgatgtggagttctggtttccacccggtaaggattcaatcgtggagtaccgatccgcatcaaggatcgggaactttgattttgatatcaatagaaaaagaattaaggcattgcgagtggagttggaaaagaaaggatgggcttccgtagaaacgttttaaaaggacaaaaacatcattttgtactgtactcctagattgttgtttcacaccactgttcacagattttgttataaatcatcaatgcaagatttgtgtcacttgcgtttccataattgaaagattattatc

SEQ ID NO: 22656 - DNA, 400 bp, Gossypium hirsutum
  Clone ID: LIB3146-057-Q1-K1-C2
aaaatggcaccaaaagctgaaaaaaagccagccgagaagaagcctgcggaggagaagaaagccgtagctgagaaagccccggcagagaagaagcctaaggctgggaaaaagcttcccaaggaaggcggagcggctgccggagacaagaagaagaagagagttaagaagagcgtcgagacctacaagatctacatcttcaaggtcctgaagcaagttcaccctgacatcgggatctctagcaaagctatggggatcatgaacagtttcatcaatgatatcttcgagaagcttgctcaagaagcctctaggctcgcgaggtacaacaagaaacccaccatcacttccagggaaattcagaccgctgttaggcttgtacttcctggtgagcttgccaagcacg

SEQ ID NO: 22657 - DNA, 268 bp, Gossypium hirsutum
  Clone ID: LIB3146-057-Q1-K1-C3
ggatcattcatgatcttccctcccttgctacaaagaaaatgttgatgatgaacaaggcctatggagtacggcctatgttatgagaaaaaaaataatgaaacaggaatttgtattatggtaagtattctaagatggtataggttatgtatgttatgttctcttttggaacacgggataagctagtatagggaagggaaagaagtgttttaccttttttataactgcaaaataacaacaggctttcaattcatagcctggccttgtttgc

SEQ ID NO: 22658 - DNA, 385 bp, Gossypium hirsutum
  Clone ID: LIB3146-057-Q1-K1-C4
gggacagctaaagttcttgatcctgatttcaaagttgttgaaagtgcatacccttttgtgattgggaagctcttggctgatccaaatcctgatatgagaaaaattttaagggaacttctcatctgtaataatggatccattaggtggaaccgcctagagcgcttgatagcagcaatatcagaacaggcatctgaatcgtctgaggagcctcctaagtctgaagaaaaaggttcgcatcccatgggatggaagtcattcgatatgcatgctgttgttgctgccaccgaagatctcctgctttttattctatctgagaagggtcaaatggtgcgggttttcctcctgcgtgatataattagagcagcagatatatttctacaggatg

SEQ ID NO: 22659 - DNA, 215 bp, Gossypium hirsutum
  unsure (1)..(215): unsure at all n locations; Clone ID: LIB3146-057-Q1-K1-C5
caacatgttatgttagctgtcactcgtcttccgttgcagtgttcgttttttttttttctggagtggtttccaaagttctttcatcacagcatggtaatgtaatcgcatctcagtgttgaggatttaaatcaccattagcaatgaggttttatcgtttnacaaaaaataacaacaaaataaaaaacaagcaatttgaatcataaaaagaacctact

SEQ ID NO: 22660 - DNA, 406 bp, Gossypium hirsutum
  Clone ID: LIB3146-057-Q1-K1-C6
cccacgcgtccgcccacgcgtccgatctctttctttctttcttccttctcaaaccctaagatttcagccaaattgtcgattcactttctcaaaacagcagctaacatattcaagccctgatagaagatttttcagccttaaggtctcttttcaactccgattgcaacgaagcaaaagaaactttcggcatatttgcaagataaggcttattcttctctttttcttttatttatctttaaacgcatatgataaaaaaaaagaaaaacagatgaacaattaatagaagatgaaagaaatttaaaaaagaaattaggaatcacttaaagagaaatattttcccctttttctattcggtattcgtaaaaaatatagtacattcagtcctccccttttatagcttaaaaat

SEQ ID NO: 22661 - DNA, 425 bp, Gossypium hirsutum
  Clone ID: LIB3146-057-Q1-K1-C8
cccacgcgttcggttgcccactgttggtgacttttaccaggatttcgacctaacatggggtgacagtataggcaagattttcaatggtggcaagctcttgtctttgtctttagacagggtttcagggtctggttttcaatctaagaaagagtatttgtttggaaggatcgatatgcaactcaagcttgttgctggcaactcagctggcactgtcactgcttattatctgtcatctcaagggccaacccatgatgagatagactttgaattcttagggaatctgagcggtgacccttacattttacacaccaatgtctttacacaaggcaaaggcaacagagaacaacagttctatctttggtttgaccctacaagaaacttccacacctatttcatcatttggaaaccccaacacatcattttct

SEQ ID NO: 22662 - DNA, 428 bp, Gossypium hirsutum
  Clone ID: LIB3146-057-Q1-K1-C9
gacccacgcgtccgattccacaaaaccaacttctttttatacgtagagaaaggagaatatgaaggcatcatatattgcattgtgtgcagtgatggtgatcctcttggcagaagcagtaggggtgtcaacggcggtgacatgcagcccaacgcagctgagctcctgcgtgagcgccataacatcttcatctccaccatctcaactgtgctgtagcaagatcaaggagcagaagccatgcctttgccaatatcttaagaaccctaaccttaagaaatttattaacactggcaatgccaggaaggttgcttccacctgtggaactccttttccaaagtgctaagctagaccctttgcttaaggctttctttctctctattttcactgcagaatggatagagaggaagtactataattattaatattatgta

SEQ ID NO: 22663 - DNA, 376 bp, Gossypium hirsutum
  unsure (1)..(376): unsure at all n locations; Clone ID: LIB3146-057-Q1-K1-D1
cccacgcgtccgcggcattggcgaaaggcatagcttatacacataatctgaatgaaatgactgtgtatcaggcattgcaattgggacaagattccaacagtccttatgagccaagaacacaaagatttcagatgtgtttgcataccgatacattgcttaaagtgatggaacaattggcaaaccctggtgtcagacgacttgttatcgtggaagccggcagtaaccgcgtagaaggcattatctcgctgagcgatgttttcaggttcttgctcggttagtccgaaataatttacagatgaactatctaggagaggtgagtttttgcagtggcatttggactcccatgtcttgtangcaacattccaaggccccaatg

SEQ ID NO: 22664 - DNA, 436 bp, Gossypium hirsutum
  Clone ID: LIB3146-057-Q1-K1-D10
cccacgcgtccgcccacgcgtccttttttcttccaacaacttaaccttatcctgtgaaaaggcagcaaaactctttacggtacttggaaactcaagtctgcagaagaagaagaaacagctgttgttgaacaagaacgagaagaaacaactgtagccgaacaagagtctgtttctgttcctgtttctccttcagacactctcagaatgtacttccaggcagatggaatgttgaatgaagctgaaattccgaaggtgaccaaggcattagagggagcagaaggcgtttccgatttgaaggttcaagtccttgagggtattggtactgttgagttaacgaaacagactacggttcaagctaccggagtagcatccaatttggtggagctcatacaaggcgcaggattcaagttacaaacattgaatttgaagtttgatg

SEQ ID NO: 22665 - DNA, 423 bp, Gossypium hirsutum
  Clone ID: LIB3146-057-Q1-K1-D11
ggaaatcgatagcgcaaaagatgtgtgccttggacggaggaggagcacaagctggttctggtaggactgcaaaaagtagggaaaggagattggagagggatttctagaaacttcgtgaagactcgaactccgacacaagtagcaagccatgctcagaaatactttctccgacgaagcaatctcaaccgtcgccgtcgcagatctagcctctttgatatcaccaccgatacggtgcaggcaattccaatggaagaagagcgagttgatcgacaagaaaactcaactcagccatctgaaaccaatgtgtttcccattatgccggcgacttttcccatggcctttaaccaggtagttccgccggttccaattcaaaatccgactgaaaatcttacattagcacaggggaatcaattgaataacaat

SEQ ID NO: 22666 - DNA, 424 bp, Gossypium hirsutum
  Clone ID: LIB3146-057-Q1-K1-D12
cccacgcgtccgcccacgcgtccggctcgtacacgtttggctaatgataacaaggctgctaaaaagggtggtcagaggcagtttaatggtttagttgatgtctacaggaagaccatccaatctgatggcattgctggtctttaccgagggttcaatatctcatgtgttggaattattgtttaccgtggactttactttggaatgtatgattctttgaagcctgttgttttggttggtggattgcaggatagtttcttggcaagtttcttgctgggttggggtatcacaataggtgctggactggcatcttatccaattgatacggtacgtagaagaatgatgatgacttctggagaagcagtgaaatacaagagctcgatggcagcattttctcaaatcatcaagaatgaaggtgccaaatcgc

SEQ ID NO: 22667 - DNA, 423 bp, Gossypium hirsutum
  Clone ID: LIB3146-057-Q1-K1-D2
cccacgcgtccggcgatttatatacactggatcagtagatgtttcattggatattgcacaggatctgctcggagctgctgatcaatatcttttggaagggcttaagcgactctgtgagtacaccattgcacaggatgtaaccctggacaacgtttctagcatgtacgaactctccgaagcttttcatgctatatcactgaggcacacttgcattttgtttatcttggagcatttctctcaattgagcgacagacccgggcactcacatctgatccagcgtatagttccagagatccgcaattacttcgcgaaagcgcttacgaatcctaacccacataaccagcggctgtagaaggctggtttttaactcatctctaacaagatacgttgatgtatagaaatgtagtagatgtggagccaatt

SEQ ID NO: 22668 - DNA, 395 bp, Gossypium hirsutum
  Clone ID: LIB3146-057-Q1-K1-D3
ctcttattctcttcgatattttctccccccatctgttgctttcttcttctttttcccccgcttcttttacctaattgcttcccaaatatctcttcagattgcttgcccaaaccctggttatttgtgagaaatactagtgggaagtcaaaatgcaggcttgtaatggagcttgcaattagtactcaatttgttttccaaatgtttctgaaaattttccttctcctttaatttattcccttctaaactctaccaggatgagctgttttttgctgaaatagagtatacgcagaaaaagccaataccatctgtttcatcatgcataaaagttcaggcaacaaaactcatcctatgaaaaaaaaagataaactcaccggtggtggagaagaggaacaaag

SEQ ID NO: 22669 - DNA, 428 bp, Gossypium hirsutum
  Clone ID: LIB3146-057-Q1-K1-D5
cttggcggttccggtactcatactggaatagcagccagagttatgtgatgaccaaaggctggagccgtttcgtcaaggagaagaagcttgatgcgggtgacatcgtgtcgtttcaacggggtgttggggagtccgggaaacaccggttgtacattgattggaggcggaggcctaatgcacccaatccaacgtcctttgcacattttcagatgcaaaatcagttcaactttcctcagtcagtccgatgggggggtggaatctactcgctgcctcaaagctatgagcctttgcatcgcttgaattacagcatatatccttataaccatcatcatcaacgacagcagcatcaacagctacagcagcagcagcatcaggcaattacttacggtaatgtggcgcagtcgcagtactatctgaggtcatcatca

SEQ ID NO: 22670 - DNA, 375 bp, Gossypium hirsutum
  Clone ID: LIB3146-057-Q1-K1-D6
cattgtctccgttgttgcaggatgctggcatgaatgatatgagtatgactcaattatcttggggacttgtaaatgacacatacaagatggaccttattcttacacatccgccatatttgattgccttagcttgcatatacattgctagcgtctacagggagaaagatatcacaacttggtttgaagaacttcgcgttgatatgaatgtggtgaaaaacatctccatggagatcctcgacttctatgagaacaaaatgattgcagatgagcgaataagtactgccttcctcaaacttgctcttaagccttagatggttgattgagcgtggaacctgataataccggcatcgaccactgcatgacttgatattattt

SEQ ID NO: 22671 - DNA, 423 bp, Gossypium hirsutum
  Clone ID: LIB3146-057-Q1-K1-D7
cccacgcgtccgcacccactccttgtccaaggatttgactctgactccattcgaaagtctgactctgttggacaagtttctgtggaaatggcaaagtcacttcctagagaaatgctgattaatctagtgaactgcttggaagcttctgccatatgtcttgtatgcaaagatccacctgatgaccccgttgttaccatgtgttgtcatgttttctgctaccagtgcgtgtcggaacatctgactggtgatgataatacatgccctgcacgtggatgtaaagaacaacttggcgctgatatagttttctctagaagtactcttaggatctgtattgcggatggtcataatggtagtcttgtgcatcctcagtttgaaaattcagtgattttacaggatgagtacagttcatcaaaaatcaagact

SEQ ID NO: 22672 - DNA, 407 bp, Gossypium hirsutum
  Clone ID: LIB3146-057-Q1-K1-D8
caaaaacagatgacaagaaagaaaaaatatatatatatataaagagagagagagagactcagtcaggatgattaaggataagcatcaataatctttaggtattagtatttagtacattggaaaatgagtaaatttgactagtaatatgaaatctacataaaacaagttcagagtcaagggtataagaaaccgcccgagttcaaatttcacccaaaacaagagatataagatctgtatcaaattcaattctgacaagtcagacagatctaaccacactgaggcagcagtgcatggtaaaatgcataataaatggcatccaaagaaaagatagcaagatatatgagcactgccctaagttttggagttccctttatttgcaaaggttagaacatagaaggcttatgagc

SEQ ID NO: 22673 - DNA, 271 bp, Gossypium hirsutum
  Clone ID: LIB3146-057-Q1-K1-D9
gtgagcatggactggaagatgtatttttcggtccgatgctatcacgttcgatggcagtggatactaaatcgaaactgtcgccttatgtaggctgctaaaacttcatcataggtgtaagagctttgggagtgcttttatgatgattgctttacaagattaatttgaatgcctactatatcagtttccatcatttgtttttgaagatataaaggctctattccattgagtaccgagaataagattatatgcaaattctactgtttatacctca

SEQ ID NO: 22674 - DNA, 354 bp, Gossypium hirsutum
  unsure (1)..(354): unsure at all n locations; Clone ID: LIB3146-057-Q1-K1-E1
cggacgcgtgggcggacgcgtggggtccgggagaaattgcttcaatttgagcaggaactgaaagatcggtagcaagggttcgagttctgttccatttaaactttggtttttgttgaaatttattattagactgtaactgtaactgtattctgtcatctgttgttagcgactgcattttattggaattttatgtaacgggacataagattgttgaggagtcaaatggcttcgctcatatatggtttaggtgtgccactaatgtttagatcaaaaaatagtatttgcttgcctgcaaaanaaaaaaaaaaaaaaaaaaaaaaaaaaaaaaaaaaaaaaannnnnnaaaaaanaaaa

SEQ ID NO: 22675 - DNA, 430 bp, Gossypium hirsutum
  Clone ID: LIB3146-057-Q1-K1-E10
attaacacataattggggtactgtaagtgaccctgagttcaaaggatatcacagcgggagttcaaaacctcgtggctttggtcatattggcatcacggtggatgatgtgaataaggcatgcgagagatttgaacgcctgggagtagaatttgtcaagaaattagatgcaggcaagatgaaagggattgcattcattaaggatcccgatggttactggattgaaatctttgatttgaaaaccattggagatgttattagccgttgttcctgagttaagcacatcttgaagcttgctcaggaaacaaggatggcatgtgaaggttttatctcattgtcttggtttcagagtatggtctatattggtcgtagtcgagacagaaattaagcatatggagttttagaccaaacaaaaaaaggcctgtggagtttt

SEQ ID NO: 22676 - DNA, 428 bp, Gossypium hirsutum
  Clone ID: LIB3146-057-Q1-K1-E12
gaagatgagcgtcctaaggttgtttacaatcaattcagcgatgaaatccctgggagctctcttgccggtatcaattatgtaggtgaaaagagggcggagatatgccagaaaatcgtcgaggcttgtgaaaattggggtatcttccaggtcgtggatcatggtgtcgacactaaactcatttctgagatgacccgtcttgccagagagttcttcgctttgcccgccgaagataagcttcggttcgatatgtctggtggcaagaaaggtgggttcatcgtctccagtcacctccagggagaaacggtgcaagattggcgggagattgtgacctacttctcgtacccaattaagagccgggactattcaaggtggcctgatatgcccgaagggtggattgaggtgacaaaggagtacagtgataaattaat

SEQ ID NO: 22677 - DNA, 397 bp, Gossypium hirsutum
  unsure (1)..(397): unsure at all n locations; Clone ID: LIB3146-057-Q1-K1-E2
agctgatggtgctggagtagattatgccctcaatagggctatctctgcttggtatgatgggcgtgactggtttaactcattgtgcaagagggtgatggagcaagactggtcttggaatcggncnncncttgattatatggagttgtaccatgcggcaaagaaatactaaaagccgattaagcaaagctgcaaatcgttaccatctcccatagcttgtacattgtttacttataccttttactgccatagttttagcacttaaaatcgttcctccatttttgtgtatcataaagcaataagctctcctcaaaataaggaaaaaaaaaagagagaaccaaatgtgtatcattcttgagagctacaaattctttttgactgcttgtacttcatctctatg

SEQ ID NO: 22678 - DNA, 365 bp, Gossypium hirsutum
  Clone ID: LIB3146-057-Q1-K1-E3
caaagacagcttgtagattatggtgctgggtcactgggctcattcccaccggttatggcccctcattatggtaggcatggagggggccgtggtcatggtggttcttatcgtcatgggagagattaccatcggaagcgacaccgagatgatgaccactatgcacgtgagtcctcaaagagaaactcggatcatgaatccaggagagcctctgaccatgacgctagaccggagaagaatccacgtttccgagagagcggtgattctgatgaagaagaagaagatgatcgtaaacggcgatcttaatagatacattatgttttaattaagtgtaatatgtgaagtaagtttttggtgtttttatgcat

SEQ ID NO: 22679 - DNA, 293 bp, Gossypium hirsutum
  unsure (1)..(293): unsure at all n locations; Clone ID: LIB3146-057-Q1-K1-E4
ataaatcctcattattgtagttcagtatccacgaaagattaagatgataccagacctcagtcgctgcagggcactgttgcaaaatatggcgactgctttcttcttcagactcacatctgggacatttagtattcaccaaaacccgctttattttgagattgagaaaagatgggatatagttccatgaaatcctccatatagtcattttgattttcgatggaatttgtaatgtccatagtttcctgtaaaagtttatagtttcggtatgtaaaaataactcattaggatccana

SEQ ID NO: 22680 - DNA, 403 bp, Gossypium hirsutum
  Clone ID: LIB3146-057-Q1-K1-E5
cttggaataccatccaacagttcttgaatcacccactatttccaaaacattaaatcccacagaaatccctaatcatgtggcttgtaaccctgcatgtgcctccgccacaaatggagatgcaatatcggagtggataaccgacttagacgccaagatttcgcccctcacatcttgtactaccagtcccgaagcaaatctgaaggcttgttgatcaaaaactgcatcaaagtaaatagccaccctcgttctcctatcaccgtgtttaggacctctctcttcttttaagatgagtgtcttctcatttattcctttcaactcggaaatgtaactggagatttgtttcgagatgtctctactcgccgtatttttgcttttatatattgacctatttctatttgcctag

SEQ ID NO: 22681 - DNA, 285 bp, Gossypium hirsutum
  Clone ID: LIB3146-057-Q1-K1-E6
acatgggcaacaatgaattcgtactgggtcgtttttaatcccaaagcttaactaacggggcccctgttggctttaacaataagtccatttccttaatttctttctttgatttacattatttattgtactgcttttatttttcctgctttattcatgctcaaatttgttcgcaaaaaaaaaaaataaaaaaaaaaatataaatgcttgtttatctaaaactgcattaaaataaaaaaacaactctaaatttaatatcaccatatataagactctttttttttttat

SEQ ID NO: 22682 - DNA, 342 bp, Gossypium hirsutum
  Clone ID: LIB3146-057-Q1-K1-E7
gaaatgctgaatcttgaaggttgtaagatcagtgatgctagtttggttgcaattgcaaagaactgtcagttactcagtgatcttgatgtctccaaatgtgcaatcactgattctggaattgcagctctggctcgttctaatcagatcaaactgcagatcctttctatgtctggttgctctaaggtctctgacaaaagcatgccttcacttcgaaaactgggtcagaccctgttggggttaaacctacaacaatgcaaggcaatcagcagcagcacagttgacctactcgttgagcagctctggaggtgtgatatccttttctgaactaaattatcaacaaaa

SEQ ID NO: 22683 - DNA, 427 bp, Gossypium hirsutum
  Clone ID: LIB3146-057-Q1-K1-E8
gaaagtgcaagataggattatcttaagtactttgagacgatttgctgtgaagagtacaaataaatccaggcattgctttgagtacttagagagagatgagaccattatagctcatttggctgggggaattgatgcatttataaaggtgtctcaaggttggccactgtcaaaatctccactaaaattgttatctgtcaagagctcagatcatcattcaaggggaatttcattgagcttgatttgcaaggttgaggaaatggctaattccttggacatgaacattcggctaaatttatcaacttttgtggatactgttgagaagttgcttttagaacagatgcgcttagaacttcggtctgatgatgcctctactaattgaccatgatgcagcctgtcacttggtaagtttgaatgtcaatgtcgtata

SEQ ID NO: 22684 - DNA, 366 bp, Gossypium hirsutum
  Clone ID: LIB3146-057-Q1-K1-E9
caatataattcaaaacaatatatccggacagtttattgttaagttaaattctaaaccaacactaccagcatcttctttgccccttccaattaagcaggcgattttaagtgtcagaaatacaccttcaatgccaaccggcaagctagcgatgactttcaaatcaacggccaagtagtcctttcaatgaaaacggaaaggtaaaaatagcatatatccaaaaaagactatttggttacacgactgaaattggatcgcccaatgactcaggagtaccgctgctaccattgagaaccgtaacatttccatcggagtcaacatcaacgattactgaatcaccctccttgatgtccctggcaagcattttct

SEQ ID NO: 22685 - DNA, 380 bp, Gossypium hirsutum
  Clone ID: LIB3146-057-Q1-K1-F1
ctttttcttttctttttttggcctcagactctgaatttcgattgttaattatcactgttgtgcaatggcgtcaggttcgaactggacgccaaagcaaaacaagttgttcgagaacgctttagctatctacgacaaggatacaccagaccggtggcacaagctagccagggctgttggggggaagaccgtggaggaagtgaagttgcattaccagaaccttgtggatgacatcaagcagatagagtctgggcacgtgcctttgcccccttacaagaaagctggaggaacaaaagatacaacaatttcatggacgatgaagaaccaaggatgaagaatctcaggctttagtgaagtatgaaccagaaatagcctgtagaata

SEQ ID NO: 22686 - DNA, 416 bp, Gossypium hirsutum
  unsure (1)..(416): unsure at all n locations; Clone ID: LIB3146-057-Q1-K1-F10
cccacgcgtccggggatcttcttattttgtgaggaagtgtgtgcatccggaatgggagaatggataccaaaataaacgaaagattgatgagaaccctgatgaaattgtgcacaaatcttcacagtgtggtcttgaaagcagtcccgagaaatctactaacaatgacattggcacagcgccatcaaggggacctatcaactctgcacctactaataagaagatgcggtatgcaggttcttctactaaatcgatctatgctaggcaccttggaggcaaagaacgttgtacttttcctggagaagtgaggttcgaaactgagtttgatggtgcaataatggatgaaagtgactntagccctcaccctacatgttataacgggcctttgactcaattcgagaaagcaaatgccattgcaa

SEQ ID NO: 22687 - DNA, 315 bp, Gossypium hirsutum
  Clone ID: LIB3146-057-Q1-K1-F11
tgaaatttttgatgatcgagtttgccttgtgaagatgttaagtagatagcagggtcgttgaacgcccctagcccttctaaagtctacaaagatatttaattgcagaaccaagttttgttacccttttaatttaaattcccttttctccttaaattcactgcattctcattactttgattttacactatgaaatgaccaaacgtgcattacaattcatctttgaaaaaaaaaaaaaaaataaaaaaaaaaatataaaaaaaaattattaaaaaaaaaaaaaaaattttttataataataataaaataataataatg

SEQ ID NO: 22688 - DNA, 198 bp, Gossypium hirsutum
  Clone ID: LIB3146-057-Q1-K1-F12
cccacgcgtccgcccacgcgtccggaggtggctactttattggcaatgttagtcctgcagggatggatttccgatggttttgtttaggtaactgtatagcaatactatcttctctaacaacttcataccacccaacttcaataatggacctaacgcaagccggcggccattaactttttttataaaacccataaaaat

SEQ ID NO: 22689 - DNA, 431 bp, Gossypium hirsutum
  Clone ID: LIB3146-057-Q1-K1-F2
gagagctgtgtggcatcgattattgggtatttggatcctccacaaatatgcaagttggcgaagttgaacagagcgtttagggccgcttcttgggctgatttcgtttgggaatcgaaattgccaccgaattatgaaacccttgtcggtgaagttttgagctttgtgcctgagaagttgggtaaaagagacatttatacgagactctgtagagttaatacctttgatggtggcaccaagaaaatatggctggataagagcacaggcggtgtttgtatgtcgatatcttcaaagggtttacagataacagggattgatgatcgaagatattggaatcatattcctactgaagaatctaggttcggttccattgcatatcttcagcaaatctggtggtttgaaagtgatggagagggtggattttcgttttcttc

SEQ ID NO: 22690 - DNA, 277 bp, Gossypium hirsutum
  Clone ID: LIB3146-057-Q1-K1-F3
caaagagggattttgaaaattcccaaaccccaaaaaaaaggctgcaaaaaaagttttggaaaaaagcgtgaaaaccaagaggctgattcaagttaaaaccccaggggcttttaaaaaagcaaaaaaggttgtgaaaaaggcggtttcgggttcaaaactgaagcgtttgagtcaggttaaaacccctgagggattgaagaggaagacctttaagcagccaaaacaagacatggaagtcaatgttagttgacaggtgaagatggtagggtttcttttt

SEQ ID NO: 22691 - DNA, 366 bp, Gossypium hirsutum
  Clone ID: LIB3146-057-Q1-K1-F4
aaaagactgttgatggtccttccatgaaggactggagaggtggtagagctgcttccttcaatatcattcctagcagcactggagctgccaaggccgtcggcaaagttttgccagcactgaatggcaagctgactggaatggctttccgtgttcccactgttgatgtctctgtggttgacctcactgtgagacttgagaagaaggctacatatgatgaaattaaggctgctatcaaggcggaatctgaaggcaacttgaagggaattcttggttatgtggacgaagatttagtctcaactgacttcatcggagacaacaggtcaagcatttttgatgccaaagctggaattgctttgaatgacaact

SEQ ID NO: 22692 - DNA, 430 bp, Gossypium hirsutum
  unsure (1)..(430): unsure at all n locations; Clone ID: LIB3146-057-Q1-K1-F5
gtaaaacgggtcttgagatatctggttgggactatggattatggtctatttttttcaaaaggacagtttaaactagaatgttattctgatgctgactgggcagcctcagttgaagatagacgttctacaacaagatatgtagtttttctcgggtcaaatccagttgcatggtcttctaagaagcaggctgtggtgtcaaggtcatcttctgaagctgagtatcgtagtttagctaattgtgttgctgaattactatggttaaagcaactgctgaatgaaattggattgtcagtttgtcaaacaccagtcatctggtgtgataatacctccacagtttctatggttgcaaacccaactcatcactctcgtatgaaacatgttgaaattgatcatcactttattcttgaaaaggtgatggcaagaagtntac

SEQ ID NO: 22693 - DNA, 419 bp, Gossypium hirsutum
  Clone ID: LIB3146-057-Q1-K1-F6
agagaacccaaagctttttccgttaaaaaaaaccctaaaatttttaaatgttctctcaacctccaggcgaatggctaatgtccagacctccaattgctcgcttgtaaccggcgaagcaaggccctccaacgaagcggtaagtctccctctctcccctatactttagtacacaaaataatctaaatgaagagctgaaagtaatagagggaaataaaatatgcaatcaccttcaaaataaaaactaatattcacttgctgttttttgcttgtattcagtatctcgtgtgaatttttgtactcgatttctattctatttctctgaagaaaaaaaaccccatacacttaaaaatcgaaggcttttatagccaaaatacaggcagttccttgctattctccattttgcaagtacgtggagatgt

SEQ ID NO: 22694 - DNA, 418 bp, Gossypium hirsutum
  Clone ID: LIB3146-057-Q1-K1-F7
ctagtcttaaagtggtagaggtgatcggcttcagaggttttaaaatcgatgtggatttcgttgcatatctacttgagcatgggaaagtgatggagaagattactattaattgttgccatccaagttgggctgggcaaataattccatgaaattctccatattgtaaccttaattttgtttggtagatttaggagctagagttttttgtagaaattcatgtagccagtttgtaaagcctaagctctaggaatttcctccaaaatttgtaataatttataggtgctgcgaaccgaaaactcgcctcagtacgcgcctctctagaccaagagatcatcgtaaagtgtgcgtgctaaaggaatgtggaggattttcccagcatcatccgctgaaaaggtgtagacttgagacgttctatgat

SEQ ID NO: 22695 - DNA, 401 bp, Gossypium hirsutum
  Clone ID: LIB3146-057-Q1-K1-F8
gagagctgtgtggcatctattattgggtatttggatcctccacaaatatgcaagttgggggggttgaacagagcgtttagggccgcttcttgggctgatttcgtttgggaatcgaaattgccaccgaattatgaaacccttgtcggtgaagttttgagctttgtgcctgagaagttgggtaaaagagacatttatacgagactctgtagagttaatacctttgatggtggcaccaagaaaatatggctggataagagcacaggcggtgtttgtatgtcgatatcttcaaagggtttacagataacagggattgatgatcgaagatattggaatcatattcctactgaagaatctaggttcggttccattgcatatcttcagcaaatctggtggtttgaagt

SEQ ID NO: 22696 - DNA, 379 bp, Gossypium hirsutum
  Clone ID: LIB3146-057-Q1-K1-F9
cccacgcgtccgcccacgcgtcctccaaggtcgacactgagtggactcggtggatgttggtcatcttcaagcaacggtagtcctaatggtccttctcaagtaccatctccaccaacaacaccttttggtcctcaaaatgacacttgggatctcatttatgctgctgctggtcaagttgctaggctaaaaatgagcaatgaagtgcctaaatataccaactttaaccatggtagaaccttatccaaaacgctccacaaaatcagtatataagcaatggcatagcagccaggggagggcagggagaagaaaaacaacacatacacacacagcggaattagattaattgagaaaaacgcaatggctcaaaagatgttgatga

SEQ ID NO: 22697 - DNA, 323 bp, Gossypium hirsutum
  Clone ID: LIB3146-057-Q1-K1-G1
ctttttttaaatcctattaacagttccattacctatcaacaactgagtcactgaagactggagggatttaacagtgttagagagcactcacggtggaaggtatgggttggatatggactcatagtccaggataagttccttttgggtccttagctaatagctatcctggttctagaagtgggcactttgtgaatttgagggtagaaactagaattgatttaagttgcagtactgcttgtgtatatctattttctggaataaattgcccatcagttttcaagttcaactgatttttcaaccttttaggcgattctttttatctt

SEQ ID NO: 22698 - DNA, 279 bp, Gossypium hirsutum
  unsure (1)..(279): unsure at all n locations; Clone ID: LIB3146-057-Q1-K1-G10
tcgttcccnccccgnccctttcaattttattctcagtcttttaattcaatatgccctaatagtcgggacaggtgtcattctggtatagtggatatatatatatantggctgtaggggtagcatnggggttgtttcgttcgttcgttcgtatgttcaattctttgttttctttctctttgaagtgtgatttgaggtgtgtttaattaacttattagaatgtaccaatgatgaagatgaagtatcaaaggtggaaaaatgttagtagttttatttaatttc

SEQ ID NO: 22699 - DNA, 403 bp, Gossypium hirsutum
  Clone ID: LIB3146-057-Q1-K1-G11
cccacgcgtccgcaaactctcaagtttttaaagacaaaagtgccatttctagagttccaaatgtcagttattaggacaagtgctaacatgattatgaaacaactcctccatcacccgccgttatctttcatctcattctccggtcggccgcttcttccctgttcccgtaaccccatcatccgactgacgcccaatcgtggaatcagttgtagtcccattcgttgcgccgcacccgacgccgatgccgacagaaaagtctccgctcgtctctcgcaaatgcagcagctccttcaggaagcggaagagcgagccagctccgccgggaatgggctcactcctcaaatcactttggatcatgttacggtgagttttgcaaggagtggtggccctggtggtcaaaatg

SEQ ID NO: 22700 - DNA, 362 bp, Gossypium hirsutum
  Clone ID: LIB3146-057-Q1-K1-G12
tgctcatgcaaatgttgagaaggctgaagcctatgagaagcaattgaagccatgaccaggtttgaagggggctgatgtggatgctttggagaaaacttcaggagcaaaacctgttgatggtgcttctcgtgccgggcttgctgaagctcaagaggatggtaagaccaaggagaaaccgaagaaaaagaggaagagaaagccaaggtatcccaaagggtttgacccagcaaatccaggtcctccaccagacccagaaagatggctccccaagagggaaagatcaagttacaggcctaaacgaaaggataagagagcggcccaggtgagaagatctcagggtgcagtggttagagataagaacg

SEQ ID NO: 22701 - DNA, 358 bp, Gossypium hirsutum
  Clone ID: LIB3146-057-Q1-K1-G2
ctttcatctgtcaaatacactaggcacgcttcttgtttcgaaccaactattggggtttgagaattacaaatgtttggaggcgttagatgcgctctacattgttggcaaagaataaattgggctttgttgatggagtttgccaaaaggaatcttatgatcccatctttcatcattaattggagcgctgtaatgccattgttctttcttggattttgaatgcagtttataaagaatttttaataagaatcttctttgtatcaaggtgcttctttagtttggcaagatattgaagaaaggcacgataaggttgatggtacttgggtttattttctccatcaagaaatttcttctcatgtgc

SEQ ID NO: 22702 - DNA, 415 bp, Gossypium hirsutum
  Clone ID: LIB3146-057-Q1-K1-G3
cccacgcgtccgcgtagcccttctccaattcgtaggcggagccgttctccaattcgcaggcctcttcgttctcgttcaaggtcaatctcaccaccaagaggcagaggacctgcagcacggcgtgggaggtcatcatcctattcccgatcacccagtccccgaaaggcaggacgaagggtttcaaggagtcgcagtcctaggaggccattgagaggaagaagaagcagcagcaacagcagcagcagtagttcgcctcctcggaagccgtagattccctcagctgattctctatttgttgtgtgaatgatgtaataggagagtcagtatcgagttgcttgagaataatacttacacattgcatctgtgatgatactttaactgccttttaacaaagtcttgatgatgagttgtgatt

SEQ ID NO: 22703 - DNA, 400 bp, Gossypium hirsutum
  Clone ID: LIB3146-057-Q1-K1-G4
gtttggaggattttacgtatgtgactacccatggatctggcaagtcgtctacaaaggtgtattatgatggaggtgaagaaaggagaaaaagtaactgtgaaaccccagctccagcaccaagatttgtggaagaggttgcttacccaacttcagattttctcagttgttgtcacctatgcaggaaaaagctgcatggccaagacatttacatgtatagaggggaaaaagcgttttgcagttcagagtgtaggtcaactcaaataatgatggatgagaggaaagaacagtgcagatcagaagtttcaagatctgcaagagtcacaacctcctcttatgagtctggggatatcttcttctcaactgggattcttgcaatttagcttccagtcctcatatgggg

SEQ ID NO: 22704 - DNA, 448 bp, Gossypium hirsutum
  unsure (1)..(448): unsure at all n locations; Clone ID: LIB3146-057-Q1-K1-G5
cacgcccgtccgnnggattaaggggccannaaacctcncnngccaccctttttcggtttgggttttggtaccggtnnncacacccttacagtggcggccgcgcnntttaccgnntccgtgcgtagttcaatatnngccgatgagnncttgttaagaccnnngcgaaaactggttgcnnatctccaggtcnngtggtattttggccccatggatgaatcannaatgctanncatgtgggannagcggcttnggcctcgattggggtctcgagaaanntaccgaggcaannaccggcaagcttaaaccgtacccttctcnngtgtctgcnnccctggcctcggtaacctaccatctcgggaaggctatccttttcgaaggagaactctctanccaatctanccatcgatgggaaaaaagaatggtcgatgttctttgttgagcanaaata

SEQ ID NO: 22705 - DNA, 427 bp, Gossypium hirsutum
  Clone ID: LIB3146-057-Q1-K1-G6
ggcgagtaattaggttcaagtggtaaatcctaaaattaagtggtttatgaaaatgaggtatcaagacctcatttctttaaaccgagcctgtaaatattttattaaatatttacggagtgttattaaggtcatattatagtttcgttagaaagttttatcatttaaatagttaattaattaaaaaagaagaaatcgtaacgatagcaaaagtgagttttattagttaaaaatgtgttaattgataaattattaaagttacaagagtttttgatgcagttagaccataacaatgaattatggctagttagtggatgtaggaattgaaaagaaaagaaaaactaataatttaatatatgtttattaattaaacaaaagttaaagtattaaaataaaaaaaccaaaagcatccatcatcttcgttctttta

SEQ ID NO: 22706 - DNA, 402 bp, Gossypium hirsutum
  Clone ID: LIB3146-057-Q1-K1-G8
gtcagaaacatttttagaagatagacatatctctccagctgttctatatattcgagtatgtgcactccaggaaggaataggatccaacatggtgactattgcagaatacagattgccggaggccaaaccaggaacagtaatgtactttgatttccctagacaattacaaacagaaagaatctctttcaaacttctgggagatgttgcagcatttacggacaagccggcggagcaggatgattctagttttagagctcctgctgttgctgcaggcttgtctctgtcaaatagaatcaagttgtattactgcgctgatccttatgatcttggcaagtgggctagcctttctgcagtttgacattactttaacccaggtggaaaaaatgggtttaaaagatgggt

SEQ ID NO: 22707 - DNA, 383 bp, Gossypium hirsutum
  Clone ID: LIB3146-057-Q1-K1-G9
cccacgcgtccgagcagaacccttcatttttctctgccaccagcggcacccaaggatgcggatcttcgtcaaaaccctaacggggaagaccataaccctagaggttgagtcttccgacaccatcgacaatgtcaaagccaagatccaagacaaggaaggcatcccacccgaccaacagcgcctcatctttgccggaaagcagctcgaggacggccgcaccttagccgactacaacatccagaaggaatccaccctccatctcgtgctccgtcttaggggaggtgctaagaagagaaagaagaagacctacaccaagcccaagaagatcaagcacaagaagaagaaagtcaagctcgctgtgctacagttctacaaggtggatg

SEQ ID NO: 22708 - DNA, 357 bp, Gossypium hirsutum
  unsure (1)..(357): unsure at all n locations; Clone ID: LIB3146-057-Q1-K1-H10
ctcctccaccaccacctattcagtttccctaaaatgggttcgggttcatgggaggcttgggaggttttgcaccaatggcaactgctcgatttgggaatttcacactctctgctgcttttggtggtcttatcccatccttgtttaaccttcaggtccatggatttcctgatgcggctatgtttggtccagctgctggttttccatacggctttccaagttcatatcttggtggccatgcttatggataccatcatcaccaccaccaccatcatcatcgcaccgcacaaggccagcaggatcattatctgaagatngctgttctgtttatcattgnttgtgttatctttgcaatgattt

SEQ ID NO: 22709 - DNA, 297 bp, Gossypium hirsutum
  unsure (1)..(297): unsure at all n locations; Clone ID: LIB3146-057-Q1-K1-H11
ccggcccgacccacgcgttcnccagactcatcccaagttatggtttcttttatgccagcaaatgtgtaagttaggggcatggtgggtttctaatcaagcaacgatcaaatgtcatgagtggctggctgatagtaaaccaaggaacttcggtcatcaatccctaaaccggttccgaaaagaaatgtaacgtatggttagagaggtccaaggagtgaaatcgctgaataataataattttatcaacattttgngaaaaaaaaaaaaaaaaaaaaaaataaaaaaaaaaaaaaatattaa

SEQ ID NO: 22710 - DNA, 428 bp, Gossypium hirsutum
  Clone ID: LIB3146-057-Q1-K1-H12
ttcttgaagcatccttacttctggtttctccttttggtcacccggacccatgcaagatggaacggttgttactttaagggcgcgttaacccaatcctatgtcattgctacttccaccaaggttgacatctcaggggttaacgtagacaagtttgatgacaagtactttgccaaggaagtagagaagaggaagaagaagactgagggagagttttttgaggctgaaaaagaggataagaaaaaactgcctgaagacaagaaagaagaccagaaagcagtcgacgcctctttgataaagtccattgagggagtcccagacttgaaagcctacctcgccgcaaggttttctctcaagtctggcatgaaaccgcacgagcttgtcttctaaagggtattttgcattcccttatgttaaagggattttacttt

SEQ ID NO: 22711 - DNA, 93 bp, Gossypium hirsutum
  Clone ID: LIB3146-057-Q1-K1-H2
cccacgcgtccgccggcttgttggcttgctgcgtttggcttcagaatgcacaggtcacatgtccaaggttcgagggctggtgccagagagaag

SEQ ID NO: 22712 - DNA, 344 bp, Gossypium hirsutum
  Clone ID: LIB3146-057-Q1-K1-H3
cccacgcgtacgccacgcgtccgcaatggttcttatataggtgaagcatcttagactgggcgctcagctcatggtcctcacaatggaggtcctaattcagcccattcagtggcacatacagcactggccattgtacctatatcaactacttcggctgccacagctgttcctggtccaactactaacttacatattgggatggattactggggtacacctgcttcatctaatgatcctgcaatgcatgcgaaggttccttcaaccccacttgcaagaggaattgtcacccctggatcacgggacaatgtccagtctcaactatggttacaggatgaacgagagct

SEQ ID NO: 22713 - DNA, 315 bp, Gossypium hirsutum
  unsure (1)..(315): unsure at all n locations; Clone ID: LIB3146-057-Q1-K1-H4
gcgtccgctaaaacaaaatgggtnnttgggcttaaattgtaatatttatnggtttannggttttaaaatnnttgggtcaatgtgagatttggacgtgatggaaataattnngtaatgaaatttgaaaccntgtaaaatggaacaaattagaaatgggctnnngttaattaannnaaaaaaanannaaaaaaannaaaaaannaaaaaannaaaaaannaaaaaaaaannnaaaaaaannaaaaaannaaaaaaannaaaaaaannaaaaaaannaaaaaacaaaannaaaaaaacaaaaacataaaaaataaaaa

SEQ ID NO: 22714 - DNA, 385 bp, Gossypium hirsutum
  Clone ID: LIB3146-057-Q1-K1-H5
ggaggtggtagtcccccatcgtatggaggttgcagttccccatcgtatggaggaggcagtcccccgtcatactgaggtggcagtcccccatcatacggaggtggcagtcccccatcatatggaggtggcagtccaactactcctattgatccaggaactccaagcattccctcacctccattctttcctgctccaactccaccaattggtggtacatgcgatttctggaggagtcaccccacactgatatggggtctgcttggttggtggggcactgtatgcaacgcatttggcgtgaccaacgttcctggacttggaacaagcatgagcttgccccaagcactttcaaacacacgtactgatggacttggggcgctttaccgag

SEQ ID NO: 22715 - DNA, 375 bp, Gossypium hirsutum
  Clone ID: LIB3146-057-Q1-K1-H6
ctggccagcacctttaaagttcattagtgagctcaatgacgaggcaaaggtactattagaacaggcgttaatggatgcaaacagggaaagggaaaagaacatcttgaaaggaacagcttactcacttctatcaccgtcaccatcccactccgattctgggttagacgacagtatttctgaggttagtgatgccgaactatgctgcatatgcttcgagcagatctgcacgatcgaagtccaagactgtggtcaccagatgtgcgcacaatgcacattggccctttgctgccataacaagccgaaccccacaactgcaagcgtaacacccccagtctgccccttttgccgcagcaccattgtccgattggcagtagc

SEQ ID NO: 22716 - DNA, 402 bp, Gossypium hirsutum
  Clone ID: LIB3146-057-Q1-K1-H7
ccacgcgtccgcttctttgctttttttgttttagcagcttgtgtagggggaaaaaattgtgaagagggtttcctttgttgccttgtgtgtggtggcactcgcggtggtgctgttttcgggtgaaagtcgcacggcggaggcagtgacatgtaatcccgtggagcttgccccctgctcgccggcgcttacgtcgtcctcgcctccatcaagcgcttgttgcagcaagctgaaggcgcagcagccatgcctctgtggatacattaagaacccatctcttaaacagtatgtcaacagtcctaacgctaaaaaggttgcttcgacttgtggagtcccatatcctaagtgttaaatgttgcttaatggtgtatctactatctactggcagcaaataagtgatttttt

SEQ ID NO: 22717 - DNA, 426 bp, Gossypium hirsutum
  Clone ID: LIB3146-057-Q1-K1-H8
ggcgctcagtccgagacgccggctcaaggtgccggatatctcgtcgtcatcggcggagccgaagggttagcggcgcgtgttggtagctcccgagacttggttaccagctggatggtcgatcgaagatagggttcggagctccggtgcaactgctggaactgttgataggtattattttgatccatcctctggccggaaattcagatcgaagaaagaagtgctttactatctagaaactggaatccccccttctaaaaggaagaaaggagcagaggcttctggaagtgaagaagttggtacagggaactctgggggcaacaaacagaagaagcctgataaaaagctgaaaactttgaactttgatttcattaacgtgccgcaaaaagttgattggttgttggcaaatgcctctgaagactcgtggac

SEQ ID NO: 22718 - DNA, 413 bp, Gossypium hirsutum
  Clone ID: LIB3146-057-Q1-K1-H9
atgcagcatacattcactcttcccaaaagataccaagaatttcctggggaggttattgggttgtctttctgcccttcttcatcttcccatccaacgaaatcttcatcgcttgttgtttatagtgccagggcaatgtgttcaattgactttgggaagccagtagacgaagatgatgaaagtgagttggtaaatggagctttgttgaaatttcaaggttctctcaccaatatgaaatggaaacattggttgagggagagccgtcaaagtagaaaaaataattttgatttagtagtttttcgggaccctgttttatttattgggcacctttcaaaacattccatcttgatcatagacaaaccatggatggaagtggttaaatcatttgattcggcaccacttcagagacatatttt

SEQ ID NO: 22719 - DNA, 375 bp, Gossypium hirsutum
  Clone ID: LIB3146-058-Q1-K1-A1
aaatggcccccttggtggggaactggcagcgaatggatgtcaatgaatctattcctaggaaagagcgtatcgggaaaatgttctaaagagagcagtgtgacatcttacactgttctgtttaatagacaccggttgtccagatttggtgtgtggcaaatgtatgactacatacatacataaatacatacatacatcaaggaacatccactgtaatttttatggccccaaacttatttattttgaagatgggatttaatatttcattttcagatatacaaggatactaagttgaagtgtgggtggtagtctttttcatgtcttatgtaaatactgaaaatcatcaatagaggctctgatgcatctgctctgtctcgt

SEQ ID NO: 22720 - DNA, 340 bp, Gossypium hirsutum
  Clone ID: LIB3146-058-Q1-K1-A10
cccacgcgtccgagaacttcggggcttcacattttgtgttgctatctgccatttgtgtccggaaacccctcctcgaattccagcgagctaagctgaaatttgaggccgaattgatgaaagaagccgaaggagatgacgggtttacttacagtattgttaggccaactgcattctttaagagtttatggggtcaagttgacttattgaaaagatgaaaggcctattgtatggttgggggtgggaaaatattttcctggtaaccaatttatgaacaaaaattgggttccctcattggaaattggggtttggaagaagattaaaattatcaaatttttgccat

SEQ ID NO: 22721 - DNA, 408 bp, Gossypium hirsutum
  Clone ID: LIB3146-058-Q1-K1-A11
atgggtccaggcatattttaacacgttccaactgaaagagggttaattaatagtggcgagatcacaaatgcgagatgcaagtgggaaccggtggtggagatgcttgtgatcacttaaacgaaaaatgtgctgaaagccactaacatcgggaaaacgaaagcttctaaacaaattctgtgccatcgcaaccaaatgaaaatgcaatggccaatacaatctgatctcctagggattatccaagtgatccaagaaactgaccgcaagtgcaaggatgctgtattagcataagccaaagcgaagtggcggctgcttctattaggagagacgattgaataacttgatccacaacgatcaaaggacttgaaagaaaaagcaaggcaacttattatacaaaggtaaaagttactg

SEQ ID NO: 22722 - DNA, 390 bp, Gossypium hirsutum
  Clone ID: LIB3146-058-Q1-K1-A2
ggatcaagtgagagaggcttctgagttatcatctaggaaaagaagggatagttgggaggttgaccgagtccggggatttggtgttggagaagccagttccatagaacaaccctcaacctcactccattagtccccgacctgcattgcctcaaaaagagaaaacagagaggtctgcaaatgaattatgtcatgtgcaccatggtttattgcttgagactatcatgatatggatgaattgttacaagaatgataaggaagttttgtacataatgggcaatcaaatctatcctagtagacattcctgatttagtcattatccaagtaataagacttggtaacggttggatttgaatcgattttggaataaaattacatttatcctgctttttt

SEQ ID NO: 22723 - DNA, 408 bp, Gossypium hirsutum
  Clone ID: LIB3146-058-Q1-K1-A3
gcatgtaggaaccagagaccaaggcaatggcttttcttgcaaccttagctggtgttcaaccaacgaccatcaagggccttggtggcagctctctcaatggaaccaagctcttggtgaattcaactagccagagtttcaaacccaaaaactacagggatggtgctgtggtatcaaagtatggtgattagagtctatactttgatttggaggatattggtatcacaactgggcaatgggacttgaatagatccgatgcaccttcaccgtacaacccactccaaagctagttttttgagacatttgcagctccatttaccaagagaggattgacgctcaagctcctgatcttgcgaggcggctccctcggtctttacctcagtgccactgcttacgatgaccttctaccga

SEQ ID NO: 22724 - DNA, 223 bp, Gossypium hirsutum
  Clone ID: LIB3146-058-Q1-K1-A4
gttatttccaatttagaattggtacaagtattcttgttgtattaaaaatttatatataggggaatggtttgatacactagtttcacaagcagtgttgagattttatcacgtgtggcaaaatctcattaacttcccttgtatttacactttaattctttggtttaatattattaagctttatttcaaaaaaaaaaaacaaaaaaataaaaggaaaaaaaaataa

SEQ ID NO: 22725 - DNA, 329 bp, Gossypium hirsutum
  Clone ID: LIB3146-058-Q1-K1-A5
gccatggctggccgtacgcttcttgcattatttgtcctataactctgcctaggagagggggtatctgatcagtgggctgaagaagacataacgactgtttgcacggtgggttttaatataaccagaggcggcaacagaggactgatgctagagattgactgcgtacgttcatgcatgcatacatgcattcaagactctacgcctgacagattctacaccgcaactgatacttgctgaatgaggtacaaaatcttgccatctcagacttacaaggacactaaggtctactgtacctggtatactgtcatgagcaccattggaaaccttaa

SEQ ID NO: 22726 - DNA, 195 bp, Gossypium hirsutum
  Clone ID: LIB3146-058-Q1-K1-A6
tttgttttgttttttccctaaagggccgggatacctttcatagaattaaaaaaaatcatatgccgtatattgacgcctaatttcaatacactgcccgccgacatgaaacgtctacacacaaaaaaccctggccaactccaatttaataaagtttaaggccacaagccttcttacttcatactataaagccatata

SEQ ID NO: 22727 - DNA, 406 bp, Gossypium hirsutum
  Clone ID: LIB3146-058-Q1-K1-A7
ctcagaggggaatttcctttctaattcgaaagtagatgtgatgttgacacccaggccttcgtcaaacttgggactgaaatctgtttctatgcttgagaaccttggggttcaaccaacaaaggcgaaagaggtcacgaaccagaaggtggtaaaggactcgcctcatgctgccaatgagacgaggcccaaccataatgcatctgtaaacaataacagtggagcacctgcttccaaggcacaggttgtaggttggcctcctattagatcgtttagaaagaactcattggccacctcttccaagaacactgatgaagtagatggaaaggcagggcctgatgctctttttgttaaggtcagcatggatggtgctccttatctcaggaaagtggacctgaaaaactactct

SEQ ID NO: 22728 - DNA, 405 bp, Gossypium hirsutum
  Clone ID: LIB3146-058-Q1-K1-A8
gactgggccaaaccaggttcgatggggaaacaatatttcttggggttcgagaagtaccttggagggtctggtgagccggcataccctggaggaccactgtttaacccacttggttttgggaaagatgagaagtcattgaaggatttgaagctgaaagaagtgaagaatgggagattggcaatgttggcaatcttgggttacttcatacaagggctcgtgacaggtgtaggaccataccagaacctgttggatcacttggctgaccctttcaataacaatgtcttgactaacctcaagttccattagatgaaagtgcctatatttgttccatggaactaccctccccccccctccggataaaagctccattgccaaatccctttctgctcctttcttgatctcagt

SEQ ID NO: 22729 - DNA, 145 bp, Gossypium hirsutum
  Clone ID: LIB3146-058-Q1-K1-A9
catttcaagtaatgcaacccatcaacggcgtccccttcattggaagcctggagactgcaatcacctcacagccccttaattgcatggttcctctccaacctcccaaactatctgacagccgcgaacccacttctaacgggaatct

SEQ ID NO: 22730 - DNA, 411 bp, Gossypium hirsutum
  Clone ID: LIB3146-058-Q1-K1-B1
ggttactagacctcacggtaatagtggtgtcttccgttctaagttcaagtctaatcttcgggccaggtgtatttgagatagagtccgaatcttgatgtacccgagcaatatataagttgtctaaatgcccggtgttctatcgatgactcgcgtgatactatcttttctatacgactgtcaaaatgttgtgtgttcttgaggccatttttttattcattaggatgatagtggattagactttcgggacatcaaagattctccagtgattaattttcgacgatttaagagttcggtaatcaatcattcatggaattgaatatcaaagattgttctacttgagccacaaatgcaaagatagaacatgtgcagagacttctgtaatgctagaattatcaaaatgaatattcgttt

SEQ ID NO: 22731 - DNA, 378 bp, Gossypium hirsutum
  Clone ID: LIB3146-058-Q1-K1-B10
tgacattgtgttggcttacgaaaatcaaaatggcacttcctttagggatgatttctgcaggagtgctgttcctagtggctcttactagggttcaactctcaaattgccaacatctcaatgccaaaatctcctgcttcgactgccctcataattatgacttctcaggcatccaagttgcagtgaagtgtgagaaagtgaagaaactagccactgcaaccactgaagaaaatggttctttcaaggtccagcttccatcaggcatctcaaaccctaactgccttgccaagctcctatgtggaccaaaccagctatacagtaagaaaaaaaaccctgtgtccaaaagttgtgaaaggggacatcaactcaatacttacaccc

SEQ ID NO: 22732 - DNA, 337 bp, Gossypium hirsutum
  Clone ID: LIB3146-058-Q1-K1-B11
aaaaaacttcatcgactgccgctcaaacttttgccatacaacctctcttgccaccttcaagagaaacacatactaactcaatatggtgttctatcaatttgactccaacaaaaactggcaaatctctattactgatctccctgacctattaataacaattggatccaactactcatatgaataattcaagcgtatcatgaaaaacatccacctggatcaacacaggtacatcaacttttccaaattctccactttttaggcctcttattccctcaccgtttaagccagtttctatttgcaccaaaccttctattcttacaatcaaaacaacaactgt

SEQ ID NO: 22733 - DNA, 172 bp, Gossypium hirsutum
  unsure (1)..(172): unsure at all n locations; Clone ID: LIB3146-058-Q1-K1-B12
cccactcgtncgnggacgcgtgggcggacgcttgggcggacgcgtggggcgccgctcggggtctagatccggacgcgtgggcggactcgtgggattaatcagaccacctttggggactttatgtaaatgtggaaaaaagtgatagaatacagtgaatacagttagggttgcg

SEQ ID NO: 22734 - DNA, 250 bp, Gossypium hirsutum
  Clone ID: LIB3146-058-Q1-K1-B2
ggattgaagcagaagaaggcacacctgatggagatccaagtcaatggtggaacaattgctgacaaggttgattttgcttacaagttctttgagaagcaagtccccattgatgctgttttccagaaggatgaaatgatcgatattattggtgtcacaaagggtaaaggttatgaaggtgttgtcactcgttggggtgtcacacgtctgccccgtaagacccataaaggtctgcgtaaggttgcttgtattg

SEQ ID NO: 22735 - DNA, 400 bp, Gossypium hirsutum
  Clone ID: LIB3146-058-Q1-K1-B3
aaattaaaacaaaagaaggcacacctgattttaatctcaaatcaaatggtgaaacaattgctggcaagggtaattttgcttacaagctctatgataaacaattccccattgatgctgctttccaaaaggattaaatgatcgatattattggtgacacaaagggtcaaggttatgaaagtgttgtcactcgttagcgtgtcacacgtctacctcattagacccatagacgtttgccttaggttccttgtattgaatcctgacatcctgccaaaatttcctttacagtaaccattgcgcgtcataatggataccaccaccgctctgagatgaacaacatcgtctacagcgttggcaaggatgatgatcagacccactctgtcataactcattatcacaggac

SEQ ID NO: 22736 - DNA, 386 bp, Gossypium hirsutum
  Clone ID: LIB3146-058-Q1-K1-B4
ggattaaatcaaaaaagggctcacctgctttttatccttatcaatgttggcacaattgctggcaagggggattttgcttacaagctctatgacaagcacatccccattgatgctgttttccataaggatgaaaagatcgatattattgctgtcacaaaaggtaaaggttatgaaagtgttgtaactcgttggggtgttacacgtcttccccattagacccataaatgattgcataaggttccttgtattgcagcctaggatcctgccaaagtctcttttacatgaaccaggacatgtcaaaatggctaccaccaccgaactgtgatgaacaagaccgtctacattcttggcaaagctgctgatgagacccactctgccataactga

SEQ ID NO: 22737 - DNA, 317 bp, Gossypium hirsutum
  unsure (1)..(317): unsure at all n locations; Clone ID: LIB3146-058-Q1-K1-B5
tcaaatcttntttgnacaccaaaattaatatattaccaccctcacggatcacttgggcacgagtactttaaaaagcgtctcttactacatttcaacaatcaaattacctatatttaaatatccaaaaatttctgatttaactctccatttcatcaaaactttttatgcttccaaatataattaaagtgttatatatttaaaaaactatccactttaaccacttaaaaaaatcactcttttaaagtccaatattcatcatccaattaaaactataacatgacatccaagctcctactttcaccaaaccaacaatacat

SEQ ID NO: 22738 - DNA, 167 bp, Gossypium hirsutum
  Clone ID: LIB3146-058-Q1-K1-B6
tcgtaacataataaagcacacctaatttttatttttatcaatgttcaaacaataacctgcgaggggtatttttcttacaagttctttcaaaaacaaatccccattgatgcttttttccaaaatgataaaatgatcgatattattggtgtcacaaagggtaaaggtta

SEQ ID NO: 22739 - DNA, 395 bp, Gossypium hirsutum
  Clone ID: LIB3146-058-Q1-K1-B7
cccacgcgtccgcggacgcgtgggctggattagtgcgaggaaacaaccctgcatgatgttgacattgaggaagtgatgcgtaggaaacagactcaagctcaacaagaagcttatgatgaagatgaggacatgcatggtggtgcgcagagagtacaatgcgctcagcaatgataaaaaaaagccgaatgtccgagacacagacggtggtttttggcgatggaatgtactgtggttaaaaaaaaaaagaaagaacatttgagagtaagattctcaaaacattgttgtgttttggtagtcctttattttttgtttttaatagtgcaagtattttagtaattgaaatggtgttatatgctttgaaacctgatgctttctaagtatgcaaagatttatgc

SEQ ID NO: 22740 - DNA, 408 bp, Gossypium hirsutum
  Clone ID: LIB3146-058-Q1-K1-B8
gtttgcttcaaaccaagtaatttctctgttgccgtgcatgtggatgttgattgtcactcaggtgaacagacctgtctgctggctgttgaaggataccattgccgggagagtagcatcgaagagcttggttcaggcggttccatcatttaccagagcttcaacggcattgggggatgtggatcacctagatcaactctgagttgcctctgggaagaggaggaagagtattattataattaaaacggcttattttcttatgttataactattaaataaattgctacccaggcattgcctggtgataaagcatggtgtgtgtttctattctagtactttttttgtcttttatcaagtcaatcgctatgccagcaaacctggacttgatactgccatttgtacggcagaatg

SEQ ID NO: 22741 - DNA, 346 bp, Gossypium hirsutum
  Clone ID: LIB3146-058-Q1-K1-B9
gtaacgcgttgcgaaaaaccctaggattttttgattcttgggcttatccctttagatggagcaagggtgaacacacagtaggaacactacttagctctaataccgattcagcgcatgtagccattaacatagagtagacagaaagcttgttaaacagattctctgtcataagccaccgaaatgaaaaagcgatgtgcacaattcaactctgatctgctatagatttatcctagcgatccaataaactgaccgcatgtgcgaggatgctgtattaccagaagccaaggcgaagtagccacttgttctaataagcgagacaaatgatacacttggtcctcaacgatca

SEQ ID NO: 22742 - DNA, 415 bp, Gossypium hirsutum
  Clone ID: LIB3146-058-Q1-K1-C1
cccacgcgtccgcccacgcgtccgaacatctcaaaaatatctgttctctcgttcatccaagtacccgaaagtcaagagtagattaaactaatggccggaatcggacctttgactcaagattgggagcccgtcgttattcgtaaaaaagcccctaccgccgccgccaagaaggatgagaaagtcgttaacgccgcccgccgtgccggtgccgagatcgagtccatcaaaaaatcaaatgctgggacgaatagggcggcttcaagtagtacttctttgaacacaaggaagctcgatgaagacactgagaatcttgctcatgaccgagtgccaactgagctaaagaaagccatcatgcaagctcgaatggataagaaacttacccaggctcaacttgctcagatgatcaatgagaagc

SEQ ID NO: 22743 - DNA, 336 bp, Gossypium hirsutum
  Clone ID: LIB3146-058-Q1-K1-C10
gctctacatatccaggttcttctgactaccaatgagtgggacgaatgcaacttttggctggcaactctgaaacggatgattaagacaaggcacaatgtaagataagtgataaagatggcaaaaactgtccgacgatgtgttcatttttgcttgtgtacatttggggcaatgatcaaagcccttggatgtccacaaagaatagcttctcttgattgctgctgcagaatatatagattggttcttttgatcccattgcataaacgcccctcctggatttggtagatattgactttagcctttacacattaatactccttttgaaagcaaaacagctac

SEQ ID NO: 22744 - DNA, 314 bp, Gossypium hirsutum
  unsure (1)..(314): unsure at all n locations; Clone ID: LIB3146-058-Q1-K1-C11
gcagcctcctcccacacgtccagccagctttcaccgacacaaatgctaggctacaaggggaatgaanaggaaattaatagacccaattgcatatataaggtagctttacccgataataaggtaactcacgatgattcatctagcgcgatatatcacaatggcggcgccatcataataaacacagcttccaaccctaagagtcctcatgatagaaacctcgactcataatatgaatcaaaacaaacaaacaaattctcttccgaaaaagtcaagggattaaaattttgaaacgaaaacatcgcaaaggatctttc

SEQ ID NO: 22745 - DNA, 380 bp, Gossypium hirsutum
  Clone ID: LIB3146-058-Q1-K1-C12
cccacgcgtccgaatttggatacaacaatggtggtgaaggtgtatggcccagcctttgcggctccaaagcgagtgattgcatgtcttattgaaaaggagattgaattcgagactgtccctgttgatttgcttaaaggagagcacaaagaccctgaatttctcaagctccagccttttggaacagttcctgtcactcaagatggagattatgttttatatgaatcccgtgcaatcataaggtactatgcaaaaaaatacaaatcacaagggactgatctactgggaaagacaatagaggaaaagggtcaagtggaaaattggctagaagttgaggcacacaatttcaacccatcaatttacgccttgaccctacatgtgat

SEQ ID NO: 22746 - DNA, 404 bp, Gossypium hirsutum
  Clone ID: LIB3146-058-Q1-K1-C2
gccccactctcatccgatttgaggtccaagttcaacgtccggtccatgccggtgcgcaaggacgacgaggtccaactggttcgtgggacttacaaaggccgggaagggaaagttgttcaagtctaccgtctcaaatgggtaatacacatcgagcgcatcacccgcaagaaagttaatggttcgaccgtcaacgttgggattaacccatccaaggttgtcattaccaagctgtggcttgacaaggaccggaagtcgtttttggaccgtaaggctaatggacaggctgctgctgataaggataatggtactaaagtctctgccgaggatatcatgcaaagtgtccattaaggttgacttgtttttcattgctatgatatgctctggtatgttacaatgtacggagt

SEQ ID NO: 22747 - DNA, 412 bp, Gossypium hirsutum
  Clone ID: LIB3146-058-Q1-K1-C3
cactatctttattttacctggtctctgtaattcctattatttctaatggaaatttcttggggcggggtgtaaaaaataaacattaggattcaaactagcattatgtaatggtttataggcgcttctgactgacaactcccctgaatgcttctctctccacacctgacagtcatcatgaatattcaggattttctacgctatgcccggctgagatgtattgttgcaaaccatcactccatcgttatattatgacctctatgcttgagaagattatttacaccttctacgccaataaagatacttacacctatgggactgctctcgctaaaagttaaactagacactaaggtggacgctttctttctctctattatctctccagaatggatacagttaaagtactataaatatt

SEQ ID NO: 22748 - DNA, 378 bp, Gossypium hirsutum
  Clone ID: LIB3146-058-Q1-K1-C4
agcaggttcaagttgcccgacaatgcaaggactgatgagattgaaggttttatggagaatgggatgctcatcgtcactattgggaagcaaactcaagctccggagaggccaaatgttagggtcgttgaaatcacagagtaatttcactttttttttttaatgcaaaatgtcaagtgatgctctactctatggtgtttgttttgttttgaagcttgaaaaaatgtgtttaatgtcaaagagtaagtcggttcttgtactagaacagtagttttagtagtaataaaagcacttttgtgttgtgtactttgcttcaactttggtttaagaagttaggaacagaattcaagccgaaaaaaaataaaaatatatataataaat

SEQ ID NO: 22749 - DNA, 406 bp, Gossypium hirsutum
  Clone ID: LIB3146-058-Q1-K1-C5
tccaccatcatctggaggtggtcgtcccccatcgtatggaggaggcagtcccccatcgtgtggaggatgcagtcccccatcgtatggaggaggcagtcccccatcatacggaggtggcagtcccccatcatatggaggtggcagtccaccaactactcccattgatccaggaactccaagcattccctcacctccattctttcctgctccaactccaccaattggtggtacatgcgatttctggaggagtcaccccacactgatatggggtctgcttggttggtggggcactgtaggcaacacatttggcgtgaccaacgctcctggacttggaacaagcatgagcttgccccaagcactttcaaacacacgtactgatggacttggggcgctttaccgggaagga

SEQ ID NO: 22750 - DNA, 407 bp, Gossypium hirsutum
  Clone ID: LIB3146-058-Q1-K1-C6
cccacgcgtccgattatcactcccgttgagcttatcaagaagggtgagaaggttggttcttgcgaggctgcacttcttgccaagctcggaattagaccattctcatacggtcttgttgtcttgtctgtttatgacaatgggtcagtctttagccctgaggtgcttgaccttaccgaggatgacctgattgagaaattcgctactggtgtctccatggttacggcattgtctctcgccatctcgtacccaaccctggctgctgcaccacacatgttcatcaatggctacaagaacatattggccgttgctgtcgcaactgagtattccttccctcacgctgataaagtgaaggagtacttggcggatccaagtaagtttgctgttgccgctgcaccctgttgctgctg

SEQ ID NO: 22751 - DNA, 357 bp, Gossypium hirsutum
  Clone ID: LIB3146-058-Q1-K1-C7
gacagctcttaggtcgactcccatttcggtttcaaggggtaatccatgcaagaatgaaatgtgaaagtatccagtcaaggtatctttagcttgatattgttgtcatctaactgtaccaatgtggcatcatcatcaatttaatttgcatgtgaagcatttgatatgaaaagtgacctggttgggaggcttgctgttggggcatctgcctttggcggtaggctatggggttttctgtcttttcaatattcttaattgttctaatgtttttttcttattgctcttttttagcttcagagaaatagcaatgaggaactatatttagtttaaaataagaaacacaaatttattttatgaatt

SEQ ID NO: 22752 - DNA, 405 bp, Gossypium hirsutum
  Clone ID: LIB3146-058-Q1-K1-C8
gctggtcgtcccatgggccctcctggtgaccgcccacgtggtcctcctcgctttggtgacggcgagaggagatttggtgacagagatggctaccgtggaggtccaagaggaggaggtgattttggtgacaagggaggagctccggctgactatcagccttcattcaggggccctggaacaaggcctgcctttggtcgaggaggtggtggttatggtggtgctggacctgcaggtggtgcaggtcttccttgagacagatgctttttcatgacagatagttttgtcagtctaggtggttgttgaagttgatagaagtttgtgttatgcttttcaatttagttatttgatgcttataaaatattgctactcttcggttcatccgaaaggaatttaggaccaatgttt

SEQ ID NO: 22753 - DNA, 203 bp, Gossypium hirsutum
  Clone ID: LIB3146-058-Q1-K1-C9
ttcagcttcaattacccttacatttcttttttttatccctatgaaattccaagtggcgaaggccaaatatatgatgtctcttgcagcactaacccaagctccggactggacacctgacctagtattggatctcacaccgtctttagccatcattatcgttattccaaatgccatataatactcaaccttatcgtatctaattt

SEQ ID NO: 22754 - DNA, 406 bp, Gossypium hirsutum
  Clone ID: LIB3146-058-Q1-K1-D1
cccacgcgtccgcggacgcgtgggtgcgtgctcatttaatgagacagacattcagaaatgggcatttcttaagaacattaacaaacccaccgacttttcattcccttcaatgagttttcccatgcctggaactagaggtcctttatttgaagatggtccaaactttgatatggcatttaagctttttcatgggaaggatggcattgtacctctctcagggaggtctgatgttccctgtgacagagacaaacaggagcctaccatccaatttaacccattagcaggaaaagctgcaacaattagcctttcagcttttagctcaggagggcccttcagctttggtcccttctcagataaaaggaagaaccagaaaaagaaatccgactcatctaacaaacaagaaccc

SEQ ID NO: 22755 - DNA, 303 bp, Gossypium hirsutum
  Clone ID: LIB3146-058-Q1-K1-D10
ctgacatagattgcgtattgctatgtgtttttatgagcgaaaacaaaacagataaaaaggggctattgactgtgggctaaccttttgtcaggcttccgagttgccagtgtttgtgcgggtgtataggtagctctcaactcatcccccatccttttatttttccttctatttttgaagttcatatttgtaagatgcagttagtgtgatttgtcttttgagtttgttaatattattgtaaccatatcagatcttgtgtggcttctgttattcattaataataggtgtaagaaacaaaatacactt

SEQ ID NO: 22756 - DNA, 74 bp, Gossypium hirsutum
  Clone ID: LIB3146-058-Q1-K1-D11
cctcacactttttcttcccactctttcttttcataatctaaaacacaacactaaagaaagaacctttttctaaa

SEQ ID NO: 22757 - DNA, 401 bp, Gossypium hirsutum
  Clone ID: LIB3146-058-Q1-K1-D12
atacaagtccgtccagtgcaatagttgcatcgatgaataacatggcgttcggaagcggggggggcggtgggaacgagtcttcaagcgaggatcttaacgtgttccaatctaacgccgacggagtgcccccgcctccgccttatgtgttgtcaaagaagaggttccgcacaaaatttacgcaggagcagaaggataagatgttggagttagccgagaaagtgggttggaggatcaataaacaagacgaagaggaagtacagaaattttgtgctgagtatggggtgaaaaggcaagtattcaaggtttggatgcataataacaagaacgtgaagaagccgccaccggaataagagttggtaattttcatggttgctaaacgagtagaatgacatgtgagacat

SEQ ID NO: 22758 - DNA, 409 bp, Gossypium hirsutum
  Clone ID: LIB3146-058-Q1-K1-D2
agaagttctatcgatttcagtttagcattcataatgtcaggaagaggaaagggaggcaagggtttgggtaagggaggagcgaagcgtcaccgtaaggtcctccgtgataatatccagggaattacgaagccggctattcggcgtttggctcgtaggggaggcgtcaagcgtatcagcggcttgatctacgaagaaacccgtggtgttcttaagatcttcctggagaacgtgattcgtgacgctgtcacctacacagagcacgcgaggagaaagactgtgactgctatggatgtggtttatgcactcaagaggcaaggcaggactttgtatggattcggtggttaaatgtgatttagggtttaggttttagaatggtggtgtcttaggggggatttgaagtcttgctgtc

SEQ ID NO: 22759 - DNA, 408 bp, Gossypium hirsutum
  Clone ID: LIB3146-058-Q1-K1-D3
acgcaactcatatttatgaaagaggaccaattattatgttagcaccaacctgggcaatcttgggggcggtgtcttgtcaacctgaatagacacctccagagcttttaatttaatggcacgatgcattacaaaacacggttctccccccacttgtatggccaaaaccttttcatatcccatttgaaggcccttattatactcacgatctgtacatgatatatgaataaataacttaaataatgaccaacgcacatgagctaacaccacggaggcaaggactagatctagcttatatgacacctgattattctgtaactgccaattcacagtcagatcttgataatttgcttctggatcaagaaatgttgaatgacctggtgaagtgtaaagctaaaattaagcaacatc

SEQ ID NO: 22760 - DNA, 413 bp, Gossypium hirsutum
  unsure (1)..(413): unsure at all n locations; Clone ID: LIB3146-058-Q1-K1-D4
gttcctaataaaagctttcttgcattggtactctggttaagggatggatgaaatggantgggcaggggctgagatcaacatgaatgatttggtttcggagtaccaacaataccaggatgccactgcaaaacacgaggagtacgagtaatatgaagaatacgaggaaaaggcttaaaggatgctccttgttctttttatcatgtaggacattcggttgtgcaatctatgcttttctggttatcagcatttggatcgcttattgctgctgtctttgctatttacacactagtattgcttctttcttttatatcaataattttcaccagttcatatatcgtgtctctcacaaatgtttcattacaatttgttatagcaaatgttaagccttcaaatcatttattaaagtatgcctt

SEQ ID NO: 22761 - DNA, 406 bp, Gossypium hirsutum
  Clone ID: LIB3146-058-Q1-K1-D5
cagcttctgaaagatgggaagattgtttatttagcaccaacctggacaattttcaaggcggtgacttgtcaccctggatagacaatccagagctgattaattttgggcaggatgcagttcaagagacggatctgcccccacttgcatggccaagacctggtcatagcccctttgaaggccctttttatgctcaagatctggacatgattaatgaagaaatggctaaaataatgagcaacgtggaggagctagcaccaaggaggcaaggggaagatcaagctaatgtgacacctgattcttctgtaactgccaattcaaagtcagatcttgataatttgcttctggttcaggaaatgttgaaagacctggtgaagtggaaagctaaaattaagcaacagctgacaga

SEQ ID NO: 22762 - DNA, 209 bp, Gossypium hirsutum
  Clone ID: LIB3146-058-Q1-K1-D6
atcaagttatagcattgcaatttttttatttatcaacaacatggccaattttaggggcggtgacttttaaaactagttcttcacccaagatcttaacaatttccaatctaacgcatactaagagacctatcctccaccttatgtattggcaaaaaatagattttatacataatttactccttatcataaccataagatgttctttttat

SEQ ID NO: 22763 - DNA, 394 bp, Gossypium hirsutum
  Clone ID: LIB3146-058-Q1-K1-D7
caaagttggactgggaggcaatgggtaagatcctcgctcgcgggcatagccgagtccgtgggtactcagggaatcccaaaaatattattggacttctgctggtgaaaagccttgtcactgtacgccctgaaactgaaacacctgtcagggctgtttccatccgaagaattccaaggggtccagctgatatgcctctctatgatattctgaatgagtttcaaaagggcagcattcatatggcagctgttgtgaaggctaaaggaaaaaataagaaccttgctccgactgttgacggactgaagtctgaagaaaacaaagtgtccagtgcagatacccagctgactactcctgtgctatccaagctggatgagaagccagagagcattgtagttga

SEQ ID NO: 22764 - DNA, 357 bp, Gossypium hirsutum
  Clone ID: LIB3146-058-Q1-K1-D8
gttgtgatggacggtatccaatctgtgcgttgaaatactttatacacaatgcaagggtcgcgtgtatattgtgactccatactgtggtgatattggttgttctcacgctcgttgcgaacctgcatctccgactccaagatgtgcaataaagtgcggtagcgctaaccttgcttggcatcaggcaacacactatagcatatgtgcgcttaggatcaaattaaattctgctgatatcatgggctaggttgatcagaatggaccggttgaggtctgcttgaccgattatgaagattttggttactacaacacaggagcttacagatcataagactagcgatgttattagaagccatgcaa

SEQ ID NO: 22765 - DNA, 368 bp, Gossypium hirsutum
  Clone ID: LIB3146-058-Q1-K1-D9
cccacgcgtacgcagtccccaatccttcctttataagatggcgccaaaaccccgggcatgtgcgggtattttctcggcacttctcgccttctctttttctttgctcctcttttgtcatgcgatcataggcggccacaattaccacgacgctctccgcaagagcattctcttttttgaaggccaacgttcaagcaaacttcccccttgcctaaccttcaaatggggcccggtcttttgtttgcaagaccggtccaccggccgtggttggcttaacaggagggttcttctcacacccgagacatacctttaatttgggtttccaatagtttttataacttctttttttactttggaattttattcatttc

SEQ ID NO: 22766 - DNA, 413 bp, Gossypium hirsutum
  Clone ID: LIB3146-058-Q1-K1-E1
gagaatcaagtgataatttctatacatgactgaattaaagataccacaggtttacctgccaaaccaagctctcggtggctgtatatcactatcattcattagcttatccaacaccacattgaggtcaaccgactggccattctccgtcaactttctaactgttgctctaacatggtctctaggaaatcccatgccggttaccttgtccaccacatcatcaatgggaaccctgtttccaggtccagacggagctgattcaccaccacccccggatacagtaggtaatgcatgtggtagtaccctagctgtcggaagctgcggataaccacttccagtagaagaggggagctgctgcaatttcattggggaggcactgccatactgtggaggttttctttttaaataacatttgt

SEQ ID NO: 22767 - DNA, 369 bp, Gossypium hirsutum
  Clone ID: LIB3146-058-Q1-K1-E10
cccacgcgtccgccaaaaacgccgaaactctaggggagaaaatgggagaaggaaattctgtaaaatttcttttccttgaccgtgagaagggaaatcggtggtgaaaggaaggggaaaacttcatgttttcttctataatatatgttcctttgtctgtacttttcttttcttttgctggtccgaatggatgaaacaaatagggtggtcacttgcatggtgggagaggccatggatttggcatattaaatagttgtttcttcatattaagaagcttgagaggtgggagacggtcacattggtaaaggcgaggagaaagtctgtgctcttaacataaaattcgggaagaattcgatttgacaaaatcatcca

SEQ ID NO: 22768 - DNA, 262 bp, Gossypium hirsutum
  Clone ID: LIB3146-058-Q1-K1-E11
atgtagcctaaaataaattggacaaatctctcttctatttataccttattttcatgaagcgacttatattttgctgaccataaaccccatacaggacacacaatactttttatctgactgtttgattttttttcaaataaataataacatccagtcctattatacctgattttggtccatgggacatccaattcctaaacttgtctatacaccagctggaaaaaagcacctttgaaatacacattcccttgagtcattacta

SEQ ID NO: 22769 - DNA, 399 bp, Gossypium hirsutum
  Clone ID: LIB3146-058-Q1-K1-E12
gtgaacattaatgtggataggaagtgcatctcttgccaggaggaatatgaagcaaatgagaaaattttaaagctatattgtggacacagttttcacatccaatgtataaaacagtggcttgtgcataaaaatacttgcccggtttgtaagaccgaagcaacggctcaatgctagctgcagccaactgtggcggcgccgatggagattcaatttttactccccccctccccttttattttctgaaatgtgtgaagccttaaaggttcaacctgtgttgacttgggcagtacagggaagagaaatgttgcaacttttctcagccctcttccttgaaatcaactactgagagtttgtgattgtgttgccatatttatgaaaattttttcatgtttataattg

SEQ ID NO: 22770 - DNA, 384 bp, Gossypium hirsutum
  Clone ID: LIB3146-058-Q1-K1-E2
cctacctctacgaatgcatgtgggaggcattgcagcagcgaataagaatgatattgatcaacatgcagttgacaccgtatgtgctctgaattcgaattcaggtgtgagtttcaaatattttatgtacaaaaaagtattagagtgccttatgtttgtatgttagttaagcagattatagatagaacctgcagtaggatcaactaattagctgatcaaaaactacacctagttttgtaatagtctacttgcatatttgcatatatttaataataatctcgtgtcaaaaaaaaaaaaaaaaaccaaaaataaaaaaaacaaggggctgcccacttaaaagaacacaagcttactacgggggcatgcttcgggatgccctttctttct

SEQ ID NO: 22771 - DNA, 344 bp, Gossypium hirsutum
  unsure (1)..(344): unsure at all n locations; Clone ID: LIB3146-058-Q1-K1-E3
ctgtagaaaccccatctggttttcctgcacatatttatgaacactgatattgtaacaggacattctcgaaaaagatgttccatagattcagatccagagccacaacgaggacacattgatgtattcgttagtcgtctaagtagcatattaacgtgagtagctaggaaattccaagagatcttccaaactgtaatttttatttttgaaggtagatcaagtagccataatttcctgtagaagtccttatagtcaacttgtaaagcataagttctaggatcatttgcagtactttgtaatagtttataggcgctacgttctatgaactcacccgacgcttcagcnna

SEQ ID NO: 22772 - DNA, 405 bp, Gossypium hirsutum
  Clone ID: LIB3146-058-Q1-K1-E4
ctaatacccaatggccgtcactttctcaaatctccacaccgagtctggtcttaaagctctgaatgacttcctctctggaaaatcttacatctctgggaataagctgaccaacgatgacataaaagtttatgctgctgttctgaagaaccctggtgattctttccccaatgttagccagtggtataattctgtttcttctcaacttgcggccagcttccctggcaaagctgttggcgttgggtttggtggcaaagctgctccagctgagtctgctaaagctgaggctgcagatgatgacgacgacttggatctattcggtgatgagacagaggaggataagaaggctgcagaggagagggaagctgcaaagaagtcagctaagaagaaagaaagtggaaagtcctc

SEQ ID NO: 22773 - DNA, 381 bp, Gossypium hirsutum
  Clone ID: LIB3146-058-Q1-K1-E5
cccacgcgtgcgacaaagcgatgatgcattctctaacggcaaagatagttagctaggcacagcttgctcaaggatattaaaatcacctattcctactttcttgagcggaacatgctgacgatataacccacccaataattgaataaagcactggatctttactctggagctaccaagatgccaacgtgaacccttatataatccaacagaacgtagtatgaggacatcatggatgaccaagcaacattgagcaaactaaagacggctatgggtgcacagctgatcagtaagaatgatggcgagagaagcttccttgctgctaatgaactgtaaaagagaggcgtgtaggatcctagagtggcctgttagaacattgacatt

SEQ ID NO: 22774 - DNA, 407 bp, Gossypium hirsutum
  Clone ID: LIB3146-058-Q1-K1-E6
cttacgctctaaggcagctttagaaggatcaaaaactgttcaagctgatcttgcggctgctggtatccaaacaaaagaagaccataatgaacagaatgagaggctaagcaacaaacaattattcattcaaaacatagattatgcgctagacctgtttctattatacgtcttaacactatcgattttccctggattcttatacgaaaacactggtgaacataagttgggtacatggtattcacttgtgttgatagcatcttacaatgtgtgggatttgatatcaagatatcttccccttgtgaaattcttgaagatagagtcaaggaaaggccttacgattgcaatactttctcgtttcttactgatccctgccttttacttcactgccaagtatggtgatcaaggat

SEQ ID NO: 22775 - DNA, 399 bp, Gossypium hirsutum
  Clone ID: LIB3146-058-Q1-K1-E7
gcggtttcaggttccatacaaaagaaggagatagggaaagactgactaccgggctaggatgggcctaatcaatcaagacaagaataagtacaacactccgaagtaccgattcgttgtccgatttagcaacaaagatgtcaccgcacaaatagtttctgctaatattgctggtgatatggttcttgcttctgcttactcacatgagcttccacgatatgggcttgaagtgggtcttacaaactatgccgcagcttattgcactggtttgctgttggggcgccgtgtgcttaagatgcttgaaatggatgaagagtatcagggcaatgtagaggctactggagaagacttctcagttgagccaactgacacaaggaggcctttccgtgctctccttgatgt

SEQ ID NO: 22776 - DNA, 409 bp, Gossypium hirsutum
  Clone ID: LIB3146-058-Q1-K1-E8
aagaaatcaagaagcctcttatgaggaatgacaagcaatcaatggctcttcttacagcagggtttgacaagatcaataaaaagcttggaatccggaaggaagatctgcccaagtatgaagaacagttagaactaaaaattgccaacgcacaattggaggagctgaagaaggatgcttttgaagcaatggaaacacaaaagaagcgggaggaattcaaggatgaggcaatgcctgatgtgaagtcattggacatacgaaacttcctataattctctaattcactttcggttttccagtgactttggaggtcaactttctgaattggggacttcctttgtcattttttgctataataaaaaaaaaagaaaagcaactggtcagttgaaaatgcaaaaatattatctcatct

SEQ ID NO: 22777 - DNA, 165 bp, Gossypium hirsutum
  Clone ID: LIB3146-058-Q1-K1-E9
cccacgcgtacgaccacgcgttctaccacttttgcgacggatttcaaggacaaggggaggtcgtgtgaagaccacattggaaaatctataattgccacataggccatggaagctggtgtgagatctgcagcaaaggcaggttcttccaactcatatgaattccat

SEQ ID NO: 22778 - DNA, 281 bp, Gossypium hirsutum
  Clone ID: LIB3146-058-Q1-K1-F1
ccacgcgtccgggatacaggaggctcattgttggtttcatcacctatttcaagggcccagcagaaggctctgtagatgctgtaatgttcttacttgtgctgttgcttgtttaactttaaatattgtgaagatgcaactagtaattccttttatttgaatagacatgtgcgcgtgcgcacacacgctgtagatgctgtaacattcttactagtgttttttgctttcttaactttcaatttaaaaaaaaaaaaaaaaaaaaaaacataaaaaaaaacatcaaa

SEQ ID NO: 22779 - DNA, 234 bp, Gossypium hirsutum
  Clone ID: LIB3146-058-Q1-K1-F10
ggtacaggacgtgtgctggcacttggtgtgtggcgtacggaggtgcgcgtggcggcacggagggttctgaaccaggctttgtgcgcacggaagccgtacatggggtgttggctgcggcgcacctaaaaaacctagggtttctgaaactattttgattttgggccacttgggcattaaatttttagactgtaattggactttttattattaggggtatttatttatttatttatt

SEQ ID NO: 22780 - DNA, 283 bp, Gossypium hirsutum
  Clone ID: LIB3146-058-Q1-K1-F11
aaaatctttagagtaaatggcagatgaagtctagagctctggccttttgaaggaatgtgggcgttcctgaggatgctctattggtaactccagaaaattttaaagagaacagatggtcctggtcagacgtaaaatctctctctggcagccttcttctggcccttgatgctagtctggagcatgcactgttgggctctgtaatgtccatggatagatatgcagcagcagaaagcttttacaagcttgcaatggcatttgcccctgtcccagatcttcacataat

SEQ ID NO: 22781 - DNA, 337 bp, Gossypium hirsutum
  Clone ID: LIB3146-058-Q1-K1-F12
gagaagaactgtgctccactcatgctccgtctagcgtggcactcagctggaacttttgatgttaagaccaagacaggaggtccattcggaaccatgaagcatcctgctgagctcgcacatgctgctaacaacggccttgatatcgccgtcagacttctcgagccgatcaaggagcagttccctaacctcacctacgctgacttctatcagctcgctggtgtcgtcgccgttgagattactggtggacctgaaattcccttccatcccggaagagaagacaagcctcacccaccaccttgaggccgtcttcctgatgctaccaagggttctgatcact

SEQ ID NO: 22782 - DNA, 414 bp, Gossypium hirsutum
  Clone ID: LIB3146-058-Q1-K1-F2
gacgaacacagcggttggtgcggagctgacccatagcttttcaagtaatgagaacactctcacgattggtacacagcatgctcttgacccgttgaccacagtgaaggctcgactgaacaactacggcagagcaagtggtcttatccagcatgagtggcgcccaaaatccctcttcactatctctggagacgtggacaccagagcaattgaaaagagtgctaaagtcgggctggccttggcactcaagccgtagggaaaggtaatatcattgtttgaatgaagggagggctttacttttgattggtgaaaccggaagtctggaagactggggagagtaataatgtgctttgacggatttttcatgatcttggattaaaaaaataattgtgattggcgaactgaaattggcaattt

SEQ ID NO: 22783 - DNA, 412 bp, Gossypium hirsutum
  Clone ID: LIB3146-058-Q1-K1-F3
actgatattgtctacccaggcagagcaaagtctttactcgtagcgttaatggcggacccgggtgctggacccaatccgaccctcaccaaagacgataattgtctaaaatacacctgcgatgctgggtttttctctaacccacacccctccgacactccaaacctcgacgaagaagattcgaacagtccacccacttttgattccgacgactgcgactctgattgtgattctacgcacttcactgatctctccgccggtcttcgtgtcttctctgattcgattcttaggatggagctggccgggatggagatggtcaaggcaatggaagcctccagatgtgaggcggagaaacggagggcggaatccgaggccgaattgactcggatgatgttccgaactcagtcccagatcg

SEQ ID NO: 22784 - DNA, 405 bp, Gossypium hirsutum
  Clone ID: LIB3146-058-Q1-K1-F4
gaaaaaaccatccagtcttggcatcttgactgttattacttctttgttgccggatatggcggggggggctggacaaccgacgtaagaagacgaaaaaggtacaacctggttgatgcagtatctaggaacactgttcaggtttatcctaaaagctggacttcaattttggtctcattggacaacaaaggaatgtggaacttgaggtcgcaaacctggtcaaagcggtacttaggccaagaagtctatcttagagtctggaacgacgagaaaagcttgtatactgaaactgatatttctccaaatgcactattttgtggcaaggccgttcaatcttagaacactattaatgtcctattgatgtaatctacagcagctaatttattttctgatttatttctctttttt

SEQ ID NO: 22785 - DNA, 407 bp, Gossypium hirsutum
  Clone ID: LIB3146-058-Q1-K1-F5
cggacgcgtgggcggacgcgtgggtcaaaacccagattttagattggcctaattcatcaaaagatgtaatgtagaatagtttcaaaaattgattttttttttgttgatgtttgaaataatgaagccaagtaaaaggcttccaatgaaggtttggttaactgctcaaagatcaatgggtctcctcgtgggtggaaatcacacttcctccaggttttgtactcgttaatcttgtttccttgtttagttttggggcacatttccttttcaattttctcattttatatcaaaagattggatctttgttacaagaacatggattttaagaccttgaaattgatgatctttcatggttctttagcaagacgtgtacttttacgtgctctaatggtgattactgctttgtcaat

SEQ ID NO: 22786 - DNA, 351 bp, Gossypium hirsutum
  Clone ID: LIB3146-058-Q1-K1-F6
cccacgcgtccggtcaaaattaatttttatgtactcacttaattgcccatagaccacaacgggatatgtggttctggcttggaataaactgatcaaagatccatggattccgctgatcatgatccatgttaggatccataaaattattgtgaatttataaaggtgtacacagaatcactgtgacaggacatgcacaaaaaatttggtcgattgtttcagctcattcatgcagatagctccatgaaattctgcatatagtaacatttattttagatggtagaatctcgagatatagtttcttggatacattatcgtggctggtaagaaaagcataaacttgatgaatcttat

SEQ ID NO: 22787 - DNA, 266 bp, Gossypium hirsutum
  Clone ID: LIB3146-058-Q1-K1-F7
cccacgctttcgcccacacttaatttaaattctacattttagattgccctaatcggggaggggaggttttgtacagtatttccaaaaattgattttttatatgtggatggtggtgctcatgaatccaagtacacgcctcccattgacgctttagttacctgctcagacaacaatgactctcctcccgctttctaatcacacttcttccagtttttttactcttttatccactttacttctttagttgctgggcaccttctcttttc

SEQ ID NO: 22788 - DNA, 410 bp, Gossypium hirsutum
  Clone ID: LIB3146-058-Q1-K1-F8
gttgaacctgcttctggggtcccacctattcctaccatctccaatcaattctcagctcgtggacgaatgggtgttcgagcaagatatgtggacacattcaaccaaggtggtggtggccaagcaaatttattccaatcacctgctgttccctctgttaagcctgcaatggcagcaaatgcaaagttctttattcccattcctgcatcaacaaacgagcaaatgatggaggcaatagccgaaaatgcacaagaagaaaatggaactagtaataaccctacgacatccaatgcgaatgagttctatgaatctgccttgaatatacagaagtttcctagcgtggataatattacaaaaactgccaatggttttccacttcactcaagacgaacagcctcatggagcggaagcaa

SEQ ID NO: 22789 - DNA, 294 bp, Gossypium hirsutum
  Clone ID: LIB3146-058-Q1-K1-F9
cggacgcgtgggtttctttttctttttttaaaaaaaaaatatctgtgtgaagaaactggggttagggaagatgatgcagactgagcagcagcctcagcaccaaaatcagttaacggttcaaaactctgggagtctcagctttagcagtcatttgtctaaggaagatgaggagatctcaaagtctgcgctttctactttcagagccaaagaagaggagattgaaaagaagaagatggaggttagagaaaaagttcagcttcagttatgccgtgttgaaaaagaaacgaaacgttt

SEQ ID NO: 22790 - DNA, 342 bp, Gossypium hirsutum
  Clone ID: LIB3146-058-Q1-K1-G1
cccaagcggccgtaagatactagctcagaggaagcatttcccttctgccaactggcttattggatagcgggaagtattcttgggcatcgaaaagattctatgagaaatgcgatacagattttattactcttggggacaaaaccccgataggttcgtcaaagataaaaaaatctgaaggaattgaaccacctggtggtaaagaatgcattggctgaaacagacaaactcttattggaaactgccaaatttttaaggggggctgatcttgtacagattgctaatagtgaataagataggttgggccaatttaacagccctgtttggatgatgcacaacattggg

SEQ ID NO: 22791 - DNA, 373 bp, Gossypium hirsutum
  Clone ID: LIB3146-058-Q1-K1-G10
cttgccagtcctgatggccgtgtcattgggggaggtgttggagggatgcttattgcagcaggccccgtgcaggtgattgtggggagttttatatggggtggatcgaaggcaaagaacaaaaaaggagggcaagaagggataaaagattcagatgatcagatggttgacaatctagtagctcctccaggcatatcaccaagtcaaaatatgactccaagtgcaccggcaggggtgtggcctgggtcgagatcaatggatatgcgtaacaatagccatgtctacattgatctaatgcgcggatgatgactggttcctgggaataatttggggagaaatgtatatagtttggggttgaagggcccacggattggaa

SEQ ID NO: 22792 - DNA, 196 bp, Gossypium hirsutum
  Clone ID: LIB3146-058-Q1-K1-G11
ctcacgcgtcctcagacacgtgtcattactcttggagctgacaggattctcatggctgggagcccctttcaaataatcttaaccgctttcatatggtattgataaaaggcaaacaacagaaaaggtgggcaagaatggatactttattcagatgatcagacagatgacaatataggagctcctacaggattatcac

SEQ ID NO: 22793 - DNA, 384 bp, Gossypium hirsutum
  Clone ID: LIB3146-058-Q1-K1-G12
gtcattttggatagaaaaattctccattgttgggatgatgtctccgtaactaaagaaatggtctgttttgcaaacagtaattggtattttgggtgcaaccttaattgataaactcgtaaggtggaataacaaccatcagtatgagtttctattaatgtcctcctaatatcaaactctagagtctagaatccaggcacctcggtgtggataatatattgtaactagatttatctgtcaaactgacgatgaatctaataatttggttttgcatcctttagatattgaaggtgcggcagaggattcaatctcttcaagctggaaaagccaaggcttagcacttcttcaaatggaacgttatttaatgttgcattccatggtcattca

SEQ ID NO: 22794 - DNA, 303 bp, Gossypium hirsutum
  Clone ID: LIB3146-058-Q1-K1-G2
cggacgcgtgggtggctatcgagttctttgtttaagaataaggatcttttaagatacgccggatccgctaaaatacgccgatccccgtccgtcttccgatcatatggggctgcttgaccagttgtgggatgataccgttgctggtccccgacccgataatggccttggcaagctccgaaagcactccactttcactttccggcctaactctgccaaggaatctgatggcgggagtgtaagatcgtacggtgatgaagcgccggaggaagcgacgagagtgacacgtagtattatgatcgtaaa

SEQ ID NO: 22795 - DNA, 413 bp, Gossypium hirsutum
  Clone ID: LIB3146-058-Q1-K1-G3
gcaggctatggcttcagcagcaaaagcagacgatacgtcattgtgaatttctgaacaggatgagagaacttttccttccgaatctctggccacaatacctgaagctgaccggccctatctctccttatatgcaccgccaaagttaatcttgatgacctcccactgtggaaaagtcgaccttgacaagtgttgagctgctctatcacccagggcattcccagaataaatgattcatagtttcagcactgtttccacatcgaggacaacttgtacttattgctagcttcctgtgttgcatattacttttgtaggcagatagttctatgacaacctccatattgtaatctttacttttgctggtagattcaggctccagagttgtttatagaatttcctgaggatggtatgtaaag

SEQ ID NO: 22796 - DNA, 410 bp, Gossypium hirsutum
  Clone ID: LIB3146-058-Q1-K1-G4
gcccaaggtgtccacggacactttacaaagcgtgcagaagagattggagccggtgaccagggtcatatgtttggttatgccactgatgaaacccctgaattcatgcctcttagccatgtccttgcaactaagctcggtgcacgtcttactgatgttaggaagaatggcacctgcccctggctaacgcctgatggtaaaacccacgtcactgttgagtactacaatgacaatggtgccatggatccagttcgtgtgcacactgtcctcatctccacccaacatgatgagactgttacaaacgatgaaatcgctgctgacctcaaggagcatgtcatcaagcctgtcatccctgagaagtaccttgatgagaagacaatcttccaccttaacccatctggccgctttgtaat

SEQ ID NO: 22797 - DNA, 408 bp, Gossypium hirsutum
  Clone ID: LIB3146-058-Q1-K1-G5
gaagcaatgcggtcatgcgttacaaggaaaagaagaagacacggaagtttgataagcaagtgagatatgcctctcgcaaggcaacggctgatgtgagaaagcgcgtaaagggacgctttgtcaaagccggcgatgcctatgattatgatccattgaaccataccagaagctgctgagaggctccaggtttccatcagaagttggatgcaaaaacccgaaaaaaaattgccatgaataaatcgcagtggcatggtccccagtagaaagctcgatggatcacatgacatcttgtggcaagatcttcccagattgtctttgctgtcaaaccaagctgtgggtttccagcacctgcgataaaacgtacaagcaagctcacctcagttctttttagtacaaaatgagagtgct

SEQ ID NO: 22798 - DNA, 406 bp, Gossypium hirsutum
  Clone ID: LIB3146-058-Q1-K1-G6
ttcaaaactcagcaacctttcatttttatttttaaaaatagaagctttaaccccggcccgtggtgtttgattcaacatgcagctgcctaaaccatcatttatttgatggctgactgtgcaccaatggcgatcgaaccttgtcaacggaggacacgcccacggagatcaagtgatgggacgatgggatggggttaggtggtggcagcagctttcacagtggcatgtgcatttgagtgtttaaggctggagtaatgactggattggagtaatagagataaagatggggtttgatcttcagaaagtgcgagccatgagactgagaatagggtttttatgttctaatgaaccttttgtttatttgtttgtgatctattattttgggaaatttttcattagttagaagaaa

SEQ ID NO: 22799 - DNA, 407 bp, Gossypium hirsutum
  Clone ID: LIB3146-058-Q1-K1-G7
ctagattaattctcatttcattgtgactagttttattatgtacacacttgttgatgacaaaatgaagttagtttttatttttatctttaaatttatgctgttaagaagcacttaacagagttaggatttttagttttagttttagttttgcccatgtttattttgatacctcaaagcagatctcagcagattattgtctcgtgtttctcattgtaaattgcttgtgactttatagagggagtttgctatgcaaagaaggattacaatcttgcgaagcaccccgagatcgatgtacccaatttgcaggtcattaaactgatgcagagcttcaagtccaaggaatatgttcgcgagacttttgcttggatgcactactactggtaccttactaatgatggaattgagtt

SEQ ID NO: 22800 - DNA, 295 bp, Gossypium hirsutum
  Clone ID: LIB3146-058-Q1-K1-G8
gttaaaatttataatttattgtttagcttatattttaaaaattaaatgaagaccctataggtggtttttatcatgtattcactttatattttatgaattttcttataaggattttgttgagctaatgccgattttagttttacatttaatttttcacctttttaaaacttgtatttttgtcaaatactccaaaatcgatggaaaaaataatgctggttaactttgctgaaaaaaaaaaaaaaaaaaaaaaaaaaaataaaaaaaaaaacataaaatgaaccggagaaggatatgt

SEQ ID NO: 22801 - DNA, 258 bp, Gossypium hirsutum
  Clone ID: LIB3146-058-Q1-K1-G9
cccaaactaagaaccctagaaattctttttctccaaattttctgcctcctcggtgccatgggcatcctattctgacgacaactagcagtctcacgctcgtgctatcgctctcaaggccaaagcttatcacctctccaccaagttttaggcgccagaaaaagtactctttctattattgttgtctgttcgtttgctaagaaaagctgtacgaaagggaaatcaaatgctgctatgatctgatttaccacattggtcctt

SEQ ID NO: 22802 - DNA, 343 bp, Gossypium hirsutum
  unsure (1)..(343): unsure at all n locations; Clone ID: LIB3146-058-Q1-K1-H1
ntattttttattttatttttttttatttattttattttttttttttttatttttattttggggttaggtgttttttatttttttttttttttttttataaaaaaaaaggaaaaaattttaggatggggttttgtgtcaaaaaaataaaaaaagtgggacccttgaatattatattttaaaaaaaaaatgagaaaaaaatttttttttatatttgggtaaaaaaaaaaaaaaaaacatgtaaactaacatttgaaatgctggttaaggtgaatatatttgagaaaaaaaaggtcgatttttaaaaatgtaaggaaattttttttattatggaacacatagtgtt

SEQ ID NO: 22803 - DNA, 297 bp, Gossypium hirsutum
  Clone ID: LIB3146-058-Q1-K1-H10
aactttcttttgaaacaagaacaacgaatttatttccgcgtgaataagggggaaaggaggtgttgtctctccctttcctcaaagccacgaatagaaagctaaaagaagcgagcctctcaagggctgctgattccacaatgcctgatgaaattcataaaacagcctactcgggttcaaatcggctgctgcaatggaatcgagaacctcaatcccatggggaaattttgttgacgataaataaccccccggccagcaaacttacaaatctacagatcattactggggtttggagtgaaa

SEQ ID NO: 22804 - DNA, 140 bp, Gossypium hirsutum
  Clone ID: LIB3146-058-Q1-K1-H11
gtcattaccaatgtggatgagttttggagggaatgatgccttaacacatgcaacggatgtgcagcgcactcttgaagaattatcgtcaaaaccagagttgctttatctcgataactatggtcacatagacttccttttga

SEQ ID NO: 22805 - DNA, 315 bp, Gossypium hirsutum
  Clone ID: LIB3146-058-Q1-K1-H12
cccactcctactggttgttacttatgaattttttaagactcaatgcacttccacattagggcggtgctatctttgagtcatctggtgtatacagcatgggtgggctcatcacacttactggtacttagactttgatgggagccgagaggattcaatctcttcatagctacataagccaaggcttttcacttcttcaaatagaacgtagtttaatgttacatcccatagtgattcatcttagccagaacttgaactatagggtatggaatacaggttttgttaacttccttgtttgccagcgtttttaaccatgat

SEQ ID NO: 22806 - DNA, 373 bp, Gossypium hirsutum
  Clone ID: LIB3146-058-Q1-K1-H2
caccttctttcctacgccaaaatgccgccaaaatttgatccaagccaagtcgtcgacgtcttcgtccgcgtcaccggcggtgaagtcggagcagctagttcactcgctccgaagatcggtcctctcggtctctctcccaagaagatcggagaagatatcgctaaagagaccgccaaggaatggaagggtctccgcgtaaccgtcaagctcactgtccagaaccgccaggcgaaggtcatggtggtaccgtcggcggcagcgctggtaatcaaggcattgaaggaaccggagagggataggaagaagaccaagaacatcaagcataacgggaacatcggactcgatgacgtcatagagatcgctaaagtaatga

SEQ ID NO: 22807 - DNA, 399 bp, Gossypium hirsutum
  Clone ID: LIB3146-058-Q1-K1-H3
cccacgcgttcgtccacgcgtacgcccacgctttcgattcttggaaccagctagagggaaagtgggcggttgttaataaaggatggtgctgagatgaggcgaataccagaatatacctgaagtctaatacttgcagcacttgcttcagtttgtcagttcaatgttctaacaaacgtaaaccgatgtgatgtggtcttgtggggggcttatatttttctatattttcccctatgtgtagaataaaaagaatcttgattgctccctgaccttcttgagataactgagccaacttttgatatgatgataatatcctctatatttgtattttgatcttcaaactcgatgacgtcatacagatcgttaaagaatgaagccgatgtccatggctaaagatttgag

SEQ ID NO: 22808 - DNA, 393 bp, Gossypium hirsutum
  Clone ID: LIB3146-058-Q1-K1-H4
tgacaactttatactcattagaggctacaatttccaaaagagagttagagttagcagggaaacatggaaagccttcgtggactaaacggctcttacttgatgaaaacttcttgtgctcaaaaatccgggaagaagcagatgagttgtgccgaatgctggaggagaaaaaggacagttcatgcattgcctcaaaaatggcagatgtgatctaccatgctatggttttgctaaggcgcaaagatgtaaagatagaaaatgttctagaagttcttcggcgaagattctctcaatcgggtatagaggagaagcaaagccgtgcatcaaccgagagttaaatgtaagctgtacttttgctaaagtctagatttgcagcttttatcccatgcttaggtt

SEQ ID NO: 22809 - DNA, 405 bp, Gossypium hirsutum
  Clone ID: LIB3146-058-Q1-K1-H5
cccacgcgtccgcggacgcgtgggttggttctgttctaagcttcatggtggctataataatgccagcactgtgtttcataaagattgtcgggagaaaagcttcaaggacagatattgttttgagttcaacagtagctgtaatcgccatcatctgtgctagtttggggacatattctgcattgcaagggattgcgagcaattactaataccgagagaatagcttcctgctagtttccgatatgtagattgtcatcatggggttgctcattcttcctgcatctacgactttctgctgggaaaatggatctttcagtagctagctgcctggataaatttggttccagatacattatcataaggcattacagaatattaggattaagacatgctcatgctcatgttaca

SEQ ID NO: 22810 - DNA, 222 bp, Gossypium hirsutum
  Clone ID: LIB3146-058-Q1-K1-H6
tttttcattgcaagatccatcattcattttcaccagccccatctaactgaatggggagggcggtttctgcggcctaaattgaactcatttgaaacttgctcctagagattacattttcagagacactcccaataagaactcctaatatatgagtataaataccacaccagaatgggaaggtctgcgaatgaccgccaaatctactttccaaaagcaaaagtc

SEQ ID NO: 22811 - DNA, 412 bp, Gossypium hirsutum
  Clone ID: LIB3146-058-Q1-K1-H8
cggacgcgtggggttctatccaagacttggttacggtgtttaccttcctccagctgaggaagctgctattgctgcattgaagagagcccttggcgctttgaacactcatcttgcttccaacacatttcttgttggacattttgtcacccttgctgacattatcatgacatgtaacctctacttgggtttctcccagatcatgaccaagagttttacctcggagttccctcatgttgagaggtacttttggaccttggttaatcagccaaaaatcaagaagattcttggtgaagtgaagcaggcagtctctctaccacctgttccttcaaagaagcctgctgcccagccaaaagaaactaaaccaaaggctgaaccaaagaaagaagccaaaaaggaggttgagaaacaggca

SEQ ID NO: 22812 - DNA, 164 bp, Gossypium hirsutum
  Clone ID: LIB3146-058-Q1-K1-H9
aattaaagggccgacccacaccgtcctaatttctttcttcctcgcatacttcaaaatatttatatccaaaccacaatttgggcgaagaggtatctttacaccaactttgacctcctttcatcctgtttactcactccgaataacaaatctatcggaaccactcc

SEQ ID NO: 22813 - DNA, 366 bp, Gossypium hirsutum
  unsure (1)..(366): unsure at all n locations; Clone ID: LIB3146-059-Q1-K1-A1
catagatggaaccaacatgggcttggaggggacaattacagaggattgtgtagagacttacatcctggtccgactagtttgttgcattggagtgggaaagggaagccatgggcgagactagatgctaacagaccttgtcccttggatgctttttgggctccttacgatttgctgcaaacatcctctgctttggagtcttaaaaatattggtgtatatcataccaataaatctttctttttgttgttgctattttttgtctatatgtgtatatgggaaaaatatgatctcagagtcagctttctgaagaagagaaattatcaagatgatcttccctttctccaaaaaaaaaaaaaaaaaaaaaaana

SEQ ID NO: 22814 - DNA, 318 bp, Gossypium hirsutum
  Clone ID: LIB3146-059-Q1-K1-A10
gcccacgcgtccggccaaacctattctcagcaacgcaattaccaccatcaacctttgccgagaagcttccatccgcattttcttcactcgccactgccacaaatcccccgccgactacggcatgctcggtgagtggtgggacaacgacctcatcttcgacggcaccgttgattccgaactgatccccgagatcggacggctttcgaaacccgacgaggtggttgagaaaaacacgtacagcgcgttcgagaacacgcgactacatgagatgctgatggagaaaaaagtggaggaggttataatcacgggggtcatgac

SEQ ID NO: 22815 - DNA, 284 bp, Gossypium hirsutum
  Clone ID: LIB3146-059-Q1-K1-A11
cccacgcgtccgatttcatagaaaaatcataacctacacacaaaattttcgtgttaaaatattttaaattgaattaataattttcttgaaaaggcaattttttttattacctttttatggggctggaatgactaactcgattgttaatagggcttaaagcttaaatgaaattagttaactaagatggcaaagcccttacatccgtctggttaacctttgctataattataagtttaataataaatccaattttaaataatccaaatttaaataatgatgtggaa

SEQ ID NO: 22816 - DNA, 142 bp, Gossypium hirsutum
  Clone ID: LIB3146-059-Q1-K1-A12
gttttatgggaacattacatgagaaatgtcatttattgcattggattcttttaaatattggaggttctatttcatgtgctgttagctatggtgcttgcctaattctgatttttgggcaagtatatgtgctgtcgttatgcaa

SEQ ID NO: 22817 - DNA, 127 bp, Gossypium hirsutum
  Clone ID: LIB3146-059-Q1-K1-A2
catgatttatctgttaatgtatgtaggttccttttgtgtactttcgtgtaggaaaagacagaagtgtagaacttgataacatcattcgtaaaacaagcatcacccgccttgtttatggcatggatgt

SEQ ID NO: 22818 - DNA, 340 bp, Gossypium hirsutum
  Clone ID: LIB3146-059-Q1-K1-A3
tccttgtccaccaacgaactcgctgttccggcggatgacgttgagaacctcgaatggctgtctcatttcgtggaggattccttctcggagcactctacggtgtatccgaccgggacgttaatggaaaagcccaagttacttgacggcaaattgcccgaacccggaaaatcagttacgacgacggcatgtttcgaaactcctgttccagcaaaagccagaagcaagcgcgttcgaaccggaggccgagtttggtcccttgtcgccaccccttctctcacagaatcctcttcgagttccacgtcatcatcttcctcctcaagcccttccccttggatgtttt

SEQ ID NO: 22819 - DNA, 403 bp, Gossypium hirsutum
  unsure (1)..(403): unsure at all n locations; Clone ID: LIB3146-059-Q1-K1-A4
gtggcgttgagagaaatcaggaagtcccagagaagtcccgaccttttgatccgtaaccttccgttccaaaggctagtaagggaaatcgctcaaaatttcaggacggttctgaaattccaaagtagggcggtggcggttttacaagaagcggcggaggttaatctggttggcctgtttgaggatcccaatctctgggctattcatgccaagagggttactattatgcctaaaaatattcaactggctcggaggattaaaggagagagagcttaaataatgtatatggtgatttgctttgaatgatttatgcttttaggatctgnnngtgtatgttttctctagatgtagatctctcagtttagtggttnngtgtcagtgatgatgaaatgaaagtttggaaaga

SEQ ID NO: 22820 - DNA, 161 bp, Gossypium hirsutum
  Clone ID: LIB3146-059-Q1-K1-A5
gcggccaaacctattatcagtgacccaggtacgtgcatcaaccttggccgagaggcttccatccggatattcttcaattggcaggggccgcaagtacaccggcggctacagcatagctaaggaggggggggaacacctcctcatcaaaaaaaaaaacaaaa

SEQ ID NO: 22821 - DNA, 269 bp, Gossypium hirsutum
  unsure (1)..(269): unsure at all n locations; Clone ID: LIB3146-059-Q1-K1-A6
cccacgcgtccgagcaaaacgaatcttacaacttatcaaagcttaacgatgcccatacacactgtaggaaatcacaggaccacatcaggtgatcagcatcctctggatctttcttgcacaaagggctgacagtttcaacactcaaagttctacgcgctaggttgcagaaatggggcaaaaaattattaaacatcctccatatgtgtatttttacttttgcaggaatgtgntaagcccataatgatttgtaaaaatcattgtattcctca

SEQ ID NO: 22822 - DNA, 376 bp, Gossypium hirsutum
  unsure (1)..(376): unsure at all n locations; Clone ID: LIB3146-059-Q1-K1-A7
gaagagcttgggaagcttttagctggtgtgactattgctcatggtggtgttttacccaatattaacccagttcttttaccaaagaaaaacgagaaagcggctgcaaaagagcctaagtcgccatctaaggctacaaagtctccaaagaaatcacctaagaaggcttagttgtttgtctattatagggattgttttgatttatctgttaatgtatgtaggttccttttgtgtactttgttgtaggaaaatgttggtaatgttgtttagaatatgttttgtttgaaatgaatgaactgaaattcagattgaaaataaaaaccgatacccncttttaattgtatattccctacaacctttatatttccaaaccatcatg

SEQ ID NO: 22823 - DNA, 378 bp, Gossypium hirsutum
  Clone ID: LIB3146-059-Q1-K1-A8
cccacgcgtccgatgaatgcaaaggttgtattttgcatccacaacatagcctatcagggaagatttgcctttgcagatttcaaacgtctcaatttgcctgaacggttcaagagttcattcgatttcattgatgggtataacaagcccgtcaagggaaggaaaattaattggatgaaggctggaatattggaatcacatagagtcttgactgtaagcccatactatgcccaggagcttgtatctggtgaagacaaaagtgtagaacttgataacatcattcgtaaaactggcatcaccggcattgtgaatggcatggatgttcaagaatggaatcctgcctctgacaaatacatcagtgtcaaatatgatgcaacaact

SEQ ID NO: 22824 - DNA, 405 bp, Gossypium hirsutum
  Clone ID: LIB3146-059-Q1-K1-A9
aagacactcactgaatggttttctccatgtgagaaactaggaattgctgctgagcatggctacttcttgaggctcaagggagacgtggaatgggagacgtgtgtaccagccgtggactgtgcatggaagcagattgcagaacctgtgatgaagcaatacatggagactactgatggatcctacatcgaagataaggaaactgcccttgtctggtgttatgaggatgcagatccggattttggatcatgccaagctaaagaacttcttgatcatctcgaaagtgtgctggccaatgaacctgttacggtaaagagtgggcagaattttgtcgaggttaagccacagggtgtaagcaagggtctagttgcaaagcgcctactctccacaatgcaagagaggggtatg

SEQ ID NO: 22825 - DNA, 220 bp, Gossypium hirsutum
  Clone ID: LIB3146-059-Q1-K1-B1
ctcagttgtaagaggttgcgatagaatcgttcctgttgacatctatgttcctggttgtccagccactgcggaggcgttattgtacggagttcttcaattgcagaaaaagatcaacaggcgcaaggatttcctccattggtggtccaagtaagaaaatttgcaagttatttcagggctatttgcactgcattttgcagtgttgagtaacaaataaattaaa

SEQ ID NO: 22826 - DNA, 373 bp, Gossypium hirsutum
  unsure (1)..(373): unsure at all n locations; Clone ID: LIB3146-059-Q1-K1-B10
cccacgcgtccggtgaattaacctgtgacttagcaacccatgtcttgtgccatccttgtgccgtttgtcaggaaggtcgtgagattcgtcgaaggttgcaccatccagggttcaatgctcaacctgtctttaccatggtccctcctggcgagcaaaccatggcccgtggagcctaatttcatgttctgcccattccctaccttataactaaaggtaatctagtagctagctcaacaacattttgttgcgtgatgtctatgttgtgaaaaatatattgcgtgtaatgtgttgtggaaataaagttaaaaagcagctttatgttacattttctagtatgaaagttgattgctctgntatgggcagatcatataca

SEQ ID NO: 22827 - DNA, 302 bp, Gossypium hirsutum
  Clone ID: LIB3146-059-Q1-K1-B11
cccacgcgtccgcccacgcgtccgccagttttggacactcacggttgggaccatgattgtggctatgatggtgttaatgttgaacatagtccagcaatcgctagccagtttcctgctacagtttccgttcaactcaccaaggataagaaagagtttaacatccatttggactcttcagtttctaccaagcatggtgaaaatggatcaaccatggctggttttgacatccaaaatgttggaaagcaattagcttacattttcagaggggagaccaaattcaaaaatctcaaaaggaacaaaac

SEQ ID NO: 22828 - DNA, 104 bp, Gossypium hirsutum
  Clone ID: LIB3146-059-Q1-K1-B12
catttcgtctttttgtgaacaatctttcttcttcttttgattttttcaccctaaaaagaaaaatgaaaccttttgttcaatgcaagctcgcttcgattcttaat

SEQ ID NO: 22829 - DNA, 407 bp, Gossypium hirsutum
  Clone ID: LIB3146-059-Q1-K1-B2
ctctttcccaagcaacaaacagaggcacttttttgattaaatcactggacaaacactaccggagccggtagattcgtaacttaacggacttcttcaattgcaaaaaaagatcaacaggctcaaggatttcctccattggtggtccaagtaagaaaatttgcaagttatttcagggctatttgcactgcattttgcagtgttgagtaacaaataaataaaatcaaactttcttgtgaaatgccatgtagatggagattgttaagaaaagcttttgattataaaaattcatggggtttctattactttgcatggtgacttgactttctgtatcatttggaacttacagtttttgtttcggatttaaatgggtattaaatatgaataattttattggttggtgtggtatt

SEQ ID NO: 22830 - DNA, 131 bp, Gossypium hirsutum
  Clone ID: LIB3146-059-Q1-K1-B3
ggaggtcgaggaactccagggtatgcagcaccggaactttggatgccatttccaataaccgagaagtgtgatgtttatagctttgggatgctattatttgagatcataggccggcgaaaggaaccttaacg

SEQ ID NO: 22831 - DNA, 274 bp, Gossypium hirsutum
  Clone ID: LIB3146-059-Q1-K1-B4
gtaaaataattcattagggtccaataaaaactcatgttataggttataggcgctcctcactggaaactccccgggtggctcccctctccaaacttgaaaggcgtcatggtccggctacgccaggggtatcttcaaaactttctcagcaatcttcggtcggaagatcatcacaaactaaaattttatcacctcttcccaccctccagcgaaaacctttttcaagcagaccttttgcagaccatacactttttcaggagttattctttttcatcat

SEQ ID NO: 22832 - DNA, 96 bp, Gossypium hirsutum
  Clone ID: LIB3146-059-Q1-K1-B5
gtatttgcagtgtagctgtgttgattataaattcctaaatttaaaaaccacctaaaaaaggggcaaatcatttattggttctggcctgataaattt

SEQ ID NO: 22833 - DNA, 60 bp, Gossypium hirsutum
  Clone ID: LIB3146-059-Q1-K1-B6
ggcaaatgctaccctggatgatttggtgacctcaacgaacgcagtcgtggtgcctatggg

SEQ ID NO: 22834 - DNA, 182 bp, Gossypium hirsutum
  Clone ID: LIB3146-059-Q1-K1-B7
caatattttagccggtggggcattcgacggagcctcaatgaacccagccgtttcatttggaccagccttggttagctggtcctgggaaaaccactgggtctactgggctggaccacttattggtggtgggctcgctggtctcgtctatgagttcatcttcattaaccagacccatgaacaac

SEQ ID NO: 22835 - DNA, 326 bp, Gossypium hirsutum
  Clone ID: LIB3146-059-Q1-K1-B8
tcgacccacgcgtgcgcccacgcgtccggcagctcctttgagtataatgaggtcggtcattcacaccaaaagtgtggagttcatgccattcactttatcatttttcctcacctgcagcgccatcttgtggttggtttacgggctacttcttaaggacttttatatatctctcccaaacattgtgggagttgttctaggaacaatccaaatgctactatatgtagtctacaaaaagttcaataacaactttgccaaagaccatgaaaggaagcaaccgtcgccgactgtgaacggaaagaacatgaatcatatcaaagcttcaaata

SEQ ID NO: 22836 - DNA, 244 bp, Gossypium hirsutum
  Clone ID: LIB3146-059-Q1-K1-B9
cgctcttgctagaaaaaaaataaccgagattcgggaagtgaaatcagaaccaagaacagacctgacagtaggatagaaattgggagggaatgatcgcatctagttggggagaaaaggacagaggggtttcataacgcttttgattccttgagtgctctttcagctttaatacacctttatttgtattaggctttagcctagcttcatttgactatgcttttggcttaattttcttgttaaacat

SEQ ID NO: 22837 - DNA, 376 bp, Gossypium hirsutum
  unsure (1)..(376): unsure at all n locations; Clone ID: LIB3146-059-Q1-K1-C1
ccttggaatacatctgaaggagatcagcaagcgtatgctcgatactgtcaaatctcgcgctgctactggtgccgccgccgatgctccgtcagccacggaagcagcgaatggtgaggaggtttcatcgtcgtccgtgaaggcggaggcttgagtttgaggatcctcgnttctctctttctctctctgtagggcttttctttagattgatgatcggtcttgctagggtttttaaagatctgtctggttggctctggatttttcgagatgcttaattgcctatatacgacgataataaaatctggaactggtataccaattctttatcccttctttttttgaagggtttctggttttggggaaaaaaaaaaaaannnna

SEQ ID NO: 22838 - DNA, 270 bp, Gossypium hirsutum
  Clone ID: LIB3146-059-Q1-K1-C10
tagcctgagcgcgagaagggtttcagaaaatgctccggagagagactgaaatcaaagattcatgatcccatgtaagataaagttctataaatggaagtaactcagtttagttgggtgtctgactggttaagaaatattggtatatctaggatttgaatatgtctttgcattaggaagattagtcctatttttcgagtggagtcgaagctagtatcgatcggtttgacatgtctctctatcccgaacctaaaagtttgattcaattaactt

SEQ ID NO: 22839 - DNA, 375 bp, Gossypium hirsutum
  Clone ID: LIB3146-059-Q1-K1-C11
gacccacgcgtccgcccacgcgtccgggcaaacagatacttcactggcggctgctcaacaaaggattcaagagcagttaagtgctgttactgcagatatggtgatgctatctaccaatgaagagaagaaaaagtcagtgaagaagactgcggagcctgatgtcaaggtacatgagaaatgtttcaatacccacgagaaacttgttaacgagataaaggaacatctcacgaaagggtcttctccaactcagcttaaatccttcctaggttcactctctggaacttcccaagaaatcatggatgctcttttcacagcactctttgaggatgttgggaaagggtttgctaaggaagtaactaagaagaagaactacct

SEQ ID NO: 22840 - DNA, 100 bp, Gossypium hirsutum
  Clone ID: LIB3146-059-Q1-K1-C12
gagacggataaagagcttgtcatactgaaaagtccaaacgctgcggatccccttgcgagggacgactctccactcctcactatcgatgactgcggagcat

SEQ ID NO: 22841 - DNA, 311 bp, Gossypium hirsutum
  unsure (1)..(311): unsure at all n locations; Clone ID: LIB3146-059-Q1-K1-C2
cctacatgtccttccagatgacaggtgtcactaagatattagtaggtcctggttatccaaagactctttatccagatgcagactggttggaaaggacattgctggaaaccaagcctgtcccaaagcttgttactgttgttaatcctggcaacccatctggaacctacattcctgagccgctacttaagaggatctcagatatatgcaaaaatgctngttgctggctggttgtaaataatacatacgagtattttatgtatgatggtctgaaacactcgtgcgtggaaggagatcacatagtcaacatcttt

SEQ ID NO: 22842 - DNA, 424 bp, Gossypium hirsutum
  unsure (1)..(424): unsure at all n locations; Clone ID: LIB3146-059-Q1-K1-C3
gacccacgcgttcgcggagaaggaaaagaagaaacatcagaccaaggatgtagagaatgctgaagttggagagaagaaaaagaaaaagagaaagcacgaagaacaagaagataaagaatctgaagtgcagaccacagaagagaaaaagaagaagaagaagaagactgaagattgagaaaaatcaaaggccttacgtggtgattgactaccagacaaattttgggtaagaaaatagaatagaacttatgcttgtaaaatgtggtattttgttgggttaatcatctgggaatatcaaaacaaattttttgtatccttttaatttgagtttaatatcttcttgcaatgatatgggaatgggtaaccaagagcctncaattggtactcttgaaggaatgagatgttaacttaaccatttttttttttt

SEQ ID NO: 22843 - DNA, 55 bp, Gossypium hirsutum
  Clone ID: LIB3146-059-Q1-K1-C4
gaaacaaaggccttcatcttagcactccgccgccccttatctcatcgcaatcatg

SEQ ID NO: 22844 - DNA, 329 bp, Gossypium hirsutum
  Clone ID: LIB3146-059-Q1-K1-C6
ctgtgaacgatgtggttatatttctagccagttgacatatgcttttaccttgcctgacacgttataattgtttaaactttagcatgcatttgatatgcctaatttatgataaagttctgccttgtactggagtggttaaagcactgatagctgtctgcagtatagttaaaactgatctgatcttatacatggtatacagaaatggtgcaaagcttgtgtcttgctggaggggctgaatcgaggtttaccaaagcttggcattggtcgtaatcaaggcctaaatagtgatggtaagaaagatagaaaaagagatagcagaacgccaagta

SEQ ID NO: 22845 - DNA, 244 bp, Gossypium hirsutum
  Clone ID: LIB3146-059-Q1-K1-C7
cccacgcgtccgagttgcaaagctttctcagttggaactaccgtttaaagaaattactagaaactataggaagcaactgcaaggtagacccgaagtttactgcagtgtatttgttgacagatcatcaacacaacagaacgggagaaccaggcaggatcatgttggtattgtcgcattttacaatacaaaattcattcctgccataaaatatttgcttgaagaacttgatctttccagaacgact

SEQ ID NO: 22846 - DNA, 422 bp, Gossypium hirsutum
  Clone ID: LIB3146-059-Q1-K1-C8
cacgcccgtccgatataatattggaggaatcaatctcatatattacaatgtatgcgcagatcgtactttactgcgtggcgagtccaatattcaatccactgcatatatatggaccaccccattaatcaggaggctctatgattagaaacagaggtatatgtgggatgccatcaatggatgacccaagtaacatactctagctcatgattgccactacgaggggaccagtgcagatgattgtgcagatgataatctgcaaaaaaggacgctgaccatacacggataatcgatggacaaaccctagaatgggggaaatgaacttctcttttaaaactgtctgtaacatgcggaaatgcaacacacctaagcctggacactaagcttgcaaacaagataaaaattcaaaacaaaaaatgccccca

SEQ ID NO: 22847 - DNA, 389 bp, Gossypium hirsutum
  Clone ID: LIB3146-059-Q1-K1-C9
cgactcttgagtatcaactcatatttacatttatggcaatcgtctttacactgggggtcggtttaatctatttatatatatgcaacacaccattattctagagggtctatgattagaaacaatgttatatatgtgatgccatcaatgattgacccatataacatactcattgctcatgattgccatctacaatatgactcaatgcagatgatgttttcagattaataatttgaaaagaaggtcgtctgacctacacatgataatgtattgacataccactaaatggtggaatatgaacttctcttttaaaactgtctgtaacatgcagaaatgcaacacacctaaacctggaccttaagctgcaaaacaagattaaaattcaaaacaaa

SEQ ID NO: 22848 - DNA, 143 bp, Gossypium hirsutum
  Clone ID: LIB3146-059-Q1-K1-D1
cggacgcgtgggttcaaatgtagtgtatgcagtgggaactttatgttttaggttaggagagatagtatacttttgtttcttatccatgttgggtactaaaagttgtaaatgctttccagaggaaaattgctacattgtaattc

SEQ ID NO: 22849 - DNA, 393 bp, Gossypium hirsutum
  Clone ID: LIB3146-059-Q1-K1-D10
ctttgctgatacatggggatgggttatggcctcggatcaaccattctccattggtgctgaagaaattgacaagaggattgctgaaagagtagatggtgaattactctacttgaatggttcttcattccttttctctgcaaccatgaacaagactggttatctatcgctgttgaacgaaacccaatgtctacactgagggaaaatccgagatttataccaggacatggattgggtaaccacctttgaggtttgcaggccttaatcttggggagaagtttgttgtaaataaaagaaaaaaagggaaaggttgcaattaaaagatagcatcaaaaagacttttgcttcaaacgaaatgagtcatcaattgttgaaagaagttggtttttaattttt

SEQ ID NO: 22850 - DNA, 152 bp, Gossypium hirsutum
  Clone ID: LIB3146-059-Q1-K1-D11
tgtgtgtgtgtgtgtttttttttttttttgtggttctcaatgtggacttgttgctttgttatcgtataatacaaattgttgttgcctgggaaaaaaaaaaaaaaaaaaaatgaatggctcttcataaatatcctatgttaccatgaacaaaa

SEQ ID NO: 22851 - DNA, 328 bp, Gossypium hirsutum
  Clone ID: LIB3146-059-Q1-K1-D12
ggccggcctgtgtgtttttttttttttttgtggttctcaatgtggacttgctgctgggacagcgtataatacaaattggagaggcctgggaaatctttaactgttaaacttgtcctgctaaaaaatgttatccttagcagtatgaagaacattgatttgctggtttagtgcttcgcacccctttggaaggctaggaaggggcctctactgaatctaatgcttatcttacaattcgaattggtatttacagtaactgacaattactagtattagacatttaaagaacattgaaaagcttgcactcctagactacgcttttcttcaagct

SEQ ID NO: 22852 - DNA, 367 bp, Gossypium hirsutum
  Clone ID: LIB3146-059-Q1-K1-D3
cccacgcgtccgcctcaagccgatcctttagccatagatttgttgcaaaggatgcttatttgcgacccgtccaagagaattactgtcacagaagcactccaacatccttacatggcaacactatatgatccaaggtgcaatccaccagcccgagtcccgattaatctcgacattgatgaaaacatgggagaagaaatgattagggggatgatgttgagtgagatgcttcactaccacccagaggctgcatcaacaaatgcttacaccacattgttttagctttgcttacaaaaacagtattggtattggtatagagaattctactaccttggagcttaccaattgagcaaaacattttgtctttaac

SEQ ID NO: 22853 - DNA, 246 bp, Gossypium hirsutum
  Clone ID: LIB3146-059-Q1-K1-D4
gtgaaattagccttgaaattcaaggccaagacggatggaccaaagttgagggtttttgtgggacccgtccagtcggttccttcctttcaaaccgaattcgttaacttccgccaggaagggggggagtccccaaaccagtttccgcctttgggttttgggaaggagccattgaattccaaggcctaaggcggttttctttccccccaatgcagggtttgtcacttttaaaaaccttcctaaacgggt

SEQ ID NO: 22854 - DNA, 379 bp, Gossypium hirsutum
  unsure (1)..(379): unsure at all n locations; Clone ID: LIB3146-059-Q1-K1-D5
ggccatcgcagatttctggggtacaagcagacaatattattggaccgaaggcttttggttgatctgatagaccagtacaatagtggatccctaagttggaatgagttctcaaatgccgggaaggaatctcacaaatatcggaaggggcaaccaacacaaagatcggtgtttcccgacaggcctaaagaagaggattacttctatgccaacccagaagaatgcttgaaaccatcatcatatggtcaagtgagtagcacgtgatctttctatctggggattgtcacgaatattggtgtttttnctttttctagcgtgctaggcatcatacctaaaaccttaagtagtttccctgcacaagtatgactacaatgaaggtttt

SEQ ID NO: 22855 - DNA, 322 bp, Gossypium hirsutum
  Clone ID: LIB3146-059-Q1-K1-D6
gtcttgccgacgctgaaggtgcaagggtttgtggtgtttctcggatcatggctgttgatgtgaacggaaaacaattcgaagaagctaacaggtttgggattacagaattagggaatccaaaagactactatcagccatttaaagaggtgattgtggagatgaccgccgtaggagtgaatcgcaatgtggagtgtacagggagcgtccacccatgatttgcgttttagaatcctcccatgatgattggggtgtatggtgctgttggatgtgccaaaaaaagacaatgcattcaaaactcatccaatgaatctactaagtgaga

SEQ ID NO: 22856 - DNA, 172 bp, Gossypium hirsutum
  Clone ID: LIB3146-059-Q1-K1-D7
cccatctcctttcattgcatttttttcttactaccacccaacctggggggttctataacatttaatatctaaccctaagtataaatctttccaaaccaaaaaacttcttctttctttaagaggcaccatccaatacctttcattattcatcctaaaaaaaatattactttta

SEQ ID NO: 22857 - DNA, 330 bp, Gossypium hirsutum
  Clone ID: LIB3146-059-Q1-K1-D8
gtgttctcaaaagctagaaatgaaatttccatatttgacagctaggttataatttaaatgattagaaatgaacattaagatgccaatatgactttgtcgttgaatagccttaggctgttcagcttaaacactgtacataaatggtcatggaattattgttgtctttactgtgtgcaaaattttcttttctaattaaattttttggtaaatatgcatagcaggagatatcacgggtgatctagtgccctgatgatgacggtggattttgctctttctttacacatacaaagtagtaccagtttggactgtaaggtaataatgttaacatga

SEQ ID NO: 22858 - DNA, 336 bp, Gossypium hirsutum
  Clone ID: LIB3146-059-Q1-K1-D9
cccacgcgtccgcggacgcgtggggaagagactcttttcgcatggaagaataggttgcgaagctggggctatgaaccggtcttttgcagtgttgagaccaaaaacggacttgattctcttgcattttacttgagggatctaacaactgtaattgttggtcctagtggggttgggaaatcaagccttatcaatgttcttcgaagtgatcaccgcgctactgattcccttgaaggagataatttgtttgatcccatttcaggcagcaagtggtttgaagatcagagggttggggaggtctcgacaagaagtggcagagggaaacacactacgcgacat

SEQ ID NO: 22859 - DNA, 368 bp, Gossypium hirsutum
  Clone ID: LIB3146-059-Q1-K1-E1
aaaacatcaatttcctttgataaattgttgattggagcagcaagagaagcagtgaaggcacaatgggaactcattctgttaaagaagaatactattgataatttaaggtggaaaggttactgtggaaagaatgggatcttaactgaaacactcaagtcacgtgtcaagcaggaaggtatgagaagggaatacctctgtagcacctttcagacaaagaggaaggacaaaaacttcaattctactagcaaaagggaatgtagcatatgttactttgatttgcacctctcagcagtgcactgttcatgttcttctcatagatatttgtgtttaaatcatgcaaagcggctttgttcttgcacatggacaga

SEQ ID NO: 22860 - DNA, 230 bp, Gossypium hirsutum
  Clone ID: LIB3146-059-Q1-K1-E10
cttctttgctttctttgtatttgcagcttctgtaggggaaaaaaaagatgaagagggttgctttgttgcctggtgtggggcactgcggggctgtttcggtgaaagtccatgcggagcaggcatgaatccacgagcttcccctgctgcgcatcacgtgtcctccctcatcaccgttgtgcacagctgaagccagaaccatccttgggatacataaactatctttaacagtt

SEQ ID NO: 22861 - DNA, 332 bp, Gossypium hirsutum
  unsure (1)..(332): unsure at all n locations; Clone ID: LIB3146-059-Q1-K1-E11
gtttgccaaatacatgctctttgtcaaggatattcttagaaggatagaagaaaaccgtggggttactgtaactgattctggagtcccagatgtaaaacctgctaccactgccaacgggctttaatctcaagtcttgagcaaagcaaatggaactgtggcttcttgcaaaaagcacccaccatggaatgaaaacctgggttcctactaccaaagcagcttgcaatgccagtcacactgtcccacagcctnccaaggacaatttatcctttcactctattttgggtgatcagtcaattcaatcagcacccacacaatctcaatcttccttaata

SEQ ID NO: 22862 - DNA, 136 bp, Gossypium hirsutum
  Clone ID: LIB3146-059-Q1-K1-E12
ccctcccaaatacattctctttgatattgttattcttagaaggatacaatacacccgaggggttactataacagattctgaagtcccacatataaaacctgctaccactgccaacaggcttcactctcaacacttg

SEQ ID NO: 22863 - DNA, 392 bp, Gossypium hirsutum
  unsure (1)..(392): unsure at all n locations; Clone ID: LIB3146-059-Q1-K1-E3
acgagacagagaatagagagaatggcttggatatggttggaagctgcacttcctcttggaataatagctggaatgctctgcgttatgggcaacgctcagtatttcattcacaaagcctatcatggccggccaaagcacatcgggaacgatatgtgggacgtcgccatggaaagaagggataagaagctcttcgagaacctctcatcctctgattgatccctttttagtttattactagttaaatgtaggaaacttggccaatggagcaatggagaagaaatanaagtgctttatgatgttttgtcctgctgaaagaagactaaagagcagatgaacttaagtattttcttttttgtaatgtgaagcatgaattccgaaaatattgcactttt

SEQ ID NO: 22864 - DNA, 202 bp, Gossypium hirsutum
  Clone ID: LIB3146-059-Q1-K1-E4
gctgacatcaatattcgaaggctctgtttcggttttaataataccccgacctccgatttcttgggggtccttggggcttatttgaaggaaaaataatggggttttatatttgaacctgcttgccggttattcctgggttttttcttttttcaatgggtgggttttgggcctgcctttttgtttaaggactatttttttgggg

SEQ ID NO: 22865 - DNA, 127 bp, Gossypium hirsutum
  Clone ID: LIB3146-059-Q1-K1-E5
cgaatcccggtcgccacgcgtcgccaccgtcgattgttaaatgccttacacatggtcttcttccatcatcgccgtaaggagtgaagtctccctttcaccctgaatccgggactggcgtgtttcatga

SEQ ID NO: 22866 - DNA, 251 bp, Gossypium hirsutum
  Clone ID: LIB3146-059-Q1-K1-E6
cccacgcgtccggacgagccattgcatgcactttttggtgttgaatccattgacatgtttcaaatgaacaaagccctgtcaaagcacatcttgcccttggattcagacgaagtcaagtcaatggagagggaaaaaccaagaaagcatgagagagaagaagtcaagtcaacggagaaggaaaagccaagaaagcatgagagagaagaagatccagatgaagcaaaaggaaaggaaaagcgacagaagggatt

SEQ ID NO: 22867 - DNA, 302 bp, Gossypium hirsutum
  Clone ID: LIB3146-059-Q1-K1-E7
cggacgcgtgggcggacgcgtgggttcatatggttgtgtttgtttctcaacgatggagcatgagttgatgccaataactcgtgaaccgaaaatttccaaaggtggtccttcaaatccaagggtggagttgaagattggctctacttttatatactgtctatggtgttgtatgctattctttcttcttctacctttgctctaaggtcttctttttcttgttctattgttcttgttggttctgtacgtttggagacaatagtatggttaatgatataaaactgaaatgagattcatttcatttt

SEQ ID NO: 22868 - DNA, 382 bp, Gossypium hirsutum
  Clone ID: LIB3146-059-Q1-K1-E9
cgcgcgaagagctcctgaagcgccgattgcagcacttgaggaagctttctcgatgttacagagaccattactgggctcttatggaaaacctcaagatccagtacaggaactattattggaagtttggtatcagtccttcaaagcaaaatgataatcaacagctagctgatgcccaagttgttgttaatcccattttcgataacattgaaagcccccctgctgataatgttcatgttgataataattttagttcgaattttaagaataatcaacattgtttgttcgttggatgtaagttcaaagccatggctttgactagattttgtcatctccatattctctccgattccaagcagaagctttataaggcttgcacttatgt

SEQ ID NO: 22869 - DNA, 424 bp, Gossypium hirsutum
  Clone ID: LIB3146-059-Q1-K1-F1
cccacgcgtccgatccatggcgtgaaaagttggccaagtacaaagtagagttatcaaagggagtatggggctattgggaacttggagcctggaagcctctaggcatcagtgccaggcatcgagccagactccgaaaagaaatgcttctagcgggccaagattggccatacgatccagagaagaaagagatgagaagcaagatgaaaggtcacaagtgcgacagaatagccgcggagagaagggagaatactgctaatttgatgcagaaaatgcctgagatgttgcttgcttataagaaacgcagatgggagaagaaaatgaaggaagaagagaaagctaaagataaataaatctgcatttttttccttatttgggtggttgagaacaaaagaaaaatgttgaatcttgtactaatgaattcaat

SEQ ID NO: 22870 - DNA, 334 bp, Gossypium hirsutum
  unsure (1)..(334): unsure at all n locations; Clone ID: LIB3146-059-Q1-K1-F10
tagcaactaaatacattatccattttccccgtcattcaggttgtgtatttcaaattattgccatggaaatgcaaaaagaagaaaaaaaaaacactgtaggattatatttaggcacagtgcatgctttttgaacttagtagcagtggagcataatgtagaaatcagtgaaaaatatagaaaactttcacaaaattgtgaatgtgaaatgttcttcagattggtcgggccgtangccgatttcttctccaaggttttactgaagcccgaatcaaaccgaacttattattccaaaaatattgaaaatactttttatagtaaaattaaaataaaacaa

SEQ ID NO: 22871 - DNA, 352 bp, Gossypium hirsutum
  Clone ID: LIB3146-059-Q1-K1-F11
cggacgcgtgggcggacgcgtgggctcttttctcttggaaaaaaataagaccaccttgaagtaggaatactgaaatagtgatggaaggtatttcagcgaccatgtacaagaacttgacagggtactggaggaggagaggctacgtgaagctaaatggtacgagtggagcacggcggagtcgggtggagctgggctcctcacggcggaagaggttctggaagatcaggatcaaggcaaagctgagaataagatcgccgaagaagtggttggtttggctacgtgatgcgtacatgaaaatgatgctggggttagccaactccaggatggtaagcagtgggtatggaggtagcat

SEQ ID NO: 22872 - DNA, 51 bp, Gossypium hirsutum
  Clone ID: LIB3146-059-Q1-K1-F12
cccacgcgtgcgcaggctccttttttcttttgtctgagaaaaaaatcagac

SEQ ID NO: 22873 - DNA, 241 bp, Gossypium hirsutum
  Clone ID: LIB3146-059-Q1-K1-F2
cccacgcgtccggatgaacttagtgcaagtgttgagagaattagaggtgttggccttacaatacataaagaacttcttgcacaggagaaaataatagatgacttgggtactgaaatggacagtacaacaaaccgactggatttgttcaaaaaaaatggctatgattatgaagaaggcagtgctaaggccagattatgatgatattatttttgctagttttgttcattattctattcattct

SEQ ID NO: 22874 - DNA, 120 bp, Gossypium hirsutum
  Clone ID: LIB3146-059-Q1-K1-F3
gccaaagctaaaatatatgcataattaaatgaataatgcagtgcaccaaaattggcaacaggaaatagtctacgaaaggaactttgtgaaagagataattaaagaggttcacctttatgc

SEQ ID NO: 22875 - DNA, 85 bp, Gossypium hirsutum
  Clone ID: LIB3146-059-Q1-K1-F4
tctctctctcaaaaaaaaaaaaaagagaaaagaggtctttatatggaggtttatattatatgctgagagaattaattatcttgtg

SEQ ID NO: 22876 - DNA, 375 bp, Gossypium hirsutum
  Clone ID: LIB3146-059-Q1-K1-F5
tagaaatgtgttgccaagaagtgccactcctagtcctcagagatcgcgttcacggattaacgtagaggccctctttacaactccaaggaagctcatccactcacttcaagatcctaatgaattgaactcagattactccgagaaacaattcaggaggttcagaagtccatgctcagagaaatttggaggtagtccaaccacaaaccgtaacagttttcgtcgtggtattatcaatgaggtcaaacgcaaagcacgttcgtataccgatggtgaagatcatggtgtctctgaatctgtatcatcaactgatgacagtcctgctgagcttgatgtcctaaggtctactgatgcagcccctaagaacaagaaagaaac

SEQ ID NO: 22877 - DNA, 375 bp, Gossypium hirsutum
  Clone ID: LIB3146-059-Q1-K1-F6
gtttgacagtgtaagtgaatttcatggcaggttgcatcatggtgggactatggttaccaagccactgccatggctaatcgcactgttatggtcgacaataatacctgaaacaatactcatatcgcaactgtcggcactgccatgtcttctactgaaagggcagcttgagaaattttccactccttggatgtcaaatatgttcttgtagtctttggaggtctcattggttaccccagtgatgatattaataagttcctgtggatggttcgaatcggacgtggtgtctttcctcatatcaaggaaccagattatcttagagaccgacaatatcgaattgactcccaggccactccaaccatgctaaaatggctaatg

SEQ ID NO: 22878 - DNA, 377 bp, Gossypium hirsutum
  Clone ID: LIB3146-059-Q1-K1-F7
cccacgcgtccgcccacgcgtccgaacaaggtaagggctgttagggctggtattgtgccaccattgatgagactgttgaaggatgctggaggtgggatggtggatgaagcattggcgattcttgccattcttgcaagccatcatgaagggagggcggcaatcggtcaggctgacccgattcctgttttactagaagtcatacggactggttctccacgtaaccgggagaatgccgccgccatactctggtcactttgcaccagtgacttagaacaattaaaaatagccaaggatttcggtgcagaggaggcattaaaggacctgtctgatactggcaccgacagggcaaaaaagaaaagctgggagtatcttggaac

SEQ ID NO: 22879 - DNA, 408 bp, Gossypium hirsutum
  Clone ID: LIB3146-059-Q1-K1-F8
ccaaacctgtgtagaacaaaaccaaatgattttaatggagaaaaggctgtccttggggaccgtgaatcattctttttccctcctcccctgtttcctccgaacccctttcagcctcctccgttgcttcctcccatactgccaccaccagctccactagttccagacccattgcagcctcctccagaacctgcagcaccatccttgccgccggttccaggactagctcctccaccatcgtgcccgtctccaccgccagacttcccattttcacttccaccattccctttccttctctgtaccccccttcccaagtgtgcccccatcgaactcttctccttgatttaatacatatagtaacatttcttcatgtataattctctcaataatataataatgtaatttgttttt

SEQ ID NO: 22880 - DNA, 347 bp, Gossypium hirsutum
  Clone ID: LIB3146-059-Q1-K1-F9
ggtgccttgaacgtggatgtaacagaattccagaccaacttggtcccttacccaagaatacacttcatgctttcttcatacgctccagtcatctccgctgagaaggcttaccatgagcagctatcagttgctgaaatcaccaatagtgcctttgagccctcatctatgatggccaagtgtgatcctcgccatggcaagtatatggcttgctgtttgatgtaccgtggtgatgttgtgcccaaggatgtcaatgctgctgttgccaccatcaagaccaagagaactattcaattcgttgactggtgcccaactggattcaagtgtggtatcaactaccagccaccgac

SEQ ID NO: 22881 - DNA, 425 bp, Gossypium hirsutum
  Clone ID: LIB3146-059-Q1-K1-G1
gaagagcttcctttttttttttctctccttttccaccgccgtcgatctcgatccttatcctcgttttcaaacaagctcgaaaaagatggccaacgctgcatcgggaatggctgtgcatgatgattgcaagttgaagttcttggagctcaaggcaaaaagaacccaccgcttcattgttttcaaaattgaggagaagcaaaagcaagttattgtggagaagcttggtgaaccaaccgaaagctatgaggattttactaaatgtctccccgctgatgaatgtcgatatgctgtgtacgattttgattttctaacggccgagaacgtaccgaagagcagaatctttttcatagcatggtctcccgacacgtcaaggatcaggagcaagatgatttacgccagcttcaaagatagattcaagcgagaac

SEQ ID NO: 22882 - DNA, 188 bp, Gossypium hirsutum
  Clone ID: LIB3146-059-Q1-K1-G10
tgttttttttttttttttttttttttttttttttttttttttttttttttttttttttttttaaagaattgggagttatttgatttctgggcccttaaaaaaaataaaaatatttccccactaactttaattaattttttttcttccctcaaaaaaaaaaaaaaaaaaaaaaaaaaaaaaaaataagg

SEQ ID NO: 22883 - DNA, 327 bp, Gossypium hirsutum
  unsure (1)..(327): unsure at all n locations; Clone ID: LIB3146-059-Q1-K1-G11
ctttatgatcctccttattatgaatggtatcaagtcaacgagatagagtgtgttcatttcgatgaatgtattgcatgcatagaagattatatgattaaacatggtccctttgatggtctactgngtttttcccagggtggaatgctagcatctgtggtgcctccaatgcaaagagagggtgccgcttttactagtgtgccaaagataaagttcgtgatcataatatcaggttttgaacttcgagaattgaagtctgggccgccgaaattgcttgctaatgtttattcagttccaattgactgcccatctcttcatttgattggagac

SEQ ID NO: 22884 - DNA, 278 bp, Gossypium hirsutum
  Clone ID: LIB3146-059-Q1-K1-G12
cccacgcgtccgaaggatacgttttggtgttgggagatcatcataacagaagttccgatcgccatgattgtggcccgcttcccatagattacaatatggcgagatcagtatgccggtatagactttcattcaaagtgtgagataccatacattatacacatgtcgagaaagatgctgtggccctttcttgacatctgagataacttaaaaaagactcggatcttactaggctcatatcgagcatattcgaatacccatcagaccggaataggccatat

SEQ ID NO: 22885 - DNA, 59 bp, Gossypium hirsutum
  Clone ID: LIB3146-059-Q1-K1-G2
gacaagcttcctttcactctttctctcacttttcacttacgaagatatgaatactaata

SEQ ID NO: 22886 - DNA, 320 bp, Gossypium hirsutum
  unsure (1)..(320): unsure at all n locations; Clone ID: LIB3146-059-Q1-K1-G3
cccacgcgtccggctttcggttcatctgaatcgcatcaagagttggctgtagttcctgcaaattcaactgtttattatgaggttgagatggtctcgtttgtgaaggagaaagaatcatgggaaatggatacaccgcagaagattgaagctgctgggaagaagaaagaagaagggaacgcactaatcaaggctggtaaatttgagagagcatcaaaacgatatgagaaggctgntagcttcatagagtatgactcttctttcaacgatgaggagaagaaacaagcaaagttgctaaaagtaaattgtaaccttaacaatgc

SEQ ID NO: 22887 - DNA, 159 bp, Gossypium hirsutum
  Clone ID: LIB3146-059-Q1-K1-G4
acccttccgcgaccccttggccgaccccttggatcctggacaaattggaaacggatatgccccaatcctcgactggcacaccttacacattggtgttaagtttgctgaacttttgaccaaaaatgacaggcgatcttgtgaggagctttagaaggaacc

SEQ ID NO: 22888 - DNA, 137 bp, Gossypium hirsutum
  Clone ID: LIB3146-059-Q1-K1-G5
cccacgcgtgcgcccacgcgtgcgatcctgtttaatttgggcacggatatgcctgaggcgggggctgctacacctcacacgttggtgcggatattgctgaactgttggccaaaattgacagacggtctggtactgat

SEQ ID NO: 22889 - DNA, 273 bp, Gossypium hirsutum
  unsure (1)..(273): unsure at all n locations; Clone ID: LIB3146-059-Q1-K1-G6
ttgactctgatcttcggatccagcagcgtgagcttttagagtccatagtgcaactgctacccggccgaaaaaagctgnctttcccgatccacttttttgtgttgcctttctccgctgtgcaattttttctgaaaagccttcagtgctttgcaagaacgaggtggagaaaacggatctcgctcatnattggagcatgttacggttgatgatctttttggtcctgtcttttcacatatgaatggggagagggctcttcgatctgggacaagcgtg

SEQ ID NO: 22890 - DNA, 378 bp, Gossypium hirsutum
  Clone ID: LIB3146-059-Q1-K1-G7
atggacggaggcttgtatgagcggtaccctcagtatagaaggtacttaaaagaggccgtagccgagcttcttggaccggaaacatcccaaaacattgtgatagagcactccaaggacggatcagggattggggctgctctcttggccgctacaaactccaagtatggtcgaaatctttaggtaaatcaacctcatagtttccgaaaggaaaattattgcttttgtattttatcgaaaaaaaaaaaaactggggagtaattgcaattttgttagaatagagtgtaaaactatatgcaagtcagattttaaatccagattgtaataatttgtattgtgtattagtaaagccaataaagatggaatcaatgaatttattct

SEQ ID NO: 22891 - DNA, 204 bp, Gossypium hirsutum
  Clone ID: LIB3146-059-Q1-K1-G8
cccacgcgtcggtccacgcgtccgctcactctttcgtaggagcactgggaggagggggcaggggaacttgttggccggaatcataccaaacattgtgcttgaccactccgggtccgctcagggataggcgttgctttcatggccgattcacaccccaagtttggtcaaaatagatagggaaatgagcctaatgcttatcgaaag

SEQ ID NO: 22892 - DNA, 196 bp, Gossypium hirsutum
  Clone ID: LIB3146-059-Q1-K1-G9
gcccacgcgtcggtccgaggaaagaaaaaggtagcaaacagtctcaagccactttggaaatacagaatacttatctggagcttctttcagcaatcatctcttagaattttcgccgtaacatagacccacgcatctgctgaagagatgagctatagaagcataccctggccgctgttgttaggagaacaagagcttt

SEQ ID NO: 22893 - DNA, 118 bp, Gossypium hirsutum
  Clone ID: LIB3146-059-Q1-K1-H1
gatgacaaacaaaccgtccccacagagctaaagccgggtagtgattcaaattcatcaatcattttggtaagactttggtttttttttttttttttttaatcatcttttttccccctta

SEQ ID NO: 22894 - DNA, 405 bp, Gossypium hirsutum
  unsure (1)..(405): unsure at all n locations; Clone ID: LIB3146-059-Q1-K1-H10
agcttgaatccgatgagaaggagaaaattgaagcagccgtgaaggaggcccttgagtggcttgatgacaaccagaatgctgagaaggaagactacgaggagaagctcaaggaggttgaggctgtctgcaaccccattatcacggctgtttaccaaagatctggcggagccccaggggctggaggatcaaccgaagaggaggattcgcatgatgaactttaaaaatctcttagcaatatcgagggttggtgatgaacaagcaagagtgaggatgaggagagcgtanggtagttaagacgaggatttttgaaaattttcttcatgggataatggcccccctgcccccctttctttgctggttttttttggtttttttccccttaatttaatttaattttgggggaaa

SEQ ID NO: 22895 - DNA, 401 bp, Gossypium hirsutum
  Clone ID: LIB3146-059-Q1-K1-H11
gaagaggtcacactggaagcggaagtgacgaataaaggagcactggcactttatgggcgtcttgggtttatcagggcaaagcggctttttcactactacttgaatggtgttgatgctttccgtttaaagctattatttcctcctcctcgccaagtattgtagccatgataacaaacggggatgcaagttatgaatttcgatccagacacttgaagaatgtgcaatgctggtgcttatgaatgtttaaggttattgctattaggtcctataaatttaagtacatcttctaagattatatacagtaatatattttcgtttaatatgctaaaaacgatgaataaagttgtccactggtaggatataatatgtatactcttgatttagtcaattcatttagactt

SEQ ID NO: 22896 - DNA, 294 bp, Gossypium hirsutum
  Clone ID: LIB3146-059-Q1-K1-H12
tcggagagctgatgaagctcgagtataaaaggaaggtagcttggttaaacaagcagaagaaacgtggtgctagtgctgaatcattggagaaaacaaaagcagctggtagtcatttgcatacaaggacataggtgacatgcagtcccatggttcaacaatgtcagaaagtaatcgattacgtgatgagcaagtatatccgaaaacttgtatgctttgtgatgggatggctaacatgtgggcaagcatgtgcatacatcatgataggcaactcaaggtttgtgaaaagcttaagtc

SEQ ID NO: 22897 - DNA, 181 bp, Gossypium hirsutum
  unsure (1)..(181): unsure at all n locations; Clone ID: LIB3146-059-Q1-K1-H2
cccacgcgtccggtatctgtatttggtgggttaaggagtgcacattttgtaaggttgatcaatatatttgtaagtggtggcaaggaatttgagatgcctagaaaatattcatcatcaatatcaaaatatttttagcgtctctnanaaaaaaaaaaaaaaaaaaaaaaaaaaaaaaataaaa

SEQ ID NO: 22898 - DNA, 245 bp, Gossypium hirsutum
  Clone ID: LIB3146-059-Q1-K1-H3
ggctgagcgaatttgcggtttgttagttcgtgtgtgaaagaggtaataaaaggaaaaaaacgatgggtgttttcaaatttgtgtgcaggagcaaaggcggtgagtggtctgccaagcagttggagggagagattgaaagctctgctgcttccacttacgagctccagcggaaactcgtccaggctgccaccgcctgcgactcctctggtggtgtcacctcctctttctctgtcgttacccctaat

SEQ ID NO: 22899 - DNA, 357 bp, Gossypium hirsutum
  unsure (1)..(357): unsure at all n locations; Clone ID: LIB3146-059-Q1-K1-H4
ccacgctacgggtttccaaagacaactacattttgcttcatcatcaagcaatggttcaaacccttcaagtccatcaagccattcctgcatagctcctgaacttttctccctgaggggctaaggatcaagctcaaaccaatcaaaacccgtgcagatattgaaatttgatgagtctcgaagctgctgcttattaaatttacacgtatcgaatgtaacagtgcangaataggatttgacattttttgttcattctatcaagttgagaataccttttgaggttggcagatatattcttgattggtggggggaggtctttaatgagttaatgagataacatgattgatatttgtcttaaaa

SEQ ID NO: 22900 - DNA, 207 bp, Gossypium hirsutum
  Clone ID: LIB3146-059-Q1-K1-H5
gaccaatagaggtctgacttctgaggaagatgaagaatctatatttgtggatcaatcaaagcgtggaaaatatttgggatttatatggtgaaacatatagacaatcccaccattgatgatgtattacaacctggaaataatctcgtagcagcccgggtattgtatgtacggaaagcttcctgcacgtttagtgctaaagtacctggg

SEQ ID NO: 22901 - DNA, 348 bp, Gossypium hirsutum
  Clone ID: LIB3146-059-Q1-K1-H7
gctaaacagtatgcatacattccgctcaagaaccagaagcagaagattctcatttcaggaacgtagctctgatctgcctcaagcgcatttgtggtattctactcatgaggttgtcaatgctttaaagctcttccttgcggctggaaatgatttagctgggagcctcacatatagatacgacttggtcgacttaacacgtcaagtgttgtcaaagctagcaaaccaagtctatttggatgcaataaatgctttccgaaggaaggatgtcaaagctttgaatattcacagccagaagttcattcaactaataaaggatattgatgtactactagcttctgatgacaattt

SEQ ID NO: 22902 - DNA, 346 bp, Gossypium hirsutum
  Clone ID: LIB3146-059-Q1-K1-H8
caaaaagatcttccagtcaccatttatgaaagtgaaaaatttagtaagaatacagaacaaagcaggcgagagacattcaatgtactgtttggtggctagtaagcaaatggttggcatatttctcacaatttggatgagaattgaattgagagatcatgttaaaaacattcattgttttttccttgttcattgtttactgaaatattctttcagtaaacattcattgtttactgaaagaatattacactcttttgcttataatttctgacatgataatttttcccttttgtacaaagatgaatgatgaaaataactttatcaatggcacatctttgcattcgtcctg

SEQ ID NO: 22903 - DNA, 166 bp, Gossypium hirsutum
  Clone ID: LIB3146-059-Q1-K1-H9
gtttttcattctcatgtggtgtggtacgtgactagcaaaaaaaaagaaaatggaagaggaaagtcaaaaactttgtaatttacatcttctcctgctggtagagagggttggcagtatacaaagatgaaatccagaccagctaatgaatctttgccttttttcttat

SEQ ID NO: 22904 - DNA, 347 bp, Gossypium hirsutum
  Clone ID: LIB3146-060-Q1-K1-A1
ctcacgcgaacattatatataagatcaaatgtatgcagattggcatgcttagtgaaaacacgcgttagactaagcctgaaactactactggagctactcgcggactagctagcatactcgatgctattagcagagactctatgtttaactataagcggatttattgtcggttgtaaagacttgtgtgaagacttggtttaaacgactattagaatgactatggaagagtgaatgtaacacacactaaaatacacactaagagtgctgagcgacgtgttgtgctttatgttttaaaaaaaaaaaaaaaaaaaaaaaaaaaaaaaaaaaaaaaaaaggggcggccgttc

SEQ ID NO: 22905 - DNA, 298 bp, Gossypium hirsutum
  Clone ID: LIB3146-060-Q1-K1-A10
cacaacctttagttggagttacaatttgttgaaatcattggctttttactaaattgtacttgagaataagtgagtttccttccctccccccaagtattttagtgacgttataagttaataagatacacttcgaactttatgctagagaaaaaaaaaaaaaaaaaaaaaaaaaaaaaaaaaaaaaaaaaaaaaaaaaaaaaaaaaaaaaaaaaaaaaaaaaaaaaaaaaggggggcaaaaagaaagaatacatattatttaggcggagacactaacacagaggcgactgtttgtagcaa

SEQ ID NO: 22906 - DNA, 408 bp, Gossypium hirsutum
  Clone ID: LIB3146-060-Q1-K1-A11
cggacgcgtgggttaagctcacagctgatcaattgaacaccctgaaagccaaagctaatgttgcaaatgcaaacggtggtataaaatatagcagcttcaacatcttggctgcacatatatggcgttgtgtaagtaaagcaaggggtctcccagctgatcaagataccaagctgtattttccagtcgacggtcgatatagattggatcctccgctcccaccaggctacttcggcaatgtaatctttacgactgcattaattgctcaagctggtaatctcgaaaccgaatcgtttactgacaccataaagaggatccatgaaggattaaatcagataaatgatgaatatttaagatcagctattgattacattgaaaaagtgcctgatttaaacaccttggttagaggac

SEQ ID NO: 22907 - DNA, 383 bp, Gossypium hirsutum
  Clone ID: LIB3146-060-Q1-K1-A12
cggacgcgtgggttaagcttatttttgattttttgaacaccctgggggccaagggtaatgtggcaaatgcaaaccgtggtataaaatatcacaggttcaagatgttgtttggacatctatggcaccgattcagtgatgcaagggctctcccagctgaccacgatgctacgttgtatgttctagcagacgggtgatttaaactgaatcctgggatacgaccaatctactgctgcacagcgaacgttacgactgtattaatcgctgaagctggaagtttcgaatccgactgtggtactgactccatactggggagccattagtgaggaaatcagataaatgatgaatatttaacaccagatatcgactacattgaataagaacct

SEQ ID NO: 22908 - DNA, 410 bp, Gossypium hirsutum
  Clone ID: LIB3146-060-Q1-K1-A2
tgactggagaaatgacactgagaggtcttgtgttacctgtcggtggtattaaggataagatactagcagcacaccgtcatggtatcaagagagttattctaccagagagaaatctaaaggacttagttgaagtacctgcgtctgtgctttccaacctagagattctgctggccaagcgaatggaagatgtgttggagcaggcgtttgatgggggatccccatggagacaacactcaaaattatgacaaagctgcttcaagcatgtctctggtgaccaaattgtttgttcggggctttgtctgttcacagattccaattatttatagtcttgtttggaaataaagctcagctgtcatggaccttttgcaaataaggcttatatacctctgttgggaagcttcgggtggaaa

SEQ ID NO: 22909 - DNA, 332 bp, Gossypium hirsutum
  Clone ID: LIB3146-060-Q1-K1-A3
gagaaatatgccaaacctgaagatgttgcaggagcagaagaagtgaagtcaagtgacgaagaactgagtgaagatgaatatgctgcctcggatgatgaggaaatcgccggaaaaccagatctttaggcagatattatgccctgcatactcgctacgaaaatcatcttgtgttgtacatgatgttcagctccaggaaaattcgaacacaacaaaactggggaacatgtggaaaaatttctatttacccctttttgtcattactttccagggatgtttgtgtaaattaatccactgtgcaataattcaaatatttatccactgctgagactttg

SEQ ID NO: 22910 - DNA, 353 bp, Gossypium hirsutum
  Clone ID: LIB3146-060-Q1-K1-A5
ggatgataatttggataacagcaccacaccttattaatcaatgtgcatgcatggcatttaggcctatattgttgccacaatttgaggttagaagttgtattttattactaacgataatgtttatgctatgtttgtattataatgttaatggtgaatgatatttgaatgttcttattttctagactcacattaagctagttagttcaccccatagttttaaccatttcagttaatgctcaaggctaggatcagacatgatatgcagacatatggccgacttttgacttataaattattttgcttacattttttttaaattcatttagtttttggacaataaagttatttagtct

SEQ ID NO: 22911 - DNA, 403 bp, Gossypium hirsutum
  unsure (1)..(403): unsure at all n locations; Clone ID: LIB3146-060-Q1-K1-A6
cccacgcgtccgcaaaacaatttcaaaattttaaatattctttttttttgatcgatactggattattatgtcagaagaagaaaaggaagccaagggtttggccaagggccggccaaaagccccaccaaggggctctgcgataacactcacaggaaatcacaaaccgggataccccgtgtatatcttataggaggtgttaagcgtatcagtggcttgatctacgaggaaacccgtggagtgttgaagatcttcttggagaacatgatccgcgacgccgtgacctacactgatcacgccaggagaaagacggcgaccgccatggatgtcgtttatgccctcaagaggcagggtaggactttgtacggnttcggtggttagattggtgtttactgttcaggattgc

SEQ ID NO: 22912 - DNA, 98 bp, Gossypium hirsutum
  Clone ID: LIB3146-060-Q1-K1-A7
cccacgcgtccgacagaaacaacggatccatgaccgccgacggcggaaacaagggcgggatctaggagcaaagcgcgggaaaatggtcaaagggggga

SEQ ID NO: 22913 - DNA, 410 bp, Gossypium hirsutum
  Clone ID: LIB3146-060-Q1-K1-A8
cgctagatcgttcgtggagaagaattacaaggatctcaagactttaaaccctaagcttccaatcctcatccgtgaatgccgtgggattgagccccaaatgtgggctagatatgatatgggtgtcgagaagggcattcgcttggaaggtttgagcgagccacagattttgaaagcactagaagaccttgccaaagcaggggcatcgaccaaagcctaaccatattgctaccattgaatccaaaaggttcgaaataaaactcatgtcttttgaggaactgtttccttttaatggttgttgtgttcttccctctgttttcagccatcataactgattttgtgagatgattgttgaaagttgtcagtatttgtgttctttcccttgcattgcctttgccttgtaaggtttcaaa

SEQ ID NO: 22914 - DNA, 403 bp, Gossypium hirsutum
  Clone ID: LIB3146-060-Q1-K1-A9
aaattatttatctcctgactgatcagaacccaattcaagtcattgtcgatgctataatcaacagtggacctcgtgaagatgctactcgtatcggttctgcgggtgttgtgaggcgtcaggctgttgatatttctcctcttcgtcgtgtgaatcaagccatctatctcttgaccaccggagcacgtgagtctgcattcagaaacattaaaaccattgctgaatgtttagccgatgagcttattaatgctgcaaaaggatcatcgaacagctacgcgatcaagaagaaagatgaaatcgagagggttgccaaggccaaccgttgaggcattagacgagattattacaccgtgggcggggagaatttcaattgttttaatcagtactttatgggctatctattatt

SEQ ID NO: 22915 - DNA, 232 bp, Gossypium hirsutum
  Clone ID: LIB3146-060-Q1-K1-B1
gtttctcttcttgtaatattgttataatctttgttttcagtagtcaagtttggaccacagtaaaaaagccaacatagaagtaaaaaaaacagaaggatcatactgtcaaaatatgttgtaaaaactgtaattttctgcccgcatgcataatcccatttttgtacagcttcaatgtataagcagggaaaaacacccagaggcagaaatgttaaatgcaagtcagccattagtg

SEQ ID NO: 22916 - DNA, 111 bp, Gossypium hirsutum
  Clone ID: LIB3146-060-Q1-K1-B10
gtgatgctttacaacctgcgcttcgctcttttctagctgctctctttgtcggaggcgtattgaacatgttagtaaaagtctttagccagtgatggtttggattaccagatg

SEQ ID NO: 22917 - DNA, 311 bp, Gossypium hirsutum
  Clone ID: LIB3146-060-Q1-K1-B11
cccacgcgtccggcagaggacttcagattttcatgatccttgctggcagaaaagagaaagacattacttccccagttaagtatgcttgaaaattcttttgctgttaacaaccttaatcagcagccatttttatcctttttgtaagctctccattgagcccctttttagcatttcttatgacagacttagtatttattagatctttgtcctttaaatctttaggttctccataaattaatcaaaaagaacctttcgtgtaatctgtaaaaaaaaaaaaaaaattacaaatataaaaaaaaattacaaactat

SEQ ID NO: 22918 - DNA, 67 bp, Gossypium hirsutum
  Clone ID: LIB3146-060-Q1-K1-B12
tgaaatttctggaaatcagacttgtttgatattttcctaatatacggttctagcaccattgtattat

SEQ ID NO: 22919 - DNA, 413 bp, Gossypium hirsutum
  Clone ID: LIB3146-060-Q1-K1-B2
cccacgcgtccgggttgaactgttgatggtaaacccagaaggtgaaaagcaagaaagtgatttgggtggacatagatatgaagcgatagttgatgctgaggaagatggagatgaagacgaagatgaagacattgataatgatggacccggagaagacaatgaagaaggagacccttctgatggtgaagatcatgggaacaattccaatgaccaaaatggcaactccaacaaggaaattggtggtggagaggctgatggagcaggggaagaagagaacggagaggaagaagaaggtgaaaatgtggatgatgagccggaagacgaggatgaggacgatggtgatggtgacgacaatgaaggcaatgatgatgaggaagaaaaagaaactgtagaagatgaagagcctgaaaatg

SEQ ID NO: 22920 - DNA, 409 bp, Gossypium hirsutum
  unsure (1)..(409): unsure at all n locations; Clone ID: LIB3146-060-Q1-K1-B3
cccacgcgtccgggttctttgaagaggaagccaaggttgaggccaatggtaatgatttccgctacctcccctttggcgtggggagaagaagttgcccaggaattattcttgcattgcccatccttggtattactttgggtcgattggtacagaattttgagctcttgcctccccctgggcaatctcaaattgataccacggagaaaggtggacagntcagtcttcatattttgaagcattccaccattgttgctaagccaaggcaattttaacttgttctcttctatccattttagtgaactcttgtaagacagtatgaaacattattcagttgaaaatatttgtgaggtgtgacaatgtaaatccatgaatcaatcaagatttgcaataagattaatattttcccttc

SEQ ID NO: 22921 - DNA, 412 bp, Gossypium hirsutum
  Clone ID: LIB3146-060-Q1-K1-B4
agaaaatggctactttgggtggaattagccaggtcgatggaagcgccaatagcctggagattgaaaacctcgctcgttttgctgttgatgaacacaacaagaaagggaatacgatgctacagtttaagaaggtgacgaatgtaaaacaacaagtggtttctgggactatgtattacataacattggaggcgatggatggtgacaagacgaaagtttatgaagccaaggtgtgggacaagccatggatggatttcaaggagttacaggatttcaaggttattggcgatgctcccgccggttgtacttccaccgcttaaggtgactggagattgtagaggaaaggatatcaggataccgaatgcgggttttaaataaatgtaactgtcttatgttaatttggatttagactact

SEQ ID NO: 22922 - DNA, 207 bp, Gossypium hirsutum
  Clone ID: LIB3146-060-Q1-K1-B5
gttttgcttactcctttaggacgtggaatctgtcaaatggtattttgctcatagaatgagggggttattctttaggaaagcataaactttgattttgttatttttgcaaagccgacttgaaagaatagttgtttcaacacttaaaagaaaaacaaattgtagttgagctcataagccatattttgattagatttattgaattatagc

SEQ ID NO: 22923 - DNA, 405 bp, Gossypium hirsutum
  Clone ID: LIB3146-060-Q1-K1-B6
cccacgcgtccgctgtgggatatgtacaggttttggggccactgtgaatgttgctaaacccaaaaagggtcaaactgttgcagtttttggactgggtgccgttggtcttgccgccgctgaaggtgcaagggtttgtggggcttctcggatcatcgctgttgatgtgaaccccagaagatttgaagaagctaagaggtttgggattacagaatttgtgaatccaaaagactacgataagccagttcaagaggtgattgtggagatgaccggcggaggagtggatcgcagtgtggagtgtacagggagcgtccaagccatgatttccgcttttgaatgcgtccatgatggttggggtgtttgtgttctggtgggtgtgccaaagaaagacgatgcattcaaaactca

SEQ ID NO: 22924 - DNA, 178 bp, Gossypium hirsutum
  Clone ID: LIB3146-060-Q1-K1-B7
ccacgcgtccgtcagcatcgttttatttatatataaatgcacaactaaccgggattggtatcttgtatgggttatatatgcatgatcccgctgttttgtcaacataaggttatatactttctgacagtacagatattttgttatttacagcaatatatttaacagctagaggaattta

SEQ ID NO: 22925 - DNA, 361 bp, Gossypium hirsutum
  Clone ID: LIB3146-060-Q1-K1-B8
gtttcgatatttgtattaagaatcgccctttagtgatcagtgaggtgaagaaaaatgtcttgctgtggtggaaactgcggttgcggctccggttgcaagtgcggcagcggctgcggcggttgcaagatgtaccctgagatgaactttgctgagcaaaccacaaccgggacacttgttcttggcgtggcaccccggaaagtgcactttgatggagctgaaatggaaactggggctgaaaatggctgcaaatgtggagataactgcacttgcaacccttgcaattgtaaatgagaaaaaaaagctaagcatattatggaagctgatctaaataatatatgatgtatttgggtttttactatta

SEQ ID NO: 22926 - DNA, 342 bp, Gossypium hirsutum
  Clone ID: LIB3146-060-Q1-K1-B9
cccacgcgtccgatgatacccctgaattaagtgaagaaactcaacgaataatagccacaattgttacacaagttgagcacaacaattatcatgaagaggaagaacaagtgttaagcagtgtattggtacaccatgaaacttatttcactatgcaaccgtgtatggattcaaattatacatgtcaaatgtgggtggacgaagtattaaatgggcatgatgatcgatgcatgaatagttttaggatgccaaaatatatatttcacagctagttgcatgatttgcttacaaattatggcataaagcatgactaggtttttgcgagggacaagctagcataataac

SEQ ID NO: 22927 - DNA, 417 bp, Gossypium hirsutum
  Clone ID: LIB3146-060-Q1-K1-C1
cgagaaaatatgatgcagatgggaaccttagggtaccatatcagatagtgacgacgacgatgaattcacctcctggtttcactttatctccttcatctcctactgagttctcatcacacaagagaggtaaaggaaggtccccagggaactggcagcttcttgcttctctaggtgagttgtttgctcacacggccggcggagacttcacggcacatgtggtcaaagttaataccggggaggatgtagcaggaaaagttgtgtcattatcacaaaagggtcctcgtgggatttgtattctatcagcaaatggagctgtttctaatgttacccttcgacaacctggttcctctggtgggattttatcattcgaggggcgttttgagatattgtctctaaccggttcatttacattcactg

SEQ ID NO: 22928 - DNA, 420 bp, Gossypium hirsutum
  unsure (1)..(420): unsure at all n locations; Clone ID: LIB3146-060-Q1-K1-C10
tggatgaactgcttgaacgtggttctaatattgatgcaagaactaaaggtgctggtgggtggacgtcacttcacacagctgctaaagaacgaaagagggaagcagcgtagttcctgatagagaatggggcatttttgccagatgacatcaatgattgcagatttaatccaccgctccattactgccctggccttgaatgggcatatgaggagatgaagcgtcttcaaagagatggctcttcttcagcaggggagacatcttatagctctgaaaattgatattcaatcatatcaaaccgctgttgtttgttcctcctcccgtgtttggtgcttncattttttctctttaataaacgctagtgggcttgtgacgtgcgttgctatatattttattttgaagactgttgtttgcatatgaata

SEQ ID NO: 22929 - DNA, 411 bp, Gossypium hirsutum
  Clone ID: LIB3146-060-Q1-K1-C11
ggtttctgccacgactggtgttgctaacaaccccgagattttcgacataatcggtcattttgccgacccaaagccaggtgcaacattgcctaaaacacccattgtttgcaaaccacaagatagtgccattgaacttgctctcaagattgccaaaatcaatcctcaaagaacattgttctttgacgatagtgtccgtaacatccaagccggaaaacatgtcggtctacacactgtgttggttggtacttcccaaagaccaaaaggtgctgattacgcattggaaagcattcataatatcaagcaggcattaccggagctatgggaaactgatgtcaaatccgatgttagttacgccggccaagttgccgttgagacatcggtgacagcttagatcctatgtttatgtttaga

SEQ ID NO: 22930 - DNA, 422 bp, Gossypium hirsutum
  Clone ID: LIB3146-060-Q1-K1-C12
gttgtcactcggtggggtgtcacgcgtctgccccgtaagacccacagaggtctgcgtaaggttgcttgtattggtgcctggcatcctgccagagtctcctttacagttgccagggcaggtcagaatggataccaccaccgtactgagatgaacaagaaggtctacagggttggcaaggttggtgatgagacccactctgccataactgattatgacaggactgagaaagatattaccccaattggtgggttccctcactatggtgttgtgaaaagtgattacctgatgatcaaaggagggtgtgttggacctaagaagagggtggttacacttcgtcagtctcttattaaccagacatctcgtgtggctctggaggaaatcaaactcaagttcatcgacacctcctcaaagtttgggcatgg

SEQ ID NO: 22931 - DNA, 412 bp, Gossypium hirsutum
  Clone ID: LIB3146-060-Q1-K1-C2
cccacgcgtccgcccacgcgtccggtgaaagggagaggaaggaacaagaaagcaagaagaaccaaaaggtcgaatttgtacctggtggaaatcaacctggagcggttcttcctgctccaaaagttagcatgcctactgcagttgcggctgggagtggtttgccttcaggtccaactgcagtggataacaacattgtgcgggatggtagacaaaacaagaaatcaaaatgggataaggtggatagtgatagaaggaatcctcttcctgctggagcacagcattctttatctgctgctggagcacatacagttatattatcagctgctaatgctggaaccgggtacacagcttttgcacagcagaaacggcgagaaacagaagagaaaaaatccagtgaaaagaggttggatag

SEQ ID NO: 22932 - DNA, 416 bp, Gossypium hirsutum
  Clone ID: LIB3146-060-Q1-K1-C3
ggatgtcttgatcattatgcaggaaccagttattccaggatgctttcttcgcgctaaagctataggtctgatgcctatgattgatcagggtgagaaagatgacaagattattgctgtctgtgctgatgatcctgagtatcgtcactacaatgatatcaaggaactcccacctcaccgcctggctgaaatccgtcgcttctttgaagactataagaagaatgagaacaaagaagttgctgttaatgactttctgcctgcctctactgcatacgaggcaatccaacactccttgaatctctacgcggactacatcgtggagagcttgaggcggtagttgtcgattcaccgtgccccgtctatatacaaatatatatattaatatgaatatgaatatgttgctgctatacaagaaattc

SEQ ID NO: 22933 - DNA, 413 bp, Gossypium hirsutum
  Clone ID: LIB3146-060-Q1-K1-C4
cttttctgtgtaattataaggaaatctacatgaacttcagtcattgttaggcaagttgagcgagatgcgatacgtgttgttctgcaggcaacaatgaaggcaaggtccgatggaaaagaggttatggtggacatccaatattttaaaactaacaatccactgctgttaatcagcttctatgagcaacatcttaagtataaccctccatcttgatcacctaggcgtatttagtgtattgatgaagctgaaggccgccatactgattttgtttgtgtatgcattgttgtaactctattacattaatcgcataatattgtgcaggataagcaagagctctcattttcaagtgccaagctgactgatataacgatagctctctcttataactaccattagtgtgccttaattggaca

SEQ ID NO: 22934 - DNA, 403 bp, Gossypium hirsutum
  Clone ID: LIB3146-060-Q1-K1-C5
cccttccctaaaaaatctcactcatttattttaaattcgaagaatctgctacaccagggactggttactcgaattcgttaattttaagtcgaagaaaaatgggaggtggtagggaaggcgaatcaagtgacaaagggctgattactcatattgctggctatgccgacggacattattctccgactggatcctaccctacacaaggatatcctcctcaaggatataccccacaaggatacccaccggctggatatcctccaccagcgggatatgctccacatggcggatacctacctgcagggtatcctcctcatggaggataccctcatccacctcatggtggatatccaccagctggttattctggacacggttcgcatggacctgggatgggaggattatt

SEQ ID NO: 22935 - DNA, 415 bp, Gossypium hirsutum
  Clone ID: LIB3146-060-Q1-K1-C7
cccacgcgtccgtgggaagaaagaagaacgattagatcataaaaaaagtaaccaaatggaatgcaaagcaacacactccattgaagaacttactttctgaacccaacagtgaaacaaaaccgatgtccccgaattcaaaacaaagcgccacaccagttgtgggtcaaaattatgataaagtaggtgaagataatgaagatatgggaggtaaagttagctcaactgcgggccctgaaacaccagtagctgagccaactaacattgaagtagagaaagaatggagttcgccggcaaggttccctgccgagattaagcgagagaaaaggagagtaaaaggtaggccattgtggtttcaatttgtatgctgctcatctataaattaggatcataaaaggctctaaagactttaaagttt

SEQ ID NO: 22936 - DNA, 410 bp, Gossypium hirsutum
  Clone ID: LIB3146-060-Q1-K1-C8
ggagaagctgctgggcctcgaagacagtcggaaaatgaaaacataagccagaacggaaacccgatgcagattccagcacaacccgatctacagcaagctgaagctggacctaatcccggaactatgagttcattcagttcattattattatggatattgggaggtgcttcgtctgaaggtcttagttcgtttctttccatgtttagagatgtgagagagcaaggacaggtttatactgacccaccgcacgaaaaccgcgcaatgcagaacgtgcagtagccccaggtgccgttacaaaagagatgaaagttggtagagtttagtgttttagatgaatgttgtatagctaatgttctaatcatatataaagaagaacttgcattaatacatggcacaaaaccaatgaacaa

SEQ ID NO: 22937 - DNA, 406 bp, Gossypium hirsutum
  Clone ID: LIB3146-060-Q1-K1-C9
gaaccggtttcctcccaaactgacgttctaactgatcaaagtctatcggagtctagagctatagttcctgttccagcaatgaatgttgaggcactagctgtcatccctgccagcccaaaagtccgaaaaaccgaacttgcacagcgtcgaactaggaggccgttttcagttttagaagtagaagcattggtacaggcagttgaggagcttggtacggggaggtggcgtgatatcaaactgcgagcttttgagaatgccgatcaccgaacttacgtggatttgaaggataaatggaaaacattggttcacacggcgaaaatttccccacagcaaagacgaggggagccagtaccacaggaactgttggacagggtattagctgctcatgcatactggtctcagcatc

SEQ ID NO: 22938 - DNA, 148 bp, Gossypium hirsutum
  Clone ID: LIB3146-060-Q1-K1-D1
cactttcttagtctaaatttatcagttttaatcagcttaaagtttgatgttggtacaagttttacgaaacgaaatgtaaggattacacttcctcttactaataagcttttcatttatggggaagaataagagaagtcgattttatttt

SEQ ID NO: 22939 - DNA, 349 bp, Gossypium hirsutum
  Clone ID: LIB3146-060-Q1-K1-D10
cgagcatggttgaacgggatgctaagtcttttattcccggccgcgatcccaatgtcatgatttctaccaataccacctttcaccagcgggaccctgttgtttccgaggcacatatccccatgaattatgttagggatagtcggattgctgacagagagaagcttttcaacatgttcccggccaccactcctaattacgccgttcttccggaaacgtcggcagctcattcattgtcaattttgcagccaccacctgattcttcaacaagagatgagagggtggctagtagcgttgaagagctgccagctaataaggacagtgttgaaccgaagaaaaggcagggtggggc

SEQ ID NO: 22940 - DNA, 107 bp, Gossypium hirsutum
  Clone ID: LIB3146-060-Q1-K1-D11
gtgcattttgtgaactagggaaatcagtattatttcttaatttttactcgtatgtatattgagatgctcaaattagaataaaatttcaactgaccgatgtttgtttt

SEQ ID NO: 22941 - DNA, 424 bp, Gossypium hirsutum
  Clone ID: LIB3146-060-Q1-K1-D12
cccacgcgtccgcccacgcgttcgcccacgcgtccgggaaggtggagatccaatcagtttgggctctgccaagagaaaccaggaagatttaagtggtcactacaatgaaacgggtttgagaagtgttgagaagaacgagaatccagttcattataactcttccaaaaacatagagacgatccttcttcagatgatgagcagcaagagtcaaaacgggggcgctccaaattggaacgttggacaagccataaggaaagggattacagtatcaatagcaagtcatctgcttcctcaaagttcaaggagattgagaagattgataatgtggatgccgcagaatcaaacaaaactctagatgaacctggtaagttggtcgagcctgctgagaaccatcaccctttgtctgacaataaaactgctggtg

SEQ ID NO: 22942 - DNA, 415 bp, Gossypium hirsutum
  Clone ID: LIB3146-060-Q1-K1-D2
cttttaaacccctccctattttctctgctagggttttgacctagccttggggcgtcgttgccatcccgccgctcctccgccgtggacgatggtcggagcggcacagaacgggcttttcagccctgttacatgtttaaaggctaagccttctcagcccacggatcgagagaaaaatgtctctctcttccctcttttgggttcgattttagggacggtgagaaggactcggacgacacaaccacggaggattttaggtaagttttcccttcatcctcttcttattttacgcccctttttttattaagtagatttataataaaaaataaaaagaaactggaaaacgaaaagaaaacaagtaaagaaaatcaaaatcaatattttcaaacttctgttttgcttttttgaattactagtg

SEQ ID NO: 22943 - DNA, 407 bp, Gossypium hirsutum
  Clone ID: LIB3146-060-Q1-K1-D3
cttaaagttagtaggagtagttttttatttatgtttaatgttatagctggtatgtcagctacattttgtgtgtaattttagctaagctttagtcatgtattagtgggagcagttatacattaggtaactgtcatattttattgtaacataaattcttctaagtcaatgaaaaatatctggtttttggagataaaaaaaaaaaaaaaaaaaaaaaaaaaaaaaaaaaaaaaaaaaaaaaaaaaaaaaaaaaaaaaaaaaaaaaaaaaaaaaaaaaaaaaaaaaaaataaaaaaaaaaaaaaaaaaaaaaaaaaaggggggggcctatttaaagggccaatgtttaaaaaccgtgatttccaggaaataactttttttatggggccccaaaaattattcccttgggccg

SEQ ID NO: 22944 - DNA, 245 bp, Gossypium hirsutum
  Clone ID: LIB3146-060-Q1-K1-D5
ctggaatagggcaccaaatgacaccattaattgtgaaagaagcgagtgattggtttgatcagttcctcaaataataattctaagggcctctgtctatgtttttattgattgtagatgtaatgtatttcctaatatgtatgtttcatcatgaatgatttgatgagctcaaagatcaaatctcttagtgtacttataattcttaataagaataaaataatttccttcagaaaaaataaatatttttt

SEQ ID NO: 22945 - DNA, 409 bp, Gossypium hirsutum
  Clone ID: LIB3146-060-Q1-K1-D6
ctttcaaatataaaaatgataaacccaaatgttacgaaaaccaggaaaaaaaatagagtatccagatatttaaatcgaaaatcacctttgaattttggtggccttttggtgtatttcagtatgcgtaaatatttgcaggtacactcggtggcttttatagccggaaaaataaaaatttaaaaatctattttttctttttgctatttttccattatattttgctgcttctcgtgtattccttttgctgtgtttgtttttccttctcgtagtttctgttgacgtggaggcgtacggagaagaaatcactcgtggggaggccgttcgtgagaggagcaatctggtgacctggtgtttccagaggcttcccctgcacgggccatttggaccaattctgggattgggcttagtg

SEQ ID NO: 22946 - DNA, 413 bp, Gossypium hirsutum
  Clone ID: LIB3146-060-Q1-K1-D7
cccacgcgtccgcccacgcgtccggtgaactcagaggacataaaggaaactgggtacacatatatcatgccaaagaacattttaaagaagttcatctgtatagcagatctcaggactcaaattgctggatacttgtatggaataagccctcctgataacccccaggttaaggaaatccgatgcattgccatgccaccgcaatggggtactcatcagcaagttaatcttccatcagctcttcctgaacatgatttcttgaatgatctggagcctttgggatggctgcacacacagccaaatgagcttcctcaattatcgccacaggatgtgacatcccattctcggatattagagaacaacaaacagtgggatggagagaagtgcataatcttgacatgcagtttcactcccgg

SEQ ID NO: 22947 - DNA, 408 bp, Gossypium hirsutum
  Clone ID: LIB3146-060-Q1-K1-D8
attgatcaagagagttcttgacaactttgtcccagacgagttttgccctgatccggttccagatgttgtgcttgaagccctggaggctgaggatcctgccgaagccagggaagggtttgtcacaagctttccctatgttgcatctcctccaatttattcaccgccttctgcaacatcagttgctagcatcattggtgaagttggtagccaatctcagctgagaagaagtcggtcatcggtcctcagaaaatcatacacaagcgacgatgagcttgatgaattgaattcacccttggcttcaatcttcaatgatggcttccgatcctcacctgttcaatcgaaacctatctggatatcgaaggggaacaactaccaaaatgctattagatatgaactcctaagagatgt

SEQ ID NO: 22948 - DNA, 320 bp, Gossypium hirsutum
  Clone ID: LIB3146-060-Q1-K1-D9
gatatatcttggaaagaaaacgctcgatgttttattgcctattcactgctgatgtgtgtggatacattgcaggaacggattgcgacccaatgcttaggaggcgcagcaggaggccacgacggctagccactagacctgtacgtggcagtgtatgcacactgatgtgagaaaagggcgataggggggcctgctgaacagggagaccatagacttatactctgcatatagtgacatgtgggtccggacgctatgggcccatggcttatgacaacatgtggatgctcttgtgatgtggatggtggatcatgcgtggagggggc

SEQ ID NO: 22949 - DNA, 388 bp, Gossypium hirsutum
  unsure (1)..(388): unsure at all n locations; Clone ID: LIB3146-060-Q1-K1-E1
aaaaaaatggggttgtagagcgttgtcacttctcagagacgtggagtaatgctggactaattgattgcgtcaaataaaatcctggatttttgctggttctggctaatcatgcaaattttgaaatacatttcaagtcaatgttgtcttatttttctgattaaatattttagggtgagataggaaaaccatttgcatcccagagttatgatttgattgctcatacttctgattaaaaataaatgtgtaccaaaccaagttcaaagcattaaatcttcatatttttcatcttcttgnacaaaaaaaaaaaaaaaaaaaaaaaaaaaaaaaaaaaaaaaaaaaaaaaaaaaaaaaaaaaaaaaaaaaaaaaaaaaaaaaaaaaaagaaaagg

SEQ ID NO: 22950 - DNA, 358 bp, Gossypium hirsutum
  Clone ID: LIB3146-060-Q1-K1-E10
cggacgcgtgggcgagaagctttctcaagattcttcgaggctcgcacgctataacaagaagcccaccatcacctcccgtgagatccagactgccgtaagatggtcctgcctggggagttggccaagcacgctgtttccgaagggactaaggctgttactaagttcactagttcttagtttccgtaagtctaaaatgccaaagaattgtagttttgtataatttattttatttgagagttgcatttagttagtttaagatatatttttcatgcctttttgattagtagaaaaggttggtctcaaagaaatgaaaggtggattttattattaatattaaaaaccatttgggccttacatt

SEQ ID NO: 22951 - DNA, 408 bp, Gossypium hirsutum
  Clone ID: LIB3146-060-Q1-K1-E11
gggaactacagggaagaaaatggatgatgaatatcagaatttcttggctgagctaggtggtactgtccctgattcagctaacaagcaaaactcttcgtcagtcagttctggaagcaatcctccttgggctagcagcactggaggtgctggaagtgcacaccctggcttaggttccaatgctgttaagccccccaaagaatatgatgatactaatttgtacattggatacttgcctcccagtcttgatgatgatggtttgattagtttgttttcagcttatggtgatattgtgatggcaaaggtaatcaaggaccgggttactggactgagtaaagggtatggttttgtgaagtatgctagtgttgacatggcaaacaatgctattaagggaatgaatggtagtcttct

SEQ ID NO: 22952 - DNA, 406 bp, Gossypium hirsutum
  Clone ID: LIB3146-060-Q1-K1-E12
tggagatcaaatattgtaccgaaaagttccttcaggattccggcttaccccacatcacgatccggctatgcggtttcatgcaagtaaatgtcatctataactcaatctttgcagatatgtatacgtacatatgtgtgtgtatatgtgtatgatgtatatatgtatgtgtgtgtgtgtgtaaagttccttcaggatttcggcttaccccacatcacaatccggtatgcggtttcatgcaagtaaatgtcatctataactcaatctttgcagaaatgtatacgtacatatggatgtgtgtgcaatgtatgtatgtctgtgtgtgagtgcgcgtgcgtatgtatgtattaattaaaagcatagaaacatgatttcttggaagaaccagtttgtcagtatgatggaatta

SEQ ID NO: 22953 - DNA, 415 bp, Gossypium hirsutum
  Clone ID: LIB3146-060-Q1-K1-E2
gcaatgggagagaaaaagaacggaaacaagcatggaggaggggatgggaaaatgaaggaaaagagttcttcaacctctgttttcaaatttgagtgtctctgtgatggttgtgcttccaaaatcctcaaatgcattaatcactttgaaggggtggagacggtgaaaccagagatgagttcaaacaaagtgacggtgataggaactgcggatcccactgccattaaagagaaactcgacaagaaaacgaagaagaaagttgagctcatttcttctcaacccaagaaagatgataacaaagaggaaaaaaaagagaaaaaacctgaccaacagaaaaaccaggattctgataataaatcagacaaaaaacccaaagaggccccggtaacgactgcggatttgaaagtgcaattgaaat

SEQ ID NO: 22954 - DNA, 406 bp, Gossypium hirsutum
  Clone ID: LIB3146-060-Q1-K1-E4
attgcttcttatcatttgtaacagctctcgggagcatagttagtcgagttaaaaacaggatcttggtcagtgatgctgaacccaattgtcaacaaagtccatccagctccagagaatctaaagacctaacagactcgcacatcaaaaccttggatgactctccactagaccagaaaacagagaagaaattgacacgctcgagtgttcaggattgtaagatgacgagaaccagcctaagtggaagcattcaggctaaggggattaagcacgagaaaggaaagagcttgaatttccaatattcaacagaagaacttggaggtggactcaaaaattctgcaaaaggtgatagtggaaggaagtcaggtgctcggagatgtctgaaacctgatcctgtataccagaaaca

SEQ ID NO: 22955 - DNA, 348 bp, Gossypium hirsutum
  Clone ID: LIB3146-060-Q1-K1-E5
ttaaggaacgacccacgcgtgcggaataaaatttgactgagaggactttcaatttttttttataagcagttaaacttgacttggggtatggatttattaaaaattaggatcttagatcgttcttgcttaagatcctaattttgaaacacattaaaagtcactgttggataaatattcctgttccccttttaaggtaagataagaaaaccatttgcaatccaaaagatagaatatgattgctcataactttgaattaaaaataaatgtgtaccaaaccaagttcaaagcattaaatctgtcctattttttatcttctttaacctaacaaaaaaaactttttaaaatttt

SEQ ID NO: 22956 - DNA, 391 bp, Gossypium hirsutum
  unsure (1)..(391): unsure at all n locations; Clone ID: LIB3146-060-Q1-K1-E6
ggttgcttggcttcgagcttcgtgatggggctgtcggcttggtttgtttgggttgaaggtgggttccacgttaaaccgacggctttgtctctttatttgggttacttaggattgagtatggcttggcatccgactgtgctttggatgggagctagctgggctgggttgcttgtgagtttggcgatggttgggaccttggtcgggtgttcaagagattttggaaaggtgaatccgattgctggtaactcggttatgccttgtttggcttgggctgcgtttttggcgactgtaaatctaaaacttgtcttcctttgaagcatataccaccatcttttgttctgcaagaaatagtattgttttttttttccctcttatgaattaanaaatttaa

SEQ ID NO: 22957 - DNA, 418 bp, Gossypium hirsutum
  Clone ID: LIB3146-060-Q1-K1-E7
acgaattgtccctgttaaaatatgtcactgtgattattaatggccaccgctgaacctggggttggagtcactgagcaacagcccgcggcagcagaggagccaaagccggcggaaaagcctgagaaggagaagagacccatagctccaaaggagaaaaagcctaagcaacccaaatccgcagcacatcctccttattttcagatgatcaaggaggcgcttttggctttgaaagagaagagtggatcaagtccgtacgctatagcgaaatacatggaagagaagcacaaggcggtgcttccagcgaatttcaggaaaatcttaggtcttcagcttaaaaactcagctgccagaggcaagctgataaagatcaaggccttttacaagctcttcgaagccggcaaaaaagagagagcccctg

SEQ ID NO: 22958 - DNA, 401 bp, Gossypium hirsutum
  Clone ID: LIB3146-060-Q1-K1-E8
aaagcattatactcgtactaagaagaaactagttgtaggcagctattatatcgtttctcctttctcccttctcttaagagtagaatgattattggaaggttacgccaatggttaagtctactggtctgtgtgcttgctgttatactactcaaatctgaaggcgctagtgtagggattacttatctgcaggatgccgtagcgaaaggagctgtttgtttggatgggagtccaccagcttaccattttgacaagggctctggcgctggacttgataattggattgttcacatggagggtggaggatggtgtgaagatgtgccgacttgcctctctcgtaagaacaccgatttagggtcatcaaagcaaatggtgaagcaatttggcttctctggactcttgag

SEQ ID NO: 22959 - DNA, 390 bp, Gossypium hirsutum
  Clone ID: LIB3146-060-Q1-K1-E9
cccacgcgtccgcccacgcgtccggccatgtacaggaagatttacagaggagatttcaagtgcccaccttggttttcccctgaagctcgtagattaattactaagcttttagatcccaacccaaatacccgaatcaccacttcaaaggtgatggactcgtcttggttcaagaaatcaatacccaagactattagaaccaaggaggagctagaatttgaagccttcaatggcgagaaatcatccaagcctgagactctgaacgctttccatatcatttccttatccgagggcttcgatttgtcaccgttgtttgaagagaagaagagagaagagaaagaggagctaagattcgctacaacaaggccagcgagcagtgtaatatcgagactg

SEQ ID NO: 22960 - DNA, 419 bp, Gossypium hirsutum
  Clone ID: LIB3146-060-Q1-K1-F1
gagattttgtagctgctgccactgatctgcggcccaactgcggtgttaatcgcttgctgattgacaagctctcagttaaaactcctacaggtgaagcaaagttgaaagtcatgaaggaaatagctaaggatcacaacatagaatgggatacaagtgaatcagaaaaggagctgctcaagcctcctgaagagcttattgaggggccacgtaaattcgttagtgcaaccagcgtacctgtgaaacctgctacaaatcattgtcccgaaccaaaagagtctatgaccagaggagaagagggccataatcgttttaaagacacggttgcagctgctgaagcagcagaagaatctgcaaaaaaagcaattgctgctgcacaagctgctgcatatttggccaaccgagagagtaatctatttagt

SEQ ID NO: 22961 - DNA, 326 bp, Gossypium hirsutum
  Clone ID: LIB3146-060-Q1-K1-F10
ctgagactataaaaatggggatttaaatcttttgaaatactgcaaatactaagggtgatttttgtgggtagctgtaaattccaaagcttcctgcaaaggtttttaatttcagcatgtactaaataattcctaggatccgcagtagctcctagcaatattttataggcactacgtactgagcattttccctattgttccactttccacacctgaaaatcttcacgatcggtctctgaaagcggaatctgtaggattatttgagcatcacctaatttaaaggtattcatgttcaaaatgcatcatttgtcggatttgcaacagacaat

SEQ ID NO: 22962 - DNA, 412 bp, Gossypium hirsutum
  Clone ID: LIB3146-060-Q1-K1-F11
cccacgcgtccgcttgataatgtacaagtgatttgccattcaactataggctacaagaatgattcgaagccttattccttcttagttgacactaagccttttgagaacaaagaaaagtcttcagatgctactgaactgagcacagatgatactgtgaaggaaaatcagaatggggtcatgcatgatataaagagcgatgaactggattcagatttctcaatatattcggagaatacacgagatgaatggacagcttctgaacttgattgttccaacagtgtacacgacttttctaatggtaatgaaaaggaggtccgagatattgtgacatttaactctcattcttcaaagaatatggattcatttcaggactcggttttttatttggacaaaagtgtaatggattgtgaat

SEQ ID NO: 22963 - DNA, 413 bp, Gossypium hirsutum
  Clone ID: LIB3146-060-Q1-K1-F12
cccacgcgtccgcccacgcgtccggtggaaggaatttactgaatctgaggtgcctattacctttcaaggaaaccatatgaagccagtgcttgatttgatcaatccacaagataaaggtccatggggtgctctctctccaattcccgagaataatgccattgctgttgatcctcaggggggatccatcttttctgctgctggtgattcttgtgcatattgctgggatgtggagaagagtgaaatcaaaatggtatttaagggacacacagactatttgcattgtattctatcacatgcctcttccagtcagattataactggatcagaggatgggactgcacgaatatgggattgcaaaagtggtaagtgcattaaagtaattgacccactaaaggacaagaagttgaggggcg

SEQ ID NO: 22964 - DNA, 147 bp, Gossypium hirsutum
  Clone ID: LIB3146-060-Q1-K1-F2
cgacccacgcggccgggattcttttttattgttactcttccgtttacatttgtggggtcaataacatgctctgggacgggttttttttcttcaatcctacatttgattctcaacagagactcccaatggtaatgattcttgatcaca

SEQ ID NO: 22965 - DNA, 432 bp, Gossypium hirsutum
  Clone ID: LIB3146-060-Q1-K1-F3
cgcccacgccgtccggtaagatttaaggctccaaaagtttttttggtaaaaatttcctattaaattgggcttgggaaagcattaagttctaaagaacttttaggtcaatattttgtaataggttgataggccctttttgaccggggaattaacccgacccgttcgccaccccaaataaaaaagttttattccggggttggggccaaaggaattttagggatttggggggattaattttccaaaaagagagatttcttagccataattgagaacatggcccaacctatcacacaccaaaggagaaagtgggcggcttttcatacttaaaaaggggatccaaaaatgtgtctcctattctcttttgacacaaatatacctgtgcaaaggggtctgtgcacataaaagtgctctgtgacgacacagctctcctct

SEQ ID NO: 22966 - DNA, 404 bp, Gossypium hirsutum
  Clone ID: LIB3146-060-Q1-K1-F4
gaaaatatctcaaatctcctcctcctcctcagaaatcttagtatcatcaccatggcctcaaatcccaaggtcttctttgacatgactatcggtggtcagcccgctggtcggattgtgatggagcttttcgcagattgcactcctcgcactgctgagaacttccgtgccctctgtaccggcgagaaaggcgtcggccgcagcggtaagcccctccactacaaaggctcctctttccatcgtgtgatccctaactttatgtgccaaggaggtgacttcacggccggaaacggtaccggaggtgaatccatctacggatccaagttcgctgacgagaacttcatcaagaagcacactggtcccggtattctctcaatggctaacgctggtcccggaactaacggatc

SEQ ID NO: 22967 - DNA, 126 bp, Gossypium hirsutum
  Clone ID: LIB3146-060-Q1-K1-F5
gtgcattttgtgaactagggaaatcagtagtatttcttaatttttactcgtatgtatattgagatgctcaaattagaataaaatttcaactgaccgatgtttgttttaaaaaaaaagaaaattaaa

SEQ ID NO: 22968 - DNA, 271 bp, Gossypium hirsutum
  Clone ID: LIB3146-060-Q1-K1-F6
gtccttatttgaaatttgctcattttacagctaatcaagccatattggaagctttttcaatggctaatagagttcatgttattgattttgggctaaaacaaggtatgcaatggccagctttaatgcaagcacttgcattaagacccggtggaccaccggcgtttcgattgaccggaataggaccacctcaaccggatgatactgatgcgttgcaacaagtggggtggaagctagctgaattggccgaactcatcgggatcgaattggattt

SEQ ID NO: 22969 - DNA, 403 bp, Gossypium hirsutum
  Clone ID: LIB3146-060-Q1-K1-F7
aaaaggattatgaacagacagttaaacaagctaattaagaaagacactgctgcggaaatggctaagaagcgagagcaggagcgccaaagactggaaaaacttgcagaaacaagccgattaagtcgtcaaaggcatcgcagccgcagtaggagttacagtcgctctcctccaagaagatatcgacggagtagaagtccaagtaggagtaggagttctagaagatattattctcggtcacgatcacgatctaggtcccactcttactctcattcacgttcacgctcaaattcccgttcacccagggtaagaagccgttcaaggtactgagaaagtgattgacataaatgttgcaggcaaagctatttgatatattatgtaaagcgatgctagttttgggtagctt

SEQ ID NO: 22970 - DNA, 380 bp, Gossypium hirsutum
  Clone ID: LIB3146-060-Q1-K1-F8
ggaaaaaccgggccgacccacgcgaacgaaatggattatgatcagtacttgcaaacaagttttatgaagaaagacactggtgtggaaatggcgtggattctatagcatgactatcaaagactggaaaaacttgcagaacaagatggataattttgcaaatggatctcatccgaattatgagaaacagccggtcttctgtaacaagatataaaagggtgtgacgtacaagtaagactctgcactataaaagatattattttcattcagtgataccttactttatgtgctactgatgtgactttactgcacgcaaaagtaccggaggagaaaccatataaagatccaaattggcttacgagaactttatgaataaacacact

SEQ ID NO: 22971 - DNA, 346 bp, Gossypium hirsutum
  Clone ID: LIB3146-060-Q1-K1-F9
ctgagattagaaaaatggggaataaaatcccatgaaattctgcaaataataattgtgatttttgtgggtagctgtaaattccaaagctttctgtaaaggtttttaatttcagcatgtactaaataattcctaggatccgtagtagcttcttgtaatagtttataggcactacgtactgagcattttccctattgttcccctttccacacctgaaaatcttcacgatcggtctctgtaagtggaatctgtaggattttttgagcaacacctaattgaaaggtattcatgatcaaaaaaaaaaattaaaaaatataaaaaaaacaaaaataaggtcgatcactctaaa

SEQ ID NO: 22972 - DNA, 417 bp, Gossypium hirsutum
  Clone ID: LIB3146-060-Q1-K1-G1
ggggtttggtactctcgtttgaatcaaagaaaccataactgtttgttctttttttctccctttgaattgaaacgattgaaagaagaaatgggttcagaaggatcatgtgttgttgtacccaggagtttcagattgctagaagagcttgagaggggtgaaaagggaattggagatggaactgttagctatgggatggacgatgctgatgatatatacatgcagtcatggactgggactattattggccctccaaacactgttcacgaaggatgcatatatcagttgaaactgttctgtggcaaggattatccagataatccacctagtgtgaggtttcaaacccggataaacatgacctgtgtcaatcaggaaactggagtggttgaacctagccttttccccatgcttgctaattgg

SEQ ID NO: 22973 - DNA, 300 bp, Gossypium hirsutum
  Clone ID: LIB3146-060-Q1-K1-G10
cccacgcgtccggaaagttatagttactaacaaattgtctagtgaaagtaaatataggatgccactttccattaataaaacatcatccatctttgaggattccttaaaaaaaaaaaaaaaaaaaaaaaaaaaaaaaaaaaaaaaaaaaaaaaaaaaaaaaaaaaaaaaaaaaaaaaaaaaaaaaaaaaaaaaaaaaaaaaaataaaaaaaaaaaaaaaaagaagaaataaaaaataaaaaaaaggatttaaacccaaaaaaaaaaaaaatcttcgccctttataataccccggcttgcct

SEQ ID NO: 22974 - DNA, 399 bp, Gossypium hirsutum
  Clone ID: LIB3146-060-Q1-K1-G11
gcaaaggaagctgttggggaatatggcggttttgcagcactggtggaggcgattgaagatggctccgtgaaggggaaggagttcgcggtgttgacactgttgcagttgtgcgctgataacattagaaaccgtggtttgcttgttagagaaggtgggatacctcctcttgtggcgctttctcagactgggagtgtaagggctaagcataaggtaattttagccgatttggattgccctatgtttgaattaagaacttgaaatagctgtctatagaagtaactttattttgattgattcccataggataaggttgaatgcttgataatcactagatagttgaagcttaaaactgtgtttctaataccaatgcaggttatagtttattgaattgcttgattg

SEQ ID NO: 22975 - DNA, 381 bp, Gossypium hirsutum
  Clone ID: LIB3146-060-Q1-K1-G12
ggaagacggcggtgatagtgaaacaagaattggagacaccgaagacggaagaagaaaaagccaaagatgccaacaaggacgagaaaaaaagtgaagaatgtggcgaaaaagacaagaaagaagccggtggagaagaaaaagacgacggcaaagacaagaaacaagagggtaacaacaaagaagcccccgccgccgacgcagctccggcgactgaaggcgctacggaagagaccaaagtggcggtggagctgaagaaaaatgaatattattattacccgccaaggtatgccactgagttttacgcataccctccacaaatgttcagcgatgagaaccctaatgcttgcacttgaatgtaaaaaactccaattgttaggggca

SEQ ID NO: 22976 - DNA, 309 bp, Gossypium hirsutum
  Clone ID: LIB3146-060-Q1-K1-G2
gggcgacccacgcgtacggaaaataggtactctcgtttgaatcacagattccatttttgtatgatcaccattgccccctgtggggtggaactattgaaaaaaaatatcggtggagaacgatcatgtgtggttgtacccaagattttcacatagttcacatatctcgctaggggtaaaaatcgaatcctctataccactgagaaatatgggatgcacgatgctgatgatatctacttccaaagatggactgtcaatattgtgggccctaacaaatattggccacggaggatacatatatcacgggaaact

SEQ ID NO: 22977 - DNA, 389 bp, Gossypium hirsutum
  Clone ID: LIB3146-060-Q1-K1-G3
catgtatcatctgattccgcgagccccataaaacccatagagcacaacaaaacaatcgagtctgctcctttgttcctttatcaaagacccaggacattttcaaaacacatgatggctatcttcctcctcagattcgcaacgagggcatctggagtttgcagttactcttttatacttcagattagccagggatgggatatagttccaggaaatcctccatatgaggattaaaatcttttgtggtagttgtaaattccataggttcttgtaaaattctttagtttcggtctgtactaaataactattaagctccaaactagcttcttgtaataagttgtatgcgctccgaactgaagactcacctgatttgtcacctttccacacctgca

SEQ ID NO: 22978 - DNA, 407 bp, Gossypium hirsutum
  Clone ID: LIB3146-060-Q1-K1-G4
gtctgattccattatcacaaagaatatccttttctcgtgttcttaaagttcattgaagtgttttatttttaaattctaagatagcagctttatgaaatgtataaaatgtcgcatagttgcatcatggatgaaatattagagaaagaaagctacattttttcaaagatcaaattattaaagctggtctactatcctcaatacaccctgttgtggagtcaaatgtggaattggaggaattagaggtgcatactaacattcaattattgaaagaaaaattgctcctttgagtggactcattttacacctcttcttttcatttacgtcacatttaatctcttattttatttccctctcttagcagctcctagcttaaccggcagtctctaggaagctattgtcgtcagatc

SEQ ID NO: 22979 - DNA, 388 bp, Gossypium hirsutum
  Clone ID: LIB3146-060-Q1-K1-G6
cacaatgatggtaatattcaaaaccccaaatccctgtctccttttatgtcttgtggtactctgtttcactatcccaatcgcattaaccaaggcagaagcaactacaaccagcctccctgaaaacgaagcgaacaatgctgaacctgtgagcaacaatgctccatttgctaaacttgttgggaacaacgggaaacaatcccaactgggttatcaacagcagaaagacccaaactatccacaacaaggcattaaccagccactatcgtcagggttgaaccagccgtattcggctacgaaccagccttactctgccgggtttaatcagccgttttctagtatcagtcagccatttgggggcaccaaccaaaggggctcaatggaaaacgtt

SEQ ID NO: 22980 - DNA, 301 bp, Gossypium hirsutum
  Clone ID: LIB3146-060-Q1-K1-G7
gagaattgcaagaaggaataccccaatgcatttattagaatcattgggttcgacaacgttcgttaagtgcagtgcattaatttcattgcctacaagcctaaaggctactaagttgtttacttccctcctaggaattccatttgtttcaaagttgtacttaaattaagcccctcaaacccccccccgctttttctttttcttttttaaatgaggtatttggcttggggtatttctctttgttttgtttaggatttccaatggaacggatgacaactaatgaataaaaaggtagattcttgcc

SEQ ID NO: 22981 - DNA, 388 bp, Gossypium hirsutum
  Clone ID: LIB3146-060-Q1-K1-G9
ctagatcggagggccgcccttttttttttttttttttttttttttttttttttttttttttttttttttttttttttttttttttttttttttattttttttttttttttttttttttttttttttttttttttttttttatttttttttttttttttttttttatttttttttatttttttttttttttttctttttttttttttttttgacaataaaaaaaaaatttcttttttttttttattcataaaaaaagggataaacaattttctttttctacggtatgggggggggggggttaacataagcaacgaggttcttggacgagagcataaagggcttggattttccggtcattattgatttattgatgatattttatgatatc

SEQ ID NO: 22982 - DNA, 417 bp, Gossypium hirsutum
  Clone ID: LIB3146-060-Q1-K1-H1
cccacgcgtccggaaaaaagcttaggagaaattgatcgtgctcgagcaatatatgtatttgcatctcagtttgctgatccacgctctgatgcagatttttgggataaatggagggagtttgaggtgcaacatggtaatgaagataccttcagagaaatgttgcgtattaaacggagtgtctctgcaagttatagccagacacacctcattctccctgagtatctgatgcagaaggatcagaacatcgatgaagctaaggacaaaatgaaacaggctggtatctctgaggatgaaatggctgctcttgaaaggcagatactacctgcggctgataatgctattgccaaagacaactctaggaaagtagggtttgtgagtgctggagttgagtcacaagccgatggtgggttgaaaaca

SEQ ID NO: 22983 - DNA, 426 bp, Gossypium hirsutum
  Clone ID: LIB3146-060-Q1-K1-H10
gccctttcacatacccgtgcctttgacaagctagcgtcgctcacattcgaaaacagataagtttctgccccaactatttcaccttccgaatctctggcaataactactgtaacagcgagttgtaaatcatgctgaaaagccgcatcaaaattaagctttaaaactccaacatcggggggtttctagaccactctatccatagatctaagagaaggactagaaatctcttgattcaggctcaaatcacgactataaccttgaataaaccctaacaattccatcaaggatggtttaaccccttcatgaacaagtttatttcttctaaaccagagactccatatagagattaccagttattgcttctgctgatcactcgcaatagaaaattcttgaataaaacgatgcttataatttgacaactcactg

SEQ ID NO: 22984 - DNA, 407 bp, Gossypium hirsutum
  Clone ID: LIB3146-060-Q1-K1-H11
tggacttctacattgatgatgacatgattcatgttgttgaatccatgccagtgaaaagatatggtgattatttccttcgacagattgtcaagcttgaaggagtgatcaatgacatggatcggataaagctggaatagatgacctacttgattattttattacttgtactactttagcgaaggatttattttatttaaatggcattttgatgcccattttgtcttggaatgggtagaatctcacgttaagatatataaatggttcctttttgagagcactgtgagaggggatttatgcatttgcgggcttgccagaaaatttttgttgcgactgttgctttgtttgttattctttaactttgggttagccctatattcaaaatattgatgtgatggatcatagtcatc

SEQ ID NO: 22985 - DNA, 326 bp, Gossypium hirsutum
  Clone ID: LIB3146-060-Q1-K1-H12
ggaaaacttacaatatccatcatcattagtttaagggtaactagattgctgtaggttctttggagtttaaacccaatacccactttgtactgcatattcgcccgagccttggcatttccaaactaacaaatccttcgaattacacccatgaagaggaatagaaaagataccagttgctgtggataaaattctatttaaatggcatattgatacccatttagtcttgaaatgggtagaatctaacgataagaatatataaatggtaccttttatatagcactgggagaggggattaatgcattttcagacattgggggaggcttttt

SEQ ID NO: 22986 - DNA, 334 bp, Gossypium hirsutum
  Clone ID: LIB3146-060-Q1-K1-H2
cccacgcgtccgggaagacgcagctagttacgcaagctccgaacttttcgaattggataatctttcagctataggtattgaaaggtatcggcaagagttgcctgtgtatgagactacccacctcgatactaatcgagccattgcaaatggtttgattgtgtgattacccctaaatgcatgcatacagcaacaaaactattagtactagttaactagctagttttattaattaaattagttaaatggtttggggggtttacatctagaagtaatacaaatttctgttttggtagagccgtactgaagttaatttaccctcttttttgttggtttt

SEQ ID NO: 22987 - DNA, 409 bp, Gossypium hirsutum
  Clone ID: LIB3146-060-Q1-K1-H3
atttaattcccgttttctaatctttttgggaaatcggtagcaaaaaaatgtcgtcgtcggggaggaagatcacccttaagagctcggacggcgaatcattcgaggttgatgaagcggtggcgttggagtcgcagacgattaagcatatgatcgaggacgattgcgctgataacgggataccgttgcctaatgttacgagcaagatcttagcgaaggtgatcgagtactgcaagaaacacgtcgaggctcctaagacagacgatcgatccgccgatgacgagctcaagagttgggacgctgactttgtcaaggtcgatcaagccactctctttgatctcattctggcagcgaactatttgaacatcaagggtttgctggatctcacttgccaaactgttgctgacatgat

SEQ ID NO: 22988 - DNA, 295 bp, Gossypium hirsutum
  Clone ID: LIB3146-060-Q1-K1-H4
gaggcactcaaagatagcaccaggattagataccttgacggccacttaaagtgccttctaaaagcaattcaggagggtgttaacatgaagggtcactacatgtgggcgtttttggatgacttcgaatggacttctggatatactcttaggttcgggttcacatacactgattacaagaacaacttgagaagataccttaaatattcagcttattggttcaagaagtttttccttaattaacaacaacaatgtcacaatggattgcaacacaacagaataatagtattacttcatt

SEQ ID NO: 22989 - DNA, 410 bp, Gossypium hirsutum
  Clone ID: LIB3146-060-Q1-K1-H5
cggacgcgtgggcggacgcgtgggcggacgcgtggggatggaacatattcgccttcgactaacctcttggtttaacaatcgtcgtgaaacaggaataagatggacctcaattcttgttccctccgccgagaagcggatttcataggcaattgcagatgctcattgctaccaagtacttagagcgaatgaagttgagtttgagatcgtctcaactgagcggacaaacataggtgatattaggagtcgtgtgtgttcctgtcgccgttggcagttatacggtttaccgtgcgcgcacgctgctgccgcacttatttcttctgggcagaatgttcatctgtttgccgaaccttgttttacagtggcaagccaccgagagacctatttgcaaatgataaatgctatcccggata

SEQ ID NO: 22990 - DNA, 407 bp, Gossypium hirsutum
  Clone ID: LIB3146-060-Q1-K1-H6
ggctgagctaattcggcatcccaacatcatgtctcaagttcgtaaagaattggactcagtcgttggtcgagaccgcctcgtctccgacttggacttgcccaatctaacctacttccaagccgtcatcaaagaaaccttccgcctccacccgtccaccccgctctccctccctcgtatggcctccgacagctgcgacatcaacggctaccacatccccaagggcgccaccctcttggtcaacgtatgggccatttctcgagaccctaacgagtggaacaacccgcttgagtttcggccctagaggttcttgcccggcggcgaaaggccgaacgctgatgttaggggcaatgattttgaggtcataccgttcggcgccgggcgtaaaatctgtgccggaatgagcttgg

SEQ ID NO: 22991 - DNA, 412 bp, Gossypium hirsutum
  Clone ID: LIB3146-060-Q1-K1-H7
aagaatatcagggaagggcaaaggcaagttaaagaaaaattcggaatcattgaatccgagtgcgaggaattgaagagggaaactaggctcataatccagcaaagtgccagaactcaggttaaacttgctcttatgttccgcatactgaaagcaagggaagccggcgagttgaataccgctgccactctcactgaaatgctccgtgaaatagtaggaagagagagggaggaaagcaaagctgacatctgaatgactatgataagcttcctcggtgcagctgccccaaatgttaagaaatagaagcgtgtgacaattaagcgcgtgttatctttcagcattgccgttttgttattaagtactgctaatctacttcgttttatgtttggtatgttaaacttagaacttatcaaac

SEQ ID NO: 22992 - DNA, 406 bp, Gossypium hirsutum
  Clone ID: LIB3146-060-Q1-K1-H8
cccacgcgtccggctggataaacggaggagttctgacaggaatcaatcagtttctcccgagattataagttgcaagcttggcagcacttgcacaggttgttctacatcagatctagatgaaatgaatagatttgctgaagtcaatacatcatcgaattccagtggtatcagctcctgctcacatgaggatattgggaatgaatctacagcaggtagtagtgaagggagcaatgtaggtgatgataacccatcgtcttctcagagtgattcaagtgacgatctaaaatcttctgtggaggatgaccatgctgatcagaacaaagtgttccaagatggattgctgaaagatttagaggttttggattgaagttccataaatttcgttaatgaaaattatgttttttct

SEQ ID NO: 22993 - DNA, 408 bp, Gossypium hirsutum
  Clone ID: LIB3146-060-Q1-K1-H9
caagaccagctaattgacaattctcagcatccacaaagctcaaaaaacgataccaatgttgttgggctggctcttggtcctccacaatcatctatcatagggttccaaaatattggttcttcaatgcagccatcaaatcttaatcctttcaacgattggacgaagaaccacgataagggagttgaggactttttatcagaggaagagattcgcgtaagaagtaatgaaatgctcgagaatgaagaaatgcagcaccttctccgtctttcaatatgggaggtaatgcttccattaatatgacagaagacagtgggtacgggttcccaaattacataccatccccaatgccaaactttgtagacgaagaccgttcacgttctggcaaagctgttgtagggtggttgaaga

SEQ ID NO: 22994 - DNA, 273 bp, Gossypium hirsutum
  Clone ID: LIB3146-061-Q1-K1-A1
cccatgcgttcgttcgaaatttccttttctttttcgattttttcctccgatttgtatttgaagtgatggatgcaggatcaaaggtgaagaaaggagccggaggaaggaaaggcggcggtccaaagaagaagccggtttctcgttcggtgaaagccggattacagtttcccgttggtcgaattggccgatacttgaagaaaggccgatactctcaacgtgtgggaaccggtgctccggtttaccttgttgctgttcttgaataccttgctgctg

SEQ ID NO: 22995 - DNA, 408 bp, Gossypium hirsutum
  Clone ID: LIB3146-061-Q1-K1-A10
gtaatgcacaaaatattaaggataacaaaggaagtgaggaaagaactacaatcaatcatgtggaagtatgttgggattgttcgatcaacttcaagactacaagaagccgagcaaaaaatcggtaagttggaagccaaatgggaaacatacttatttgagcacgggtggcagcaaacaatggttgccctcgaggcttgtgaaatgagaaacctcttttgttgcgcaaagctagtggtgagcagtgccctcgctaggaacgagagtcgtggacttcactacatgaccgattttcctcatttggaggaaagcaagaggctacctacagtgatattcccgagttcccatacaaccggcacatggagttcacgacaactacaccagcagcctatagttaagtccatggtctga

SEQ ID NO: 22996 - DNA, 357 bp, Gossypium hirsutum
  Clone ID: LIB3146-061-Q1-K1-A11
gaaaaaaactgggagaaatggcgagtggtggtaaagtgtcttttaaagtcactcttacatccgatccaaagctccctttcaaagtgtttagcgttcctgaagcagccccgtttacggctgttttgaaattcgcagccgaggaattcaaagtccctccccaaaccagcgctatcatcaccaacgatggtgtgggaatcaatcctcagcaaagtgcaagaaatgtgtttctgaaacatggttcggagcttcacctgattccccgtgacagggtgggagccttttgaatgcttaaaaacttaacgctagtttatcaccttcaattatggatatattttattgacatgattgaacttttac

SEQ ID NO: 22997 - DNA, 241 bp, Gossypium hirsutum
  Clone ID: LIB3146-061-Q1-K1-A12
ctttttagcaacttccgcattgaagaggtccttccaaacagaaatacgatcccccttaccaaccctccagcaaagtcctcattcgagaatgccttttgccgactagatacttttccaggtaagcgaacgtaaattccctaattgagcagttagaaaacacgcattcggataatatttagctttcaatactcgagctagcaaagaatctggaaaattaatgagacgccagccctgtttagct

SEQ ID NO: 22998 - DNA, 311 bp, Gossypium hirsutum
  Clone ID: LIB3146-061-Q1-K1-A2
aagtctctcaggtgaacggagatggcaggaaaaggtggaaaggggcttttggcggcgaaaacaaccgcagctaacaaggacaaggacaaggataaggacaagaagcgtccggtttctcgttcatctcgtgccggaattcagttcccagtgggtcgtatccaccgtcatctcaagtctagggcatctgcaaatgggagagttggggccacagccgccgtttacttggcctctattcttgaatacctgacagctgaggttcttgagttggctggaaacgcaagcaaggatctgaaagtgaaaagaatcacccc

SEQ ID NO: 22999 - DNA, 305 bp, Gossypium hirsutum
  Clone ID: LIB3146-061-Q1-K1-A3
cccacgcgtccggcaaaataatcaagataatggaacaacctttttactattttttgtattttgatttctatgggaccttttttgtattgattttttgaatattcaagaatcccctcattcacaatcggttcccccctttttgaattcgaaaaaaccgcttttttaaattcggaaaaaaaacccccttaatacattcgtttcttctcggctttatagccggttacaatattacgaaaatcttatttatttttgtcattttcgtttgtctgcttctgtcttggtgtctgcttcatttttcaggtgtc

SEQ ID NO: 23000 - DNA, 298 bp, Gossypium hirsutum
  Clone ID: LIB3146-061-Q1-K1-A4
aaaaaaaaaaaaaaaaaagcaaacaattttttttattaaaaaaaaaagggcgattgcttttgactctttgtctgttatgcttgtgaaattttcatctgggcgtttttaatttgcttgattttaccaagtttatgtaatgatgattttgattatgatttgggtatatctaatttcatagcatttattacttggagtagtgtttaatacaaaaaattcttttttgatgaactttatattcgatatgacctcatgcttgactacattgaagaactaggacctcagttgatccatgtcggtc

SEQ ID NO: 23001 - DNA, 407 bp, Gossypium hirsutum
  Clone ID: LIB3146-061-Q1-K1-A6
cttgtcattggtccatttcttatgccttcaatgccacctagtctaattactggcctttcaccccttactgggaatgaagctcattatggtatcattaggcaagggcagtttgtgcacttggatgatctctgcatgtctcacatattcttgtttgaaaaccctaaagctgaaggcagatacatttgctcctcccatgaggccaccattgttgagcttgccaaaatgctaagagaaaaatacccagactacaatattcctactgagttcaaagatgcagatgaaaacttgggaaatgtggtcttcaattccaagaagctgttggatttagggtttcaatttaagtacagcttggaagacatgtttgtcggagctgtggagacatgtcatgaaaaagggttaattgcacc

SEQ ID NO: 23002 - DNA, 373 bp, Gossypium hirsutum
  Clone ID: LIB3146-061-Q1-K1-A7
gcgcccacgcgtccgttaaagatgaaggcctctagatttattttcagcgagataaatcagagattccccatcctgccattcaccgctcgtgccttggaagagaaaagggctcgtctaggtttagttgaatgtgtgaatcacgatctcttgcagccataccctgttctctatgagaagcctggtgattatgttgctcatatcaaatttacagtattgctaatgccaaatggatcagatcggattacatcccatcccctgcaagaactgcagccaaccaagatgatagacgatcctgaaatcaaggcctggttggctttgggaacaaagacaaagaagaaaggtggtgggaagaagagaaaagtaagaagggtga

SEQ ID NO: 23003 - DNA, 385 bp, Gossypium hirsutum
  unsure (1)..(385): unsure at all n locations; Clone ID: LIB3146-061-Q1-K1-A8
taccggtatattaccgggtccgacccacgcccgtccgcaataatacgaaggatggcggaaggcggatccaatggtcatggttcggttaggccaatcctattagttggaagggataaggaaacttttttcaaaanngtgtaatttaaaatttgcttagaaattgancctcttccactccannatttataatttctaagaaggtatgtatttatttaatttggtaaaatctttatttctaggagattatantttggtatgtattccatgagctaattacaaggtaattacaatttcaaataagtatgtatatttaatttgttaaatctgtttttaacttattttttaatggatcattaatgaatcatgtttttaatctagatcgcga

SEQ ID NO: 23004 - DNA, 333 bp, Gossypium hirsutum
  Clone ID: LIB3146-061-Q1-K1-A9
cccacccgtccgtttccaacatattcacttcggcctaatgcctgatcagcctgccaagaggactaacgaaggcgaggacgttctcatgaaagatgggttttttgcttcagctaacgtcggcgtcactccgtactaatcagtgagctaagccatgggggcttccattcattgtctttttctccatgtttccaccattaagtctctctctcttactccttttcttcttcttcttcttcttcttcttcttcttcttcttctttctctcagtgcagcaattaggcaaagcttgtgattagcagttgatggagagctaagaactgagaaaaactcgct

SEQ ID NO: 23005 - DNA, 346 bp, Gossypium hirsutum
  Clone ID: LIB3146-061-Q1-K1-B10
cggacgcgtgggtggatctgcgtacactgattgttctagtctttttggtggatattctccgaagttggctcctcctaagcttgatgatgctcctgcacccaaggagcaagtggagtgagttgatgttgttgaagttcctctaagattatatgttggtgggtaaacaattaacttgttgcaccaaaagtttgttatggatcacattatcttttattatgtaatctatcaaatgagtaaacacaatttgaagcggaaaaataaaaacaaatacttccgttgcagtcctgcattttgcgtgattattgttgagagttggacttgatttaaaaaaaaatgatattatata

SEQ ID NO: 23006 - DNA, 392 bp, Gossypium hirsutum
  Clone ID: LIB3146-061-Q1-K1-B11
gaacaggttactctatgaaaggtcacatcaacgttgacactccgtttggagctatgaaattacccatcagcaaggagggtggcacaacccgccttaagaagaatagggaagacggtggtgatgatgatgatgatgatgaggattaaagcaaaagatcaacagggatggtccccttgagcttcttttgttttgttacagagttcattgcaataatatactaatggtgtgtggaatttaatgtttagattgtgacggtaacatgtactacaattatggaaaagttggtacctataattatgcatattatgtattatgtatgtatgcatgaatgggatgctgtgaccctggtttttattttgtctagcagcaccccccccccctcttagcgaacc

SEQ ID NO: 23007 - DNA, 375 bp, Gossypium hirsutum
  Clone ID: LIB3146-061-Q1-K1-B12
tttaaatccaaaaaaaaaaaaaaagaagtcattttttcagggctaagaaagagaaaaaaaaatggctttgcaaaaggcgaaggacatcgtatctaccaatcctgtcgtcgttttcagcaagtcctactgtccgttctgtgtggatgtgaagcaattgcttcaacaacttggagcttctttcaaggccattgagctcgacagagaaagcgatggatctgatattcaagcagctctggctgagtggaccggccagcggactgcgccaaacgttttcattggtgggaaacacattggtggctgtgattctacaatggccttgcacatagaaggtaagctggttcctctgctaactgaagctggagctattacaaaatc

SEQ ID NO: 23008 - DNA, 405 bp, Gossypium hirsutum
  Clone ID: LIB3146-061-Q1-K1-B2
gaaaaggctcatttttgtgtaactccagccatcgaagacgaccgatggccatggcgcgcttccaacggctctatggccagaccttagggcgtgtttcagagaaaaaatgggaaagaatttttttaaaaaaacacagtagaaatgtttttttttttgaaaattttaacttatatagggccttggtacaacgtcattttggcttgactttagaaaccccaaaacgacgtcgttttgaagctgaaccctattacttgactcgaatcgcacaagatccgcgtgtttttatatgggggatttatttatttacttagtccttcccatttttaaattacttttcaatccaaatcttgctttttttttcttttttaaatttataccatgggatttttgattttttttggtttg

SEQ ID NO: 23009 - DNA, 403 bp, Gossypium hirsutum
  Clone ID: LIB3146-061-Q1-K1-B3
cccacgcgtccgcccacgcgtccgcccacgcgtccgggtgacgaatataaggagattggctgagatggtagagaactgcgatgatgagtttctgaaattggacttggaatatgaacaggttttctctctctctctcttcatgcatgtagtttccgacacatgctcttgttgcagtacacgactagacatacattgatgtttgtggtttgatgcagacagtagtgcttcgaacaaagacagcaaaagcaactactccggacattcttgcaacccactgtataccatcagcaatgtcagctgatctcaaagcattgagaccatggacttaattaattgattttttgtaccttttatatatagcttttcctgtttctttttttttttttggggcatgattatattt

SEQ ID NO: 23010 - DNA, 410 bp, Gossypium hirsutum
  Clone ID: LIB3146-061-Q1-K1-B4
cccacgcgtccggtgctccactcatgctccgtctagcgtggcactcagctggaacttttgatgtcaagaccaagaccggatgtccattcggaaccatgaagcaacctgctgagctcgctcatgctgctaacaacggtctcgatattgcagtcaggcttctcgagccgatcaaggagcagcttcctatcctttcatacgctgacttctatcagcttgctggtgttgttgctgttgagatcaccggtgggccggaaattccattccatcctggaagagaggacaagcctcacccaccacctgagggtcgtcttcccaatgctactgagggagctgatcacttgaggcaggtgtttagtaatcaaatgggtcttagcgaccaggacattgttgctctttctggtggccatacc

SEQ ID NO: 23011 - DNA, 407 bp, Gossypium hirsutum
  Clone ID: LIB3146-061-Q1-K1-B5
gcccatgctgcccgacatgtgaccgataagatgatgttcaatgcttctttcatatttcctcacagcacacctactacaaaagaagcatattactacaggatgatttttgagaggtttttccctcagaactcggctagattgactgtccccggaggagctagtgtggcatgcatcacagctaaagctgttgagtgggacgctgcctggaaaaacaaccttgacccttctggccgggctgccttgggggttcatctctctgcttatgacgcagagactcccctcagcaacaagccatccaaggttattgatagtataccacggatggactttcctggagttgccatacagagttaatgcctgcctactggatgacaacagaatgtatgaattatttaataaaatgagta

SEQ ID NO: 23012 - DNA, 329 bp, Gossypium hirsutum
  Clone ID: LIB3146-061-Q1-K1-B8
ctggaatctacaactcacctctctctctgaggatgaaatcatatcaatcattaatcacgcctttgctaaaggaatcactttctttgacacggctgatgtttacggagcgcataccaatgaagttttggttggcaaggccttgaaacaattaccaagagaaaaaattcaactagccaccaagttcggtattgcagggatggcacctactggtatgatcgtgaaaggtagtcctgagcatgtccggtcgtgctgcgaggcgagctttgaacgtctcgatgtcgattacatcgatctctattatcagcatcgggtggacacgttggtaccta

SEQ ID NO: 23013 - DNA, 372 bp, Gossypium hirsutum
  unsure (1)..(372): unsure at all n locations; Clone ID: LIB3146-061-Q1-K1-B9
cttccgaaaccactaactttttcttctacgttctcgagaacatccgggaactttttgagacctagggtttcatttcccgtcattaaggcaagtcttgatgttggaagcgacgcgattaggcctggaggtacggtcgagactgataagttaccctctgacgtcagaaaacgagcaatggaggccgttgactcgtttggcgggagggttactgttggagatgtttcgagtaaaagctgggcttaacttgaatcaagctaaaaaggctcttcaagcacttgcttccgatactaacggtttcttggaggtactttgaatttttataacttccataaatntgatctgtgttagggttctcgttgagtggaattacta

SEQ ID NO: 23014 - DNA, 383 bp, Gossypium hirsutum
  Clone ID: LIB3146-061-Q1-K1-C1
gggtcttatgaccactgttcattctattactgctacacaaaagactgttgatggtccttccatgaaggactggagaggtggtagagctgcttccttcaatatcattcctagcagcactggagctgccaaggccgtcggcaaagttttgccagcactgaatggcaagctgactggaatggctttccgtgttcccactgttgatgtctctgtggttgacctcactgtgagacttgagaagaaggcttcatatgatgaaattaaagctgctatcaaggcggaatctgaatgcaacttgaagggaaatcttggttatgtggtcgaagatttagtcttaactggacttatctgaaacatcaattcaagcattttttatgccaaggctt

SEQ ID NO: 23015 - DNA, 406 bp, Gossypium hirsutum
  Clone ID: LIB3146-061-Q1-K1-C10
cccacgcgtccgcccacgcgtccgcccactcgtccgcccacgcgtccgggcacatggcccattcattgctggggaaaagataagtgcagttgatttagctttgggacccaaactttaccatcttgaggttgctctgggccatttcaagaaatggactgttccggaaagcttgactaatgtccgcaattacatgaagtcgatattcactcgtgaatcgttcgtgaaaacgcgggctgctaaggaatacgtgatcgccgggtgggcacctaaggtgaatgcatgaacaaactggaaacaatgaggtgtttgaagcgtatgagttatgtaataaaatgtgagggatggtgatgtaataaaatgtttgaatgtatgagtgtcaatgctactaagttggtaagtatttaat

SEQ ID NO: 23016 - DNA, 407 bp, Gossypium hirsutum
  Clone ID: LIB3146-061-Q1-K1-C11
gatcgtgtggttgactcaccttgctgtttagtgactggcgagtatggttggactgcaaacatggagagaatcatgaaggcccaggctttgagggataacagcatggctggttacatgtcaagcaagaagacaatggagatcaacccggagaaccccatcatggaagagctgagaaagagagccgatgcagagaagaatgataaatctgtgaaggaccttgttctccttctcttcgagactgctctcctcacctctggcttcagccttgatgagcctaacacctttggcaacagaatccacaggatgctgaaactcggcttgagcattgatgaggatgcaggtgaaggtgaaggtgatgctgatatgcccccattggaggatgctgatgccgaaggcagcaagatggg

SEQ ID NO: 23017 - DNA, 400 bp, Gossypium hirsutum
  Clone ID: LIB3146-061-Q1-K1-C12
cccacgcgtccgcccacgcgtccgcccactcgtccgacggaaggtactatttgattcagtcagtgaatgcatggacttgagatgcagacggtatgttggtggaggatacaaaacgtggacgaaagggatgacaatcctgagacgaaatgagtggctagctgaagaagtgtacaaggagatatgtgggtggagaggcatgggagattgcatggtggatgagcttgtggacaaagacatgagaagccaacatggaaagtggctggatttcgaagtagatgcgttcgcactaggagcagacatcgagggtcaaatactgaatgtcttggttgatgagatgattagtgagttcttgccattttaaaagctttgtcagtaatgtacggtggttgagtttatgcac

SEQ ID NO: 23018 - DNA, 361 bp, Gossypium hirsutum
  Clone ID: LIB3146-061-Q1-K1-C2
ggtaaattcctttttatttattttaatagtttttgcatgaaataaataaataaataaataaaggtatatcacctttaagaaactgcttggacttctttctttcttctgtatatgcgtgtgtatattattgtctttgtaaaaatccggctcctttacattgttttgatttgggccttttatagccactggaaatttgaaagtaaatgttacaaaatctgattttattccttgccatattagttcctattctgtgcccttttccttccttttgcatgtttacggtgtgaatcacagcgatgatgagggaactgatagcggctcgatacgaggtctgtggatgcttacggcgctgaaaggtgca

SEQ ID NO: 23019 - DNA, 236 bp, Gossypium hirsutum
  Clone ID: LIB3146-061-Q1-K1-C3
gcagttggtagctagaattatacatctatgtaatggaagagttaagaccaatgctatgtagggtttttgtttcgcttcaagtattgagtaggatgaatgaatgcgttttaacttttgacaagttttgctttgatttagagtggaaagtttctagcacttcattatataaaatatattaatatataatttaaaataataaatttaattatttattacactatctataattttataaa

SEQ ID NO: 23020 - DNA, 375 bp, Gossypium hirsutum
  Clone ID: LIB3146-061-Q1-K1-C6
gcgtccgaatttttaattttatcaactttacggagctttttttatagactttccaggggttatagtgaggggggtttttaaagtcgtgtgggatcctaacgttgagagggttaatttggaatccggaaaaccattggtccctgattatgccatgtcttttgtcggtggctcatcaagcataccatttgctcgtctatggtgggatgaaactgtacccacagtggtcactagtgcagaacctcataatcaggcgatattgcatcctgtacaagaccgagttctctcaattcgcgagaacgcaaggttgcaacgctttcctgattactacaagctttttggccctgtcaaggaaaggttcatccaatttggaaatgc

SEQ ID NO: 23021 - DNA, 405 bp, Gossypium hirsutum
  Clone ID: LIB3146-061-Q1-K1-C7
gggaatcagaaggcaacttaatattgtttccaagataatagaatgtaaggactctcacctctacaggcatttggagaagctgcaggcagaggattgtttttttgtttataggatggtggtggttctctttaggagggaattgacatttgaacagacaatgtgcctatgggaggtaatgtgggcagatcaggcaacaattagagctgggctttcgaaatccacctggagtaggataagacagaaggcacccccgacagatgatttattgctgtatgcaattgcagcttcagtcttacagaggaggaaattgatcattgagaagtacagcagcatggatgaaattttaagggagtgcaacagtatggccgggcaacttgatgtatggaaactccttaatgatgctca

SEQ ID NO: 23022 - DNA, 401 bp, Gossypium hirsutum
  Clone ID: LIB3146-061-Q1-K1-C8
gaaatttctgttgtgccaaaaacttctctattatttcttaccagcaccatcaagaagcctgttggagcaaataaacttgggggtcttggtgcccgaaagcttactaataagcacagtgaaaatctctatgaccagaagcctgaagaaccagttgtccctgttgcttcctctagtattaacactgcacctattacctcaccttttccatctcgttttgagtatgtggaaaatgcacaatctactatgttgaattctgatggtccacaattgctcggccatgttgctctacctaagtcatcaagcttctttgctgaatttgaaatggacaatggttttcataagaaatcaagctcataatcctctaaagtgctagatgttattcaggaaaccgattaaactag

SEQ ID NO: 23023 - DNA, 396 bp, Gossypium hirsutum
  unsure (1)..(396): unsure at all n locations; Clone ID: LIB3146-061-Q1-K1-C9
ttccgaaaggcacccccacacagatgatctattgctgtttgcaattgcagcttcagtcttacagaggaggaaattgatcattgagaagtacagcagcatggatgaaattttaagggagtgcaacagtatgaccgggcaacttgatgtatggaagctcctaaatgatgctcatgacttggttgtaactcttcatgacaagatcgagtcgtcattttgatcacctcgccataattttttgtcctctaattttatgtgcttcggttttacttcaacatggctttctgtgagtattacaagtcctccatttcactgcatgaaatgtnttctgtgcttgtgctagatattctcacttattgtttgtcaatgcttgaaaatttgttggagactgtacactta

SEQ ID NO: 23024 - DNA, 395 bp, Gossypium hirsutum
  Clone ID: LIB3146-061-Q1-K1-D1
catttccaatatgcctgccctctgtgctccaaatcggtttgtgacatgtcaaaggtctgggagaaattcgacgaggagatcgcagctacaccaatgccggaacagtaccaaaacaaaatggtctcgatcctttgcaacgattgcgagacaaaatctctagttcggtttcatgtcctggctcagaaatgcccgaattgcaagtcatacaatactaggcaaacacgaggctgaagtggcttagagtgggatgtagaaaccgacttggatggcatattttccaaatcgatgcatcaagcattgggttctggttaagcttctgcaacgtgtattggtaccagtcgtggcgcatggttccttcgggggttcggtttaatgcttgggattttcaattcttt

SEQ ID NO: 23025 - DNA, 406 bp, Gossypium hirsutum
  Clone ID: LIB3146-061-Q1-K1-D10
ggttgttattgctcatgatgtggatcctatttagttggtagtgtggctccctgcattatgcagaaagatggaggtcccttactgcattgtcaaggggaaatctcgtttgggatcgactgttcacaagaaaactgctgccgttttgtgtttgaccacggttaagaatgaggataagttggagttcagcagagtccttgaggccatcaaggcaaacttcaatgacaaatatgaggagaataggaagaagtggggaggtggtgttatgggctccaaatcacaggccaaaaccaaggcaaaggagaagcttcttgccaaggaagctgctcagaggatgacttagaaatgttcattttttttcctatcaccattaattggtgtttatttttcttttttgataatgctcctt

SEQ ID NO: 23026 - DNA, 360 bp, Gossypium hirsutum
  Clone ID: LIB3146-061-Q1-K1-D11
cgattttattgtgttggactgaaacgtgcatatgagattattggtgtcaccactgaggaaggcgtgctgaaggcaagacagggttctatttcagcttaatgctatgctacctcggtgaggatggtgagtggaggatatacatgtatgaacctgagccacgtggtaatgaggttatcagaaccctaaaattcttgcttcatatcatgtgacatgggaactgggatgtgggtgggaagacgtggtccagcaagcagctatgcagttgtgcatattgttgattttaatgtgtgtgtgtatttccttatctcaattttaggggttcattttctggcatctatgtgctgtacattattattttgg

SEQ ID NO: 23027 - DNA, 378 bp, Gossypium hirsutum
  Clone ID: LIB3146-061-Q1-K1-D12
tttaaatccaaaaaaaaaaaaaaagaagtcattttttcagggctaagaaagagaaaaaaaaatggctttgcaaaaggcgaaggacatcgtatctaccaatcctgtcgtcgttttcagcaagtcctactgtccgttctgtgtggatgtgaagcaattgcttcaacaacttggagcttctttcaaggccattgagctcgacagagaaagtgatggatctgatattcaagcagctctggctgagtggaccggccagcggactgtgccaaacgttttcattggtgggaaacacattggtggctgtgattctacaatggccttgcacaaggaaggtaagctggttcctctgctaactgaagctggagctattacaaaatcatc

SEQ ID NO: 23028 - DNA, 380 bp, Gossypium hirsutum
  Clone ID: LIB3146-061-Q1-K1-D3
cccacgcgtccgctgaaatctttaacacttggtgtaatattcttaagcgtgtacctaatagtgcactttggctcctcaaatttccagctgctggagaaatgaggctgagagcatatgctgccgcacaaggggtacagccagagcaaattattttcacagatgtggccatgaaacatgagcacatcagacgcagtgctttagctgatctctgtcttgacacgcctttatgcaatgcacatactactggcacggatgtgttatgggctggtttaccaatagtgactctaccccttgagaaaatggcgacaagggttgctggatcactttgtttagccactggattgggggaagagatgattgtaacagtatgaaggaatatg

SEQ ID NO: 23029 - DNA, 214 bp, Gossypium hirsutum
  Clone ID: LIB3146-061-Q1-K1-D4
ccacccgtccgcaaagggaggtaatgccttaacccctaagagctctttatccgtatcccttttataacgtcgccgggaccccagcatggtgccacccggtaccgccttggtccgcgaccttcaccataaactcgaacccggggccctatttttcatacttgacccctttcatagacaactatgttggggtccaaatgaatccgcctgccaaaac

SEQ ID NO: 23030 - DNA, 94 bp, Gossypium hirsutum
  Clone ID: LIB3146-061-Q1-K1-D6
gcattttatggttggactgaaacggcttttagatattggtgtcaccactgagaaggcgtctgaagcaagacatggtctatttaacttaatgcta

SEQ ID NO: 23031 - DNA, 384 bp, Gossypium hirsutum
  Clone ID: LIB3146-061-Q1-K1-D7
agccaaacgaaatctaatcatttttgaaaaatggcaccaaaagctgaaaaaaagccagccgagaagaagcctgcggaggagaagaaagccgtagctgagaaagccccggcagagaagaagcctaaggctgggaaaaagcttcccaaggaaggcggagcggctgccggagacaagaagaagaagagagttaagaagagcgtcgagacctacaagatctacatcttcaaggtcctgaagcaagttcaccctgacatcgggatctctagcaaagctatggggatcatgaacagtttcatcaatgatatcttcgagaagcttgctcaagaagcctctaggctcgcgaggtacaacaagaaacccaccatcacttccagggaaattcag

SEQ ID NO: 23032 - DNA, 399 bp, Gossypium hirsutum
  Clone ID: LIB3146-061-Q1-K1-D8
gttctttgcttacaaatttggtattggatctttatccaaatctcaaatcgtaaattgcatagaatgaacgatattagtctgtgtgagtatagcttttctcatcaatatcctcgaagtccaagctttacttgtcttaactcttgcctgacggaacgatggggcgatttgcccttgaaagtcgatgactctgaggacatgcttatatacaactcccttcacgaagctcttaattttggatggtctcctttcgattcaacgctgccaactgccattaaagactagcctgaggtgttgacaccagttattaaaagtgaactccatcgggtcgactcaacccgtatcttctgcaacaactcaaatgtttttcggaacctgtttcatgggaataagcagtgaaaa

SEQ ID NO: 23033 - DNA, 248 bp, Gossypium hirsutum
  unsure (1)..(248): unsure at all n locations; Clone ID: LIB3146-061-Q1-K1-E1
taattggggcgacgacacgactcgtccggtttgtncaaacaattgttttgatgatagtatttgtacatctgtatatgtatccattggtagcatagcaataaactgggattaaaaaaaaattgtaagacaaccactattgttctatattttttgccttgcctggtgaatatgtggaaatacaggaaattaaccaggttcacttgttctgttcctatttatggcagagcttcaaaaataataatgcaatt

SEQ ID NO: 23034 - DNA, 334 bp, Gossypium hirsutum
  Clone ID: LIB3146-061-Q1-K1-E10
tattccattttttccttttttttcttacagctaaacaaatccatgggggcgtcttttctcttcataaaagatcgaaacacccgtctggaggatgggaacttgataatttatgccaccaactccatcagctggtctcttccgtacagcccccacaagacataattgatcgcataatgagagtatttccaggcaatgtacgcttaattgttccttcaattgccaatgttgaggatttggcggggatgtcagctgctggactatatgaatccatcccaaatgtcagtccttcaaatccaactgttttttccagtgctgttagccatatttgggcctt

SEQ ID NO: 23035 - DNA, 230 bp, Gossypium hirsutum
  Clone ID: LIB3146-061-Q1-K1-E11
cggacgcgtgggtgaatggattcatatttttatttgtcgagttaacaaaaaatcaactgggggagcggtgattcatgctggtttacaatctcataaacctaactcatgaacccggagtttgtcatgctttcatcgcccgtagcatcataatgaactcgggtgtttttgtttactgaacacaatgctccattatttgacatatatgggggaaatttgatgaattctttatt

SEQ ID NO: 23036 - DNA, 400 bp, Gossypium hirsutum
  Clone ID: LIB3146-061-Q1-K1-E12
cccacgcgtccgaaaccccacttgatcttgctgtcactgaagaaattcggtcattactgagagaacgtgaacaggcccctgaggaagtaaatacgggtggtaaaaggaaggttgaacaacctgattcttcaaggccaccgttggataaaccggaaaactccaatgatgaagctactgcggctgagcatgaccggcaagaggaggagagtgttaaaaggaaaggtgatgacaataaaccagaatgcgtatcagaacctaagaaaccaagagttgttcttaagcatctcaatgaagatgacactcaggaagatgaccatacctagtgaggacaacgcttgagtggaatccatgagcatttgttgaaccaaaatttgttacaagatggtgaatcagttaatgc

SEQ ID NO: 23037 - DNA, 387 bp, Gossypium hirsutum
  Clone ID: LIB3146-061-Q1-K1-E3
gtttcagtgcttttgcctaagattcctggccttgttttgcatgtggaaccgtcttgcagcttgttagaagcaatagatcttatacttgaaggagctcaaaaccttgtggtgccaatcaaaaccaagctcagcaacaagagaaaacagcaccagaagccatcaccgactgtcactgtccacaaaggccgtgaattctgctggttaactcaagaagatgtgattagattcctactcagctcaattggcctcttttcacctgtccctgctttctccatcgacactcttggcatcatcagctctgaaatcctcaccattgagtaccactcccctgcttctgcagccataggagccatttctcgaacccttgtggaccaaacttcagtggct

SEQ ID NO: 23038 - DNA, 402 bp, Gossypium hirsutum
  Clone ID: LIB3146-061-Q1-K1-E4
cccacgcgtccgggcattccgtgtccctacacccaacgtttctgttgtggatttaacctgccgacttcaaaagagtgcctcatatgaaactgtcaaagctgccataaagcgtgcttcacaggggccacttaaaggcattcttggatacacagatgaggatgttgtctctagtgattttgttggtgatccaaggtcaagcatattcgacgccaaagccgggatagggttgggcaattcattcatgaagcttgtttcatggtacgataatgagtggggttacagcaatcgagtagtcaacctaatacagcacatggaactggtaggatcaacacccaagtaaattatttagcaaggtatgctgttgaaactgagcgacgctgctgcaattttagtgtgcgcaat

SEQ ID NO: 23039 - DNA, 407 bp, Gossypium hirsutum
  Clone ID: LIB3146-061-Q1-K1-E5
cccacgcgtccgaaagaagttgaacaggatgaaatcattgaagggtaagaaacgtcaacggtttaaagaaaggtttataagtgggaaccataagtacaatgaagctgctaggagtataattaagcctaagattggttatggtttagctagtgagctaaggagagctggggtttatgttaaaaccgtggaggataagccccaagcagcggattgggcattgaaaagacaaatgcaacattcaatgagtagagggattgattggttgtttttagtttctgatgataaggattttgtggagatgttgaggagagcaagggaagcagatttagggactgtggttgtaggtgattgggataggggtttaggtagacatgctgatctatgggtgtcttgggttgaggtagaaa

SEQ ID NO: 23040 - DNA, 231 bp, Gossypium hirsutum
  Clone ID: LIB3146-061-Q1-K1-E6
gatcatagcttccgttctagttctactcaccgagatacacagttgtcaagctgttcggttttcaggggcaattcgagcaccaaatcacgtctcatgagactgccaaaaccgacccctcttcccctttctcatgtgtattaaaagttagacctgaaaatgttatttccatgtatgtttatatatatacataggaatggagttgttaactgggtgtgtaattgcagaagaact

SEQ ID NO: 23041 - DNA, 313 bp, Gossypium hirsutum
  unsure (1)..(313): unsure at all n locations; Clone ID: LIB3146-061-Q1-K1-E7
cccactcgttcgtccacgcgttcggccacgcgttcgtccacgcgtccgatctctttttatggtggggatggcaatgcaaatttgagttttttacataatgttttgttaacgtactctttctataactttgatcttggttactgtcaggtgattactccagatattctttacttctcttttttttggttgtcattaataagttgattgcattcacaatatgctacggtttttatgttggntattttatttgatttaatgaaaaatctttgtgttattaaatgcaacaagaatagggggttaaaatgggatattt

SEQ ID NO: 23042 - DNA, 400 bp, Gossypium hirsutum
  Clone ID: LIB3146-061-Q1-K1-E8
tgcaaagatctccgaagaacggattaagaatatcgaaagcatactcaaagatgtaatgctggtaacatcgccgcagctaccggatttcttgccgatcctcactccgttgtttcgtcggcaaatgaaagaggccaaagcactaagaaagaggcaattggattgcttggctccattaataaagaaccggagagcttttgttgagaaaggtgaaaaccctaaccaagaaatggtgagtccaatcggtgcagcctatatagactcactcttcggactagagccaccaacccgaggtccgttgggggaagaagagtacgttaccctatgttcagaggtgatcagtgccggtaccgatacgagtaccacgacagttgaatgggccatgcttaatttggtaatgaat

SEQ ID NO: 23043 - DNA, 387 bp, Gossypium hirsutum
  Clone ID: LIB3146-061-Q1-K1-E9
ggagtagttattccatttggctccatggaatgggctttagagcaaaacaaatccatggaaacattcatgtctcttcgagaaaagattgaaacagcacgtctggaggatggtgaacttgataatttatgccaccaactccagcagctggtctcttccgtacagcccccacaagacataattgatagcataatgagagtatttccaggcaatgtacgcttaattgttcgttcaagtgccaatgttgaggatttggcggggatgtcagctgctggactttatgaatccatcccaaatgtcagtccttcaaatccaactgtttttgccagtgctgttagccaagtatgggcctcgctctatacacgaagagcagtactaagtcggcgagct

SEQ ID NO: 23044 - DNA, 138 bp, Gossypium hirsutum
  Clone ID: LIB3146-061-Q1-K1-F1
tcggccaagccttccgccaacccttccggttggattgtttttccggagggaaccattcttttttggccttgacacccatgatcatttggttaaaatggccaaggccctaggtcctggtgagtttaaatgccttatctc

SEQ ID NO: 23045 - DNA, 410 bp, Gossypium hirsutum
  Clone ID: LIB3146-061-Q1-K1-F10
ctgcctattatcttccttccttttcattccttttgctatggcaggaactggggtggtcgctgtttatgggaacggcgcaatagctgaaacccacaaatcccctttctccgtcaaggttggcctagcccaaatgctccgtggcggggtgattatggatgtcgtcacccctgaccaagctcgcatcgctgaagaagctggagcctgcgccgtcatggctcttgaacgagtccccgccgacatccgagcccaaggtggcgtggcgcggatgagtgacccacaactcatcaaagaaattaagcaagctgtcaccattcccgtcatggccaaggctcgtattggccatttcgttgaggcccagatccttgaagccattggcatcgactatgttgacgagagcgaagtccttaccc

SEQ ID NO: 23046 - DNA, 406 bp, Gossypium hirsutum
  Clone ID: LIB3146-061-Q1-K1-F11
ctgaaattttatagcaagactccttatttctccgatgtcgatcttcgaatacaacgggagtgccctaatagccatggtaggcaagaactgcttcgccattgccagcgatcggagactcggagttcaactccaaactatcgccaccgatttccagaggatttataaagtccacgatcgcctcttcctcggtctctccggcctcgccaccgatgctcaaaccttgtatcaaaggcttgtctttcggcacaaactgtatcagctaagagaagaaagagacatgaaacctgagacttttgctaaccttgtttctgcgattctttacgagaaaaggtttggtccatacttctgccaacctgtaattgctggattaggagatgaagacaagcccttcatttgcaccatggat

SEQ ID NO: 23047 - DNA, 337 bp, Gossypium hirsutum
  Clone ID: LIB3146-061-Q1-K1-F12
ctcaaactttctaacgaggctacttttttattcgatgctaaactgggacaacgacgggagtgcatgtactgccacttcaagatttaccggatgtatgcttaatcaaaaaccctagactgcatgcatgcctgcatgactgcatgtatatatatgatgtgtatgattgcatgcaataaaccctttaagtctgtctccttagtctggcaacctgccctgaaaactaatataaaatgcttgttctttatatcaaactgtttcatctattacataaaaattacacataacacttaaatgttccataccttggtcctatatctatttccataaaatgctaaat

SEQ ID NO: 23048 - DNA, 281 bp, Gossypium hirsutum
  unsure (1)..(281): unsure at all n locations; Clone ID: LIB3146-061-Q1-K1-F2
cccacgcgtccgcccacgcgtccgcaaaaacccagtgattctcggaatagatgatcaatggtttcagccctcccctcacaccgaggacaatttgtattgattgctagattcctactcagcatattagtttttgtaggcagatagttccatgaaagtttccagattgtaaactttatttttgctggtagatttagtagccagatttttttttgtaaaaattgctataaatggtcagtaaagcataagctctagtaattctatcaaaaacttattttnnnnaa

SEQ ID NO: 23049 - DNA, 385 bp, Gossypium hirsutum
  Clone ID: LIB3146-061-Q1-K1-F3
gtcctccgtcttcgtgggggtatgcagatcttcgtcaaaaccttaaccggcaagaccatcaccctcgaagtcgagagctccgacaccatcgataatgtgaagtctaaaatccaagacaaggaaggcatcccaccagaccagcagcgtctcatcttcgccggaaaacagctcgaagatggccgtaccttggccgattacaacatccagaaggaatccaccctccaccttgtcctacgtcttcgtgggggtatgcagatcttcgtcaaaaccttaaccggcaagaccatcaccctcgaagtcgagagctctgacaccatcgataatgtaaagtctaaaattcaagacaagggaggcatcccaccagaccagcagcgtcttattttcg

SEQ ID NO: 23050 - DNA, 409 bp, Gossypium hirsutum
  unsure (1)..(409): unsure at all n locations; Clone ID: LIB3146-061-Q1-K1-F4
cacaaacggatgctaagcctgaaaaggggtctgaaaaggaggctgaaaaaattgaagctatggcgtctaccaaatctgaaataaccacaaaagctgctagtacagatcctgggcctgagggagaaatgtcaagaaaggagcagaanagtgatcctaataagaaggtgcctgctattgataaggatttgttgcaggctttcaagttttttgaccggaatcgagttggctacgttagggtcgaagatatgaggttgatgattcatagcttgngaaagtttctatctcatagggatgtcaaagaactagtgcanagtgcattgttagagagcaacacaggaagggacgatcacattctttacgataagctggttcgtatgtctgacatataanaagccttggggtccaataa

SEQ ID NO: 23051 - DNA, 411 bp, Gossypium hirsutum
  Clone ID: LIB3146-061-Q1-K1-F5
cccacgcgtccgcagagagagaaaaaaaagaaagaaaaaatggttctgctagacaaaatgtgggacgatgtagtagctgggcctcaacctgaacgtggtctcggcaggcttaggaagatcaccacccagcctttgtccatcaaagatgaaggagaaaagaaaaagtaccagaggtcgttgtcgctgccgaatagtccagtgtcaggtccgacacccgtgacaccgacgactccgacggcgcgtaaggagaacgtgtggaggagtgtgttccatccgggtagcaacctagccaccaaaagtataggttctgatgttttcgacaagccacaacccaactctcctaccgtctatgactggctttacagtggggagaccaggagcaagcatcgctgagagggtggcgactgacag

SEQ ID NO: 23052 - DNA, 393 bp, Gossypium hirsutum
  Clone ID: LIB3146-061-Q1-K1-F6
cccacgcgtccggttctcggtactcggggtccacgaaggatgcattgtatgatgcactctatccgtgcttcggctcttgacgccagtggtgttgtccctggccagcccgagcttctccgtcatccattagaggactcattcagaagcatttccttctctaaatctcttgaccactctgttgagttcagcagctctcggttttccgaaattggcacatcttatgatgatgaggacgggaaaatgaaacccttgatcctcaaaaacaagcccccaagatggcacgagcagttacagtgttggtgcttgaatttccgaggtcgagtaacagttgcttcggttaagaacttccaattgattgctgccacacaagcagctgctggtgcacccacccca

SEQ ID NO: 23053 - DNA, 406 bp, Gossypium hirsutum
  Clone ID: LIB3146-061-Q1-K1-F7
gctgactaaagttgcatgtgctcttgccttttcgctatgccaaaagcgcattcaagtctctgtattgcgtgaggatgaatatgaaaagcttgataaattacttggcaccaagtctgagggtaaattggttctctcaaaaagttacacttttaagacatggttagttggagatggattgagtgaagtagaacaaaggaaagcaagcaaaggaactctatttattcccttctcgcaattcccaccaaagaagttgcggacggactgcttctatcataccacaccggccatgcaaactccgttggcccttgagaatgtggattcttgcgagaactggttgccgaggagggtgatgagcgtatggcgtatagctgggttagtacatgcactggaaagatgggaggaacat

SEQ ID NO: 23054 - DNA, 362 bp, Gossypium hirsutum
  Clone ID: LIB3146-061-Q1-K1-F8
gctttgagaaaggtgttcgaagtctctgatttcgcctcttagtggaaaagatgtcttcagccggcgaatctgcttgctcttacgccgcattgattctctatgatgatggcatccccatcactgctgagaagattgcaactctagtcaaagctgcaaatgtctctgttgaatcttattggccaagcttgtttgctaagctttttgaaaagtgtaacattgaggatctcataaccaatgttggtgctgccggtgctggtgccccaattgctgcagctgcacctgttgcagctggtgctggtggtggagctgctgcttcacctcctgccgaggagacgaagaaaggagagccagaggaagagagc

SEQ ID NO: 23055 - DNA, 285 bp, Gossypium hirsutum
  Clone ID: LIB3146-061-Q1-K1-G1
tccttgcttatgctgggaatccaaaaattttaatcgggtggttactggtgaaaagtcttttaacggtccgaccagagaccgagactccagtcagggctgtttccataaggaaattgcctagggtccaagcccatttgccttggtttgatatcctcaatgaatttcaaaagggcagcagtcatatggcagctgtagggaaggttaaaggaaagaccgaagaccctcattttttggttgatggacagaaaatttgacaagcacataggttaccaatgggaaattctc

SEQ ID NO: 23056 - DNA, 250 bp, Gossypium hirsutum
  Clone ID: LIB3146-061-Q1-K1-G10
atgtaatctacaactcacctatctctctgaggatgaaatcatatcaatcattaatcacgccgctgctaaacgattcactttgttcgacacggttgatgtttactgcgcgcataccaatgaactttcggttggctaggccttgaaacaattaccaagagaaataattcatctatccaccaagttcagcattgcaaggatggcacctactggtatgatcgtgaaaggtagaactgagtatgtccagtcgtgc

SEQ ID NO: 23057 - DNA, 105 bp, Gossypium hirsutum
  Clone ID: LIB3146-061-Q1-K1-G11
ttcttatctacaaaactcaatccacttttcttttcacatcatcgtcatgattattctcgggggctcttcacgaaattccatcaccatcaccacttatctataaaa

SEQ ID NO: 23058 - DNA, 178 bp, Gossypium hirsutum
  Clone ID: LIB3146-061-Q1-K1-G12
aaattatctaaataactgaatccactttttttatgactgcctgctccacattatacgggggggtactttaccataaatgagcatcaacacctcagagctatcaaactcacctcgaaggatacccattggagactctggccctgtaccagcccacaccacgaacaatgcttacaagatc

SEQ ID NO: 23059 - DNA, 405 bp, Gossypium hirsutum
  Clone ID: LIB3146-061-Q1-K1-G2
ttcccgttccgccccacccttccgaaaaaaaaaaaaaaaaaaaaaaaaaaaaaatttttttaaaaaacaataaaaaaaataaaaaaggggggaatttttaaaagcattatttttatctactctttagtggacctacatgtccaattcttttgccgtggcgtgccccctttaaagggggcgccccctctaggggtcccaatttttcttccccttgcttacaactacttttttttttttttggccccccaactttaattccccttcccgttttttacaaccgccggtttgggaaaacccttggctttcccaactttattttcttgtacaaatatcccctttttgcaggtgggcttaatagcaaaaatggcccccccgtttcccccttcccaaacgtttccccccctt

SEQ ID NO: 23060 - DNA, 340 bp, Gossypium hirsutum
  Clone ID: LIB3146-061-Q1-K1-G3
cccacgcgtcccaagaagaaggcttggaggttgttgcgaaagtatgaacttggtcgtcagccagcaaattctaagctctctagcaacaagactgtaaggagaatccgtgttagaggaggcaatgtgaagtggagggcattgagattggatacaggcaactattcatggggtagcgaagctgtcacccgcaagacccgtattcttgatgtggtatataatgccctcaaacaatgagcttgtcaggacacagaccctcgtaaagagtgctattgttcaagtggatgctgctccctttaagcaatggtaccttcaacactattgtgttgatattgggaggaag

SEQ ID NO: 23061 - DNA, 258 bp, Gossypium hirsutum
  unsure (1)..(258): unsure at all n locations; Clone ID: LIB3146-061-Q1-K1-G4
ttggttatggaaggagtcctaaattcttaatcagctggaattctagtttacatggcattagtagatctcattgctgcagattttttaagtaagaggatgagctgcaattttagccttcaagtagtatcttacttcatgctncttctaggagctggtttaatggcttcccttgccatctgggcctaaaaaactcactanctgtgggtttgctagttctttaatttgggcatttatttttgggaattcaatcacaaacca

SEQ ID NO: 23062 - DNA, 134 bp, Gossypium hirsutum
  Clone ID: LIB3146-061-Q1-K1-G5
cttgtttaaaatataagaaaaaaaatcatacgcaatgagcactgctggtcaggttattcgttgcaaagctgcggtggcatgggaggcggggaaaccactatcgatagaaaaaaggggaggggccccccccccaa

SEQ ID NO: 23063 - DNA, 234 bp, Gossypium hirsutum
  Clone ID: LIB3146-061-Q1-K1-G6
cgttgcttgcttgccatggatgcatcacatttttatcttctatcgcgtttagaataaattgcagtgatgttatgtttcacaatgttgttatgagtaaataatccgttgtattattgtctgttttcggcctaatgacaaattaagttcttttaaaaaaatctacattgcttttatatcacactgatgtatactacatagaattataaaatctacactgcctctgtattcttctaa

SEQ ID NO: 23064 - DNA, 369 bp, Gossypium hirsutum
  Clone ID: LIB3146-061-Q1-K1-G7
cccacgcgtccgcctcagtctaggttcttcttccatcgtccttctagagcagatcgatggtgattcgacactactgttatcaggtgcgagtcctctcccttttctaaggcgtcttgtgcaagtttatgggtataaacatttcctgatatatcaataaactgaaaatcaatttcttgaaagcgagattttttatttgaatatctctaataattgccccaataattgatttatctggttttgttgtttggcatttcttgatgactgttcgtgaattccccatgattgtcactgagagtatacccattgagattcctagcttaatggcctgtaatcctgcatatgcttctgctgcaaacggggatgaaacgt

SEQ ID NO: 23065 - DNA, 385 bp, Gossypium hirsutum
  Clone ID: LIB3146-061-Q1-K1-G8
gcattttctgaagaactgaaaccacatcagaaagcactgcttcctgataattatactgtgctggaccgtgccataatagagcataatcttctgagtgctagcaaactgtacacaaatatacgttttgatgagttgggtactttgctgggcattcctcctcataaggctgagaagatagcctcaagaatgatttgtgaagatagaatgaggggatcaatcgaccaggtggaagctgttatacagtttgaagatgacactgaagaactccaacaatgggatcaacagatagttggtgtgtgtcaagctcttaacgatatacttgatagcatggccaagaaaggcatggaagttcccatctaatcctgaccagtcggtgcactgttcg

SEQ ID NO: 23066 - DNA, 402 bp, Gossypium hirsutum
  Clone ID: LIB3146-061-Q1-K1-G9
ggagttcctttcacagatgatgaacagaaacaaggagtggttgaaaaaatagcgaaagtgcggagctttgagaacttgaaagaattggaagtgaacatgaaggacgtacatacttctggagttccacacacacatttttttaggaaaggagaagtgggagattggagcaattatctcacacccttcatgattgaatgtttggagaagcttattcaagagaaattgaatggctcgggtttaacatttaaactgctctccgaaactgctaacaatattgcttctacatgatcgcggggatgtcttctagcttttttgggaatgaaatctcttgtattcccattgtctgtataaataatcctgactagaatcctcttgtgatcatgatcagaataaattgctttg

SEQ ID NO: 23067 - DNA, 414 bp, Gossypium hirsutum
  unsure (1)..(414): unsure at all n locations; Clone ID: LIB3146-061-Q1-K1-H1
accctccggtgtgttctcaaaccggggaggggcccgcgaaaattaaggtttggttgcgccccccctgcttagaggaaaaagggaccaatccttatgggatatgtaatagtccatggggttggaagaatcgaaggatgcctccaccgggattagcattctacaaaggttttgccttgaactgattcctgtctttcccaactggctaaccttgaaaaatactgactattaactgttatttgttttcgtgatcgaattcaaagcacgggagttgggatacaaatcggntgcgcatctgctgatggatgagcttcagcgtanaaatccttcaagattgatgatatgctgcaagtgattacactcaattttcaaggttctttccatgcggcagttgacgatgtgtaccataatgacttt

SEQ ID NO: 23068 - DNA, 311 bp, Gossypium hirsutum
  Clone ID: LIB3146-061-Q1-K1-H10
caagtgtcgatttttaatacggggtattgagtctgggaaagaagcataatgtgattttatggtttgggagcatttttgcttttcttttatgggtaaatgcctgaggttttagggttgtcatttgtagcagttttggtgtcaaatgcgttttcggtttcagtttgcagaaaatattttgctcgattgtgattattacagagttgtggaccgaaattttgaatggttaaaaaaaaatctaaaaagaagaactttataataaaataaatggctgagtcttttataacaaaaagtttttttcacgagagtgtggt

SEQ ID NO: 23069 - DNA, 232 bp, Gossypium hirsutum
  Clone ID: LIB3146-061-Q1-K1-H11
cccacgcctacaccgatttcaccgcatcgatcacccttttttttttttttttgccgagcgggctgtttaccatctgtcactgtctccaaccccctactgcattgtcatttaatgttgttcatgcattgcatctacggatccacttggcctgtataggtcaagatattctaaatattgcgctcataatcacggtccttcaaattgttctcctaccaaatcataaggttggaac

SEQ ID NO: 23070 - DNA, 215 bp, Gossypium hirsutum
  Clone ID: LIB3146-061-Q1-K1-H12
actctaccaaaatatttcctcaagccttgtcccatgattacaagagcattgaagtgctcgagggcgatggcaaggcccccggatccatccgccttatcaattatgctgaaggttctccaatcgttaaggtttcaaaagagagaattgaatcagtggatgaagctcagaagatatatgtttacagcatctttgatggggatctcatgaaatactac

SEQ ID NO: 23071 - DNA, 408 bp, Gossypium hirsutum
  Clone ID: LIB3146-061-Q1-K1-H2
caattatcatcttccatggaatcccagaatctcaaacaccgttccagggatgaccctcgttttgccaccaccacctccaacgaaaagaacagagcatacaggcgagaaaaaagaatggcaatggccaaacgtgggctaagatcactagtcatagcagtttccttccctttgtctctcaccttgttaaacatatacttgtttggttcaagtcgtggttacgcctctttagccaaacctttctggttccctcctttgtggcttttacatacaggttgcttggcttcgagcttcgtgatggggctgtcggcttggtttgtttgggttgaaggtgggttccacgttaaaccgacggctttgtctctttatttgggttacttaggattgagtatggcttggcatccgactgtg

SEQ ID NO: 23072 - DNA, 79 bp, Gossypium hirsutum
  Clone ID: LIB3146-061-Q1-K1-H3
aatctcttcgttccttaagtgcttcagactctgataatagcaacggaagccctggtaggttgaaaaacagagacttgcc

SEQ ID NO: 23073 - DNA, 272 bp, Gossypium hirsutum
  Clone ID: LIB3146-061-Q1-K1-H5
ggccgagcaagatcgctttcctttttctaactcattaaccaagtacaatcacagttagatagaattacatgtttgtgtattcattcctaagaggctaaatctattttttttaaaaactgttaagaaattctagaattacatgccttaattacaaacagtgttaaaaatctcaggaagttagcttgaatgagttatttgcagcttgcatttgtgcccagcagatcctttctcaatgaattatcaacctctgttgaaaccgtatcagagttttt

SEQ ID NO: 23074 - DNA, 384 bp, Gossypium hirsutum
  Clone ID: LIB3146-061-Q1-K1-H6
ccggatcgacccgtgcgtggacgcctgggggaaagatggaatttagatctctcaaaggaaacatgtcgctgatctttggaaagtgtttaacatgtttagttgcaaggttgttggtactccaatgaatgtgaatgcttgaagatggtactgacaaggctgatggtagatattttcgaagcttagttggagggttgatctacttgactcagacacgtccaaatatagttttctcagttggaggcatttcaagattcatgcacagcccccacgagcgtcagcttggagcagctaagagaatctcgcgttatattgctgaaactacaacttttgggctgtgcagctatttcttggagctataaaaaacgaccaactgttgcaatgtca

SEQ ID NO: 23075 - DNA, 474 bp, Gossypium hirsutum
  unsure (1)..(474): unsure at all n locations; Clone ID: LIB3146-061-Q1-K1-H7
tcgtctcgtcccatcgcccgtccggtagagtttcaaccgnncttttcagtatatcttttaannntaaagtgcnnctttcnntttggagctnnngtttcccnnatcttanctacttggctgtttntngtcccttctgcnnattgcattcnngctgttgtttggggccagtgtattcgacccgtatctnncctttgccttggaaataggtcaagaatattcnnttggtattgcgcccttataatnncacggtccttcagaaattgttcgtataccccaaatctcaagggttggaacccggttctnntttgggttgtgcctttcttagtatagaatattnnttctgggtcttcgctttccannaatggttgtttcaatgagagttngtgatgatagtggtaagctttcgtggcgatccggagtgggagaaggatggcatttaccaatgctactaaaaaattccgcggatgtttgatc

SEQ ID NO: 23076 - DNA, 183 bp, Gossypium hirsutum
  Clone ID: LIB3146-046-B4-F4B
gctggtgctcaggctgtcagtaatgtgcttatgttttgcactactactagaataaatttgacagcctgttgacttatatctacctaccgctgttttcttatgcatctcctatatattgtgcgtttgctatgtgtgaaattctagtgtaataataaataaataaataaagtcttattttgtcct

SEQ ID NO: 23077 - DNA, 648 bp, Gossypium hirsutum
  Clone ID: LIB3146-046-B4-R3B
gggtggaatttgagactacatctttcccgaagattccgaaaatcttttggccacatttgctgcgtcgtgtaggatgcctgctgctgtatctatcgcactatgtatgatatcaaaagtaagactcttagccttagccttagacggtttaggcttgtcggtatttactgttgtcgtcatatgctgaccaccaaattgttctttctctttttcaatgagacccccactgtggcacgaatctgataggattgtgaagcttgctccttctggtagccgattaactaaacgtctgaagtccacatcggtgacaagatttaaatcacaagccacgattgcttcatcttgcttgaaaggctggccaggttgaaagattggaacgcgtgttccatgtccactgaagtagaaaaatagaatatctcctgctttagccttgttcaccattctattgagtgcatccttaatgtttacacccgtaggcagaaccggcgaccctggcgcatcggtgaggacattaacatcgctttccttaaacccaatgtccaggatcacacctcttatggctttcacatcattgatgcatccatgcaagctgaattgggtcttggggtagttgcattccaccagaactgctctcttcgtacccttacccga

SEQ ID NO: 23078 - DNA, 482 bp, Gossypium hirsutum
  Clone ID: LIB3146-047-Q1-K1-F2.9C0
cctagcgaaatgcccagagcctcccagttgtaacaagcaccgccgcctccgcctccgccatatctgcctccaccgccaccgccaccctgcccacattcccgtgctaaatggcccatctcaccacacttataacatccggcgcctgcaccaccaccaccaccggctccttcatcataaccggttgtccttgctcctccaccataaccaccggatccaccggcataaccgctaccaccgccgacgccgcgtccggatctagatgatccacgaacaggggtgccgttggggcccgggacctgaacagccttggggcgaccttgagaagactgaacagcggactggacctgttgaccatggggagggctacggaaaccctgggaacggatggaacgattgggaacagacaaatcagcgacggcgggcggaggggatatgaaggcatggcgcctgggggggtgggggccactggggcgcttggcggg

SEQ ID NO: 23079 - DNA, 614 bp, Gossypium hirsutum
  Clone ID: LIB3146-010-H6_FLI
atctcatggcacaagtttcccagctacaaaatgaaaatcaccagattttaacaacggtgagtatcaccacacagcgttacttgaacgtggaggctgagaactcggtgcttagagctcaagccaacgagcttagccacaggttacagtccctcaatgatatcattgattccttaaatggatgcaataacaatattggtggtgctgacggtggtggtgattgtggtggttttaatgttgcaacgattggtttcaatgagatggttgatcatagctttattaaccctttcaatttggcttacttgaatcaacctatcatggcttctgcagataataacatgtttcagtattgatcttcatgagcttattgatatatatatagatatatctgatcaaagggggttaaagtggaggagatttcaatagaggaaagatcatggtgtttttaatgtttttttggggtttggtttttagagtattttcaatgattattagtagtaggggaattgtgcttattggggtttaatttgtataacctatccaatgcaaagcaaaatattattaatgtattttgaggttttagtttttttttaattttcattttttaaattataatt

SEQ ID NO: 23080 - DNA, 271 bp, Gossypium hirsutum
  Clone ID: LIB3147-001-Q1-K1-A1
gcaagattaagtgtgatagagaatgtaatgatatccacttaagttcaataatgaccgatgggtatttctttcagggcggtgttcgcacgttcatccttaccgcttttgattccatttttaagctagttcatcggttttacttatcagttgccttgtggtattttattacatttgcattgcattgcattgtaatgaccttgaagtggtagtagccattgtagcattgaatttttgggacaggaaatgagaaaacttggatttgttagtgggt

SEQ ID NO: 23081 - DNA, 440 bp, Gossypium hirsutum
  Clone ID: LIB3147-001-Q1-K1-A2
cctccctcgactcttatattcaagaagaagagtttgtaaaaggaatcacaaagtggattaatgaagcaaagcaaactgggggtgcttatctcgaacctaacgccggaacgtttaagtttattgaccaatttcaccagcaaaccaagagagaacatgctttgttggggtcagaggaacaaagtgatgaggttgttgaacatgttgaaaacccaaggtggatctccttcaaagcagtactgatgctcctagtaggcaccttgattgcagctgcatttgctgatccactcgtagatgctgtcgataacttttcaaccgcaacaagtattccatcgttcttcatctcatttattgcattgccattggctacgaactctagtgaagccgtatcagccattatcttcgctacccgcaaaaagcagagaactgcatcattaacattt

SEQ ID NO: 23082 - DNA, 422 bp, Gossypium hirsutum
  Clone ID: LIB3147-001-Q1-K1-A3
taaccgaacatcatcaaaatcatttcggggtcctggaatggctgaaggcttgcagatccttgagaaagttaaagtagcatatgacattccaattgtaactgatgtccatgaaactattcagtgtgaagcagttggaagagtcgctgatgttattcagattccagcattcttatgtcgtcagacggatcttctagttgaggcggccaagactggaagaattatcaatattaaaaaaggccagttctgtgctccttctgttatggtaaattctgctgagaagattagattggctgggaatccgaatgtgatggtttgtgaaagaggcaccatgtttggctataatgatcttattgttgatccacgtaacttggagtggatgaaggaagcgaattgtcctggtgttgctgatatcacacattcac

SEQ ID NO: 23083 - DNA, 422 bp, Gossypium hirsutum
  Clone ID: LIB3147-001-Q1-K1-A4
cggagactcaccaaagcacgaaagccaggatctttcagaaaatggattcctattcgaagagtgcataaccgcatggataagctcacactaacccgtcaattttggatccaattcgggattttccttggggggtatcagtaaggaattggaatgtaataatattgattcatataggaggaaaaggttctctattgattcaaatgctgtacctatgggatagggatagagaaagaggagaaaccgaagatttcacatagtgcttttgatcgaaaaatcaatctgatttatttcgtacccctcgctcaatgagaaaatgggtcagattctataggatcaaacctatgggacttagggaatgatggaagggaataaaataaataagagaaggaaatcatactgagaatactgaaataaaagggcgg

SEQ ID NO: 23084 - DNA, 370 bp, Gossypium hirsutum
  Clone ID: LIB3147-001-Q1-K1-A5
cggagactcaccaaagcacgaaagccaggatctttcagaaaatggattcctattcgaagagtgcataaccgcatggataagctcacactaacccgtcaattttggatccaattcgggattttccttggggggtatcagtaaggaattggaatgtaataatattgattcatataggaggaaaaggttctctattgattcaaatgctgtacctatgggatagggatagagaaagaggaaaaaccgaagatttcacatagtgcttttgatcgaaaaatcaatctgatttatttcgtacccctcgctcaatgagaaaatgggtcagattctataggatcaaacctatgggacttagggaatgatggaagggaat

SEQ ID NO: 23085 - DNA, 296 bp, Gossypium hirsutum
  Clone ID: LIB3147-001-Q1-K1-A7
ctttcgttccctatcgcaggatttactgggagaaatatgtacgctgaaaggagtcaataaggcgttagtgatactaacatatatcatcatcctttaaatcttggaagaagtgtttctaccagaaagctgactaggctaccatcaattactcagaacgatgcaaagttcagggggtatgatgggattcacaggtcaggattcagctactgtctgctgaaactggaactgatctgatctatatgggattttgcttatgaacatcctttccgaagcaaaggtttaaactcatgtctaat

SEQ ID NO: 23086 - DNA, 185 bp, Gossypium hirsutum
  Clone ID: LIB3147-001-Q1-K1-A8
tacgcttttctaaaatcactaaggacttgttagtacctgcagagtcacgggtgacaggcattaatgagatatgcggccaagcgttaacttcagatcttacaaaggactttttgggtatactagccgataatggaatgcttagacatatagaaagcattgcgaatagatttgtggaggttaccatt

SEQ ID NO: 23087 - DNA, 446 bp, Gossypium hirsutum
  unsure (1)..(446): unsure at all n locations; Clone ID: LIB3147-001-Q1-K1-B1
cccacgcgtccgcgatggcatagtccttgagaaccttgctgttcggttcatgaaagaggtccaaatctccgaggcgcgtgctttttatggtttccaaatcgctatcgaaaatatccactccgagatgtacagtctccttctcgagacttacataaaagattccgatgaaaagaaccgtcttttccgcgccatcgagacggtgccgtgtgtggctaaaaaagccgagtgggctatgaaatggatcgacggcggagaaactttcgccgaacggttaatcgcttttgcttgcgtagaggggatctttttctccggaagtttctgtgccatattttggttaaaaaagagggggttaatgcccggattaactntctcaaacgagttaatctcacgagatgaaggtctccactgtgatttcgcttgcttgctgtactctctccttcggtcaa

SEQ ID NO: 23088 - DNA, 432 bp, Gossypium hirsutum
  Clone ID: LIB3147-001-Q1-K1-B2
gtttttatttgtacgataataaacgcaaagctaatcccgatcccgaactaaaaatgtacattgagaaggcgaggagcatctctggtgtagctgttgaccctaagtttgtgaaattgtcggagaaggacattgtggaaatgatattctttccagtggttaatgaggcttgccgagtgtttgctgaaggtattgcagtgaaagcatctgacattgacattgctgctgttatgggcatgggattcccaccttacaggggaggactcatgttttgggctgattctcttggttctaagtacatttattcgagacttgaggagtggtcgaatttatacggaggatttttcaagccttgcgctttcttggctgaaagagctgccaagggtgctccattgagtgcaccactggagatgggaaaatcaagactattaaact

SEQ ID NO: 23089 - DNA, 422 bp, Gossypium hirsutum
  unsure (1)..(422): unsure at all n locations; Clone ID: LIB3147-001-Q1-K1-B3
cggacgcgtgggtttgggtttgatacaatggagtccaacaccaaaatgtcagctcttcttgtgatttgcatgcttttcatttcttcagtgacaccaattcttgggtgtggttcatgtgggaaagcacacaagcatcgaaagcctaagggaaagtcccctaaaggtcccatcactttgcctccccttgtgaaacctccaatcaagttgccaccgggtgttcctccaatagttaagccacccattgaccttccttcggttacggtccctacaattaaccttnccccagggactgttcctncaagtactaaaccaccaagtgggaaaccctgcccaacaccaccaaccaaggacacttgccccattgacacactgaaattgggtgcttgggtgaatctgttgggagggttggtgcacattggact

SEQ ID NO: 23090 - DNA, 354 bp, Gossypium hirsutum
  Clone ID: LIB3147-001-Q1-K1-B4
acgacgcgtccgcccacgcgtccgatggaagagtataagagctttgtaatcacgattcaagtttcgcccaagagcgagggtagtggcagcgtagtgcactggactttggaatacgagaagctgcacggtgggattgagcatcctgagactctgctgcaattcgttcaagatgtctctaaagacattgacggtcacctcacccaagcaagttaagcagtatcacatgatgctattgttgccgctacttgaagcactattcatctatttaatggataaagtgacaacttgctttctcatgtattttgatctgaatatgtacgtttagatcaatatgcagtcacagtgaggagcttt

SEQ ID NO: 23091 - DNA, 99 bp, Gossypium hirsutum
  Clone ID: LIB3147-001-Q1-K1-B5
cggacgcgtgggcggacgcgtgggcggacacatgggatttttatgggttgactaaacaagaatttaactctttgctctattaaaaaaaaaaaaaagaac

SEQ ID NO: 23092 - DNA, 169 bp, Gossypium hirsutum
  Clone ID: LIB3147-001-Q1-K1-B6
agagctcaaagaactacgggtacgatgctgccacatgagcctcaaatatgcacgaagtagaagatcaaccagagccactcatgatgcaacttaaaactgccagaggtcgaaagcccttgatttgaacaatccaatagtataaattcaggcgtattggttattcagcttc

SEQ ID NO: 23093 - DNA, 120 bp, Gossypium hirsutum
  Clone ID: LIB3147-001-Q1-K1-B7
ggaacaggaagaacgatataggcagcccagttatgggagatccgaggaagaagcagtaagagatctgaagccacgatatgggagatcccatgaaaaaaggtatggcctcaagaaacatgg

SEQ ID NO: 23094 - DNA, 61 bp, Gossypium hirsutum
  Clone ID: LIB3147-001-Q1-K1-B8
attgtcttaattaacttagggcttggcaggatcttaacaggcacgggtcaaaggcattaat

SEQ ID NO: 23095 - DNA, 396 bp, Gossypium hirsutum
  Clone ID: LIB3147-001-Q1-K1-C2
cccacgcgtccgtatgaaatgaatgcacataggttttggaggggttaaggttgaattcatcttcagttcagttttcacctttgtccctgccttatgcctcagcatcatgttaatgttagtcggtttacaacataatctagtcttaatctaagttgtgtcatgcaatgcagagtttaacatgccctgtctgggatatacttatatatacaagagaatcatattctataaaaaaaaaaaaaaaaaaaaaaaaaaaagaacaaaaaaaaaaaaaaaagagaaaaaaaaaaaaagaaaaaaacaaaataaacttgagcaggaaaatcaataccaatttaaaagtgtggactaaaaaaaaagggggggcccttttaagggtcccaagtttacttacccttg

SEQ ID NO: 23096 - DNA, 241 bp, Gossypium hirsutum
  Clone ID: LIB3147-001-Q1-K1-C3
cccacgcgtccgcccacgcgtccgcccacgcgtccgcccacgcgtccgcgttgtcgtccacgcctcctgattggatcggatcccatccccttctttacacaatttctttctttctgttgttaatttcgtttatgaatttgtgtgctgctcctcgtcgctgtcttacccaacattcttgtacttttataacccagtaatattacgatgaaattaattttacgaaaaacaaagagattgacac

SEQ ID NO: 23097 - DNA, 256 bp, Gossypium hirsutum
  Clone ID: LIB3147-001-Q1-K1-C4
ggacaaatgtatcgttatgaggatgattttgaagaagccatgcttcaggatactttattaccaagatttccttgattaagtaaatgtattatatcttttattaccaagatttacttgattaagaaaatacattgtatattttattaccttgcatatgtattatttattttagttttgattctaaaaaaaaaaaaaaaaaaaaaaaaaaaaaaaaaaaaagaaaaaaataaaaaagaaccaaataaaataaaagggc

SEQ ID NO: 23098 - DNA, 393 bp, Gossypium hirsutum
  Clone ID: LIB3147-001-Q1-K1-C5
aggattcggagcaacaagagtactttgatccaaagatagcagacgaggagcgtgagaaagggaacgaatgtttcaagcagcagaagtatcccgaggctgtgaagcattatacggaatcattgagaagaaatccgaaagatccaaaggcatacagcaacagaactgcatgctacacaaaaatgggtgcattggcccgagggcttgaagaatgctgaaagtgcattgagtttgacccaacctttttcaaaggttacacatgaaaaggtgctgttcagttcttcatgaaagagtatgacaaagctttagaaacataccacgaaaggttgaaacaccatgccaataaccaggagctgctcgatggtgttcgaagatgcgtagaacagatcaacaaag

SEQ ID NO: 23099 - DNA, 219 bp, Gossypium hirsutum
  Clone ID: LIB3147-001-Q1-K1-C6
accacgcgtacgaccacgcgtacgaaacacttatgcaatgacccaaaaaagcttcattgtctcttctattgaaaaccccatggctgctcttaagctagtttgagctctagtgttgtgcatgttggtggttgagcccattgccacaagcgtcataacatgctgctatgtgacaagcatagtggccggttgcttatcatacttgcagaacggtgggaacgt

SEQ ID NO: 23100 - DNA, 263 bp, Gossypium hirsutum
  Clone ID: LIB3147-001-Q1-K1-C7
cgaaaacccctcctcaagaaatattcagtctctgtgcaattacaactccaagaaaaaatggcaacggaactaccaaaaccggcaaccgaagacgtaaagtttgatttgattgaagatgatgatgagtttgaagaatttgagattgatgaagagtgggagttaaaggaagaaggaaaggatattacacatcaatgggaagattactgggatgatgatgatgtcactgacgatttctctttacaactgaagagggaacttgagaa

SEQ ID NO: 23101 - DNA, 294 bp, Gossypium hirsutum
  unsure (1)..(294): unsure at all n locations; Clone ID: LIB3147-001-Q1-K1-C8
aaaaatcaagaagaatttaggcatgatgtatggcaaattgcctacaacgctcatatctacaatgatggtcgaaatcctggtattcctnctcttgccgatcagcttttggagctttgtgactacttgctacatgagtattctgataacttggctgaagctgaagcaggtataggggaagcttaatcggataacacatttaaaatcattcatcatctgaaagccaaaattccctcacagtagaactgctgcttctctgggttctaggggtttccaggctttgaaccatggtaatag

SEQ ID NO: 23102 - DNA, 57 bp, Gossypium hirsutum
  Clone ID: LIB3147-001-Q1-K1-D1
attttgttaagttttagagttctccaatacttgaaggaaaagcttaaatatttttgg

SEQ ID NO: 23103 - DNA, 444 bp, Gossypium hirsutum
  Clone ID: LIB3147-001-Q1-K1-D2
caagattacgatcacaaacgacaagggtcggttgtctaaggaagaaatcgagaagatggttcaagaagcggagaagtacaagtccgaggatgaggagcacaagaagaaggttgaagccaagaacgcattggagaattatgcctacaacatgaggaacactgtcaaggatgagaagattggttcaaagcttgacccggccgacaagaagaagattgaagatgccattgatggagcaatccaatggttggatggcaaccagctagccgaggccgatgaattcgaggataagatgaaggagctcgagagcatctgcaatcctatcattgccaagatgtaccaaggtgcaggggctgacatgggtggtggcatggatgaggatgccccacctaccggtggcagcagtgccggacctaagatcgaggaagtcgactaaattaacagctt

SEQ ID NO: 23104 - DNA, 388 bp, Gossypium hirsutum
  Clone ID: LIB3147-001-Q1-K1-D3
gctgctataagatttgatgcgggcttatttagtttttattttttactttagcccatacactgggactatcatattcccatatctatgcctgaaaatgtgttcagcatggatgtcaaacaccgaccaaagagtcccaacaacttagctataaaaattaaattattaactttgtactgcatgtttcagtcaagtgtgtttcattcccaacccaaatctatcataggagccccagcctacattgcaccagaggtcttgtctaggaaacaatatgatgggaagataattcttattccctgtttctgtactttttggtctataagacatactattccgagttgagctgagtagaacttcatatgaatgaaaacttagagactttttggaaaaa

SEQ ID NO: 23105 - DNA, 436 bp, Gossypium hirsutum
  Clone ID: LIB3147-001-Q1-K1-D4
cccacgcgtccgaaagaaacgtaaaaaggacaaagttgtatgggatgaacagactggtgcatggaaacgtcgctttggttatgatcgtgtcaatgatgataaagacatacccatcattgaggccaagatgactgatgagccatgagaggatccttttgctaaaagacaagatgataaaaagaaacgggttgagaagcaagagaagaatcgcctccagaacttgaaacaagctgcaaaacttggtgctttgccaagccatgttcagcttgctgctacggctttgcccataacaggaacccaagctccacctaagaaagtaaccaaagatgaattggggaatgtagctgggatggctgctacatctacagccagtggtgggaaattcgataggaaattgccaggagaaaagcctgctaaaaagcaaggaaagcatcgc

SEQ ID NO: 23106 - DNA, 160 bp, Gossypium hirsutum
  Clone ID: LIB3147-001-Q1-K1-D5
accacgcgtccggccgaaccctccatttgtctctgccaccagccgcacccaaagatgcaaatcttcgacaaaaccctaacggggaagaccataaccctatagggtgagactttcgacaccatcgacaatgtcaaagccaagatccaagacacggaaggca

SEQ ID NO: 23107 - DNA, 229 bp, Gossypium hirsutum
  Clone ID: LIB3147-001-Q1-K1-D6
accacgcgtacgaccaagcgttcgaaacacttctgcaatcacccaaagaagctgaatcgcgtcttctattgaacactcaatggctggacttaaactctatagggctatagtgttgagcatgttgacgatgtcgcagattgcctcaaccatactgaaaggctgctgatttgacaagaacagttcatgcttgcctataagactttcaaaaacgacggaacgttatcaaggt

SEQ ID NO: 23108 - DNA, 441 bp, Gossypium hirsutum
  Clone ID: LIB3147-001-Q1-K1-D7
ccaacaaaagctggactgaagcgtctcccatctgatcgtctagaagaaattgctgcaaagaggttgaaaaaacttagtcagttgaaatcattagctgcagagaagaagggcaatctgagggcttcggaagctccaaaagttgaagttaaagaacagccaactacagggcccccagcaagaccgactaaaaaaccagattctttaaggaaagtggagtctttacctaaggctgttgagcctacaatgctggttatgaaatttcctcctcaagtatcactttcatcaagtgcagaattgaagggcagatttggacgcttcggctcattagaacagtcagctattcctgtggtttggaagttctcaaaatgccctggtggggttcagacaccagaattgatgctcaggctgcatatagatatgctaatggaaccaactcccttt

SEQ ID NO: 23109 - DNA, 418 bp, Gossypium hirsutum
  Clone ID: LIB3147-001-Q1-K1-D8
cccacgcgtccgatttatgggaacttggttccagtactggagggcgaaaaattatccctcagagtcttggtggatcattcgatcgttgaaagctttgctcaaggtggaaggacagtcatcacatctcgggtttatccgacgaaagcaatctatggagctgctaagctgttcttattcaacaatgctactgaggccagtgtcagtgcctcacttaggatctggcaaatgaactctgctttcattcgaccttatccaaacgataaggagtcccaataggaccgaatagaagttaatccaaaagtcaccattgattaattaattattgtacctcctgctattcaaaggaaaatgaagtttcttgttttttgtactagttattcttttcggctttttagtaggccaataaaaattttattag

SEQ ID NO: 23110 - DNA, 444 bp, Gossypium hirsutum
  Clone ID: LIB3147-001-Q1-K1-E1
ggtttacttttccatctgaagaagggggaagagcaatctttgcgaagaaccaaagatgccgaagaacaaaggaaagggaggaaagaaccgtaagaggggaaagaacgaggccgatgacgagaaacgtgagcttatcttcaaagaagatggccaagaatacgcccaagtctcacgcatgttgggtaacggccgctgcgaagctatgtgcatcgacggcaccaagcgcctctgccacatccgggggaagatgcacaagaaggtctggatcgccgccggcgacatcatcctcgtcggccttagggattatcaagatgacaaggctgacgtcatcttgaaatacatgcccgatgaagcaaggcttctcaaagcttacggtgagctacccgagaataccaggttgaatgaagggattgctggcggcattgatgaggaagatgatggtgc

SEQ ID NO: 23111 - DNA, 443 bp, Gossypium hirsutum
  Clone ID: LIB3147-001-Q1-K1-E2
gggatagcaatataagcacagtcttgaaaggagatgctctgaccttgaacaagctgaaactgaggtcgatctcttgggtgatgaggtggaagtacttgtaggccttctcgagaaaatatacattgcacttgatcattattccccaatattgaaacattatcctggaattatggagatactgaagctggttctaagagaattgagtggagaatgtgacacgtgactttgatttatccttcattagatgaatgttgattctttttcacccctattcatcatgagggaaggaatggtcgcacggacaaaatgttccactgctgatacaatcaataacagggttatgtgcaggtgaacccggaaaaatacattcttatccctgctgattatgttattctccctgtatagaaacttataagatagcacgtaaaaattgtggcgatggt

SEQ ID NO: 23112 - DNA, 442 bp, Gossypium hirsutum
  Clone ID: LIB3147-001-Q1-K1-E3
cccacgcgtccgaagagatttaatgcggccaagatctttagccaccctgatgttgttgctgaggagccttggtatggtattgagcaagagtacactcttcttcaaaaggatactaagtggcctcttggatggcctgttggaggattccctggaccacagggtccgtactactgtggtgtaggtgctgacaagtcctttggtagggacatcgtggactcccactacaaggcttgcctttatgctggcgttaacatcagtggaatcaacggtgaagttatgcctggtcaatgggaattccaagttggtccatctgttggaatatctgcaggtgatcaaatatggattgcacgatacatactcgagcgaatcactgaaatcgcaggagttgttctttcttttgatcccaaacccattccgggtgactggaatggtgctggtgctc

SEQ ID NO: 23113 - DNA, 379 bp, Gossypium hirsutum
  Clone ID: LIB3147-001-Q1-K1-E4
gccacgcattcgtcaacgctggctgtagagctctgactaacggattgctccagatagaccatagtgcgcgcaccgtcactgcttgcacagatagatgccaggcttgaaactctatgctcgatggagcgagcccatgtcgacagtatccgatcgagacgacgcatttccattgctcgctgaggacaatctaccatgaaagacagcccatacgtgttaatacgactgggacaatgcaaatcatcgaggactcaatgtatccacggcaatagctaatgacgctggcatcataggcgacagccataatgtactgttagcttaaaaacctccaggactactgaaatcccgtaaccattcttttgatcttgttatcactgttaat

SEQ ID NO: 23114 - DNA, 251 bp, Gossypium hirsutum
  Clone ID: LIB3147-001-Q1-K1-E5
accacgcgtacggaaaaaccttctattgatctctgacaaaagcgttgctccaagattcacctagtccacagaaccagcactgggaagaccataaccctataggttcaaagtccccactcggttgaccgtgtccaagattacatccaacactcggtaaggctcccatgtgtaccacataatctcaaattttccggtaagaactttgtggactgtcggaacttaacttacttcaaccatcccatggaaaacac

SEQ ID NO: 23115 - DNA, 343 bp, Gossypium hirsutum
  Clone ID: LIB3147-001-Q1-K1-E6
cccacgcgtccgagataaacagcaaagatgttttagaagaggggcaagtcagcaatttccctcgcgatttgtgaggatgattgatccagagatgctgaagatattcgtgtaccacctttcctttttcttttaactctcaaaaacctcatctcacaatttgtagtgatataaactggtaatgcaatctttttggttcaaaacttggtaccgggggggaacctaagaatttggtggggcttagggtggggtgcggtgaatctttaaaacttttctgaatttaagtgaatttatggattataacattctcattaatgatttaattcgtaatccaatatatattgtg

SEQ ID NO: 23116 - DNA, 346 bp, Gossypium hirsutum
  Clone ID: LIB3147-001-Q1-K1-E8
cgtttcaccagcagttagccatttttttgtaggatcaaaatctcaaaggcttagaactgtatgtcttggagaaatggggcttgtttatttttctttgttccctttctcggctcgctattacttgtttgattcatggagttatgcaggggaagattttaaagtagttttatacatttttcatcatcttgctgaaattcatattcatggtatgttgtttcccctgcaaaaaaaaacaaggataattttgattaaaagcactatcaaaagaatagtacctatctgatgctgatttccagaatgattatttgcttgaaatcatcgtcatcaataaaaaaggggcggccct

SEQ ID NO: 23117 - DNA, 440 bp, Gossypium hirsutum
  Clone ID: LIB3147-001-Q1-K1-F1
cccacgcgtccggatgctttccatgtcaataccgtggacacaactggcgccggtgactcctttgttggtgcattgctatgcaagattgttgaaaacccaaccattcttgaggatgaagcaaaattaagggaagtgttgaaatttgcaaatgcatgtggagccatcacgacgaccaaaaagggagcaatccctgcactaccaaccgtggccgatgcccttgccttaatcaatggagcttagattttaagcaacttgaataatttgcacgttgttttgcctcccgtgattatcctttcatttcaaagagttctcaatttattcccctttgatatgcgacctttgttccccccacacccgattgcttgtgttctaatgatggaaaaggctttgtggttttaagcgtgtaggaaattcttttccctcttttataattttgcaat

SEQ ID NO: 23118 - DNA, 325 bp, Gossypium hirsutum
  Clone ID: LIB3147-001-Q1-K1-F2
gaagtcaaacgtaggttctacaagcattggtgcaagtccaagaagaaggctttcaccaagtactcaaagcggtacgagagtgaagaaaggaagaagagtatcgaggctcaactggaaaagatcaagaaatatgccactgttggtagggttttggcccacacacagattatgaaaatgaaaggattgaagcagaagaaagcacacctaatggagatccaagttaatgggggaactattgcagacaaggttgattttgcttacaagttctttgagaaacaagtccccatcgatgcttgtttccaaaaagatgaaatgattgatatca

SEQ ID NO: 23119 - DNA, 441 bp, Gossypium hirsutum
  Clone ID: LIB3147-001-Q1-K1-F3
gaatgataagttgaaaagaagaagagagaaaactgtaaggacagcaatgcttgccattcatgcaagccaccaaagcccattccaccacctgctgcatgccctccaccaccagcaaagcctgcttcttgccctaaggacacattgaagctaggcgtttgtgctgacctgcttggactggtaaacatagtggtgggagcacctccttcgagcaaatgctgtgctttgctccaaggcttggctgatttagaggctgccctttgcctttgcaccgccattaaagccaatgtgcttggggccaacctcaacatccctattacccttagcttactccttagtgcatgtcagaaggaaatccctccaggcttcaaatgttgatatttttttttaagaagcacaatcagttgttgatgttggctaatggctaagtttgctctactttaa

SEQ ID NO: 23120 - DNA, 310 bp, Gossypium hirsutum
  Clone ID: LIB3147-001-Q1-K1-F4
gaatagaacaacaaatagtacactagttaaaagaaagccttttgtggtgattaatttaaatgctagcacatctagtgtctattttctctttaatgcttggcccgccacgaacatgagcaggatttatgttgaagattaagataatatcaatttagtttttactgcatgaaaaacagaaaggaataaaaaaataaaatacaaaccaaaaagaaatgcccttgacttaatcaaaggatctaatactaaaaacaatattgattaaaagttacattgaaaatgaattccctgattatgctgttctttcgaaggg

SEQ ID NO: 23121 - DNA, 306 bp, Gossypium hirsutum
  Clone ID: LIB3147-001-Q1-K1-F5
cccacgcgtccgcccacgcgtccgcaaagaagctcaagcgcaaatgaatgaggagctttccggatggaagcttgtcgtgggtgatgttttcagagaacctaatcactcgaagcttctctgcgtgatgattggtgatggagttcagattatgggaatggctttagtcactatagtttttgcagctttgggtttcatgtcaccggcttcacgaggaatgctactcaccgggatgatcattctctatcttttcttaagtatagctgccggatatgtcgctgtttgtctttggagaactcttaaagggac

SEQ ID NO: 23122 - DNA, 253 bp, Gossypium hirsutum
  Clone ID: LIB3147-001-Q1-K1-F6
gacaatcttacaaatcttcctgttcatatcagatatcttagtatcatctctatggcctcaaatgccaagggcttcgttgacatgaccatcggtggtcaacccgctcgtgcaacatgtatggagctttttgcacattgcacttctagcactgcggagaactttcgagccatacgtactggccagaaaggcgtgagtcgaagcggtaagcccctgcactacataagcttttcttttcattgggtgatccctaact

SEQ ID NO: 23123 - DNA, 141 bp, Gossypium hirsutum
  Clone ID: LIB3147-001-Q1-K1-F7
tcgcccacgcgtccggtggcctcattccgtgctcaacaacttcgatttcgattttctggacgctgcctttcctgctagaggaaaatccgactttgaatccccttatgatccttcttattattgatggtatcaagtcaacga

SEQ ID NO: 23124 - DNA, 372 bp, Gossypium hirsutum
  Clone ID: LIB3147-001-Q1-K1-F8
gcaaactctctctagaactacagaaaaactagggaaaatgactgaggcagtgataaggaagaagccaggaatggcgagtgtgaaggacatgccacttctccaagatgggcctcctccgggtgggttcgcccccgtcaggtacgcccgtcggatacccaacaagggcccaagtgctatggctatctttctagctgcttttggtgccttctcgtatgggatgtaccaagtcggccaagggaacaagatccgcaaggcactgaaggaagaaaagtttgctgcacgtagagcaatattgcctgtgcttcaagctgaagaagatgaaagatttgtcaaagagtggaagaagtatcttgagtatgaagcggaagtgat

SEQ ID NO: 23125 - DNA, 446 bp, Gossypium hirsutum
  Clone ID: LIB3147-001-Q1-K1-G1
aaaatggtgaagggacgccaaggagagcgagtgagactctatgtaagaggaaccatcttgggttacaagaggtcaaagtcgaaccagtatccaaacacttcattgatccagattgagggagttaacaccaaggaggaagtagcttggtatgctggcaagcgtatggcttatatctacaaggccaaagtgaagaagaatggctcacactatcgctgcatttggggaaaagttactagacctcatggtaacagtggggttgttcgtgctaagttcaagtctaaccttcccccaaagtctatgggagatagagtcagagtcttcatgtaccccagcaatatatgagtagtgtagatcgacgactcgaatgacgctctaccatttcacttttgtttttatgaacttagtcaagattttgtgtgctttgaatcagtcattttgtttctttg

SEQ ID NO: 23126 - DNA, 415 bp, Gossypium hirsutum
  Clone ID: LIB3147-001-Q1-K1-G2
gtcaatgagactggatacgggagcacatttgactaggatgctttgatcaatgatatgtcatggttaaaggcatctatgctggtccttttgctggagaacttatgaatgctatctgctaagagagttacttttacaataagaatgtggagatcacagacttgaaccaccatgactttgtcttgaccgagcatataacgtttacagctgctactgatgatgcatgctctaatatatacttggtatctcggatgcgactacagatgcttcctagacacagtatgaaactgggaaaaatgctttgaagctgcaaacccatttgtataccaattgcagtgctctgatacagacatcaaatgcaacatgttcgtagtgtgaaatatgtatctatattttctggatcagactgtaacagtgt

SEQ ID NO: 23127 - DNA, 431 bp, Gossypium hirsutum
  Clone ID: LIB3147-001-Q1-K1-G3
ctctctctctctatctttataaaaaaacctccggctattggggtttttggtttcgtagattcgtttcgcttcatttttgtctcgttttaaacagtaatttccttcttttttttttcatttttttcttggaatttttgaagtgtttaataaaaaaaaatggcgttagtttcattcgtcgggagggttcttttcgcttcagtgttcatcctctctgcttggcaagagttcaatgaatttggtgttgatggagggcctgcagctaaggcactcaaaccaaaattcaatgtcttctcaaagactgtgacagctcatacaggggtggaagtaccagaatttgatattaaggttctagttgctgctgctgtagccttcaagggtgttgggggtatcctttttatctttggcagcactatcggggcttatcttctggc

SEQ ID NO: 23128 - DNA, 443 bp, Gossypium hirsutum
  Clone ID: LIB3147-001-Q1-K1-G4
cagtttttcctttaacgtggttttctcccagtaaatctagtttgatggaatggatgatcgatcatctggttcaaacaacgctgcagcactttaaagaaatctcaactgctgtaaatcaaccattgtcagtccttattccatcacctatcaatccttatttttgaagctcaaatctgcatatttatgaagtaagtacttccggctggcttgtatttaaatctcctctgcttcatttatacattttggttcggggtcgggtcgaggattaaccacattcagcattgcattcattagaattcatttcattcgttagttttacttagtttgggagtcaaaattgttccatctcatgcattcatagaatttttctgtctttgcgtttctttggggtatacaactgtttttcattttgttcttctttttttttttttataaatgtattt

SEQ ID NO: 23129 - DNA, 337 bp, Gossypium hirsutum
  Clone ID: LIB3147-001-Q1-K1-G5
cccacggttactgcacaaccatctggtacttctggtgccaccaccaatgtctcagtcatcacgattatgcagaaagcagatgcgatccgtcaggctgatgcgagtgatgacagtgaagatgaggataactggagcgacaattaattatcttggaacatggatgcatcagataattgcaagtaaatcctgccagtctccattgagtatttttcacaattgggtttggagctcttcatagctgtctttgaattaaaccctgtctatgatcgagccattgccatggatggacaaagctgtgatattgattcaaccaggtttggctttggttaccatgtgt

SEQ ID NO: 23130 - DNA, 161 bp, Gossypium hirsutum
  Clone ID: LIB3147-001-Q1-K1-G6
cctttactgccttactgtctgattagatcttatcaagtcgttacattttcattgttcattgatgcgtgaattagagtatcttgggttacattgggctcttatgatagttaggagaagccatttattaggatgggtcgaccatactatgagtatgtgctggg

SEQ ID NO: 23131 - DNA, 278 bp, Gossypium hirsutum
  Clone ID: LIB3147-001-Q1-K1-G7
cccacgcgtgcgacagggatatgggtacatacagatattgtgcgccgtgttatgctatgacggctcagctggcatgcatgtaggatatttacagcttgtgaggggacctacaggatctaaatactgatgagcaaggtagatgatagacaagagatcgactctagcataatctacatcatgcgcacgtaccatgctcaaagaccgaacaaacttgtgacgtatgggcgttcctctactactaggtcgatatccgggacgacgtgcaatacgaagcactt

SEQ ID NO: 23132 - DNA, 243 bp, Gossypium hirsutum
  Clone ID: LIB3147-001-Q1-K1-G8
cccacgcgtccgcttagaacttatcaaactctttttctgttgtgtgtctaaggttgaataaacaaaatatggagacttcaaaacaacagaagttaaaaaaaaaaaaaaaaaaaaaaaaaaaaaaataaaaaaaaaaaaaaaaaaaaaaaaaaaaaaaaaaaaaaaaaaaagaatataaatgaagtaaaaaaataaaagatgaatgagaatttaaaactaataatgattgatttatacatttag

SEQ ID NO: 23133 - DNA, 444 bp, Gossypium hirsutum
  Clone ID: LIB3147-001-Q1-K1-H1
taaggatggttttatcatccggaagcctaccaagattcactcccgatctcgtgcacgcagaatgaaagaggccaagagaaagggtcgtcattctggctatggtaagaggaagggtaccagggaggcaagattgcctacaaagatcctttggatgaggagaatgcgagtactaaggcgtttgcttcgtaagtacagggaatccaagaagattgacaagcacatgtaccatgacatgtacatgaaggtgaagggtaatgtatttaagaacaagcgtgtcttgatggaaagcattcacaagtccaaggctgagaaggcaagagagaagacactctcagatcagtttgaggccaagcgagctaagaacaaggcgagcagggagagaaagatggccagaaaggaagaacgccttgcacagggacctggtgtgaaagcagcacctgcagc

SEQ ID NO: 23134 - DNA, 440 bp, Gossypium hirsutum
  Clone ID: LIB3147-001-Q1-K1-H2
tccacgcgtccggagcaagaagacctcattgtttggatgctaactgctgcgctgccaacatttagaaaattgtatgggaagattgaacaggatctgcaaccaaatgatcaaatacatgtgacattggataataactacaatacttacagtttcaatggcaagaaaaaactagggctttaaatactagctgcttgggtggaaaaaatgactcccttgcaattgctaatttaattgtggccgggttagctttcttttgggcttggccttcaattgttgcttacctggcaaagccaaggcaattgggagacccatcgtatttgtcatggaacagaaatccaggaggacattaagcaattcaagaacctggaacctctcatgaccaatggttacagttgggttgatgggttgatggattaaaatggcctatatatatatataat

SEQ ID NO: 23135 - DNA, 437 bp, Gossypium hirsutum
  Clone ID: LIB3147-001-Q1-K1-H3
cttttgttctcctaattttgattctttttaaagtatttcatttttagttcaagatatatgatttccattgggcttttctttgtctgattctattgcatgttcgattgaacagatgaaaagttctcttcttggtctttgactatttttcgaatggcttgtgattttgactagttgagttttctttatttgcatttcttgaattttttttaatgataaaattgtgggttttaatattaagaggatattaacatgaagtttatgtttcggtttctatattgaattaagttgaggtttttctttagaggatttttttatatctctggctcgttttacaggaaaaagagaccagcactgaccatttgttttcagatacaattcttctttcttggatttatagtgaatcatttctggacaaattttccaggttttatatcaat

SEQ ID NO: 23136 - DNA, 448 bp, Gossypium hirsutum
  unsure (1)..(448): unsure at all n locations; Clone ID: LIB3147-001-Q1-K1-H4
ccagaaaccctcgttattaatcggcggaagcagatagcctctagccatgactttcaagcgtaggaatggtggccgcaacaagcatggccgtggccatgtcaaattcatccgctgttctaactgtggcaaatgctgccccaaggataagtcaattaagaggtttcttgtgaggaacattgtggaacaagctgctgttagagatgtccaagaagcctgcgtttatgacacttatactttgcctaagctgtatgttaagatgcaatactgtgtctcgtgtgcgatccactcccacgttgtgagagtccgatcccgcaccgataggaggaaacgtgatccacccgcccgcttcatcagacgcagggatgatatgccaaagcctggtcagcctggtcaagcaccacgtncaggtgttgcagttcctgctcgtgcttaaaggctgtgaaagctt

SEQ ID NO: 23137 - DNA, 427 bp, Gossypium hirsutum
  unsure (1)..(427): unsure at all n locations; Clone ID: LIB3147-001-Q1-K1-H5
cccacgcgtccggagagatttgtatagcagcttctcctctcaaccgccacgccaaacatgccttcacataagactttcagaatcaagaagaagctggccaagaagatgaagcagaacaggcctatcccttattggatccgcatgcgcaccgattacaccattaagtacaatgcgaaacgtaggcactggctgccgaccaagctaaggttctaagctttatgtgccttttttggagttttgtactcacgcaaagctctgttttttggttaattcatgaaatttgatgtggccttgacgttttatatgatggtattgacgatatttagccattggttcgactgttgtctatctaatgttttgatttcgagctttgaatttttatgaaactgaatcattatgttctttggaataatgaanactgttatta

SEQ ID NO: 23138 - DNA, 341 bp, Gossypium hirsutum
  Clone ID: LIB3147-001-Q1-K1-H6
aatttattcgtacggaggatctatagaaacattaagtgtgactagaacattgctgtctgaaagtagaaccatcagcacttctgcgagaattctagttattgaggcaataagtgcttagaggaagctcctgatcaggtacaggggaacccaacgaagcctatatattcaatgacggactttgacggtaacatgtattcctggtaccatggaacaaggaaagccctgagattttggtttggttctgatataattattagtattattggattgctcttgctgtaacttggaggcctggattggtagaatttaaatagttgtgtataattcagaaacttgcttaa

SEQ ID NO: 23139 - DNA, 176 bp, Gossypium hirsutum
  Clone ID: LIB3147-001-Q1-K1-H7
tcggatcttggttactttagtttcattccccatcctctatcatgatcatcattcatggcagatgttgattacaattgcctgccctgaaaaaatagtatatgagtgactcactgtaagtcctttttattatattattcaaaaccaggatcacggcttgaaaagttacttttcatttt

SEQ ID NO: 23140 - DNA, 275 bp, Gossypium hirsutum
  Clone ID: LIB3147-001-Q1-K1-H8
ctgactcgtgggcggacgcgtgggcggacgcgtggggttttttttgtgcgtgggaattgttgggacaaggagagggtgggcagagacatggcggaagggtgattttgtctgtctagtgcttgcacatctcttctggcaattgtccaatgatggtgcttgaatgtaaccttcattatcattctcatatggatctttcacaggatgctcctgaatatcactctaatacgatatctaccatgtcttttgaattccactccaccttatggttggcaatc

SEQ ID NO: 23141 - DNA, 273 bp, Gossypium hirsutum
  Clone ID: LIB3147-001-Q1-K2-A1
gcaagagtaagtgtgatagagaatgtaatgatttgcacttaagttcagtaatgaccgatggtgggttctttcagggccgtgtgcgcacgtacatgcttaccgcttttgattccatttttaagctggttcatcgggtgtacttatcagtggccttgtggtattttattacatttgcattgcgttgcattgtaatgaccttgaagtggtaacagccattgttgcattgactttttgtgaccggaaatgagagcaacttggattgggcagtgggtt

SEQ ID NO: 23142 - DNA, 446 bp, Gossypium hirsutum
  Clone ID: LIB3147-001-Q1-K2-A10
aaacacttgaaaatatctctcttcactttcttctcttttcaacgcagagtgaaaggcggagaggccgtagacaatctctcttgcgctcttctcgtagaatggatcagattcaacatccatctgtcatgcataaggtagctggccagctcctttcttctagcatttcccgagattttcaagggtatgatgggtctttcaggaggcctgctctataccaaggacattttgcatatgggaattattccaatgctggaatgcactatcctattgttccatcaacagctaccgccatttgtgttcaagcccctgcagagaaaggatttaccagctatgccattgatttcctcatgggtggagtttctgctgctgtgtcaaaaacagctgctgctccgattgagcgtgttaaagctttgatacagaaccaggatgaaatgatcaaaactggt

SEQ ID NO: 23143 - DNA, 378 bp, Gossypium hirsutum
  Clone ID: LIB3147-001-Q1-K2-A12
cccacgcgtccgcatggttaagctggtatgctccgacaggaagaccggcggagttgttttcgagaaggagggatataccgacaaaaccggaaaataccagattcgtgtatccgaagatcacttggatcagatctgtgatgcagttcttgtgaagagcccccagcttggatgtgccacaatgtcccccggtcgtgaacgtgcccgtgttatcttgaccaactccaatggcatttcatccaccacccgttatgccaatagcatgggcttcatggttgacaaggctgaagttggctgtgctgagatgatgaagatgtatcgtgaggatgaggaggatgtctagtgtgtgggtttggattaatttgcatatgaaatgtgatg

SEQ ID NO: 23144 - DNA, 217 bp, Gossypium hirsutum
  unsure (1)..(217): unsure at all n locations; Clone ID: LIB3147-001-Q1-K2-A2
nctncctcgactcttatattcaagaagaagagtttgtaaaaggaatcacaaagtggattaatgaagcaaagcaaactgggggtgcttatctcgaacctaacgccggaacggttaagtttattgaccaatttcaccaagcaaccaagagagaacctgccttggtgggggtaaaaggaccaaatggataaggtggtggaccatgtggaaaacccaaggg

SEQ ID NO: 23145 - DNA, 453 bp, Gossypium hirsutum
  unsure (1)..(453): unsure at all n locations; Clone ID: LIB3147-001-Q1-K2-A3
taaccgaacatcatcaaaatcatttccgagtcctggaatggctgaaggctngcagatcctttgagagagtgcaagtagcatatgacattccaattgtaactgatgtccatgaaactattcagtgtgaagcagttggaagagtcgctgatgttattcagattccagcattcttatgtcgtcagacggatcttctagttgaggcggccaagactggaagaattatcaatattaaaaaaggccagttctgtgctccttctgttatggtaaattctgctgagaagattagattggctgggaatccgaatgtgatggtttgtgaaagaggcaccatgtttggctataatgatcttattggtgatccacgtaacttggagtggatgagggaagcgaattgtcctggttgtgctgatatcacacattcactgcaacagccagctggaagaaagttggatg

SEQ ID NO: 23146 - DNA, 370 bp, Gossypium hirsutum
  Clone ID: LIB3147-001-Q1-K2-A4
cggagactcaccaaagcacgaaagccaggatctttcagaaaatggattcctattcgaagagtgcataaccgcatggataagctcacactaacccgtcaattttggatccaattcgggattttccttggggggtatcagtaaggaattggaatggaataatattgattcatataggaagaaaagggtctctattggttcaaatggctgtcctaatggatagggataggagaaggaggaaaacccgagaattcacaatatgcttttgatcgaaaaaatcaatctgtttatttcgtacccctcgctcatgagaaaatgggtcagaatctataggatcaaccctttggaccttagggaatgatggaagggaatt

SEQ ID NO: 23147 - DNA, 412 bp, Gossypium hirsutum
  unsure (1)..(412): unsure at all n locations; Clone ID: LIB3147-001-Q1-K2-A5
gcgcagagactcaccaaagcacgaaagccaggatctttcagaaaatggattcctatncgaagagtgcataaccgcatggataagctcacactaacccgtcaattttggatccaattcgggattttccttggggggtatcagtaaggaattggaatgtaataatattgattcatataggaggaaaaggttctctattgattcaaatgctgtacctatgggatagggatagagaaagaggaaaaaccgaagatttcacatagtgcttttgatcgaaaaatcaatctgatttatttcgtacccctcgctcaatgataaaaatgggtcagattctataggatcaaacctatgggacttagggaatgatggaagggaataaaatanaaaaaaaaaagaaatcaaataaagataataa

SEQ ID NO: 23148 - DNA, 407 bp, Gossypium hirsutum
  Clone ID: LIB3147-001-Q1-K2-A6
gtggaattttaggacaagcactgtgcaccactgctgctgtacttggagggaagagcctggcgtgtcagatatctgagaaaattgttgcactctcgggtggagttcttttcattggttttggaatccaatccctcctctcaacagttgagtcttgacgacttactaatggttagttctgatttttccatcaagaaaattgttcactagagttggcgtactccgttggggaggagttgggttgctatgaattctttaatgtttcacataaaacaggcgaagatcctaaatccaaattggacccgctgttttgttattacatttataattattcatacctgtctgtcatcttctcagtccaggcacagtgctgtgtcttacagtcattattagataggcaagcaaacgct

SEQ ID NO: 23149 - DNA, 237 bp, Gossypium hirsutum
  Clone ID: LIB3147-001-Q1-K2-A7
ctttcgttccatatagcagggcttactgggatatacatgtacgctgaaaggagccaataacgcgttagcgatcctaagatatatcaccaatctttaatgatggatgaagtgtttctaccagaaggctgactaggctgacttacattactcataacgatgcaaagttcagggggtatgatggcatttacaggacgagattcagctactgtctgctgaaacaggagctgatctgatcta

SEQ ID NO: 23150 - DNA, 168 bp, Gossypium hirsutum
  Clone ID: LIB3147-001-Q1-K2-A8
cttttctcaattcactaaggacttgttagtacctgcagagacacgggtcaaagccattaatgagatatgtgtccaagctaaattttcagatcttacaaagaacttattggctatactagctgataatggaatgctatgacatatagaaagcattgcgaattgatttgt

SEQ ID NO: 23151 - DNA, 416 bp, Gossypium hirsutum
  Clone ID: LIB3147-001-Q1-K2-A9
ggccaaatgtgacccacgccatgggaagtacatggcttgctgccttatgtaccgaggagatgttgtgcccaaagatgtgaatgcggctgtggccaccatcaagaccaaacgcacaatccaatttgtggattggtgccctactggattcaagtgcggtatcaactaccagccaccaactgttgttccaggaggggaccttgccaaggttcagagagctgtctgcatgatctccaactcaaccagcgttgcggaagtgttttcccgcattgatcataaatttgatctcatgtatgccaagcgtgcatttgtgcactggtatgttggtgagggcatggaggaaggagagttttccgaggcacgtgaagatctcgctgccctggaaaaagattatgaagaagttggcgctgagtctggtg

SEQ ID NO: 23152 - DNA, 382 bp, Gossypium hirsutum
  Clone ID: LIB3147-001-Q1-K2-B1
gacggatgcgtccgcgcacgcgttcgcgatggcatagtccttgagaaccttgctgttccgttcatgaaagaggtccaaatctccgaggcgcgtgctttttatggtttccaaatcgctatcgaaaatatccactccgagatgtacagtctccttcttgagacttacataaaagattccgatgaaaagaaccgtcttttccgcgccatcgagacggtgccgtgtgtggctaaaaaagccgagtgggctatgaaatggatcgacggcggaaaaaactttcgccgaacggttaatcgcttttgcttgcgtagaggggatctttttctccggagtttctgtgccatattttggttaaaaaagagggggttaatgcccggattaactt

SEQ ID NO: 23153 - DNA, 437 bp, Gossypium hirsutum
  unsure (1)..(437): unsure at all n locations; Clone ID: LIB3147-001-Q1-K2-B10
gaactaatgtatcggtgtgaggatgataatggaggagccatgcgtgacgatacttgattgccttgacggcgttgagtaagggctggtagtatatgatcgattagctagagatactggtttcagactactgattggatacaagagtacccttgctatgtactaagtattgtagtactggatctataaagcatatgcagatgaagtcggcataccttttatggaaaccagcggcaaagattccatgaacgtggaacaagccttcatggccatggctgctttcattaaggatagaatggcgagccaaccggccatgaacaatgcaaggcctncgaccgtacagatccaaagacaggctgttgcacaaaagagcggctgctgctcttttaaaaaggaaaagggaaaaaagtcaattatgtggttagattttacatggttct

SEQ ID NO: 23154 - DNA, 357 bp, Gossypium hirsutum
  Clone ID: LIB3147-001-Q1-K2-B11
cccacgcgtccgcccacgcgtccggggactcgaaaaatcgggggagcaagctgatgattcagatgcacttctagctcaggtgcgtcgtttgtcaacggagatcaggcaactggcatcagcacggcagataactgttctgaatggggattctggcggtaagttaacctctcttgtagtgccagccgcaacattgggggcattgggttatggttacatgtggtggaagggtatttcattctctgatcttttctgggtcaccaaacgcaatatggcgatggctgtggagaacttaacaaaacatctggattctgtctcagatgctctctctgctgcgaagaagcatttgactcaacgcat

SEQ ID NO: 23155 - DNA, 367 bp, Gossypium hirsutum
  Clone ID: LIB3147-001-Q1-K2-B12
accatgcttcctgcgactcatgctgctactcttaaaattatacgcgccagttcatcattcggatgctggtgtaactcaattacttcttatgcttactgtcatctaccaactatcttcataacgaccgatcactaggactcagtactccttctaatagctagtgaacctgacttgactgcccatacactgcatattcttcattggaaaatgcttacacttaaaaaagcggtataacaaatcttacttcttgagttcatgaccatgctctgtatgacacattgccttaactgaactactctccatatcaacattctgtctcatatgctgtctctctagccgatacacacttacctacacgtacttacaa

SEQ ID NO: 23156 - DNA, 456 bp, Gossypium hirsutum
  Clone ID: LIB3147-001-Q1-K2-B2
gtttttatttgtacgataataaacgcaaagctaatcccgatcccgaactaaaaatgtacattgagaaggcgaagagcatctctggtgtagctgttgaccctaagtttgtgaaattgtcggagaaagacattgtggaaatgatattctttccagtggttaatgaagcttgccgagtggttgcttgaagtattgcagtgaaagcatctgacattgacattgctgcttgtatgggcatgggattcccaccttacaagggaggactcatgttttgggctgattctcttggttctaagtacatttattcgagacttgaggagtggtcgaatttatacggaagatttttcaagccttgcgctttcttggcttgaagagctgccaagggtgctccattgagtgcaccacttgagatgggaaaatcaagactattaaactgctttgattgcggtgctcggagat

SEQ ID NO: 23157 - DNA, 449 bp, Gossypium hirsutum
  Clone ID: LIB3147-001-Q1-K2-B3
cggacgcgtgggtttgggtttgaaacaatggagtccaacaccaaaatgtcagctcttcttttgagttgcatgcttttcatttcttcagtgacaccaattcttgggtgtggttcatgtgggaaagcacacaagcatcgaaagcctaagggaaagtcccctaaaggtcccatcactttgccttcccttgtgaaacctccaatcaagttgccaccggttgttcctccaatagttaagccacccattggacctccttcggttacggtccctccaattaaccttcctccagggacggttcctccagtaactaagccaccaagtgggaaaccctgcccaacaccaccaaccaaggacacttgccccattgacacactgaaattgggtgcttgtgtggatctgctgggagggttggtgcacattggactaagtgacccggttgtgaaccaatgttg

SEQ ID NO: 23158 - DNA, 451 bp, Gossypium hirsutum
  Clone ID: LIB3147-001-Q1-K2-B4
cccacgcgtccgcccacgcgtccgatggaagagtataagagctttgtaatcacgattcaagtttcgcccaagagcgagggtagtggcagcgtagtgcactggactttggaatacgagaagctgcacggtgggattgagcatccttagactctgctgcaattcgttcaagatgtctctaaagacattgacggtcacctcacccaagcaagttaagcagtatcacatgatgctattgttgccgctacttgaagcactattcatctatttaatgaataaagtgacaactgtctttatcatgtattttgatctcaatatgtacgtttagatcaatatgcagtcacaggtgaggagcattgcattatcttgcatgtttgcctttttaattctgaatgaatgcaatgttgcctatgcttgtatatgtgttctaataaatatttgtaagtatgatatt

SEQ ID NO: 23159 - DNA, 302 bp, Gossypium hirsutum
  Clone ID: LIB3147-001-Q1-K2-B5
accactcgtccgcgatggcatagtccttgagaatcttgctgttcagttcatgaaagaggtccaaggctccggggcgcgtgctttttatggattccaaatctctatcgaaaatattcactccgagatgtacagtctccttctcgagacttacataaaagattccgatgaaaagaaccgtcttttccgcgccataaagacggtgccgtgtgtcgctaagaaagccgagtgggctatgaaatggatcgacggcgtacaaactttctgcgaacggttaatcgcttttgcttgagtagaggtgatct

SEQ ID NO: 23160 - DNA, 447 bp, Gossypium hirsutum
  Clone ID: LIB3147-001-Q1-K2-B6
agagctaaaagaactacgggaacgatactcccacatgagcctcaaatatgctgaagtagaagatcagcgagagcaactcatgatgcagcttagagctgccagtggtcgaaggcgctggttttgatgattctaatagtataaatccggtcgtattgtttctccagctccggcatccacactgagcttctgttttttcaccatctaatttttttttcctatggtgtttgtgtagattctttacgaagcagaatagggaaacaaatttatggctcctacatcaggagccagccttgcctgcctggggactgagatagggatttatttacaggctaattgtaatacaagaaacaacatataacaaagttgtatactaatagtattttcatttcttgtaggtatgctgagcaatgaaaacacgagtataaggctatgataagccttgatttc

SEQ ID NO: 23161 - DNA, 457 bp, Gossypium hirsutum
  Clone ID: LIB3147-001-Q1-K2-B7
ggaagaggaagaaggatataggaagccaagttatggtagatccgaggaagaagcagaaggatataggaagccaagttatggtagatccgaggaagaagggtattggccgaaggaacattgccattacgacagggaatatgaatatgaaaagaagcgtcaccaccaacggtataagggcccacaacataagcgccatgatgactatgacgactagtcagactgggcgttccctctacaaatggaaatctgcagtaatagctattaaataaatgatcgaggcatgccacctttgatcgtttcttctaccatttacgtgtgttatttgtgtgtgtgtcagtgtttgatcgtcaataaaatgcccgaacattagggtttgcgcaattgtgcttgttgattatcaatctgatgatgataatataatgccatgatctacttgcatattaactattaatgctta

SEQ ID NO: 23162 - DNA, 303 bp, Gossypium hirsutum
  Clone ID: LIB3147-001-Q1-K2-B8
attgtatgaattaactaaggacttgtcagcatctgaacagacacgggtaaaagccgtgaatgagatatgtggaccagctaaattgtcagatcttacagggaactttttggatatacttgctgacaatggaaggttatgacatattgaaagcattgggaagagatttgaggagttgaccatggctcataagggagaagtgaaagctattgtcacaagtgttattccccttccttcttaagaggagaagtgactaaatgagaccttgggggagatcattggaaaggggaagcatgttaagcttga

SEQ ID NO: 23163 - DNA, 302 bp, Gossypium hirsutum
  Clone ID: LIB3147-001-Q1-K2-B9
atcatcattgatgtgcctttggctaccggtcttatatttagaggctttatttggccagtcgctgcttacagagagcttatcaatggtgaccttgttgtcaaggacgtttaatctcctcagggatcgaatggaaggacttgaactccaaggaatagctagggaagaagatgggagtgcttttagactgaatattcttggtgggaaatttcttgtacttaaaaatgttgtttaaaaaaacatacttttgagtcttatgtaatgctaatgttgaaacatttgttaactgaacgactttccatttc

SEQ ID NO: 23164 - DNA, 210 bp, Gossypium hirsutum
  Clone ID: LIB3147-001-Q1-K2-C1
cccacgcgtccgaaaaaaaataaatatgcaaatttaaaagataaagaaataagaaagaaatgatagggaaaatggtatgaataataatgaataaaagataaaaaaggtgcgtacttctgctatgttgatgtttattgatacgtgcatggaattggtttattgttttgagtgcttaggactattcattaaattgtcaagatgattaaaaac

SEQ ID NO: 23165 - DNA, 446 bp, Gossypium hirsutum
  unsure (1)..(446): unsure at all n locations; Clone ID: LIB3147-001-Q1-K2-C10
accacgcgtccgagtaaatatttgggacactgatgagttctgcagaccccttactttctttgatccttggaagaacggagttatttgtatgcttgttatggttgagcagtcacttcctgtagcctttggtgctgaaacagctaaatggatttgtgttggtgctattgacataactcaattatctatagctgggtatcttctaggggctggtaagccgtattatgcactcgccctagttggtttaatagttccacaagttgtatttcagttccagtactttctaaaggatcctgtcaagtatgatgtaaagtatcaggcaagtgcacaaccatatctggttcttgggttactggtgactgctttagcaacgagccattgatgaagtataactggtggaggacangaaagagatgaagtaagctgatgagcagagtaaattgtgatcg

SEQ ID NO: 23166 - DNA, 339 bp, Gossypium hirsutum
  Clone ID: LIB3147-001-Q1-K2-C11
cacgatccaaagtttccaaattcctctccgggttttgctcttcaccacttagtctcaaatggttcgtaggccaaacgacccggaacactcccgtttcgcctctctcgtcctcctcttggtggctctgttctcctgtcttctggtctatgcggttgtttccacactattgaaccccaccgtaaatcctcaggattccagctttgagtctttggaatcggtggcgggtattgattttggggaaaagaagggcgagtgttgcagaggcattgagaatttggagctgtggggtgcagctgtgaagtgagggtctgacttcaagttaacttcctctgtggaatg

SEQ ID NO: 23167 - DNA, 414 bp, Gossypium hirsutum
  Clone ID: LIB3147-001-Q1-K2-C12
cccacgcgtccgcccacgcgtccgggagctttgaaaatgtggatgttatagggaagcctgataggttttcttctatgggttctacacatattgctgccacgttgcatgctgctgctatgttgatgaagcttgatcgtggctgggattggtttattgctttgagtgctttggactatcccttagttactcaagatgatttgtcccacgtgttctcctctgttaggagggacctcaatttcattgatcatactagtgaccttgggtggaaagaagatcaacgggtcctgcctattgtggttgacccagggatttacctagctaggaggactaaaatttttcacgctacgcagaaacggctaatgcctgatgcttttaaagtgttcacaggttcgccatgggttgtcttaagcagat

SEQ ID NO: 23168 - DNA, 349 bp, Gossypium hirsutum
  Clone ID: LIB3147-001-Q1-K2-C2
cccacgcgtccgtatgaaatgaatgcacataggttttggaggggttaaggttgaattcatcttcagttcagttttcacctttgtccctgccttatgcctcagcatcatgttaatgttagtcggtttacaacataatctagtcttaatctaagttgtgtcatgcaatgcagagtttaacatgccctgtctgggatatacttatatatacaagagaatcatattctataaaaaaaaaaaaaaaaagatcaaactaatgacctagaaaggaaaagaaagatcaacgattactgactaaagatggaagacccatggattaacctaagcttagaagactaaaattattgaacgc

SEQ ID NO: 23169 - DNA, 224 bp, Gossypium hirsutum
  Clone ID: LIB3147-001-Q1-K2-C3
cccacgcgtccgcccacgcgtccgcccacgcgttcgcccacgcgtccgcgttgtcgtccacacctgctgattggatcggatcccatccccttctttacacaatttctttctttctgttgttaatttcgtttatgaatttgtgtgctgctcctcgtcgctgtcttacccaacattcttgtacttttataacccagtaatattacgatgaaattaattttacgaag

SEQ ID NO: 23170 - DNA, 216 bp, Gossypium hirsutum
  Clone ID: LIB3147-001-Q1-K2-C4
ggacaaatgtatcgttatgaggatgattttgaagaagccatgcttcaggatactttattaccaagatttccttgattaagtaaatgtattatatcttttattaccaagatttacttgattaagaaaatacattgtatattttattaccttgcatatgtattatttattttagttttgattctaaaaaaagtcataaaaacaaagatgaaaataaaa

SEQ ID NO: 23171 - DNA, 455 bp, Gossypium hirsutum
  Clone ID: LIB3147-001-Q1-K2-C5
aggattcgtagcaacacgcgtactttgatccattgatagcacacgaggagcgtgagacaggtatcgaatgttataagcagtagaagtatcctgaggctgtgaagctttatacgggatcattgagaagaaatccgagagatccaaaagcatacagcagcagagctgcatgctgcacacaattgcatgcattgtcctaggcgctgaaagatgctgaaaagagcattgagtttgaccgaaccttttacataggttacacaagaataggtgctgttcatgtcttcatgaaagagtatgacaaatctttagatacataccactaagggttgaaacacgttgccgataaccaggaactgctctatggtgttcgatgatgcgtagaacagatcaacatggccaatcgaggtgatttgagccctgaagaactgaatgaaagacaggctaaggctatgctagat

SEQ ID NO: 23172 - DNA, 450 bp, Gossypium hirsutum
  Clone ID: LIB3147-001-Q1-K2-C6
cccacgcgtccgcccacgcgtccgatacacctttccagtgacccaaaaaagcttcattgtctcttctattgaaaaccccatggctgctcttaagctagtttgtgctctagtgttgtgcatgttgatggttgagcccattgccacaaccgtcataacatgctgcgatgtgacatgcacagtggccggatgcttatcatacttgcagaacggagggaacgtgccgaaggcttgctgcgactgcatccggtccctgaacatcatggctcgaaccacccctgaccgacaaaccgtgtgtgggtgcttgcaaactgccgctaaggctgtcaaaattaaaggcaacttggctgagaccctgacggccgaatcgtagtgtcaacatccattacaagatcagcacttgcactaactggaaaaatgtgaagtgagatggatgaagagagggttttgcag

SEQ ID NO: 23173 - DNA, 420 bp, Gossypium hirsutum
  Clone ID: LIB3147-001-Q1-K2-C7
cgaaaacccctcctcaagaaatattcagtctctgtgcaattacaactccaagaaaaaatggcaacggaactaccaaaaccggcaaccgaagacgtaaagtttgatttgtttgaagatgatgatgagtttgaagaatttgagattgatgaagagtgggagttaaaggaagaaggaaaggagattacacagcaatgggaagatgactgggatgatgatgatgtcactgacgatttctctttacaactgaggaaggaacttgagaataacactgagaacaacaactaagctggacttatgcattcctctgcactgaacttgtctgaatccgggttattttttttggttgattttcttttccatgcaaagcgaatgaaagaatcagctgtaactctttatgcttgggtgtactggtagaaactt

SEQ ID NO: 23174 - DNA, 466 bp, Gossypium hirsutum
  Clone ID: LIB3147-001-Q1-K2-C8
cttcggggaccccttggaccgaaggggcctatctggtcttaaaaccagtgtcccaaaaaggaggcccttgactactttgaacattgaaaagcacccaatgaattggccaccattagggacaaaggttagccggatggaatccaaaaatcaggaagaatttaggcatgatgtatggcagatttgcctacaacgctcatatctacaatgatggtcgtaatcctggtattccctctcttgccgatcagctttttggagctttgtgactacttgctacatgagtattctgataacctttggctgaagctgaaagcaggtataggggaagctaaatcggataacacatttaaaatcattcatcatctgaaagccaaaattccctcacagtagaactgctgcttctctgggttctaggggtttccaggctttgaaccatggtaatagagctttgcatatgtatagtcgaaac

SEQ ID NO: 23175 - DNA, 175 bp, Gossypium hirsutum
  Clone ID: LIB3147-001-Q1-K2-C9
atttagtcttgtagatagtgggaaaaaacatactagtgattttggttggactttttatacatgcttacatttttttttcttagtttttgccaggttgtgctaatggtttatggaatttttaaatttttttgtgaaaagaagagactttaaggcttaaaatattgatttggtttct

SEQ ID NO: 23176 - DNA, 57 bp, Gossypium hirsutum; identical to SEQ ID NO: 23102
  Clone ID: LIB3147-001-Q1-K2-D1

SEQ ID NO: 23177 - DNA, 236 bp, Gossypium hirsutum
  Clone ID: LIB3147-001-Q1-K2-D10
ctgaaagagctaaatattacagctgtgccaactgttcaatactttaaagaaggcaaacaggaggtagaagttgttggtggtgatgctacacgcataattcaaacaatgaagaaactttacaacatgagggatccgaagacagatgattcaaagcaagatgctacttcaggggaagaggtaaacgaaaaaaactgatgcttgatgatgattacggagccttcctcaagctatcaaag

SEQ ID NO: 23178 - DNA, 346 bp, Gossypium hirsutum
  Clone ID: LIB3147-001-Q1-K2-D11
tcgagagtagtggggtcgccgcgaagcccatcaagcccaagaaatctactggaaagccttgttggccgccgaagaagacaacggatggagcagcatcatatggcgatctgaagagaaaacttgaattcttttaattaaaagtgaaacaggcatttgagtgcttaagagttaagttaacagtgaaagcgacattagtgcaatcgatgctattcaagagttagaagtacttgcagctatggacatttacaaaccattttaagatgatgctcagtcaccgtccccaccacccccagcaccagaaccgacacagacagcaccgatgccccaaaatatggaaggacaagtg

SEQ ID NO: 23179 - DNA, 413 bp, Gossypium hirsutum
  unsure (1)..(413): unsure at all n locations; Clone ID: LIB3147-001-Q1-K2-D12
aataagcttcagcgtccgaatcgggaggaaatggtgaagggacgccaaggagagcgtgtcagactctatgtaagaggaaccatcttgggttacaagaggtcaaagtcgaaccagtacccaaatacttctttgatccagattgagggagttaacaccaaggaggaagtagcttggtatgcaggaaagcgcatggcttatatatacaaagctaaggtgaagaagaatggctcacactatcgctgcatttgnngaaaggtcactagacctcatggtaacagtggtgttgtccgtgctaagttcaagtctaaccttcccccaaaatctatgggagatcgagtcagagtcttcatgtaccctagcaatatctaagctgtctcgatgccgaacggcttgtgattgactacttgagtgac

SEQ ID NO: 23180 - DNA, 466 bp, Gossypium hirsutum
  Clone ID: LIB3147-001-Q1-K2-D2
caagattacgatcacaaacgacaagggtcggttgtctaaggaagaaatcgagaagatggttcaagaagcggagaagtacaagtccgaggatgaggagcacaagaagaaggttgaagccaagaacgcattggagaattatgcctacaacatgaggaacactgtcaaggatgagaagattggttcaaagcttgacccggccgacaagaagaagattgaagatgccattgatggagcaatccaatggttggatggcaaccagctagccgaggccgatgaattcgaggataagatgaaggagctcgagagcatctgcaatcctatcattgccaagatgtaccaaggtgcaggggctgacatgggtggtggcatggatgaggatgccccacctaccggtggcagcagtgccggacctaagatcgaggaagtcgactaaattaacagcttctgctggtgctatattttattt

SEQ ID NO: 23181 - DNA, 383 bp, Gossypium hirsutum
  Clone ID: LIB3147-001-Q1-K2-D3
gctgctataagatttgatgcgggcttatttagtttttattttttactttagcccatacacttggactatcatattcccatatctatgcctgaaaatgtgttcagcatggatgtcaaacaccgaccaaagagtcccaacaacttagctataaaaattaaattattaactttgtactgcatgtttcagtcaagtgtgtttcattcccaacccaaatctatcataggagccccagcctacattgcaccagaggtcttgtctaggaaacaatatgatgggaagataattcttattccctgtttctgtactttttggtctataagacatactattccgagttgagctgagtagaacttcatatgaatgaaaacttagagactttttgg

SEQ ID NO: 23182 - DNA, 443 bp, Gossypium hirsutum
  Clone ID: LIB3147-001-Q1-K2-D4
cccacgcgtccgaaagaaacgtaaaaaggacaatgttgtatgggatgaacagactggtgcatggaaacgtggctttggatatgatcgtgtcaatgatgataaagacatacccatcattgaggccatgatgactgatgagccaagagaggatccttttgctaaaagacaagatgatacaaagaaacgggttgagaagcaagagaagaatcgcctccaaaacttgaaacatgctgcataacttggtgctttgccaagccatgttcagcttgctgctacggctgtgcccataacaggaacccaagctccacctaagaaagtaaccaaagatgaattggggaatgtagctgggatggctgctacatctacagccagtggtgggaaattcgataggaaattgccaggagaaaagcctgctaaaaagcaaggaaagcatcgcaagttct

SEQ ID NO: 23183 - DNA, 450 bp, Gossypium hirsutum
  Clone ID: LIB3147-001-Q1-K2-D5
accacgcgtccggccgaaccttccatttctctctgccaccagcggcacccagagatgcagatctgggtcaaaaccctaacggggaagaccataaccctagagggcgagacttacgacaccatcgacgatgtcaaagccaagatccaagacacggaaggcatcctacccgaccaacagcgcctcatgtatgccggaaagcagctcgaggacggccgcaccttatccgactacaacatccagaaggaatacaccctacatctagtgctccgtcttaggggaggtgctaagaagagaaagaagaagacctacactaagcccaagaagatcaagcacaagaagaagaaggtcaagctcgctgtgctacagttctacgaggtggatgaatcggataaggctcataggctgaggaaagagtgtgctaatgctgagtgtggagctggaactttcatg

SEQ ID NO: 23184 - DNA, 453 bp, Gossypium hirsutum
  Clone ID: LIB3147-001-Q1-K2-D6
accacgcgtacgaccacgcgtacgattcacttttgcagtgacccaaagaagcttcatggactctgctattgaaaaccccatggctgctcttaagctagtttgagctctagtgttgagcatgttgatgattgagcccattgccacaagcatactaacatgcagctatatgacaagcaaagtgtccggatgcttatcatacttgcataacggaaggaacgtgacgaaggcttgctgcgactggttccgatccctgaccatgatggctcgaactacccctgaccgtcaaaccgtgtgtgagtgcttgcaaactgccgctaaggctgtcaaaactaaaggcaacttggctgagaccctgccggtcaaatgtagcgtcgacatcccttacaagatcagcacttgcagtaactggaaaaatgtgaagtgagatggatgacatgagggtgttgcagcaga

SEQ ID NO: 23185 - DNA, 460 bp, Gossypium hirsutum
  Clone ID: LIB3147-001-Q1-K2-D7
ccaacaaaagctggactgaagcgtctcccatctgatcgtctagaagaaattgctgcaaagaggttgaaaaaacttagtcagttgaaatcattagctgcagagaagaagggcaatctgagggcttcggaagctccaaaagttgaagttaaagaacagccaactacagggcccccagcaagaccgactaaaaaaccagattctttaaggaaagtggagtctctacctagggctgttgagcctacaatgctggttatgaagtttcctcctcaggtatcacttccatcagttgcagaattgaaagcaagatttggacgcttcggctcattagatcagtcagctatccgtgtgttttggaagtcctcaacatgccgtgttgtgttcagacacaagattgatgctcaggctgcatatagatatgctaatggaaccaactccctttttggcaatgtgaacgtgagat

SEQ ID NO: 23186 - DNA, 389 bp, Gossypium hirsutum
  unsure (1)..(389): unsure at all n locations; Clone ID: LIB3147-001-Q1-K2-D9
gaatggtgtctcctatataaatcccgatacccctttgaagcttgctgattattttaacatccccggaggttttagcacgaattccctcagtgaacttccttcaggtcgtgctgcaacgctagctacgtctgttatggcaacatctctccatgatttcatcgaagttgtctttcaagacaatgaaaacaccatgcaagcttggcatcttgatggttacgatttttgggtccgttggtgaagttcatgctctgnttgtttgtacaattggttcctttgctggacaaggtactaatcattattattacaatatacacaggtttggctcggngcaatggacacctgacaaggagaagagctaccatctagtcgatgctcttactagacacact

SEQ ID NO: 23187 - DNA, 477 bp, Gossypium hirsutum
  unsure (1)..(477): unsure at all n locations; Clone ID: LIB3147-001-Q1-K2-E1
gacggatgcgtccgggtgtacttttccatctgaagaacgaggaagagcaatctttgcgaagaaccaaagatgccgaagaacaaaggaaagggaggaaagaaccgtaagaggggaaagaacgaggccgatgacgagaaacgtgagcttatcttcaaagaagatggccaagaatacgcccaagtctcacgcatgttgggtaacggccgctgcgaagctatgtgcatcgacggcaccaagcgcctctgccacatccgggggaagatgcacaagaaggtctggatcgccgncggcgacatcatcctcgtcggccttagggattatcaagatgacaaggctgacgtcatcttgaaatacatgcccgatgaagcaaggcttctcaaagcttacggtgagctacccgagaataccaggttgaatgaagggattgctggctgcattgatgaggaagatgatggtgcaggcgatgattacatcgag

SEQ ID NO: 23188 - DNA, 181 bp, Gossypium hirsutum
  Clone ID: LIB3147-001-Q1-K2-E10
atttgatttgagttgtaatggattctttgtgtccaagtacgaggactgttgatgttaaaaaaaaaaaaggataactaataaaaaaataaacataaaaaaaaaaaataaaaataaaacaaaaaaaaaaaaaagacaaatactaatataatagatagataataaataaaaaaaaagggcggaa

SEQ ID NO: 23189 - DNA, 416 bp, Gossypium hirsutum
  unsure (1)..(416): unsure at all n locations; Clone ID: LIB3147-001-Q1-K2-E11
cggacgcgtgggcttgacactgttctaggacctggtaaccagatcactgaacctgacacccacaaacttgcctaccttcaggctgtgatcaaggagactttgaggttacgaatggcaattcctctactcgtgccccacatgaacctgcatgatgcgaaattgggtggctatgatatccctgctgagagcaaaatcttggtaaatgcatggtggcttgccaacaaccctgctaactggaaaaatcccgaagaatttaggcctgaaaggttctttgaagaggaagccaaggttgaggccaacggcaatgatttccgctacctcccctttggcgtggggagaagaagttgcccaggaattattcttgcattgcccatccttggtattactntgggtcgtttggtacagaaatttgagct

SEQ ID NO: 23190 - DNA, 408 bp, Gossypium hirsutum
  Clone ID: LIB3147-001-Q1-K2-E12
gatcaatacaggtctctaacttacatgcgtccgttggccatatgggcaatgcaatgggccttatcaagagcaaaagttccaaagcaggagctaaaacctgaaatggaggcggattcgctacgtgtacaccatgccggcttctccaaagttgctcgccttctaaaattgcctgaagatcaaagatccaaaagtcttttacagattatgttcgattatacttgcaagagaatgttgacttaattgattggtgcaattattagtgtgtatggtgagtgtgcaatgcattattcaataattggaaaacttgagtatttgcaaaaatataatggtattggaaaataagtgtattcagtacttcaaaatataataatttgcagtgtaagcaaaaaaaaaaaaaaaggccggccg

SEQ ID NO: 23191 - DNA, 434 bp, Gossypium hirsutum
  unsure (1)..(434): unsure at all n locations; Clone ID: LIB3147-001-Q1-K2-E2
gggatagccatataagcaaagtcttgacaggagatgcttttaccttgaaaaagctgaaactgaggtcgatctattgggtgatgaggtggaagtacttctaagccttatagagaaaatatacattgaacttgatcattattccccaatattgaaacattatcctggaattatggagatactgaagctggttcgaagagaattgagtggaaaatgtaacaagtcactttgagttatccttcattagatgaatgatgattattttgcacccctattcagcatgagggaaggaatggtctcacggacaaaattttccactgctgatacaatcaataacagggttatgtgcacgtgaacccggaaaaatacattcttatccctgntgattatgttattctccctgtatagaaacttagaagatagcacgtaaaaattgt

SEQ ID NO: 23192 - DNA, 374 bp, Gossypium hirsutum
  Clone ID: LIB3147-001-Q1-K2-E3
ggcatgccgtcagaagagatttaatgcggccaagatctttatccaccctgatgttggtgctgaagagccttggtatggtattgagcaagagtacactcttcttcaaaaggatactaagtggcctcttggatggcctgtctgaggattccctggaccacagggtccgtactactgtagtgtaggtgctgacaagtcctttggtaggtacatcgtggactccgactacaaggcttgcctttatgctggcgttaacatcagaggaatcaacggtaaagttatgcctggtcaatgggaattccaagactggacatttgctggaatatctgcaggtgatcaaatatggattgcacgatacatactcgagcgaatcactg

SEQ ID NO: 23193 - DNA, 381 bp, Gossypium hirsutum
  Clone ID: LIB3147-001-Q1-K2-E5
accacgcgtacggcaaagccgactatttgtctttggaaggagcggcgccctgaagatgcgaataggggttagatctcctaacggggacgaccataactctagatgttgagactcatgactccatctacgatgtccaagtcaacattcaagactaggaatgaatgacatgcgaccaacatagcctgatgtttgttgctaagcattttgaagtctacataactttagcttgctacagcgtgcgtactgaatccacggtacaactcaagctacgacttacgagaagtgctaataagattatgaagatgatctacgatatgcgtaagatgattatgcacaataggaataatgttgagctcgttgatctacacttgtacaatgtgg

SEQ ID NO: 23194 - DNA, 352 bp, Gossypium hirsutum
  Clone ID: LIB3147-001-Q1-K2-E6
cccacgcgtccgagataaacagcaaagatgttttagaagaggggcaagtcagcaatttccctcgcgatttgtgaggatgattgatccagagatgctgaagatattcgtgtaccacctttcctttttcttttaactctcagaaacttcatctcacaatttgtagtgatatagactggtaatgcaatctttttgtttcaaatcttgtaaccgtgggggaacataagattttgttggggtttgtgttgtgttgtgttgattcttcaaaatttttctcatcttaggtgattttatgtatattatcatcttcattattatttcactcgtcatccaaatattagtgtgaaaaaaataa

SEQ ID NO: 23195 - DNA, 327 bp, Gossypium hirsutum
  Clone ID: LIB3147-001-Q1-K2-E8
cgtttcaccagcagttagccatttttttgtaggatcaaaatctcaaaggcttagaactgtatgtcttggagaaatggggcttggttatttttctttggtccctttctcggctcgctattactatgttgattcatggagttatgcaggggaagattttaaagtagttttatacatttgtcatcatcttgctgaaattcatattcatggtatgttgattcccctgctattgaaaacaaggttgattttgcttacaagttctttgagaagcaagttcgcatcgatgcttttttcctgaaggatgaaatgattgatatcattggtgtcact

SEQ ID NO: 23196 - DNA, 370 bp, Gossypium hirsutum
  Clone ID: LIB3147-001-Q1-K2-E9
gcaccaacaggaacctgtgctgtttgtgttgttggtggtgaaaggtcactcattgcaaatctatcagctgctaactgctacaagtctgagcatttgaagaagcctgagaattgggcgttggttgagaaggccaagtacttctatattgctggatttttccttactgtatctccggaatccatacagcttgttgctgaacacgctgctgcaaagaacaaggtgttctcaatgaatctttctgctccatttatttgcgagttcttcaaggatgcacaagagaaagcactaccgtatatggactttgtctttggcaacgaaactgaagcaagaaccttctaaaggttcatggcttggagactgatgatgttgc

SEQ ID NO: 23197 - DNA, 382 bp, Gossypium hirsutum
  Clone ID: LIB3147-001-Q1-K2-F1
tccacgcgtccggatgctttccatgtcaataccgtggacacaactggcgccggtgactcctttggtggtgcattgctatgcaagattgttgaaaacccaaccattcttgaggatgaagcaaaattaagggaagtgttgaaatttgcaaatgcatgtggagccatcacgacgaccaaaaagggagcaatccctgcactaccaaccgtggccgatgcccttgccttaatcaatggagcttagattttaagcaacttgaataatttgcacgttgttttgcctcccgtgattatcctttcatttcaaagagttctcaatttattcccctttgatatgcgacctttgtttcccccacacccgattgcttgtgttctaatgatggaaa

SEQ ID NO: 23198 - DNA, 327 bp, Gossypium hirsutum
  unsure (1)..(327): unsure at all n locations; Clone ID: LIB3147-001-Q1-K2-F10
aaaatagaagaagaagatgaagccctcattaaatcgattttccagaagccgaaggaatttgttcgaaggatttcggatgatgttttcaacgatgatgaggatctgacccgtttattgagtggcaatggtgaaacctcaaatgatggcttaaagaggagaaaggtgtcggaagaatcttcaagtaaccctacagatgctttgacaaaagctagtttgcctgattattccagcagtaaagaaggttcaagtggctcggtgagttgtcaagttaaagctccattcaagtcgtcngtgataatctcggttgtgaagaagaaacctgagaag

SEQ ID NO: 23199 - DNA, 214 bp, Gossypium hirsutum
  Clone ID: LIB3147-001-Q1-K2-F11
cccacgcgtccgattgtatgttgctgatgttttcagatgttgagttgttaatgttgtggtagtgatctgatttaagttgccaaaaaaaaaaaaaaaaaaaaaaaaaaaaaaaaaataaataaaaataaaaaaaaaaaaaaaaaataaaaataacaaaaataaaaatactaaaaaaaaaaaataaaaaatgcattaaaaaagtaatgatgataaa

SEQ ID NO: 23200 - DNA, 404 bp, Gossypium hirsutum
  Clone ID: LIB3147-001-Q1-K2-F12
cccacgcgttcgggcggcaccaagccagcttaacctaacggaaatcatgtcgaagcaaggatgtaaagcttttgcggatttgctgacagcttcgggagccgatgacaaatttaacgaaaacatggacgcgggtttaacggtgttttgcccgaccgacggtgccgtcaaaagtttcatgcccaaatacaagaatctgacgtcgtcgaagaaagtgtcgctgctgttgtaccatgggattccggtgttcatgtcgttgcatatgctgaagaccaacaatggagttatgaacacgttggcaacggatggagcgaacagctacgatttctcggtgagcaacgaagacgaggtggtgtccttggatacgactgtcgtgacctcaaaggttttggggtttttgaaggagg

SEQ ID NO: 23201 - DNA, 324 bp, Gossypium hirsutum
  unsure (1)..(324): unsure at all n locations; Clone ID: LIB3147-001-Q1-K2-F2
gaagtcaaacgtaggttctacaagcattggtgcaagtccaagaagaaggctttcaccaagtactcaaagcggtacgagagtgaagaagggaagaagagtatcgaggctcagcttgaaaagatccagaaatatgccacttgtgntaggggttttgcccacacacagataaggaaaatgaaaggattgaagcagaagaaagcacaccctatggagatccaagtaaatggtggaactatngcagacaaggttgattttgcttacaagttctttgagaagcaagtcccgatcgatgctgttttcagaaagatgaaatgaatgatatca

SEQ ID NO: 23202 - DNA, 436 bp, Gossypium hirsutum
  Clone ID: LIB3147-001-Q1-K2-F3
gaatgataagttgaaaagaagaagagagaaaactgtaaggacagcaatgcttgccattcatgcaagccaccaaagcccattccaccacctgctgcatgccctccaccaccagcaaagcctgcttcttgccctaaggacacattgaagctaggtgtttgtgctgacctgcttggactggtaaacatagtggtgggagcacctccttcgagcaaatgctgtgctttgctccaaggcttggctgatttagaggctgccctttgcctttgcaccgccattaaagccaatgtgcttggggccaacctcaacatccctattacccttagcttactccttagtgcatgtcagaaggaaatccctccaggcttcaaatgttgatatttttttttaagaagcacaatcagttgttgatgttggctaatggctaaatttgctctac

SEQ ID NO: 23203 - DNA, 178 bp, Gossypium hirsutum
  Clone ID: LIB3147-001-Q1-K2-F4
gaatagaacatcggatagttcactagttaaaactaagcctcttgtggtgattaatttaaattctagcacagtatagtagtctattaccctcttgaatgcttggcccgccacgaacatgagcaggatgtatgtttaagattaagattatgtcaattgagtttttactgcatgatgaact

SEQ ID NO: 23204 - DNA, 457 bp, Gossypium hirsutum
  Clone ID: LIB3147-001-Q1-K2-F5
cccacgcgtccgcccacgcgtccgcatagaagctcaagcgcaaatgaatgaggagctttccggatggaagcttgtcgtgggtgatgttttcagagaacctaatcactcgaagcttctctgcgtgatgattggtgatggagttcagattatgggaatggctttagtcactatagtttttgcagctttgggtttcatgtcaccggcttcacgaggaatgctactcaccgggatgatcattctctatcttttcttaggtatagctgccggatatgtcgctgtttgtctttggagaactctcaaaggaactgcagaaggatggaggtctctttcctggtcagttgcatgcttcttcccaggaatcgtctttgttatccttacagcattgaatttcattctatggggcagcaaaagtaccggtgcaatcccgatttctctctacttcatactcttatctctc

SEQ ID NO: 23205 - DNA, 422 bp, Gossypium hirsutum
  Clone ID: LIB3147-001-Q1-K2-F6
gaaaagcttacaaatgtgcttgtacttatgagttatctgaggatcatgactattgcttgaaatgggaagggctaggatgacatgaccataggtgctgaatccggttgtgggatagtgatggatgctttctaagattgcacttcttgcactgagaataactatcgagctctacgtactggcgagaaaggcgtctgccggatgcggaagcccctgcactacataagctcttgtttacatcgtgtgatccctaactttatgtgccaaggaagagactataccggctgaaactgtacctgaggtgaatccatctacggatcaaagttcgatgacgagaacttgatcaagaagcacactggttccgggattctctcaatggctgacgcttgaacgggaactaacggatcctaagtcttcatttggac

SEQ ID NO: 23206 - DNA, 455 bp, Gossypium hirsutum
  unsure (1)..(455): unsure at all n locations; Clone ID: LIB3147-001-Q1-K2-F7
cccacgcgtccggtggcctcattccgtgctcaacaacttcgatttcgattttctcgacgctccctttcctgctagaggaaaatccgacgttgaatccctttatgatcctccttattatgaatggtatcaagtcaacgagatagagtgggttcatttcgatgaatgtattgcatgcctagaagattatatgattaaacatggtccctttgatggtctactgggtttttcccaaggtgggatgctagcatctggggtgccttcaatgcaaagagagggtgccgcttttactagtgtgccaaagataaagttcgtgatcataatatcaggttttgaacttcgagaattgaagtctgggccgncgaaattgcttgctaatgtttattcagttccaattgactgcccatctcttcatttgattggagacaaggatttcctgaaagaacgagggttcacgc

SEQ ID NO: 23207 - DNA, 326 bp, Gossypium hirsutum
  Clone ID: LIB3147-001-Q1-K2-F8
ggctatgggataggatacgtatgcagaatgaactcgaatgctttcgtctatgacaaatcttcagtagatgcatctaaactggaccttgaggtggagacctcatgaaagctatgggctaatatagttagttttacaataagaatgtgtacatcacagactctaaccaaggtgactatgccttgaccgatcatattacgtgtacaggtgctactgatgattgatgctctcaaatatgctctgggtatcggatgccgctagggatgcttcctagacacgatttgtcactgggaaaaatgctttgaagttacaaacccatctgtatacca

SEQ ID NO: 23208 - DNA, 407 bp, Gossypium hirsutum
  Clone ID: LIB3147-001-Q1-K2-F9
cccacgcgtccgtgaagataaagcaactatctctttatatttatagaaagcaaagtgttaatccatgggaagttgggaaaatacatcatcatcaccatcaccatcaccatagccattaattcacattaaaataaagcatagcattataataacatcaataaaaatacttcttcaatccattcccactgcatttcaatgtatgatgatgaatgaccatgattgatgattgatgattgatgattgatgaaccatatgctccattgctcctcctccttcacctttagaatctcatttaaaaaaaaaaaagaaaagaaggaaactatatagaaaatatatgtttatatttgcctggcttcatcctgtctgcctttttgcaagcccatagagaaagaagtgaatttttttta

SEQ ID NO: 23209 - DNA, 450 bp, Gossypium hirsutum
  Clone ID: LIB3147-001-Q1-K2-G1
aaaatggtgaagggacgccaaggagagcgagtgagactctatgtaagaggaaccatcttgggttacaagaggtcaaagtcgaaccagtatccaaacacttcattgatccagattgagggagttaacaccaaggaggaagtagcttggtatgctggcaagcgtatggcttatatctacaaggccaaagtgaagaagaatggctcacactatcgctgcatttggggaaaagttactagacctcatggtaacagtggggttgttcgtgctaagttcaagtctaaccttcccccaaagtctatgggagatagagtcagagtcttcatgtaccccagcaatatatgagtagtgtagatcgacgactcgaatgacgctctaccatttcacttttgtttttatgaacttagtcaagattttgtgtgctttgaatcagtcattttgtttctttgggat

SEQ ID NO: 23210 - DNA, 336 bp, Gossypium hirsutum
  Clone ID: LIB3147-001-Q1-K2-G10
gaaaatgtggtatttgctgcaactccatgcacgagcatgcaaagaatctcaatgccacgtaccacgttgcagagaccttaaggaacatttgaggaggcttcaacaacagtctgattcacgacgtatggctgctgtgatggagatgatgagacagagagctgcagaggttgctggtagttctgggtaaaagaccaaagtgttaatatgcattttggtgctttgatgaaaaaatgcgcccttctataaagggatgtctaagattgttcactgcttggaactaggcggtgatgagaaaatctggctgatctataaaaggtcacagggggatatgcatat

SEQ ID NO: 23211 - DNA, 434 bp, Gossypium hirsutum
  unsure (1)..(434): unsure at all n locations; Clone ID: LIB3147-001-Q1-K2-G11
ggaagaggaaaattcaagggcaagcccaccggccaccgccacttctctactcccgaagagctccgtgctggtacctcagctcgaccccgtacatttaggaaggaagaagctgaagtagaggaagaagaagaacgagaagagtctgaagaggaaatagaagaagagcccgagaaacgaaaagggacccaagggcttattgagattgagaatccaaatttggctaaacaaaagaatgtcaaagccaaagatgttgatatggggaaaacaactgaactatcaaggcgtgaaagagaggagatagaaaagcaaaaagcacatgaacgatatatgaagctccaggaacaaggganaactgagcantcaagaaaagatttagagcgcttagccatgattaggcaacanagggcanagactgctaagaagagagaagagga

SEQ ID NO: 23212 - DNA, 352 bp, Gossypium hirsutum
  Clone ID: LIB3147-001-Q1-K2-G12
cggacgcgtggggtctcttgatgcgcatgcgcagaaagcattagattgcccttgtgtatctgagctgcggaatggcgcttgcgggactcaatttacagaggctttcctttgttttctcaaaagcactgctgaagaaaagggttcggattgcgtgcatccctttgtagccttgcaaacctgcatcaaaggtaaccctgatgcatttcctaaaaacatcattgaagataaagaagtcaagaaagaagaggaaccaatccaagaatataaaatctatcctcctatatggttcaaggaatctcagaaaccaaaagcaaaaccaaaaccaaagctgtatgacaacagttcattctta

SEQ ID NO: 23213 - DNA, 275 bp, Gossypium hirsutum
  Clone ID: LIB3147-001-Q1-K2-G2
gtcaatgagactggatacggaagcacattggactaggatgctttcatctatgatatgtcatcagcagatgcatctatgctggtcctttagctggagaactcatgaaagctatctgctaagagagctactattacaagaagaatgtgtagatcacagacttgaaccaccatgactgtgtcttgaccgatcatatgacgtgttacagctgctactgatgatgcatgctctaatatatacttggtatatcggatgcgactacagatgctacctagaca

SEQ ID NO: 23214 - DNA, 425 bp, Gossypium hirsutum
  Clone ID: LIB3147-001-Q1-K2-G3
ctctctctctctatctttataaaaaaacctccggctattggggtttttggtttcgtagattcgtttcgcttgatttttgtctcgctttaaacagtaatttccttcttttttttttcatttttttcttggaatttttgaagtgtttaataaaaaaaaatggcgttagtttcattcgtcgggagggttcttttcgcttcagtgttcatcctctctgcttggcaagagttcaatgaatttggtgttgatggagggcctgcagctaaggcactcaaaccaaaattcaatgtcttctcaaagactgtgacagctcatacaggggtggaagtaccagaatttgatattaaggctctagttgctgctgctgtaaccttcaagggtgttgggggtatcctttttatctttggcagcactatcggagcttatct

SEQ ID NO: 23215 - DNA, 456 bp, Gossypium hirsutum
  Clone ID: LIB3147-001-Q1-K2-G4
aggcgttctcctttaacgtggatgtctcccagctgatctagtgtgatggaatggatgatcgatcatcaggttcaaacaacgctgcagcactttaaagaaatctcaactgctgtaaatcaaccattgtcagtccttattccatcacctatcaatgcttatttttgaagctcaaatctgcatatttatgaagtaagtacttacggctggcttgtatttaaatctcctctgcttcatttatacattttggttcggggtcgggtcgaggattaaccacattcagcattgcattcattagaattcatttcattcgttagttttacttagtttgggagtcaaaattgttccatctcatgcattcatagaatttttctgtctttgcgtttctttggggtatacatactgttttcattttggtcttctttatttttttttataaatggatttttggttatcact

SEQ ID NO: 23216 - DNA, 455 bp, Gossypium hirsutum
  unsure (1)..(455): unsure at all n locations; Clone ID: LIB3147-001-Q1-K2-G5
cccacggttactgcaaaaccatctggtactactggtgccaccaccaatgtctcagtcatcacgagtttgcagaaagcagatgcaatccgtcaggctgatgggagtgatgacagtgaagatgaggataactggagcgacacttaattatcttggaacatggatgcataagataattgcaagtaaatcctgccagtctccattgagtatttttcacaattaggtttggagctcttcatagctgtctttgaattaaaccctctctttgatcgagccattgccatggatggacaaagctgtgatattgattcaaccaggtttggctttggttaccatgtgttaacaaatgttgcataaatttctcacattcaaaagattgataaacatcatgcatccatttagatcacgtatatcaactttggcacagnatattaagtctatggcttctgctattgcct

SEQ ID NO: 23217 - DNA, 215 bp, Gossypium hirsutum
  Clone ID: LIB3147-001-Q1-K2-G6
ttcccgaatcgaccgatgcgtccagcacgttcggccatgcatgcgatgcttctcaactgacttagtgtctgtgtagatcttgatcgagtcagtctcgttcaaacaactcatttatacgttaattagactataacgggtgacattgagctattttcatagttaagagaatccattttttaggactatattgacaatatgatgagtatgttctttga

SEQ ID NO: 23218 - DNA, 308 bp, Gossypium hirsutum
  Clone ID: LIB3147-001-Q1-K2-G7
gccacgcgttcgtcaggcatatggctacatactgtaacagtgcgacgctttatgctaggaccggtcagctgacgtgtacgtaagataggtactgtttagaggacggccatcaggtactaaatactgtttacaaagcaacctgctatactggagatcgcgcgactcatcatttgacatcatgggcacgtaccatgcacaaagactgaacaaacttgtcacgtatggtcgaccctctactacaaggtcgatatctggaccgcgtgctttaccaagcacttgacatagctccaatgcgcgttcaagagcat

SEQ ID NO: 23219 - DNA, 140 bp, Gossypium hirsutum
  Clone ID: LIB3147-001-Q1-K2-G8
tccgaatgaccgcatcgacccacgcatgcgtccacaccatcgagaactccttgtttggatgcttacttgtgcgctgccaacattgagaaaattgaatcagaagactgaacaccatcttcaatcaaatgatgcatgtacat

SEQ ID NO: 23220 - DNA, 290 bp, Gossypium hirsutum
  unsure (1)..(290): unsure at all n locations; Clone ID: LIB3147-001-Q1-K2-G9
cgcacgcgtacatgtacataaagggacaatctagctagattgatagcttgcagtgtgacaatccatgggacgatcagaccttacatcatgattacgatatgcatcaccgctatcattaattcacattcatatcatcgtatcatgatcttaacatcaataaaaatacttcttcaatccattcccactgcatttcaatgtatgatgatgaatgaccatgattgatgattgatgattgatgattgatgaaccatatgctccattgctcctnctacttcacctttagaatctca

SEQ ID NO: 23221 - DNA, 436 bp, Gossypium hirsutum
  Clone ID: LIB3147-001-Q1-K2-H1
taaggatggttttatcatccggaagcctaccaagattcactcccgatctcgtgcacgcagaatgaaagaggccaagagaaagggtcgtcattctggctatggtaagaagaagggtaccagggaggcaagattgcctacaaagatcctttggatgaagagaatgcgagtactaaagcgtttgcttcgtaagtacaaggaatccaagaagattgacaagcacatgtaccatgacatgtacatgaaggtgaagggtaatgtatttaaagaacaagcgtgtcttgatggaaagcattcacaagtccaaggctgaaaaggcaagagagaagacactctcagatcagtttgaggccaagcgagctaagaacaaagcgagcaaggagagaaagatggccagaagggaagaacgccttgcacagggacctggtgtgaaagcagc

SEQ ID NO: 23222 - DNA, 87 bp, Gossypium hirsutum
  Clone ID: LIB3147-001-Q1-K2-H10
cccacgcgtgcgaccactcgtacgcccacgcgtccgaccacgcgtacgaccacgcgtccgaaaaaaaaagaaaagaaaatattgaac

SEQ ID NO: 23223 - DNA, 404 bp, Gossypium hirsutum
  Clone ID: LIB3147-001-Q1-K2-H11
aaatattctgcagggaaagcccatcaccatttatcggggaaagaatcgggttgatttggcccgagattgtacctacattgacgatatcgtgaaaggctgtttgggatcgttggatacatccgggaaaagcaccggttctggtgggaagaaaaaggggaacgctccatataggatttttaatttggggaatacgtcgccggtcaaggtgccggagctggtgaacatcctggaaagacatttgaaagtgaaagccaaaatgaatatcgtagatatgcctggaaacggtgacgttccattcactcatgcgaatatcagcttggcccatagagaattcgggtacaagccctcaaccgatttgcaaaccgggttgaagaagtttgctagatgggatttatcttattatg

SEQ ID NO: 23224 - DNA, 297 bp, Gossypium hirsutum
  Clone ID: LIB3147-001-Q1-K2-H12
caaaggttcaaaagccactagatcaaatagattctattgactattgtgagccacgtgtttgttaatctgtagatatctgatctagttatatgatgaggtttagcagattcagatttgtggtagggactctcaagagggaatttaatccaaccaactctaagacaggatttgaacttctaggaggtaataccagatggttgaaagcatctgtgcaagttctgggtcatgccagtacctaatgatccgttttttttttcctgagtttctaatggtctatataaacttgaaataatgaag

SEQ ID NO: 23225 - DNA, 204 bp, Gossypium hirsutum
  Clone ID: LIB3147-001-Q1-K2-H2
gcgtccacacgtaggagacgtacttgtctggctgcgaactgctgcgctgccaacgtttagtaaactgtatggggagactgcacaagatcttcagccaaatgatcaaattcctgtgacattggataattacttccattcttacaggttcaatggccagaaaaaaactagtgctttcaactactagctggcttggtgggaaaaatg

SEQ ID NO: 23226 - DNA, 456 bp, Gossypium hirsutum
  Clone ID: LIB3147-001-Q1-K2-H3
cttttgttctcctaattttgattctttttaaagtatttcatttttagttcaagatatatgatttccattgggcttttctttgtctgattctattgcatgttcgattgaacagatgaaaagttctcttcttgttctttgactatttttcgaatggcttgtgattttgactagttgagttttctttatttgcatttcttgaattctttttaatgataaaattgtgggttttaatattaagaggatattaacatgaagtttatgttttggtttctatattgaattaagttgaggtttttctttagaggatttttttatttctctggttcggtttacaggaaaaagagaccagcactgaccatttagtttcagatacaattcttctttcttggatttatagtgaatcatttctggacaaattttcccgtttttatatcaatcaattgaattaattactga

SEQ ID NO: 23227 - DNA, 141 bp, Gossypium hirsutum
  Clone ID: LIB3147-001-Q1-K2-H4
ccagaaaccctcgttattaatcggcggaagcagatagcctttagccatgactttcaagcgtaggaatggtggccgcaacaagcatggtcgtggccatgtcaaattcatgcggtgttctaactgtggcagatgctgccccaa

SEQ ID NO: 23228 - DNA, 439 bp, Gossypium hirsutum
  Clone ID: LIB3147-001-Q1-K2-H5
cccacgcgtccggagagatttgtatagcagcttctcctctcaaccgccacgccaaacatgccttgacataagactttcagaatcaagaagaagctggccaagaagatgaggcagaacaggcctatcccttattggatccgcatgcgcaccgataacaccattaggtacaatgcgaagcgtaggcactggcgccgtaccaagctagggttctaagctttatgtgccttttttgtagttttgtactcacgcaaagctctgtttttttgtttatttcatgaaattttgatgtggccttgaacgtttttatatgatggttattgacgatatttagccattgtttcgactgttgtctatctaatgttttgatttcgagctttgaatttttatgaaactgaatcattatgttctttggaattaatgaaaactgttattattcagt

SEQ ID NO: 23229 - DNA, 404 bp, Gossypium hirsutum
  unsure (1)..(404): unsure at all n locations; Clone ID: LIB3147-001-Q1-K2-H6
aatttattcggaccgggggtctattgaaaccttaagtgggacttggacaatggtggccggaaggtgaacccttaaccccttctgggaaatttcaagttttcgaggcattaagtcctaagaggaagctcctgatcaggtacaggggaacccaacgaagcctatatataaaatcacggcgtttgacggtaacatgtattcttggtaccatggaacagggaaagccctgagattntgatttgcttctgttataattattattattattttattcctctggctgtaacttgaagccctgggttgttagatttcagatattgttttataattcagaaactagctaaagtataagacttgtgtcatttttacttggtatagatgtgtccttgacccctctgcttatggat

SEQ ID NO: 23230 - DNA, 208 bp, Gossypium hirsutum
  Clone ID: LIB3147-001-Q1-K2-H7
gatattggttaccttaggatcaatccacatcctgtatcatgatcatgattcattgcagaagatgagaaccattgcctgccctggaaaaatagtatttgagggactcactggaagtcctaattactatattattcaaaaccagcatcagggctgtaaatgagacttttctctttaaaaaatgatagttgcacgtattctaaagtaccat

SEQ ID NO: 23231 - DNA, 88 bp, Gossypium hirsutum
  Clone ID: LIB3147-001-Q1-K2-H8
acgcggacgcgtgggcggacgcgtgggctgacgcgtggggttttttttgtgcctgggaattgttgggagaaggatagggagggaagag

SEQ ID NO: 23232 - DNA, 311 bp, Gossypium hirsutum
  Clone ID: LIB3147-001-Q1-K2-H9
cggacgcgtgggacttgcagccgtggtgatatagaatcaacatttgttatgatcatagatatttgagagaacaggtaatatttaattgatcaggggtatatttggcatgatcattattgacattatacggctcatctatcttctgagtattttatgttgtatttgttaaaaataagggccgcgaccaacgtatttttacctttgtaccttatcagcgcactgaaaaatttggattagcatcatttgagttccttagttatgaacagttattattggactaaaaaaattttatagggtcacctaaattcaat

SEQ ID NO: 23233 - DNA, 90 bp, Gossypium hirsutum
  Clone ID: LIB3147-002-Q1-K1-A10
tgagggtatactgggaccgcaaattgtgcttgaacaacatgcaattggcaattcagaaaagagattaaacaatggacaacttgttctttc

SEQ ID NO: 23234 - DNA, 373 bp, Gossypium hirsutum
  Clone ID: LIB3147-002-Q1-K1-A11
cgactttgtaggaaaatgtggatcacgtgaatgcaaccgacacattccaaaacgaaacttttgcagttcggtgtccgacctgaataggcgaagaaatatagttacatggacagaagaataacatgaattttgacatagggcacatgtaaaattggtgataaatcttcagtacatgtaaggttttgttaccctacttttagattcttttgcttttatggcaaattcttttgtaagaaaggaagttgaaacatgaaacaggaatttaggtacaaattaagggcaaggtagaaaattgattccttttcctttagtcactaattttcatgaggatggtactttgagctgatgttaattgaagtaaatgtttaactaa

SEQ ID NO: 23235 - DNA, 438 bp, Gossypium hirsutum
  Clone ID: LIB3147-002-Q1-K1-A12
gctgaagtggaggagaaagttgaaacagaagctgatccagcagagaagactgagtaaataatgaagcttttgtgatgaaaatgcgggtgtcaatggaagtgtgtttcaaatggctacagtttgataagtttgcatgtcaagtcaactagttttcttctatgtaagtcaataaggatgtagtaatgtggctgatggaggcccaccgatagtagtcctgcaatgtggctaggttaacatgcatttgcatatgtcaaagagtgacatacttcaagttccattgtgggggaatttttatgggtcatctgttatctgtaaagggatgggtttcttgggtcccaaaccacctttctttgcttatgtttattgttttgcttgtatggttattaggagaggcagtatcaagtatgcatgttgtcttggttataataaatcttagtc

SEQ ID NO: 23236 - DNA, 451 bp, Gossypium hirsutum
  Clone ID: LIB3147-002-Q1-K1-A9
ctcacgcgttcgcccacgcgtccgaatatgttcaagcaagctggatggggtgtgatggccagccaccgcagtggtgaaacggaggatacttttattgctgatctttcagtcggtttggccacgggccaaattaagaccggagctccatgcaggtctgagcgtttagccaagtacaatcagcttctgcgaattgaggaggagcttggtgcggaagctgtctatgctggagccagcttccgtgctccagttgcaccctattaagatgcttgtttagatgataatttgctgagactggatgcgtgcggcagagcttcagtggtttattgtgaccctaaaacatgtttcaataattttgatagcaattttgtacttggtcagaattatatcaatcttcgtgttattcttgttggactttgcctgcattaaaatatttttttttttgttttttttt

SEQ ID NO: 23237 - DNA, 460 bp, Gossypium hirsutum
  Clone ID: LIB3147-002-Q1-K1-B10
cccacgcgtccggaaagacctgagagaagaaaggagctctccaagaaactggaaggaaaatccaatggaagggaagccgaaaggaaaaatctccagacaaaatcaaaggataacagagacgcagagatcaaaaaattaaggcagagccttaattttaaagctacaccactgcctggtttttatcatggacagagaacatcaaaaagtcctctcgataagataggttccaagagtgacatccattggcaacctggcttcctcgggtaaacgaattgggcttcatctacaactagtgggaggacatatcaagaattttttaaaaatgaaaaacagtaggaaaagacggaagcataagaagtacaacagctttggaggctaactacattgctgggcaaaaagaaaaggtctatctgaattctgaaggcatgtttttcattgaggacacatgccatgatattac

SEQ ID NO: 23238 - DNA, 447 bp, Gossypium hirsutum
  Clone ID: LIB3147-002-Q1-K1-B11
cttcgcaaacaattggaaggtcctcgtcagatcctgagggatgaggaaggtaaaaagctcggtttgaaagctaatgagaaaagctccagctcaaaagatgatgatgtcaagatgattgatggagaggggtcatccaatgcaagtggagaatcaactgtgactacatctcaagaaggggttccctctgacaaggaaacacgtttaactgggatttatgatttggttgctgtgctgacccacaagggccgaagtgccgattcagggcattatgttgcgtgggtcaagcaagaaagcgggaaatggattgagtttgacgatgataaccctatcccgcagcgagaggaggacattgttaaactttccgggggaggtgattggcacatggcatacatctgcatgtacaaggcacgcactgttttaatgtaatctttggttttattatgaact

SEQ ID NO: 23239 - DNA, 433 bp, Gossypium hirsutum
  Clone ID: LIB3147-002-Q1-K1-B12
agctgtgcgaattgttcttgaaatggcaggtgttgagaacgcattgggcaagcaacttggaagtaaaaacgcccttaacaatgctagagctacggttgttgctgtgcagaaaatgaagcagttccgagaagttgctcaagaacgaggaattcccatggaagagctatggaagtgatggtcgtggaaacaacttcaccattaccctcaattctcctctgcaaatgtagatacagtacatgaagctttggtaatgtaagtcaaccaacaagatttgagcatctatttaacttttcgattataaaagttatgttactctgagcttctattagaaattttccattttcttttcatttcttgtctctgatgtttgtaaaaactgaatttcttgagaacttgccatcgattactgaaaaatcaagtaccttttgtaggc

SEQ ID NO: 23240 - DNA, 448 bp, Gossypium hirsutum
  unsure (1)..(448): unsure at all n locations; Clone ID: LIB3147-002-Q1-K1-B9
cataaggtctacatgcacaccggctgtacatttaatcatcgatacgtgaaatccagccctcgggaagttgaaaatgctacatggatgctaacagtattccattgttttggtcagtatttctgcctacactttgaagccttccagttgggaatggctccagtttacatggcatttatccgtttcatgggtgacgagacggaagctaggaactatagctacagccttgaagtcggagcaaacggacggaaacttatatgggaaagcgccccacgtagcatccgtgatagtcaccggaaagtcagggacagccatgatggtctaattatccaacgaaacatggcacttttcttctccggtggggatagaaaggagctgaaactganggttactggacgaatatggaaggaacaacaaaatccagatgccaacatgtgcataccaaactaat

SEQ ID NO: 23241 - DNA, 462 bp, Gossypium hirsutum
  unsure (1)..(462): unsure at all n locations; Clone ID: LIB3147-002-Q1-K1-C10
acaggattggatatggtccgtgggatgcaatcctttctccattacttctcaaggttggcagatatcaaaatttcaatcagatacaattgctcggagctacatcatctcaactcttgaagagtcgataaaactggtcaattcagccatgcaccttctactttgggagcgtacaactgagaaaacctttaaacacttccaatctcaggagcgtgagctagtgaacaagtataattatgttgtcagcttatggagaagaatttcaactattgctggtgaattgagatacacagatgccatgaaactgctatataccttagaggacgcaaccaaagggtttgttgatcaagtgaatgcaaccatagcccttcttcatccgattcattgcacaaaagacaggaaagtgcaattagagttcgacgcatcaacaatacctgctttcttgattgttntaggtattctcta

SEQ ID NO: 23242 - DNA, 474 bp, Gossypium hirsutum
  unsure (1)..(474): unsure at all n locations; Clone ID: LIB3147-002-Q1-K1-C11
agcaaccattatggtggtctaggtggtggccactacactgcctatgctaagttgattgacgagaatagatggtatcatttcgatgatagtcacgtctctgcagtcaacgaatccgacatcaagacatcagctgcttatctcttgttctataagagagttagatctgaatccaaagtggaggcaggagaggcatcacatagtcattccatctcttaaagatcccgatgagtgcaatctccaatactattgccttatcgagctgcctccaatcaaggattggcagccggcctcacctgcaacaaccactgttatactacaatgatttttacttgtctgagcagaagctgagcgaaccctcaatgttataaaagatacgataggtgagcctaactcggaaacaactcacaacgaagcagcggcgcaattcaaaggtaggggcaactattattattagttctattaaattnttttaat

SEQ ID NO: 23243 - DNA, 460 bp, Gossypium hirsutum
  unsure (1)..(460): unsure at all n locations; Clone ID: LIB3147-002-Q1-K1-C12
cccacgcgtccgattctacaaaaggagaataccattcctgttcgtttttatgccaaagaggctgctgctcccattgctaataagggagatgagatattgaaaaatatctttttggaggttaaggcaaaatatgaggcggcattgggaatatttaggaaggagaagatcaccattgacccagatgaccctgctgctgtttctcagtatgcaaaggttatgaagacagttaggcagaaggctgacttgttttcagaatctcagcgcatccagtacaccatccaaacacgaactcatgacattccagatgctcgaacatatttattgatcctgaaggatataaggatcaagagaggactcactgatgacctttgtgctgaggctatgatgatgaatgctttggataaagtcgaaaaagaaatcaagaagcctcttttgaggaatgancagaaatcaatggctc

SEQ ID NO: 23244 - DNA, 458 bp, Gossypium hirsutum
  Clone ID: LIB3147-002-Q1-K1-C9
attgattactggcgtgttcctatcacagtacgaattgttggtgtctggcgtagaaggcatgaagtcgagcagaaccatgaagtgcctggtcttcggattcttcaagatagcgggttatggatcagaaagcgaagctgatgaggaagctgcaacagttactctgactagtgatcttagtcgagttaatcgtgcctctacaaaaagcgcagttaagcttcaagaaattggacctagaatgactctccaactcaccaaaattgagggtggactatgttctggtgaagttatgttcagtgaatatggcaatggtggcaataagaaagagccaggcaatgagggtaatgaaaaggaagacggtgacaatgatggccaaatggaggatagcgatgaagatgatgaagcggataacgaggaagatatggaagaaagtgaagaagattagtgctttagcaaagtgg

SEQ ID NO: 23245 - DNA, 378 bp, Gossypium hirsutum
  Clone ID: LIB3147-002-Q1-K1-D10
agagtttgagctctcccacaactggaaaaacgggagcgtatatttcctcggttataaaactgtcataccagaggaaggtgatgattttggtatgtctagtgaagaagaaagcgaggaggaggaagatgaggagcttcctgtcgctgctgctgctgctgcagtaaatggaaaagctaagccagatgcaaaaacagccaaggctaatgctgggaaacctgatgctgttaaacaatctggcaagatagcagaacctagcaataacaggaaatctgaggatgaagatgatgatgatgagtccgaggatgagagtggttctgatgaggaagatgattctggtgacgatgatgagtctgacgagatgtctatggatgaaagttc

SEQ ID NO: 23246 - DNA, 450 bp, Gossypium hirsutum
  unsure (1)..(450): unsure at all n locations; Clone ID: LIB3147-002-Q1-K1-D11
gggatttagcacaagcctttatgaaacaatacagtcatgtagctgatatggtccttgacagaattacccttcaaaatatggagaaaaagcctaatgaaagttttaggcaatacgcacaaaggtggagggaggtcgctatccaagttcagccgccactcctagagaaagaaatgacgatgctcttcatcaacacattgaaagccccgttcatcacccacatgttaggaagtgcttcgaagagtttttcagacatagtcatgagcggtgaaatgattgaaagtgccgtgagaagtggaaagattgatgctggagaaaataataggaggtcagacttaaagaagaaggaaaatgangtgagcaatgtgaacacctacaacaaatcgattacacagccaagaaaggtgattacaagtcagcaaagttcatctagacaagaatcgtatgtgaagc

SEQ ID NO: 23247 - DNA, 450 bp, Gossypium hirsutum
  Clone ID: LIB3147-002-Q1-K1-D12
gagattttctcatcaggcactggcgagtttgatgaagaagaagtctatgacaaaatcccagcagatctcaagattaatcctcagaaggcaaaaggtgttgttcatgatctcgcacggactaggttgtccaattcacttattcaagctgtggcattgctaccgcaggagaaaccgacagggagcggtttcctcgcttaatgatttgctagcttgtgacaaagctgtgccttcggagccactatcatgggaggtgcctgaggagctagctgatctgtttggtgtatacgcacaaagtaatcctgttcctgagaagttgtcccgcttgcagtatctgcttaacataagtgattcagtggcggcagctgccaaagagatgggacatggatcagtatcagtcggagcagaggaagaaaagtttgtgttttgaatgtttgcttgaaattgtggtgt

SEQ ID NO: 23248 - DNA, 349 bp, Gossypium hirsutum
  Clone ID: LIB3147-002-Q1-K1-D9
gtaaaatctgcagatttagacaagtgaacatatggacaactgattgcaatacataacaggtgatgctgtaagaagcagattatatggaaaaaggtacacttttagaagcttttgtttgtttgtttagctgactatacaggcaacttgaacaggggaaaaaaggattgtgatattaacatataaccatgttttccaattttaacttgttgaagtggattttctgtgatgaaagctaatattcatacctttgaatacacttattaatggaattacctacaattttagtcaaaaaaaagatcttgtgtacccacacgtttgtgtgtgcggacacaacaaggttctaacatgt

SEQ ID NO: 23249 - DNA, 241 bp, Gossypium hirsutum
  Clone ID: LIB3147-002-Q1-K1-E10
gggacggtctgctgggtcagctaaaggcaagcctaaaattgaagtctatgacaaggatcgaaagaagggggccgggttgataactcctgccaagagttacaatcctgcagcagattcagttcgcgggcaaacaacaaactcgggtgctcttgatgagcaagacacagccccaaggaagaagaaaaaggtcgatgtcgaacctcaggaggaggaagcagcagaagtggctgctattgaagat

SEQ ID NO: 23250 - DNA, 396 bp, Gossypium hirsutum
  Clone ID: LIB3147-002-Q1-K1-E11
gttggtatacttggtattgcttgggcttttggtggcatgatctttatccttgtttactgcactgctggtatctctggaggacacatcaacccggcggtgacgtttggactggtcgtggggcggaaagggtcacttgtcccaacccctgtggaccttggggcttcatgcttgggtgccatccgggggtgttggttggtgaaagctttccaaaagacttactaccatagctattgaagtggtgccaacgagctccaagatgggttcaacaagggcaccggcttgggtgctgagatcattggcaccttcgttcttgtctacactgtcttctcagccactgatcccaagaggagtgcaagggattcccatgttcctgtgttggcaccactttccattgga

SEQ ID NO: 23251 - DNA, 445 bp, Gossypium hirsutum
  Clone ID: LIB3147-002-Q1-K1-E12
gttgctatactgggtatcgcttgggctcatggaggcatgagctgtatccttgttggctgcactgctggtatctctggaggacacatcagcccggcggtgacgtttggactgttcgtggggcggaaggtgtcactgatccgagccctgctggacatggtggatcaatgcttgagtgcaatctgagggtgtgggtcggagaaggctatccagaagactcactacaatagctatggaagtagtgccaacgagctccaagatgggctcaacaggggcaccggcttgcgtgctgagatcatcgacaccttagttcttgtatacactgacttatcagccactgattgcacgacgagtgccagggattccaatgttactgcgttggcaccacttaacattgtattcgtcgagttcatggttcaccttgccgctgtccgtatcactggcactg

SEQ ID NO: 23252 - DNA, 449 bp, Gossypium hirsutum
  Clone ID: LIB3147-002-Q1-K1-E9
actagtggatcccccgtgctgcatgaattcgcgaacgtgtcgacccctggcccggttcaaaccgctcaaatacatctacgagacggagactgtcatgtatgcctactataaaaacctcaactacttcagcacggagcgcacctactcaccgtttgcggcgcgaagactgtcccgcgagttcatcatggacctggagctgacccaaccgtgcgccatcatcgacctgatccagacctgagctcaaactaggatacaggactactacaaggcggtcgtccatttagatgggcacctgcactcactgaggatacctgaacatgcacaaaatctgcaaggcgctcctattgctggacgctctgaaaaacgtccgaccgcggataggcattgctagggtgaatcagggatcggcctgagtaaggaagcgctaacccggttgttcgcctgtacat

SEQ ID NO: 23253 - DNA, 450 bp, Gossypium hirsutum
  Clone ID: LIB3147-002-Q1-K1-F10
gcaagttaagctactgtacaagcgacacaaaaacactgctttttcttggctgagaaacattttccatgactgtgctgtccagtcatgtgatgcttcactgctgctggactccacaagaaggagcttgtctgagaaggagacagacaggagctttggcctaaggaatttcaggtacattgagaccatcaaagaagctgtagaaagggaatgtcctggagttgtttcttgtgctgatatccttgttctgtctgctagagaaggcatcgtttcgttgggaggcccttacattcctctcaaaactggaagaagagacggtagaaggagcagagcagatgttgtggaggagtatcttccggaccacaatgagaccatctctggcgttctcgacaggtttgccgccatgggtattgacacccctggagtcgtttgccttctaggagctcacagtgt

SEQ ID NO: 23254 - DNA, 348 bp, Gossypium hirsutum
  Clone ID: LIB3147-002-Q1-K1-F11
ggttgacctcagcttcccatccagtcctaatgtctcaatggaggctagaaatctcatcaaccggcttcttgtgaaagactcctcgaaaaggctctctcttcagaagataatggagcacccttggattattaagaatgcaaaccctacgggtacttgcaaaaaatagaacttgtagtagttttagattctatgtcgtaaaagctgttaacagattgcaattcagctgtgaatgtattgttcaaactgggatgataatcatcactttattctcttttgtgatgcattaagctctacttttgtccatataagcgttcatctatgaatctgattacataggattatagttgt

SEQ ID NO: 23255 - DNA, 269 bp, Gossypium hirsutum
  Clone ID: LIB3147-002-Q1-K1-F12
cccacgcgtccggatttatccaaggcttttgtatggttatttatgagaaagcctttccatgacagcttgtaataaaataccactgactaggtttacagtctcttgttggtcctagttgggaatccttattaactaaaatccttaaagaacatatgctttagactttaaaaagaaaaaatataacatactaggacgtaaaaactggaaacagattagaaattaaactgagaaggaattgtccaaactgggatgttaataataacttaatt

SEQ ID NO: 23256 - DNA, 464 bp, Gossypium hirsutum
  unsure (1)..(464): unsure at all n locations; Clone ID: LIB3147-002-Q1-K1-G10
aaaatgaggatgctattgaggctattgctgttgttgatggtgcaattgatgtagggagtgatgaaattgaaaagaagaagaagaagagcaatgaaaatgaggatgctattgaggctattgctgttgttgatggtgcaattgatgtagggagtgatgaaattgaaaagaagaaaaagaagaagagcaatgaaaatgaggatgctattgaggctattgctgttgttgatggtgcaattggtgtagggagtgatgaaattgaaaagaagaagaagaacaaagagaatgacgaggctattgaggctattgctgttgctgttgttgatagtgcaattgatgcanggagtgatgaaattgaaaagaagaaaaagaagaagaagaagaagaacaaagagaatgaggaggctattgccgttgttgatggtgcaattgatgtanggagtgatgaanatgaaaagaggaaaaag

SEQ ID NO: 23257 - DNA, 455 bp, Gossypium hirsutum
  Clone ID: LIB3147-002-Q1-K1-G11
cccacgcgtccggtcatcagatccattggaacctggttcccaagcagcagcccatgttgctgagatccgtaagaggaagggattgaaggagcagatgaccccactttctgagtacgaggacaaactgtaaggttgagaataactcagcttctgccgctatattttctgctgcaattttttgttttcggtgtctgtctcttaatgttcttgttagtagttttgggtgccttcacccatactgtcttatcatgcaaggtcatttcagtccttttcagacggtttttacaatgtacttcgctctccatctgtgttgttaatttttattgctttgatgaaatgtatttgagtcaacattgatcgtcttaaacctatatttttctttaccttcaaaaaaaaaaaaaattaaaaaaataaaaaaaaaaaaaaataaaaataatttaataaaaaaaaaatca

SEQ ID NO: 23258 - DNA, 398 bp, Gossypium hirsutum
  Clone ID: LIB3147-002-Q1-K1-G12
tcgcccacgcgtccgctttctagaaaacggatctcccccacctaaacggaagaagggaactgagcttcctggcagtgaagtaccttctacaggaaactctcctggccaaaaacagaagaagtctgctaaaaaacagaagccgttgaactttgatttcattaacgttccggagaaagtcgattggtttttaactgatgcctgttcggactcctggactcccttcctcgggaacgatttagtgtctgaatctactaaacaagattgggcagctgcatttacgtccctaacagtcaagaaaagtagtcaagcaatgttttgaagacattttctacgtcgttttagatttgactacatcgattaaacgcctggtttcatactgaccagcaatatctatattc

SEQ ID NO: 23259 - DNA, 459 bp, Gossypium hirsutum
  unsure (1)..(459): unsure at all n locations; Clone ID: LIB3147-002-Q1-K1-G9
cattcaagcccgatgcacctgcttccggtatgtattcctgcaattgtaacatccaagatatgggtatcgaagaaggccaatttgatattcctgtttttcctactaaggaagcttatacttccattttactccttcacattgttctgcatcatacttccattaacaatgttcattcctgaagctgaacttcccctttgggttatctgttatatcccaattttcatgtcattcctaaacatccttccggccccgaaatccttccctttcttagtcccgtaccttctgttcgaaaacacaatgtcggtaaccaaatttaatgccatgatctcgggactattccagctcgggagcgcctacgaatgggtagtaacgaagaanacaggtcgatcttcagaatccgacttagtggccttagctgaaagggaatcgaaatcattgaatgaagaaaagatcacgagg

SEQ ID NO: 23260 - DNA, 225 bp, Gossypium hirsutum
  Clone ID: LIB3147-002-Q1-K1-H10
cccacgctttcgcccacgcgtccggcctcacgctaaggttagtcaaccctaaccagctcaaagggatcaagtatgatcctttgaacgtcacggtttatgattttccaaacaaaagtaatgtcataggtaacattttgatgccagggttttaccagggttacagaaagaaggctacaaagcctggtcaaggcaccgctaacaccacggtggctttacgagcggtgt

SEQ ID NO: 23261 - DNA, 388 bp, Gossypium hirsutum
  unsure (1)..(388): unsure at all n locations; Clone ID: LIB3147-002-Q1-K1-H11
gctgtgcaagtcacacctgaggaacgtgaagccatagaacggcttgaagcaatggggtttgaccgtgcaactgtgctccaagtgttctttgcgtgcaacaagaatgaggaacttgcagccaactaccttttagatcatatgcatgattttcaggattgagttggtaaaagaaatggcttggggaagtacaatatcattttctctttcgttctttgggggtccattgtcattcatgttccccctgccctcccctacccccaaaactctaccgactttattcttaatcaagtgatgtaagtgtttggtgtagagacaagggatgtgaagatgttaacttcatttntttntctttcttctttatatttccgaaggacccattatttataac

SEQ ID NO: 23262 - DNA, 445 bp, Gossypium hirsutum
  unsure (1)..(445): unsure at all n locations; Clone ID: LIB3147-002-Q1-K1-H12
aacagattgaggctgctggcagaggtgttttggtataccttcgtggacatgaaggcaggggaattggtttgggccacaagcttcgtgcatataatcttcaggacgctggtcgtgacacagtcgaagcaaatgtggaacttggattgcccgttgattcaagagaatatggcattggcgcacagatactgagggatcttggcgtgcgaacgatgaaactgatgactaacaatccggccaagtacagtggactcaagggttatggattaacaatagcaagcagggttccactactaactcctattacaagggagaataggagatacttggaaacaaaaagagctaaactgggtcacgtatatggcttagattntaacggcagtttgaacagtctcattatcggcggcaatggtaacacggntgctccgacggatgctgcatctgaatc

SEQ ID NO: 23263 - DNA, 452 bp, Gossypium hirsutum
  Clone ID: LIB3147-002-Q1-K1-H9
cgagagatctaggggagcttccgtcacgactgcataaccgtacacaaaatgggcaaggatctaagcgacgagcaagtctcatcaatgaaggaggctttcactctcttcgacaccgacggtgacggcaagatcgctccatcggagctagggatcctaatgaggtctctcggcggtaaccccacccaagcccaactcaaagctattatcgctgaagagaagctcacggcgccctttgacttccctcgctttttagatctcatgtccaagcatatgaaacctgagcccttcgataggcagctacgcgatgctttcaaggttctggataaggacaatactggctttgtctccgttgcagatctgagacatatactgactagcatcggagagaagctggagccctcggagttcgatgagtggatcagggaagtggatgtcgggccagatgggaagat

SEQ ID NO: 23264 - DNA, 466 bp, Gossypium hirsutum
  Clone ID: LIB3147-003-Q1-K1-A1
cccacgcgtccgcaagtagcagaaacaaggggcatttatcctcctgccgcagactatttgaaacatgctgatagatcacatatgacacttgtggagactttcagaaacatgccaacagaggaggagcctcttgagaatggtgaccttgatcatgagaatctagaggatcagaatggagaagagggtagccaagaggaggctgttgttgtggatgctgattcaaacgatggtgcagtgctcgttaatggcaatgaacctgaagaagagtggggtacgaataatgaaggaaccccgtcagcctaaaagcaattggtcggggcagtgtgaaaatccaaattttgtctctgtgcttacaccggatcactaggttccttcaagacattcagttcgagctctattcagaacatatttaaggtgagaaaccataatcattgttattatttcttaaaggagaaaacattattag

SEQ ID NO: 23265 - DNA, 377 bp, Gossypium hirsutum
  Clone ID: LIB3147-003-Q1-K1-A10
cccacgcgtccgattcaggccgatcaattgtacgtggaacattagactatctccaaggtctcaagatgcttggagtcaagagaatagagcgtgtgcttcccattggttcttccttgactgttgttggtgaggctgtcaaggatgacgttggaacaattcggattcagaaaccccataaaggaccattttatgtgtcccccaaatctattgatcaactcatttccaaccttggaaagtgggctagattgtacaagtatgcttcgtttggactgaccatctttggcgccttccttaaaaatcaccaagcatgcaatcctttatttcttggagagaagacaccgacgggaattgcagcgaagggttcttgctgctgcagc

SEQ ID NO: 23266 - DNA, 345 bp, Gossypium hirsutum
  Clone ID: LIB3147-003-Q1-K1-A11
cccacgcgtccgaaaaaaaaagaaaagaggaaaaacgttctctcccacgaaacccaccattactgcaaatggcgacgacggcccccgacaacctgagccgcgatcagtacgtttacttagcgaagctatccgagcaagctgagcgctatgaggagatggttcagttcatgcaaaaactggtcctcggctcaaccccagccgctgaattaactgtcgaggaaaggaaccttctctccgtcgcctacaaaaacgtcatcggatctctacgtgccgcgtggagaatcgtttcttccatcgagccccaagaaagaagaatgtcgaaagaacgaggaacatgttgtgctg

SEQ ID NO: 23267 - DNA, 421 bp, Gossypium hirsutum
  Clone ID: LIB3147-003-Q1-K1-A12
agtggagcaattctgcattaccagcccaaatggcaatgattcgtgggacatgcacgaggaaatgttgaagaactctgaggaattttatcaggagataaagctaccttatcaaatcgtcgccattgtttctggcgctcttaatgatgccgctgccaagaaatatgatttggaagcatggtttcctgcatctcaaacttacagagagctggtgtcttgctcgaattgtacagattatcaatcaaggcgactagaaatcagatacgggcagaaaaagaacaatgaacaggcaaaaaacccaatatgttcatctgttgaactcgactctcaccggaacaaaaaggaccatgtgctgcatacttgagacttaccagaaagaagatggtgtcgaaatacccgaaagtttacaaccgtacatgggcgg

SEQ ID NO: 23268 - DNA, 418 bp, Gossypium hirsutum
  Clone ID: LIB3147-003-Q1-K1-A2
gtcttccctgaaaccaacaccggcatcattgtgttggctgaaggacgtctcatgaacttgggttgtgctactggccaccctagctttgtcatgtcatgctctttcaccaaccaggtgatcgcccagctcgagctgtggaaggagaaggcaaccggcaagtacgagaagaaggtgtacgttttgcctaagcaccttgatgagaaggtggctgctcttcaccttggaaagcttggggctaacctcaccaagctcaccaaggatcaggctgactacattagcgtccccattgagggtccttacaagcctcctcactacaggtactgaggagagaatacgagagagagagagggagagagttggactagaaaaaggaaccatacaacgggatggtttgatttgttgtttttactaaaattta

SEQ ID NO: 23269 - DNA, 441 bp, Gossypium hirsutum
  Clone ID: LIB3147-003-Q1-K1-A3
gagagatggtatcgcttaagctccagaaacggttctcagcgagcgttctaaagtgtggaaaaggaaaggtttggctcgatccaaatgaagtcaacgagatctccatggccaactctcgccagaatataaggaagctggttaaagatggttttatcatcaggaagccaaccaagattcactctaggtctcgtgcacgccgcatgaaggaagccaagagaaaggggcgtcactctggttatggtaagcgcaagggtacaagggaggcaaggttgcccacaaagatcttgtggatgaggaggatgcgtgttctgagacgcttgctccgcaagtatagggaatcaaagaagattgacaagcacatgtaccatgacatgtacatgaaagtcaagggtgacgtgttcaagaacaagagagttctcatggagagcatccacaaatcta

SEQ ID NO: 23270 - DNA, 354 bp, Gossypium hirsutum
  Clone ID: LIB3147-003-Q1-K1-A4
ctcaggaatggcaactggaacagcaccaccaataggaagtgcagcagcagctgcaaacatgcggaggaggagaacgacaagtggtgcaggtgcctcgggaggagctgctggcacaatgcttcagttttacacagatgatgccccagggctgaagatctctccaaatgtggtgcttgtcatgagcattggtttcattgcatttgttgccattctccatgtcatgggcaagttgtattttgttcgtaaggagtagggaggggctttcctcaatacctgtattaacaagtaccaaacaaagatcaatgttgtagttttcagttttgcttaataaatggattttgatttgatttctcc

SEQ ID NO: 23271 - DNA, 459 bp, Gossypium hirsutum
  Clone ID: LIB3147-003-Q1-K1-A5
gcgcccacgcgtacgcttctactttatatgacactcttgtgttcaaatatgatccaccgagcaacaccgcgtttcctcacggtgtctcattgctacccaacctcaggagcttccttaactgcgacttgaagaaagctaagctgatcgccaaccaaactcaaggtggcggaaatgggtttgagtttgttttgaagaagaagaataagaagaagccctactacttcgtttgtggtgagcgtaatggctttcactgcaaggttgggattatgaaattcgctgtggcgccgctcctccgtcctcggcccttctgatggaacaccaccagaatccaaggaagacgcagtgcctgactttattatgttctgtatcattttattcacaataatattagagattggaattcagtaatgccgtcatgtttcttctttctacctaatatgtcagaatttgctttatgcg

SEQ ID NO: 23272 - DNA, 230 bp, Gossypium hirsutum
  Clone ID: LIB3147-003-Q1-K1-A6
gaggaataggtgatgaggttttaaaacattttcttttagtaggaaatcaaattgttttgcagtttggtgcctacattaacctttttaagaagtgttttgcagtttctcaatgtactttttggcataaacaattttatgatttacttttatgtcaaaaaaaaagtgtacattaaaactaaacacctatataaaaaaagaaaatgatcttaaccttggggcggtcgttttta

SEQ ID NO: 23273 - DNA, 453 bp, Gossypium hirsutum
  Clone ID: LIB3147-003-Q1-K1-A7
ccgacgcgtccgggctccctcaatgtctactttaatggttgttctcgtcgctggatgcgctctcatgggttccgccattgccgccgacgctccggctccgagccccacctctggtgccagctctatctcgccgccatttgtctctgtttccgtcgccgctgccgctatggctctgcttttcggatctagacttcggatctgaatgatgctatctctggtgttcagatgatgctctgtttttcttttatatatgtattttttttctttttgatttgattttgaatttggtttgcaattttagtagctgtggtagtggatctagggagtgattatattatatataatttatcagagagagggagacagagaggtagttattttatttgttgcacagattattgatggctgatgttttggatttggattattttctggattattatggattgatgg

SEQ ID NO: 23274 - DNA, 403 bp, Gossypium hirsutum
  unsure (1)..(403): unsure at all n locations; Clone ID: LIB3147-003-Q1-K1-A8
tcgatcagattaaggttgagcacatatggccaagtttaagaaccacaccgctcacaatgagtcttacaaggctcacaagaatggcatcaagaagcccaagaggcaacgccatacttccaccaaagggatggatccaaagtttttgaggaaccagaggtatgcaagggagcacaacaagaagaatggggaatctgccgctgaggaagagtaaatttaaatgaaaaagaaattacccttcattaaggcttttctagttagggctgctttactatattctatggaatttggtgttaattttacactccttttgtttttgtattggtgatttatgggattattgattatatttgntagaaaagatctgaacgtgcgagcttattaatatcatgaacatgttttgatc

SEQ ID NO: 23275 - DNA, 115 bp, Gossypium hirsutum
  Clone ID: LIB3147-003-Q1-K1-A9
tttttttttatcataattaaataatagatttattatctgaaaatgggaatatctagtaatgcaaaaattcaagcatattcaagtgatatcttcaaaattccagatgtcagcatcc

SEQ ID NO: 23276 - DNA, 312 bp, Gossypium hirsutum
  unsure (1)..(312): unsure at all n locations; Clone ID: LIB3147-003-Q1-K1-B1
angagttaagaactgcaagttaaggctctactttaaagatttttgatcgtttgatctatttagcagcccctactggaaagatgcgagtgttggagctgcacttttcttattctcaacagttatctgggatcaaagctgtagtttactattctacagctgtgtttcagagtgctagaattgcatctgatgttgcatcaagtgctctcgttggggcattaaatgtctttagctcatatattgtatcctctctgatggacagacaagggagaaaaagtcttttgatgacaaattttaaagaatggctgcttaatg

SEQ ID NO: 23277 - DNA, 455 bp, Gossypium hirsutum
  unsure (1)..(455): unsure at all n locations; Clone ID: LIB3147-003-Q1-K1-B10
ccgatgcctgagaacacgggtttctctctgcatcacccccacaagctaaaagatcagcaaatgcccctattccagtaccacccttattgtttctgtggcgttaagagcagcaaaggaatggttcggaagcctgggccaaagcaaggaagtgtcttcttcggctgtgggaactggactgtcaccagaggtgctcgctgccactacttcgagtgggcttctccctaactcgagaaatcacaaaagggcttgtccatctttcttgatggcatcttaaacccttctttgatgtcattgtttaaagaaaatgtattaattgtttgtaatttgtatggaaaaaaaaaaggagctnaaaagcaatggtaatgggttgtctcctcgttgaagcacacataccttaagttgcttaactgcttgctgatgcttcttgtttgtggaaaacaccgtagtaatgatcg

SEQ ID NO: 23278 - DNA, 429 bp, Gossypium hirsutum
  Clone ID: LIB3147-003-Q1-K1-B11
cccacgcgtccggcagcaaccaaactctgaaatatactaaccttctttttttacattttgttcgattagtcttcttctcggtatcgctgtcatggctgggttcgagcagcgaataaaggagagagccaaggagctcaaggttttcttcaagaagggtgtgaagatcgtgggagaatcatgcaagaaaggttggtacaaagtcaagcacatcagaggctgattcttttgccttccatcatcttgttttcttttcgttttccatgtagagatctttgtcagtcatcttgatttggagggggttttttctttaatttattgaaggattttatcctgttttctgcttattttttgtgcttttttttagcatcttatgaggtgatttgattttgagattatagttaacttgtttcggttggctttttttttttt

SEQ ID NO: 23279 - DNA, 69 bp, Gossypium hirsutum
  unsure (1)..(69): unsure at all n locations; Clone ID: LIB3147-003-Q1-K1-B12
naaaaaaaaaaaaaaaaaaaaaaaaaaaaaatataaactaaacaaaaaaaaaaaaaaaaaaaaagaaaa

SEQ ID NO: 23280 - DNA, 371 bp, Gossypium hirsutum
  Clone ID: LIB3147-003-Q1-K1-B2
cccacgcgtccgatttggaaaggacaacgcatgtgcattctatggctatatctgagcaagctccaatggcaaggcacaatactgcttcggagaatggaagcttgtcccggaaactctatactgctagcagcctaggaagtatggaggaaagcgaaccatatgcatgcatctgaaggactcaacggatggtgggtctgatgagagtaatgttgaagaggcatcattgaaaacgatctacatgaagagcatgacacccatagcgtgtgaatctgcccttcgtcagaaggagggtgaacttgcatcctacatgtctcgtttgtcttccatggaagctatccgtgactccttagcttaggaagtggtgaaaatga

SEQ ID NO: 23281 - DNA, 282 bp, Gossypium hirsutum
  Clone ID: LIB3147-003-Q1-K1-B4
cccacgcgttcgcccacgcgttcgataaaaatataaaaaaaattataataaataaaaaaaataagtgaaaaaaaagtgataaaaaaaaaataaatggtaggaaaatttatttaaaatatatatttttaattttaaaaaaaaaaagggtgaattcataaatgtatgtactaaaaaaaattgtaatgctaatagtttttgttaagttttagactggtatctttttaatttgtatacatataaaacattgtgtttttaataatgttatgtctaatagtttttaat

SEQ ID NO: 23282 - DNA, 443 bp, Gossypium hirsutum
  unsure (1)..(443): unsure at all n locations; Clone ID: LIB3147-003-Q1-K1-B5
cccacgcgtccgggagtatccggaccgaatgatgcttacgttttcggtgtttccatctcccaaggtttctgatactgttgttgagccttacaacgcgacactctcagttcatcagcttgtggaaaatgctgatgagtgtatggttcttgataacgaagctctctacgatatctgtttccgtaccctcaagctcactactccaagttttggagatctcaaccatctaatttctgccaccatgagtggtgtaacatgctgccttcgcttccctggtcagcttaactcacatctccgcaaacttgctgtaaaccttattccattccctcgactacatttcttcatggtgggatttgcgcctctcacctcacgcggttcccaacagtacagagccctcactgtccctgaacttacacagcanatgtgggatgccaagaacatgatgt

SEQ ID NO: 23283 - DNA, 373 bp, Gossypium hirsutum
  Clone ID: LIB3147-003-Q1-K1-B6
taaggatggttttatcatccgtaagcctaccaagattcactcccgatctcgtgcacgcagaatgaaagaggccaagagaaagggtcgtcattctggctatggtaagaggaagggtaccagggaggcaagattgcctacaaagatcctttggatgaggagaatgcgagtactaaggcgtttgcttcgtaagtacagggaatccaagaagattgacaagcacatgtaccatgacatgtacatgaaggtgaagggtaatgtatttaagaacaagcgtgtcttgatggaaagcatccacaagtccaaggctgagaaagcaagagagaagacactctcagatcagtttgaggccaagcgagctaagaacaaggcgagc

SEQ ID NO: 23284 - DNA, 421 bp, Gossypium hirsutum
  Clone ID: LIB3147-003-Q1-K1-B7
gacgaggttcaagaatggctgtatactgatggtgaagatgcaactgctacagagtttcaagaacgcctaaatttgttaaaagcagccactgacccaatatttttccgatttaaagagttgactgcacggccagaagcggtaaaatttgcgcgacgataccttactgaattgcaacagactattcgtgggtgggagaaggacaaaccttggctgccaaaagataaagtagaggagttgtcaatcaatattgataagttcaagacttggttggatgaaaaggaggccgagcagcagaagatgtctggattgaggacgcctgttttcacatctaaagaagtctacgagaaggtaaccttcgtgcaaaacaaggctgatagcattaagaaaatccccaagccaaagcctaagactgagaagccat

SEQ ID NO: 23285 - DNA, 357 bp, Gossypium hirsutum
  unsure (1)..(357): unsure at all n locations; Clone ID: LIB3147-003-Q1-K1-B8
cggacgcgtgggcttttggagctgctaatcggaaagaaaccgctagagaaaatgtcaccaactcagcaccaatctcttgttacatgggtaatttctttggaccatacattttgaatttctttcagccatggcttaatacttcatttatatactatttttataggtcatgccccagcttaccgacagattgaaacttccgaagttagttgatccagtaataaaagacacaatggatttaaagcacttatatcangtcgctgctgttgcggtgctgtgcatacagcccgaaccaagttataggccaactataactgatggactgcattctctcatccctcttgtaccgatagaactcgg

SEQ ID NO: 23286 - DNA, 317 bp, Gossypium hirsutum
  Clone ID: LIB3147-003-Q1-K1-B9
atatgaaaatgacattgtatatgatgggatatgaggatgtttcatcagcaccaaatgacccagttgagaaaactatttggacatttggaagaccagctactatggaactaacacacttttggggtaccgaaaacgatcctgaattcaaaggataccacgatgggaattcagaacctattggctttgggcacattggcattaccgtggatgacatgtacaaggcatgcgagagatttgaaagtcttggagtagaatttgtcaaaaaaccaagcgatggttttgcattcatcaaggatcccccttgatggtattgggat

SEQ ID NO: 23287 - DNA, 421 bp, Gossypium hirsutum
  Clone ID: LIB3147-003-Q1-K1-C1
gttttaaagtactctgtttgatcacctaacatcatgcagtgtggaaattcatccaatatattgaagcagaatttgaaatgagaattgaaagtacatttggatggagctaaagttgtgtttcttttagcgatatatttgaacttgctggtgttaggtccctggtttttgctatctctagatttaagggtagaaggaaaaggaaaatattttggtctacgttagtatgtaatctacatgtttaatccaacaatttaatgtgttattctgctgtcagatagtacctgggcaggttcaacaatttaatgcattgtattttttattaccttgcaatgtgtatagtcataggtaggttcaactaaccgagctggttttcatatgaataattgattgtagtttaattttaaatttttatatttacttt

SEQ ID NO: 23288 - DNA, 228 bp, Gossypium hirsutum
  unsure (1)..(228): unsure at all n locations; Clone ID: LIB3147-003-Q1-K1-C10
tgatgaatctgtcaaatccttttcccttgtgtttgatgtatgccaatactgtagagagaatctttgttttccatatgactacaaatattgcggctggatttttggattgancaaaaaaaaaaaaaaaaaaaaaaaaaaaaaaaaaaaaaaaaaaaaaaaaaaaaaaaaaaaaaaaaggggggncggggtggaggatctaaaagttcctacccttccttgccacgaaat

SEQ ID NO: 23289 - DNA, 306 bp, Gossypium hirsutum
  Clone ID: LIB3147-003-Q1-K1-C11
tgaagctggaagccaatgaagatggggatgccgatgtacattttgaagctttccaaatgagtgatatgtgtgttaagttatttaaggaaggatggttcgtgaccgagttcggggaagacgatgatccaaagctttccaagatgaagaaagaagtcgtcgtaggtgggaaggatgttaaggaggttgataatgatttcttcttggtggtggttaagattatcgaccatcagggacctctttcatcaacctttcctattgagaaccggaacaacctcgcgacgatgaggacactgaaaagtaaaatca

SEQ ID NO: 23290 - DNA, 449 bp, Gossypium hirsutum
  unsure (1)..(449): unsure at all n locations; Clone ID: LIB3147-003-Q1-K1-C12
cccacgcgtacggcatagagatccaaagaacagattaggtgcacgtgaaggggccaatgaaatcaagcgacatccattctttaaaggtgtaaattgggctctcgttcgctggatgactccacctgagcttgaagttcccatctctgcaactgaaactaggaaggaagaagataaagcaatggaccctcaattacaggatttacaaactaatattttctgagaagcttggaatgctttatcacttcaccattagaggcttcgggttttataaatgttgtgtcgttctctcatgggccctaccattatgttggattcttcttttatcttttttgggaataaaatgcccccnttctggtgattggtaaataaaaatcaaattgttccttttaatttctttatatcatcaatacaggtaaggagatttggggggtattctttagattcttaaa

SEQ ID NO: 23291 - DNA, 393 bp, Gossypium hirsutum
  unsure (1)..(393): unsure at all n locations; Clone ID: LIB3147-003-Q1-K1-C2
cccacgcgtccggctcaatctctccttttagctcagaacgctcttcacgctgtgtagaaatgccgttcaaaaggtacgttgagatcgggagagtcgctctcgttaactacagcaaagactacggcaagctcgtcgtcatcgtcgatgttgttgaccagaacagagctctagttgatgccccagatatggtgaggggccaaatgaactttaagaggcttcaattgactgatttcaaaattgacattcctcgtgttccaaagaagaagacactgattgaagcaatggaaaaagctgatgttaaaaacaagtgggagaatagctcatggngtaaaaagctgattgttcaaaagaagagagcatctctcaatgacttcgacagattcaagatcatgt

SEQ ID NO: 23292 - DNA, 184 bp, Gossypium hirsutum
  unsure (1)..(184): unsure at all n locations; Clone ID: LIB3147-003-Q1-K1-C3
ggcgagccaagcgtacgggtgttttttgtggatgaccgtgtctcctcttttaatgaaggangacaaagcgggctcaaatgggctgggggggccttaattctcgctgagaaatcatggctttttgtttgctttatgttaaaacaatattctcagcatatacaactgagtgtgctttgcacttttt

SEQ ID NO: 23293 - DNA, 432 bp, Gossypium hirsutum
  Clone ID: LIB3147-003-Q1-K1-C4
gaaacaagcaacagagaagtcctcatatagcgctatgggctagttgacacaacacacaaacatcttagcactgtattgtataacaaggggtattgatgatgaaagcgaaaaaaaaggacgtgtgaccttgaaaaaagctggacttgtcagctaccattattggcactaggacaaatttttgttttgctacacatactatgggcaatcataatggggtgtggagctacaatccattggaactatttgctcaaatccagcctgctttcttgcaataacttcaatcatgaaatatgaactgaacctttctactacaaagactgccatgactgaagataatgtgtttaggagtccatactagaaacacttctttcgatgcctttgacgcgtgatccgacaaaaagatgcacatatgtttaaaagttgttctttact

SEQ ID NO: 23294 - DNA, 167 bp, Gossypium hirsutum
  Clone ID: LIB3147-003-Q1-K1-C5
gctgtttttgggggttgtccgtttcttctcatggaatttaggttgtgaaatcagactcaaataagcttggggggccttagttctcgctgagtgttcatggttttttgtttgcttcagtttaaaacaatattctcagcatatacaactgagtgtgctttgcacttttt

SEQ ID NO: 23295 - DNA, 274 bp, Gossypium hirsutum
  Clone ID: LIB3147-003-Q1-K1-C6
cccacgcgtccggataaaactaaaaaaaacatttaaaacaaaaaaaaaaactgcgaaaaaaaggggcaaaaaaaaaaacaaggggggccggtcgtaacgatccaacaaacttacgcaagcctgcggccagcttggtttttttttacgtgacctaaactcaatcaaatgccctccctatgccaaccaaccgactgggaaaaaactggctctacccaacttaatagaagattgataacaaacccgtttctcctgctggggcaattaataaaagact

SEQ ID NO: 23296 - DNA, 365 bp, Gossypium hirsutum
  Clone ID: LIB3147-003-Q1-K1-C7
caaaaccttcattccatcccactcaccccgaacaacctctctccaccaacatggggaaaacacgtggtatgggagcggggcgcaagctgaggacccaccgcaggaggcagaggtgggctgataaggcatacaagaagtctaaccttggaaatgaatggaagaagccatttgccggttcttcccatgctaaaggaattgtccttgagaagataggtatcgaggctaagcagccgaactctgccatccgaaagtgtgctagagttcaattgatcaaaaacggcaagaagattgctgcttttgttccaaatgatggttgcttaaactacattgaagagaatgatgaggtgttgattgctggatttgga

SEQ ID NO: 23297 - DNA, 431 bp, Gossypium hirsutum
  Clone ID: LIB3147-003-Q1-K1-C8
cccacgcgtccgtatatagccatgggtttgtgaccaacacagcaacacttagcactgcattgttcaacaatgggttgagctgtggttcttgttatgaaatgaggtgtgatggtgacccaaaatggtgcttgcctgctaccattatggtcactgccaccaatttttgtccccctaattttgctttgtccaatgataatggtgggtggagcaaccctacattgcaacactttgatttggccgaacctgctttcttgcaaatagctcaataccgtgctgagattgtacccgtttcattcaggagagtcccatgtataaagaaaggaggagtccgattcacaatcaacggtcactcatacttcaactcggtcctaatcactaacgttggcggcgccggagatgtccactcggtgtcgatcaagggctcgaaaact

SEQ ID NO: 23298 - DNA, 192 bp, Gossypium hirsutum
  Clone ID: LIB3147-003-Q1-K1-C9
cccacgcgtccgcttttgaaatggcaaaaattgtagtgttgaggtgtgtgtttcactgtatgaactttggttggtttttggtttaattgttttattttgatggaaaccatagttttgttgtttttgaaatctcccattgttacaatttagaggatctatttatgttgctgggttttggattgttggtattcc

SEQ ID NO: 23299 - DNA, 417 bp, Gossypium hirsutum
  unsure (1)..(417): unsure at all n locations; Clone ID: LIB3147-003-Q1-K1-D1
cccacgcgtncggtttttctctcgtatactgtcgttctttgcggtttgaagataaacccgattattcctatttgaagaggcttttccgagacttgtttttaagagaagcgccccccccccctttttgttgatctgttggaggcttggagttgtcaatttagtaaatcccttagctttgaagatagtgttttgtttttgtttggcttgagaatggataatgtgattggtggtaagttcaagcttggaagaaagattggcagtggctcttttggagagctttatttacgggtaaatgtgcaaactaaagaggaagttgctgtcaaactggaatctgcaaagaccaagcatccacagcttcattacgagtcaaagttgtatatgcttcttcaaagaggaacgggtattccacaccttaag

SEQ ID NO: 23300 - DNA, 397 bp, Gossypium hirsutum
  unsure (1)..(397): unsure at all n locations; Clone ID: LIB3147-003-Q1-K1-D10
gaacgtgaggtcggaaaagagaagtttaagataggaatgtataaagaagcatgcaagatttgtactcgccaatgcactgcttcaactttggatgattttttgacacttgatgcttataattatatcgtcattcatcatccaaaggatgtttcttctaagctttgatgaagcttccatgaaagcttagaattatggggtttgagtgaaaaaaaatagtgccattgctaaataagcaaataatcataattgtggtttttacgggaaatggttcaataaggtatgttttatttcaaaaaannngggtttttatagattatttttatggttttanttgagttattancnnntaaaattgtagtcgtttgactttttctgtttgtaccgcttgcaccaatag

SEQ ID NO: 23301 - DNA, 439 bp, Gossypium hirsutum
  Clone ID: LIB3147-003-Q1-K1-D11
caaaatttaaaagaaaagtgcattcccgggactctgttctcgtaaatcaaactcgtaaatatttattataaatatttacgaagctatttggtgtagttaattaggtttcgattaagtgaatttgcttgaattaaaagtaattaggtataaggactaaattgtatatagggtgaaagttaaattatagattaaagaaaaatttaagggactaaataagcaattatgccattgacattaaatgaggcggcgtaaggatgaagatatttataaaatttaaagttaaaatatatattaattttaatattataatattatatcttaattattatattatattatattatattatattatattatattatattatattatattatattatattatattatattatattatattatattatattatattatattatattatattat

SEQ ID NO: 23302 - DNA, 439 bp, Gossypium hirsutum
  unsure (1)..(439): unsure at all n locations; Clone ID: LIB3147-003-Q1-K1-D12
cttggaggtattcttatgaatctgtctctagcatccctcaaaagtcgctctacctcaatgagcaatacttgaatgtgaaaaaggctttggtcgatgctttctttggtcctcctgaacggngtgtatatagtgcatctgttcaaagcactcttttgcagatggcaaaggctgtacttggcaagttcagtgacatatcatcagttaaactaaaaatgccgaatatccatttcttacctgttaatatatcaagcaaggatcacggcagcattgtaaagttcgatgatgatgtatatcttccgacagatgaaaaaacctcacggatcgatcgaagctagcttgagcccggtctggtcaaaagatgtaggtacaagacaaacgtagtgtatggtgggaagaagggtataataaaatntctgcttcatgctntgttcattatcta

SEQ ID NO: 23303 - DNA, 434 bp, Gossypium hirsutum
  Clone ID: LIB3147-003-Q1-K1-D2
ctcgagttctttcattcctgattccgatcttaaaaaaccctcgttatccccattctttatattctatggctccaaaggttggtgagaagaagcccgccgagaaaaagccagcggaaaaggctccggcggagaagacgccaaaggcggagaagaagatctcaaaagaaggcggcgcacataagaagacgaagaatgttgagacgagcgctgagacttacaagatgtacatcttcaacgtattgaaacaggttcatcctgatatcgggatctcgagcaaagcgatggggataatgaacagtttcatcaacgatatctttgagaaattggctcaagaagcatcgagattggctaggtataataagaagccgacgattacatctaaggagatccaaaccgccgttcgattggctttgcctggtgaattggctaagcat

SEQ ID NO: 23304 - DNA, 430 bp, Gossypium hirsutum
  Clone ID: LIB3147-003-Q1-K1-D3
cccacgcgtccgaatatttacgaagttctaccgtcatggggagaagacctgcaaggtgttatcgtcagataaaaaacaaaccttacccgaagtcacgttattgtcgtggtgttcctgatcccaagattaggatttatgatgtgggaatgaaaaagaagggtgtggatgagttccctttctgtgttcacttggtctcttgggagaaggaaaatgtctctagtgaagctctggaagctgctcgtattgcttgcaacaagtatatggctaagtatgctggaaaggatgccttccacttgcgagtccgtgttcacccattccatgtcttgcgtatcaacaaaatgctttcatgtgctggagctgataagctccaaactggtatgcgaggtgcttttggcaagccttcaggaacatgtgctagagtagccattgg

SEQ ID NO: 23305 - DNA, 423 bp, Gossypium hirsutum
  Clone ID: LIB3147-003-Q1-K1-D4
cggacgcgtgggaaagaaaggaataaaaggatgtttacgtgtagacagttgagcagaaattgggggaaatagaaaaactggattaataatttagattttatattggagaggaagatgacgacgaattttagatatagacattggaaaagttattatgtatgaccatattatggtttgattaagttgtgaattgttctttttaaagagggatagtattactagaaacgcttttggatttatttttataataggtactatgtatattgataacattgctttacaggattacatcatgtagttacactttggaaaaatattacatgttttgcgtattaacaaaatgctttgatgtattgtatcataataggtttaaaatttgtattgaaaattccttggggcgtgcgttttaggaattttttggtt

SEQ ID NO: 23306 - DNA, 357 bp, Gossypium hirsutum
  Clone ID: LIB3147-003-Q1-K1-D5
cccacgcgtccgcccacgcgttcgcgaagcttgagatcactaagctggtttctgggatgctgtattttggatacatgctagttgcttcatatgcatttttcgtgctaacgggcaccattgggttttatgcatgtttttggttcacaaggcttatctactcatctgtcaagatcgattaatgtgtaaaacgggatatgcttttatcatatataatcatgattcttagattcgatcatgttttcagatgagataatcgctattgtttgtcttacgttacaattcaaggttaagatctaatcatgctttcagatataaactgttaatgctcatttctgggctgagcttttatttttttaa

SEQ ID NO: 23307 - DNA, 359 bp, Gossypium hirsutum
  Clone ID: LIB3147-003-Q1-K1-D6
cccacgcgtccgcccacgcgttcgtggcaaccaggcttggtgctcgcctcactgaagttcgcaagaacggaacttgccctaggctcacacctgatggcaagactcaagtcaccgtcgcggattacaacgacaagggtgccatggagactgttcgtgaccacaccgcgctcatctccactcaacatgacgagaccggcactaacgatgacataactgataatttgaaggagcacgtcatcaagcctgttatacccgagaagtacctcgatgagaaaaccattttgcaccttaacccgtcagaacttttcgacattggaggtccccatggtgatgctggtctcactggtcgcaagattatc

SEQ ID NO: 23308 - DNA, 418 bp, Gossypium hirsutum
  unsure (1)..(418): unsure at all n locations; Clone ID: LIB3147-003-Q1-K1-D7
cccacgcgtccggtttctactctccaaaacattatgcctcanggaaagcttcaagttgtccttgttagtgccaatggtctcgagaacacagattttctctgtaacatggatccttacgtgcttcttacttgccgaacacaggagcagaaaagcagtgttgcatcaggaaaaggatcagaaccagaatggaacgaggatttcatattcaacatctccgaacgtgcttcggaactcgcactgaaaataatggacagtgatactggttctcaggatgatttcgtgggagaagtagctataccactggagcctgtatttatcgaaagaaacattccccttactgcatatactgttgtcaaggatggagaatatcgtggggagattaaacttggtctcactttcacccccgaggaacgtgaaa

SEQ ID NO: 23309 - DNA, 380 bp, Gossypium hirsutum
  Clone ID: LIB3147-003-Q1-K1-D8
gaaggaagaagaagcaaaacctgctgaagtgtagaaagttgaaacagaaactgatccagcagagaagactgagtaaataataaagcttttgtgatgaaaatgagggtgtcaatggaagattgtttcaagtggctacagtttgataagtttgcatgtcaagtcaactagttttcttctatgtaggtcaataaggatgtggtaatgtggctgatggacgcccaccgatagtagtcttgcaatggctaagttaacatgcatttgcatatgtcaaagagtgacatacttgatgttccattgtgggggaatttttatgggtcatctgttatctgtaaagggatgggtttcttgggtcccaaaccacctttctttgcttatgttta

SEQ ID NO: 23310 - DNA, 464 bp, Gossypium hirsutum
  unsure (1)..(464): unsure at all n locations; Clone ID: LIB3147-003-Q1-K1-D9
ctactcaccagattcagcaaaatctattgttgttacaaaaactttcccaatcacgttttacttaaaagctatactgccacaactactactttgttaatttactgcaaaaatgaaggtgacgaagaaaaagagtgatgctactgctcaaagagcatggaggctactgcgtctattcttgttatggactagaaaaagtggggtgctcaggagacggcttatgatggagctaaggttggtgcctaagttcctcaagggtctaggacacacatccccttctcctcctggccaaatctattttaaggaacgccagctttttttcattcgatgagacacccatttttcaggtgaagatgcgccgttccgcttncatgcgcttccttcttccttgcatgagcactcaggatgtggatttcgattacgatttcggcatcgatggagaggacggagtttacgggtacgatagt

SEQ ID NO: 23311 - DNA, 327 bp, Gossypium hirsutum
  Clone ID: LIB3147-003-Q1-K1-E1
atcggatgcctagtgttcagtttttgcactttcaaataaatttttattcacttcggatttcctctcttctttgtttcacccctatgaatatattcaaagtttttttccacttgtgaacttggttacatgttcatacaggttggctctttcttgatggggtggtggggtgttgttttcaaaggtgacatatctcaagtatctgatattttggcaattggattgactaccggatacttgggtagcgtcacaacattcagtggttggaatcagaaaatgcttgatctcagtgtagatggccactgggtgcaagctatacttgggtttctc

SEQ ID NO: 23312 - DNA, 216 bp, Gossypium hirsutum
  Clone ID: LIB3147-003-Q1-K1-E10
cccacgcgtccgtgaacttgtcaaactctttttcccttagacattggttttcagagaagactattccggatttgttgttatggtgtttgtaatttggagcagtatatacctcagtttatattagctccatttatgtcagttttctgttttcttttttaagcaacaataataaaaaaatatttatttttgtgataaaaaaaaaaaaataaaatcaaa

SEQ ID NO: 23313 - DNA, 299 bp, Gossypium hirsutum
  unsure (1)..(299): unsure at all n locations; Clone ID: LIB3147-003-Q1-K1-E11
aaaaaaaaaaaaaaaaaaaaaaaaaaaaaaaaaaaaaaaaaaaaaaaaaaaaaaaaaaaaaaaggaaaaaaaaaaaaaaaaaaaaaaaaaaaaaaaaaaaaaaaaaaaaaaaaaaaaaaaaagaaagaaaaaaaaaaaaagaagggggggggaagagccnagggggaaaaaaaataaaataaccaggcagaaaaagactaaattcacaagctgggggaaaaaaaaaaaaggtaacggggcaaaggctaaaaaaaacaggtggggagaaaaaatggccaatgggaatggccctggagggg

SEQ ID NO: 23314 - DNA, 452 bp, Gossypium hirsutum
  unsure (1)..(452): unsure at all n locations; Clone ID: LIB3147-003-Q1-K1-E12
atctttgcaaagcatccgcatagggcaggagacatggtgattgaatatactggtgaacttgttagaccttctatagctgataggagggagcatttcatatacaactcattagtgggtgctgggacttatttgttccgaattgataatgaaagagtgattgatgccactagagcagggagcatagcacatctaatcaatcactcgtgtgaaccaaattgctattcaagagttattagtgttcatggcgatgagcatattatcatttttgcaaagagagatatntaaacgatggggggaagagctgacatatgattatagattcttttccattgatgagcggtttggcatgttactgtggttttccaagatgccggggtgttgttaatgatactgaagctgaggagcaagtctcaaagatattggtaaaccgcggtgaattaatacaatggact

SEQ ID NO: 23315 - DNA, 194 bp, Gossypium hirsutum
  Clone ID: LIB3147-003-Q1-K1-E2
gagaataagcctgtcatgacagagtaacagctgcttttgattagtatgcatggcaagttggtggatggttgttcttagaactctgatatgtacaagatggaaaatgcttgttgatgtattcaaatactgtcataacggtttttctttgagatggaatgatattcaactttgtggaaaaaaaataacatataaaa

SEQ ID NO: 23316 - DNA, 420 bp, Gossypium hirsutum
  Clone ID: LIB3147-003-Q1-K1-E3
caagaggtgctcacttgctatgttatcctggagcatttaacatgacaaccggaccattgcattgggagttgctgcagagagcaagggctgtggataatcagttatatgtggcaacttgttcacctgctcgagatactggagccggttacgtggcttggggtcactcaacccttgtaggaccttttggagaagtcctagccacaactgaacatgatgaggacataattatagcagagattgattactcaatacttgagcaacgaagggctaatctccctttggcaatgcaacggcggggtgatctttatcagttggtagacatccggagagtcagtgctcattgattagagaagagaagcatgtgaatagctatgagtcatggtggggatgtaatataaggtgcaactttactaaaatcat

SEQ ID NO: 23317 - DNA, 431 bp, Gossypium hirsutum
  Clone ID: LIB3147-003-Q1-K1-E4
agagattgcaaggaacttgaagaagtatagctagaagtacgaggcagaggaccaggatgtatcgatgttattgagcgagcaagatcgtgagaagagaaggatgttgaaggaggaatgggaaaagtgggttagtgaatggaggcgggcacaagaggaagaaaaattggagaggcaaaagttgagggatggagaagctagtgatgaagaagaagaatacgaggccaaagaagttgaaatagaggaagtgttggatatgtcggaagaggtccttccatttgaagagtgagaacctgtagtagaggagcttgattcttcattatgatgttgttgttacctttactttttgattttgttaccgtaagaattttgggtcatgacattgccaagtctagttgattatgatttatttgaaaacaagttaattttagatc

SEQ ID NO: 23318 - DNA, 412 bp, Gossypium hirsutum
  unsure (1)..(412): unsure at all n locations; Clone ID: LIB3147-003-Q1-K1-E5
cccacgcgtccgcaagtagcagaaacaaggggtatttatcctcctgccgcagactatttgaaacatgctgatagatcacatatgacacttgtggagactttcagaaacatgccaacagaggaggagcctcttgagaatggtgaccttgatcatgagaatctagaggatcagaatggagaagagggtagccaagaggaggctgttgttgtggatgctgattcaaacgatggtgcagtgctcgttaatggcaatgaacctgaagaagagtggggtacgaataatgaaggaaccccgtcagcctaaaagcaattggtcggggcagtgtgaaaatccaaattttgtctctgtgcttacaccggatcactangttccttcaagacattcagttcgagctctattcagaaacatatta

SEQ ID NO: 23319 - DNA, 305 bp, Gossypium hirsutum
  Clone ID: LIB3147-003-Q1-K1-E6
gtgggtctaaagcatccgcatttcttaattttaaccagcggatgaaaataacgtgcagatgtaggcagcatgttcaagcttgaaatcagattttggtgggaataatggaagaggatgagtcatttgcaattacattattactaggttttgtgagatttaattgaacttgttcatttattttgtcctacggaactaaacaaacagataacgataccaatgtgattgtgtcgctaatattttgttagttttaaagaaacaaaagaggcaattttctttgatttttcaaaaaaaacaacaacaaaaat

SEQ ID NO: 23320 - DNA, 448 bp, Gossypium hirsutum
  Clone ID: LIB3147-003-Q1-K1-E7
acgcccacgcgtccgcttcctctttttttttgctatttttacatcgtattctgttattgctacttctcgtgtattctgttgctgctacttctcgtgtattctgctgcaagtgtggccgaacggaggaataggccctggtgacgtggaggtcatacgtgggaaaccactcatgggagcccgatcctggctagctgcagcgctagtgtattccagaaacctctaaggtttctggtgctttcacaatattgggctcatttgcgccatgtgcaaattgagctaagaattaaattaggggttttggttgcaggcttattaggtttaatgtttgggctattatttttgggttaaatgaattgtaaatggactttggacccataaataatgcggcttattatttattatttgtggattgttatgggcccgggcaaattgagcctattacaataat

SEQ ID NO: 23321 - DNA, 350 bp, Gossypium hirsutum
  Clone ID: LIB3147-003-Q1-K1-E8
cccacgcgtccgcccacgcgttcgattaacttttcgattgttataacttacgtgggtcaaattataacaagttaaagtagagggattaattttttaatttttgtaaatgatgatgctcttaattagagatatgtaagtcttggaattttgacgggtgcaaaaacaaaggaaaaggtttatgaatgtttttcggtacttccgtttgattttaatatcgaattttgtatttgagtttttctttttaaatttcaatttggtaaaaaaaaaaaaaaaaaaaaaaaataaaaaaaaaaagaaaaaaacaaaataaataaaatgatgggacagttaatacttaaagaaaaataaaa

SEQ ID NO: 23322 - DNA, 112 bp, Gossypium hirsutum
  Clone ID: LIB3147-003-Q1-K1-E9
tgtagccacctgccgacttcattgtttggtttgagatttgctttgcggccatgtatctgttaaattattactaaattaatagtagtaataagcgaatgccaaggttttcttc

SEQ ID NO: 23323 - DNA, 428 bp, Gossypium hirsutum
  unsure (1)..(428): unsure at all n locations; Clone ID: LIB3147-003-Q1-K1-F10
cccacgcgtccgagttgccgtacccaaggatcgatgggcttcacatttacacctaccgcgccttcctcgacgccgttaacttttatctcgagatgtgcgatatttctgaactcttccacattcggggtatgccgcttcaccggagcaatgaccggagccggaaatggcgatgcatggaggaagacgatggtgtgtttgtatacagggaaggaacattggaacaaacaacgtacaaaatgtaccatttcaacaagctaaactccaacagctgcaatgggtataatggtgccattttttgtcattcgtgacaaagggaacaattacaagaacaatacccctgttagctgntttgttccattgaaggatattatagtatgagggctagaaaacatggaataatatgtccgtaaggatcaaatttttgttac

SEQ ID NO: 23324 - DNA, 305 bp, Gossypium hirsutum
  Clone ID: LIB3147-003-Q1-K1-F11
gcccttacagccgtttgcatcatcatgctcaagcaatctcccacattcggtactccaagtcagttctcccgacatgaagaaggtgtaactcatgttcttgtaactggtggtgctggctatattggttcacatgctgctttacgacttttgaaggagtcataccgtgtaactattgtggacaatctttcacgtggaaacataggtgccgttaaggttctacaagagttatttccagaaccaggaaagcttcaattcatttatgctgatctgggggatgcaaaagctgtaaataaaaaaaatatttt

SEQ ID NO: 23325 - DNA, 451 bp, Gossypium hirsutum
  Clone ID: LIB3147-003-Q1-K1-F12
ctttggttctactcctgctgatagttatggccctaggccatctttgaagttgagctgttctccgcatggaactctttctagcagtccaccagttggttccctgccaaagtcatttccgccttttcagcatccaagtcataagctgttagaagaaaatggttttaagcaacagaagtacctaaagtttcataagcgctgcctgaatgacaggaagaagctgggaattggttgcagtgaggaaatgaattcgctgtacaggttttggtcatatttccttagggacatgtttgtttcccccttcaatgtacaatgagttccggaaacttgctcttgaagatgctgctgctaactacaattatgggttagagtgtcttttcagattttatagctatggtttggagaagaaatatcgagatgatctttataaagattttgagcaacttacccttga

SEQ ID NO: 23326 - DNA, 441 bp, Gossypium hirsutum
  Clone ID: LIB3147-003-Q1-K1-F2
cccacgcgtccgcaaactcccaggacagcatatgaaagatgaagaggacaccacccaaccaccagctgctgctgccccaattgagaacgaccaccatgaaggagagacaaaagagaagaagggatttttggtgaaaatcaaggagaaaattcctggttaccactccaaaacagaggacgagaaggaaaaagagaccactgctcccaattaatgaatcaatataatgcatttcaagtaaaagatgtgtagagattgtgtggtttatcaatttgttggaactgtctgttctctgtttttctttttggggttgcatacatcatataaatttctgcgtctgttttcctgcttgtaagttaaaaaagaaaagaaagaaaaaagaaggtatgtatatttaatgcttttaatgtcattataataattaagaaatgacggtattatttc

SEQ ID NO: 23327 - DNA, 304 bp, Gossypium hirsutum
  Clone ID: LIB3147-003-Q1-K1-F3
cgcatgcgtttgacttgaaaaataaacaatatattggtttcatttgctgtgtgcacgcgctatagaaatacaaggaactactgctgacgaaacagaacctattcggcgcgtctaatgcggtggcatatttcaaacatgatggttataggtacacggtcggtggatgtgacaacgactgcgcttcaaacgacaagctggtcagaaagagatagatgcaccgaatctacggactatatataacatttacataagaatgaggctagggctaaacttgaaatgtgcggctggaataagatatcctgac

SEQ ID NO: 23328 - DNA, 469 bp, Gossypium hirsutum
  Clone ID: LIB3147-003-Q1-K1-F4
cggacgcgtgggcgaaggcaaccatctctctgccgctgctatcatcggccaagacggcagcgtttgggctcagagctccaatttccctcagtttaagcaagaagaaatcaatggcatcatgaatgacttttctgaacccggatcacttgccccaaccggattgtaccttggtggcactaaatacatggtgattcaaggtgaaccaggagctgttattcgagggaagaagggacctggaggtgttactgttaaaaagaccaatcaggccttgatcatcggcatctatgatgagccaatgactcccgggcagtgcaacatggttgtggaaaggctgggtgattatctcattgatcagggtctttgatctcattggtgtgccttatttgttgcaattcttgttggcttctatacgaaagtgcatccaccacctcctgtagtaatggttgggggtgcaattaaataatacgat

SEQ ID NO: 23329 - DNA, 427 bp, Gossypium hirsutum
  Clone ID: LIB3147-003-Q1-K1-F5
cccacgcgtccgaaatataagctcatcactccctcaattttgtctgatcgtatgaggattaatggatcccttgctaggaaggctataagggaattgatggcaagaggatcgattcgtttggtgtctgcccattcaagccagcagatttacactagggcaaccaacacctagatgttttgttatagttttgcttaaattagttctatgtagtatttgcctttcttgactttctgtgaacgatttttccttttgctaaagacctccatctataatgtgtgagctacagtttcttgttgttctggtttaatggataattttttgttcctcaaaatgagattgatatgtggtttattttgttcaatcgcatattggattgtcatacatatatgtgtgtattgtgtgtaaagtttatgggatatttgtgatg

SEQ ID NO: 23330 - DNA, 466 bp, Gossypium hirsutum
  unsure (1)..(466): unsure at all n locations; Clone ID: LIB3147-003-Q1-K1-F6
gcgtagaacgccagtatcatatggtggaaggtctagtagtgtgccggacagatcacaacgttctagaagtatgtccttcagccctgagcgagttcgtgtgaggggaaggtctcccgctttcaatgcactagcagctgcatttgagaaccctaatgctagaaacctttctactccgccacctgtggttaaaaaactctatccaaaatccgtgactccggattctgcaaaaaagtctgcagctatagcagctcttactgcatcgttcgaaaaacaaccaccaccagctcgagagaccatcatacctagatctgtgaaagtgagcccaccgacacccaaaacaacaccaacaccagagcctaactccaaagagaattccatgagtagcaaactagaatccctcactatacaagaagatgctaaagagggtgaagctgaagacgaggaanggcctccaatatacccttac

SEQ ID NO: 23331 - DNA, 398 bp, Gossypium hirsutum
  Clone ID: LIB3147-003-Q1-K1-F7
gcagaactcactgtgtgaagctggtgcatcgtttgtacccagaggttgaccctgccctcaaccccgaccatgttccacacatactccataaatgccctgatcagatcccagaccccaaggccgtccagtatgtgagaaacgaccgtgggacacccatggttttggataacaactactacaggaacatactggacaacaagggtttgttgattgtggatcaccaactggcgtacgacaaaaggaccagaccttatgtgaagaaaatggccaagagccaagactatttcttcaaggagttctcaagggccattactctcctctctgaaaacaatcctctcactggtagcaagggtgagatcaagaagcaatgcaatcttgcaaacaagctcactaaaatg

SEQ ID NO: 23332 - DNA, 468 bp, Gossypium hirsutum
  Clone ID: LIB3147-003-Q1-K1-F8
cccacgcgtccgaagattcctgatccagatgtcgtgaagccagaggattgggatgaggatgcacacatggaaattgaagatgaggaggctgtgaaacccgaaggttggttagatgaagaacccgaggagattgatgatccggaggcaaccaagcctgaagattgggatgatgaagaagatggtgagtgggaagcccccaaaattgagaacccaaagtgtgagacagcccctggttgtggcgaatggaagaggccaatgaagaggaatccagcttataaaggaaaatggtctcctccactaattgacaatcccagttacaagggtatttggaagcctcaagagattccaaaccccaactactttgagcttgaaaagcctgactttgatcctattgctgccattggtattgagatttggacaatgcaagatggtatattatttgacaatattttgatagccaaaaacgac

SEQ ID NO: 23333 - DNA, 424 bp, Gossypium hirsutum
  unsure (1)..(424): unsure at all n locations; Clone ID: LIB3147-003-Q1-K1-F9
gtagcttggtatgccggcaagcgtatggcttatatttacaaggctaaggtgaagaagaatggttctcattatcgctgcatttggggcaaggtaactagaccgcatggtaacagtggtgtcgttcgtgctaagttcaagtcgaaccttccccctaaatctatgggagatagggtcagagtcttcatgtaccccagcaacatttgagttgtctagacgcctgacggcattcaatcgatgactcaagtgactctgcctttccaccaggttttacaaacttcgtcgaaatgttttgttttttttcnaattggcattttggttgtttactaccatagaaaactcgcttttgtcccaaatgtctcttctatctcggattttttgcgtgtttgttcatggacttcgaaagtttgggaatcaatcattatgg

SEQ ID NO: 23334 - DNA, 204 bp, Gossypium hirsutum
  unsure (1)..(204): unsure at all n locations; Clone ID: LIB3147-003-Q1-K1-G1
cggacgcgtgggcggacgcgtgggcggacgcgtgggcggacgcgtgggtcaatactgaatattgtgtcatcctttgggatattgttggtttacttgcttaatggttccttctgttaataggtcgagaaaaatgaaataatcacactagtataactagtttgcaatttatttaaactnagnngagtggatcccgaacaatgtgaa

SEQ ID NO: 23335 - DNA, 307 bp, Gossypium hirsutum
  Clone ID: LIB3147-003-Q1-K1-G10
ggtagcagttttatgtatcgtgtgcagcaatgtcttagccgatcagattttcccatctcatgtagctagcacacttggtcgaagctcccgtgaaccaaaatacaagattgagttccattctgaagactctccctaccatcccgatgatgatcaggagtctgtttttatgcctaataaagatggaaagaattttttatgtttcttgcctaaggtggagaaaaccaagactctaaagccagttactcagcagaacgttagtaccatgattgtggaatctgagaaacaggttaaaacccctgaagacgcc

SEQ ID NO: 23336 - DNA, 178 bp, Gossypium hirsutum
  Clone ID: LIB3147-003-Q1-K1-G11
agttattatctgtttttccctagccagaaaaaaatagggttagtatgttttttttgaagccaattttatggacttaatggcattgatggccatgatgtttttgcatttatgcttgatcctatactatgaacccagtgttgaagttttgtgatgaagtgcttttatggattttgaattt

SEQ ID NO: 23337 - DNA, 258 bp, Gossypium hirsutum
  Clone ID: LIB3147-003-Q1-K1-G12
cggacgcgtgggcggacgcgtgggggatgttcatcctattacaccctcactggataagctgtgggatggtcatgatggtgcaaagaaagagcacctacccaatgataagaagccatcctccctgctgtttccttctagcaggaggtttgcttttgctgatgatggagccagtgatcacccaatacttgattggaagtccagttcaatgtctcaacaggatgtgacgaagtcttttacagctttggaatctacccctac

SEQ ID NO: 23338 - DNA, 465 bp, Gossypium hirsutum
  Clone ID: LIB3147-003-Q1-K1-G3
cccacgcgtccggctttaaaaaaaatcactttctttctttcattttctctgtgcaggcgctcttggttcggtcggggctccggcgagctgccaccgctctccgtcgcgtctccgccgttggcgacctccgtgcacggcggtcagaggtacacgggcggtggatgtgacatgggcggtgctgcaagcgtcggctggtcaaaagtccctaggtgcaccgcacctacggtttatttattatttttttctaattttgggtattgggcttaacttgggatttgggccttgatttgtttgggttggggctttgatttgttgggctaaacgggctagtacagtaggattttcaatgcagccgctgatttacacttagtaccaagtagcaaaccatcaacactctacttgacaggatggatccacaagtagcacttccctttgtaaacgaaaacgaatatgcacgatgaaaca

SEQ ID NO: 23339 - DNA, 345 bp, Gossypium hirsutum
  Clone ID: LIB3147-003-Q1-K1-G4
cccacgcgttcgcctacgcgttcgaaaaaattattaaaaaatttaaaaaaaaaaaaaaaaaagggaaataaataaaaaaaaaaaaggtatttaaaaaaagtataagaaatgttataggtatatagaataaaataaaggtggttttgaaaaaataaatattatatttgttgggctatatttaataaattgggcgttggtttaaaatttggttattggaaaaactatggttttacgtatttataattttttttttgattattgattttttaatagatgggggattttttgattgtttaaaatctattgggcttttaatttttttggatatacgcttttttattggga

SEQ ID NO: 23340 - DNA, 453 bp, Gossypium hirsutum
  Clone ID: LIB3147-003-Q1-K1-G5
cagtacctgagctcacccagcaaatgtgggacgcaaagaacatgatgtgtgctgctgatcctcgtcacggtcgatacttgactgcatctgctatgttccgtggtaaaatgagcaccaaggaagtggatgagcagatgttgaatgtccagaacaagaactcctcatactttgttgagtggatcccgaacaatgtgaaatcgactgtttgtgacatcccacccactgggctgaagatggcatcaacatttattggcaattcaacatccatacaggagatgttcaggcgtgtgagtgagcagttcacagctatgtttaagaggaaggccttcttgcattggtacacaggggaaggcatggatgagaaggagttcactgaagctgagagcaacatgaatgatctggtctcagagtatcagcagtaccaagatgcaacagctgatgatgaagagtacg

SEQ ID NO: 23341 - DNA, 348 bp, Gossypium hirsutum
  Clone ID: LIB3147-003-Q1-K1-G6
attgttttttgtttactttttttttttttattttttaacaataaacaaaatatggaaagatcggaataattgttgtattgtgtcacctaaaattaatgacggtgctgttcgtataactgtgtcctgctgtgaagattcagatacctgccaagaacaaggtcgtggagtacatgaacatgtaaaccagtggagctatagctatcagtcacgctattatctactttggtaacattaccatattctgaatggccaatggtgctcatatcttatgctgccaataatctctagctgttgcttgcttcacttctaactgactgattataaatgcattgcattatctatcgatat

SEQ ID NO: 23342 - DNA, 440 bp, Gossypium hirsutum
  Clone ID: LIB3147-003-Q1-K1-G7
cccacgcgtccgcaccgtcgatgtctccgacgcggaggatgtcgtcgaccagcaccaccaagactcaatcatatctcatcttcctccccctcaaatccaccctatgcatgaatcccccgacggtacctccctctacgatcaccgtttcttggccatggtgtcgcccagaaacccaacttctttcactaaccgtatcgtcgacagtagcaccacagacactgcttcttttttgcgagcttgttggctttgtaatcgccgcttagctcctggtcgtgacatatatatgtatagaggggatacatcgttttgtagtcaagagtgcagagaaaaacagatgaagcaagatgaaagaaaagaaaagctaaacattaattcttcaaagaaagaagaccgccatgcccattcctcttcaaccaccacctgctccaagacttctaaag

SEQ ID NO: 23343 - DNA, 421 bp, Gossypium hirsutum
  Clone ID: LIB3147-003-Q1-K1-G8
cccacgcgtccgggtttttgcttcaaggtaagagtcgattgattcttcgaaaaccataaacgaaaccaaatatggcggagaaagcaatcgagtcggttcaatgctttggccggaagaagacggcggtagccgtaacacactgcaagagaggccgtggtttgatcaagatcaatggttgtcccattgagcttgtcgagcccgagatcctccgtttcaaggccgtcgagccaatccttctcctcggccgtcagcgttttgccggcgttgacatgaggatccgagtcaaaggtggaggtcacacttctcagatctacgctatccgtcaaagcatcgctaaagcccttgtcgctttttaccagaagtacgttgatgagcagagcaagaaggagattaaggatattttggtcgggtacgataggac

SEQ ID NO: 23344 - DNA, 289 bp, Gossypium hirsutum
  Clone ID: LIB3147-003-Q1-K1-G9
cccacgcgtccgtaaaaacatcaacaaccttattaaccccaacaatgtccctttcctaacaggtctaacaggtgcacaaaccagtgccatcgtccaaaactcccacaacagcgacagcgttatcaattccgacagcaaccctttcgtcacagcaggccaactcccacccggctctctccaacgtctcatgttcggtaccataaccgtcatcgacgatcagctaaccgaagcccacgagttagattcagctatcctaggcaaagcacaagggttctatttggctagctca

SEQ ID NO: 23345 - DNA, 375 bp, Gossypium hirsutum
  unsure (1)..(375): unsure at all n locations; Clone ID: LIB3147-003-Q1-K1-H1
cccacgcgtncgcccacgcgtacgcccacgcgttcgcccacgcgtgcgcaccaagctgccgttatcatctccaaccttgcaaccattaccacctctcactctcgggcgaggacggatggtccagaaaacagagtaagtccagtctgagttgagacaaacagttctaagtgcttcatgaagggccatcatccccacagcttctttgctcctatcaactgaacctgagcccaccatctttttctttttttctctttgaaaacaacaatggctgctagtgctatctgctacttctgttgctgttgctggctgcccccttttgctactttctcttggtttttaagctcgtttganaaaaaaaaaaannnannnnnanaa

SEQ ID NO: 23346 - DNA, 290 bp, Gossypium hirsutum
  Clone ID: LIB3147-003-Q1-K1-H10
cccacgcgtccggaaaagactagtaacttttgataaagtttttgcagcatatcatgaagctaggagctgtatccggagtgacttggccagtgcaggtagtgctgaaaatgtgaaagatgacttaaatggtctggataaggctgttagtgctgttctaggtcaacgaacaattgagcgcaatcagttgttggttagcattgcaaagagcaaacttacaagacgtcgtgatgacaaaaacgagaaagtcaccaagcctgaggagttggtccgcttatatgatcttttattac

SEQ ID NO: 23347 - DNA, 296 bp, Gossypium hirsutum
  Clone ID: LIB3147-003-Q1-K1-H11
aaacgacctcaaggcaaaggagcgggtgatgaagttgatgaaccacgacagtgcggaggttaccaagaatgccttgctctgcatccagaggcttttcctaggtgccaaatatgctagctttttgcaggcgtagttttgcttcattgtgctcggtcatgtctcatcggatggtaagtaaattatgctttgtaggagttttatattctcgttcaagttcagtcgggatggctgatatttctattggatacttcatttcgaacatgtctaaagaagaattgttttgattcttttgtccc

SEQ ID NO: 23348 - DNA, 300 bp, Gossypium hirsutum
  Clone ID: LIB3147-003-Q1-K1-H12
cgactcccctacttctaaaaacttcctgggtttcatcgtcgccttgtcggaatctatccgcggccgtaaaatctccgatcccagccatgaatctgccaccgtgtccaatatcgtctctatcatcgaaaacctgagtctctgggtcgatcagatcccacccgttcaacagtcctctcgttacggtaacatctcttatcgaacctggcacgaacgcttaaccgaaaacgccgaatccttcatgctacagttcctccccgaggatctcaaaccggccactattgaaatcgtcccttacttttt

SEQ ID NO: 23349 - DNA, 415 bp, Gossypium hirsutum
  unsure (1)..(415): unsure at all n locations; Clone ID: LIB3147-003-Q1-K1-H2
gtgttgaggttgaggaaaagtctaataacatgcaaattgaataggaatccttggaagatcgcgagcttttatctagttatttgcctctattaagagagtttatccctgcagctgctgccgaaattgaagctgatgttcgagcttacatgtttgaaaaagatgcagatggatatgtgtatgactactacactgtgaagaatgacttgggtgtaggtgaggaggatatggcttcaaatccattcccactggtgaaggtggatgatgaggatttctatgatgtgccatatgagtcagaatatgatagtgaagattcaaatgccgaagataatccgagaaatgattatcctgatgaaacatccgaagaggaggaagaggaaaaggaagaggaangggacgaggatgaggatgaggagac

SEQ ID NO: 23350 - DNA, 394 bp, Gossypium hirsutum
  Clone ID: LIB3147-003-Q1-K1-H3
cccacgcgtccgcccacgcgtccgcctcaccgtatgtgtccttacatctgcacccaagggatacaagggacctgagcagaatgcactggggaatttgcttgttttgtttctcctaggaggtatctttgcaggggtcacacttgactggttatggctcataggcaagggatggtaaagtttaggttcaaagctggttttaggaatgaaaaatcaggtttattgagttgaaattggaaataatgatcccttgcattttgatttgaacacagtaaatgatgaaattgttccatagtcgtaggctacacgcaccaatgctgagatttcatattcattaaaattcctttgtattcatcaacaccatgctttaaaattactgaatgtgtcattgtcttct

SEQ ID NO: 23351 - DNA, 442 bp, Gossypium hirsutum
  Clone ID: LIB3147-003-Q1-K1-H4
cccacgcgtccgccaaaaccaagtatgccactgttaaattccataacccacgtgttcaagaggatcccacctgtggtccattgttggatgcggttgctattaaggagcttgtccgtcccagagctaccagatataatctggtgaagaacaatggctttgaagagggtcctcatcgcctagtcaactccaccaatggtgtcttgctcccccctcggcaagaggatttcacatccccactcccgggctggatcattgaatcacttaaagccgtaaaattcatcgatgcaaagcacttcaacgtcccggcgggacactccgcagtcgagctggttgccgggagagaaagtgccatcgcccacatgctcaggaccatcccgaacaaatcatacaacatgacgttcatcatcggggacgctcgcaacggttgcaacgggaaaatgat

SEQ ID NO: 23352 - DNA, 385 bp, Gossypium hirsutum
  unsure (1)..(385): unsure at all n locations; Clone ID: LIB3147-003-Q1-K1-H5
gctggttctacttcgttatcgacacccgaaggtgaagtcaacagcctgatgcagcaggtggctgatgattacggattagaggtctccgttgggttgccaaacgctgctgctcatgctgttccgacgaagactgaagagaaggtcgacgaggatgatttgtcaaggcggcttgcggagcttaaagctcgaggttagaatgaaaatggttgaattttatttgaatgagcttgtaatattatgataacattatgatgtttgggattataattgctgcttatatagatcataatctgtttgtaaatttgactgaatttgttgctttacaatgtcattaatgctgatgcccctttagtgtgagttttccattttgcannnnannnnnnnt

SEQ ID NO: 23353 - DNA, 432 bp, Gossypium hirsutum
  unsure (1)..(432): unsure at all n locations; Clone ID: LIB3147-003-Q1-K1-H6
ctcgtcctctgtttactttcccctttcttcttccttttcaataaacaaaagaaggaaagatcaaatcaatggcagattggggtcctgttttagtagcgacggtgctgttcgtattactgtgtcctggtctgttgtttcagatacctggtaagaacaaggttgtcgagttcgggaacatgcaaaccagtggagcttcggttctcgttcacgctattatctactttggtctcattaccatcttctgtctcgccattggtgttcatatctatgcttcccaataatctttagctgttgcttgctgcacttttcactttctcattattaatgggtttcattttctattgatattgcttgatctgttataattgaagctgtgttttaatagactcttttacggattaatttatgtattttggtcgatctnggaaatgc

SEQ ID NO: 23354 - DNA, 445 bp, Gossypium hirsutum
  Clone ID: LIB3147-003-Q1-K1-H7
aagaacatgggcctctatggcgaacgtgttggtgcattgagtgttgtctgcagggcagccgatgtagcaagcaaggtcgaaagtcagctcaagcttgttattcggccaatgttttcaaatccaccaattcatggtgcatctattgtggtaaccatcctgaaggacagcaacatgttcaatgaatggactattgagttgaaggcaatggctgaccgtatcatcagcatgcgcaaacaactttttgatgctttgcgtgctagaggaacacctggtgactggagtcatatcatcaaacatattggaatgttcaccttcacgggactaaattcaaagcaagtggaattcatgaccagagaataccatatctacatgacttctgatggaggaattagcatgcaagaactgattaaaagacagtcctcatcttgctgatgcaattcatgat

SEQ ID NO: 23355 - DNA, 371 bp, Gossypium hirsutum
  Clone ID: LIB3147-003-Q1-K1-H8
cccacgcgtgcgcacgcacgaagaagattattacgaggctcttaaacacaccaatgctggtggcaccatggaactgcatgcactgaatgtgcaaatattcattaagatgcatcggtcggactatgcagagagacagctgagggtcatgcagcagattgatgaggatcatacactgacacaactagcaaatgcatggctgaacctggcagtgggtggttacaagatacaggaagcctacctgatcttacaagatttctctgagaaatatcctatgactggactaatcctcaatgggaaagcttgctgctgtatgcatatggcgaaactgtgatgaagctgaaacacttttgcttgaagcacttaataaggat

SEQ ID NO: 23356 - DNA, 81 bp, Gossypium hirsutum
  Clone ID: LIB3147-003-Q1-K1-H9
ccttcgtggaaaccatgaatccaaatactgctcctctacttatgggtttgagaaggaagttctggccaaagtttggggtta

SEQ ID NO: 23357 - DNA, 340 bp, Gossypium hirsutum
  Clone ID: LIB3147-004-Q1-K1-A1
gaaataggggaggtaaggttgaatttatttataattagggcactctgattctgttctgagtgcatttaggaccttcgacttctgttttaaatcctattctgattttcttttttggcttagaagttttctagcttgaagattagggcttttgggaattatacagtaattatctaagatctggcttttccgtgttatgtttggtagttaatgagaaaatgtaactagttttatattttttaattgtcttctgaaattattcatatctttgcagagatggcccgtaccaagcagacagcccgtaagtcgactggtgggaaggctccaaggaagcaacttgcta

SEQ ID NO: 23358 - DNA, 452 bp, Gossypium hirsutum
  Clone ID: LIB3147-004-Q1-K1-A10
gacacgcgtcaacaatatcgcacgctttggggattcgagaagctgctgttgagagaggcaagaacgggaattcggcgtgacaggaaatatgcaattcatgcgaagaatgcattcgcaacgggagtgcatatgtcggagaatgctattgggaaaacattacatacaacagaaactaagattcgttattatcactatcacaacaccattgccgtacaccaagagctatgcagagagtacctacctccctctgccaaaaacaatgtcacttggttcaataagctaccctatgtctacgatgataacatgaagaaactggccaacaccatcaaggaattcgagcataaaaccattggagacctcggttctctatgaccccacaccccacattccactccagcagctaccacatgtatcagtttaatgcgttaatggttgagcattcatggcatatg

SEQ ID NO: 23359 - DNA, 427 bp, Gossypium hirsutum
  Clone ID: LIB3147-004-Q1-K1-A11
cccacgcgtccgggaaacccctgtttactctctgtctcctgtcaagagtctcgaaggattcgctattcttgatccaatttttctctgattttttaaaatttgtttttcagggttcctttacattttctattggaggcttttgggggggtttttttattgaatttttccttcggtcgtcatcgcagacgaagaacaacaacgttaacataaccatcggcagagtcagcaacacaaggcggagaccctgaagttctcgcgagttcggatttctagttgtattttgtttttgggttttgtgcctgttttaaggtttgagtaggtttccaatcggagcccctaattttggtgttgtaatctttcctttatagtcttattataaggaaaaagaaggattagctttttattctggaatttcagtttcaatttt

SEQ ID NO: 23360 - DNA, 331 bp, Gossypium hirsutum
  Clone ID: LIB3147-004-Q1-K1-A12
cccacgcgtccgcccacacgtgctattttgatcacaaattaaatactgttgtatgtgaggttgtattatatatatatatcatatttataatgccctcttttaacatcatacttagcacagatcatatagaaaaaataagtttgctatcaaatctaatgacagacatataaccattctgtctttttgagattcaaacaatatttaatgaatcaaatttcttgctttcttgaatattaaaaaaaaaatatttattaaaataaaaaaaaaaaaaaatataatatataaaaaaggatctccctctttaaaagttccaagtttacttaccctttct

SEQ ID NO: 23361 - DNA, 460 bp, Gossypium hirsutum
  Clone ID: LIB3147-004-Q1-K1-A2
attcaaaacaaaaatggcttccatctactgctgcaaagaatgcggaaccaaccttaacctacgatcaacttatttatcccctccagatttctatttcgaagcgggaaacaaaggtaccctttctttcgccacgatcgatgataccaagttcaatttcgagaaagaagataagtttaggccttttttttgagactcttgattattgggggattcaacggaataggaccaagatgaagtgtaaaagctgtgggaaacttgtgggttatatttatgatgatggtcctccattaacggatagtcctggtcaatttcatatgggacctagtcaagtggtacccagatgtcctagatatcggttcaagatcaaagcacttacgatctcatctgaaacttgaggaaattaaagaaattgaataatttcttttctgggtttttgtgttgatggcttgaattttgggtt

SEQ ID NO: 23362 - DNA, 279 bp, Gossypium hirsutum
  Clone ID: LIB3147-004-Q1-K1-A3
ccgaaagccatttcttctcattatcgagagcatcttttttaacggctccttccatatcttctgagcagatattaatcacaaaaatggcgctggcttctatcatcggcacggttgctctcgcgtcagcgtacatactatctgctcggcaagagttcaatgaatgaggcgtcgatggtggcccagcggcgaaagagctgatgccagagtgcaacgtcttctcaaagactgtgacatctgacacaggcttgcaagtgcctgaatttgatatcaatgatgtag

SEQ ID NO: 23363 - DNA, 345 bp, Gossypium hirsutum
  Clone ID: LIB3147-004-Q1-K1-A4
aaacttttcacttgtgccagtgagaacaatggaggaaaatttgcatacgtgcatgttgctgtagcatactatattatgattcgacggagggatatataatttttttagtgatgtagtttttgaaactcttggcagggaacttacaagtgtccaaggtctatcagactggttggattctgcatatagttatttggcaatggttaattacccgtatccttcaaactttttaatgcctttgccgggacatcccataagagaggtctgcaaaaagattgatgggtctcctgccgggtctagcattctggagcatatattcaatggagtaagcgtatattacaattatac

SEQ ID NO: 23364 - DNA, 184 bp, Gossypium hirsutum
  Clone ID: LIB3147-004-Q1-K1-A5
gaggctacgacgtacgcgttcgcatatatgtataatctaagcttaccttttgtttacaaatgagaacttgcattggtgtatgtatgattaatataaatattgatagattgggatgaaaaaaacaaaaaaaaataaaaaaaaaaaataactaaaaaataaaagcattatgagaattatacaataa

SEQ ID NO: 23365 - DNA, 422 bp, Gossypium hirsutum
  Clone ID: LIB3147-004-Q1-K1-A6
gctggaacatcaaagaagaatcgacccacttgcgctaatacaaatgccttgaagctgagttgtgaacttcttcggatttttatcacagaggctattcagcgagctggtacaattgctgaagctgagggtagtaccatgattgaaccaactcatttagaaaggattcttcctgaattacttctggatttttaaggggttcagctcgctaactaattcgttggaactgatagacatcaatgcagtatctctacatcagctagtatgtagtattatcgtattgattatcgattgtgtagtggacaagtagactgtattggcctagtggtaatctagtatcaagtatatcatccaagtgtattattgctatgaacttactacagtattaatggctgaatatgaccgatgtcgattttagttgaaaa

SEQ ID NO: 23366 - DNA, 359 bp, Gossypium hirsutum
  Clone ID: LIB3147-004-Q1-K1-A7
cgttactgtagcaaggagagtggtgatgaagcagtggcctcctctatcatcggcttcgccgattgaagtaatggcgtcgccgcgggcaccgaccctttgcggccgaggagacaagaagacgaagaagggaagagattcaaaggatcgtacgggaacgccagacccaagaaggagaagaagattgaacgtatcaaagacaaggtcgaagttcccaggtccaccccttggcctctccccttcaagctcatctgattatttttcaaaatctatgcgttttttcttttttttaatagctgtaataataaagctaaaatttttgtacaattttcagggtttttattattagtagctttgctttt

SEQ ID NO: 23367 - DNA, 457 bp, Gossypium hirsutum
  Clone ID: LIB3147-004-Q1-K1-A8
cttttagatattattgatgaactagtaaagaatggcaaagagatcgaggcagtgtactttgccagagcagctggccttacagagagatttcctcctgtttctctactcaagtcctatcagcagaattccaaaaagaatgccaccacaatattgaagaatggaaattattccgcagctgcaatggaggagtcaaaaaatgtggagctgaattcaattaaagctattatcaaatgcgttgaagaccataagcttgaatcagagttttctactgatttgttaagaaagcgagccacgcagctggaaaaagtcaagtcagataggaaaaaagagttcagcagccgcttgaaagcctcagaataaacgaagtcatagtgctggtagtgcccgacgcagtggaccacctgctttccgtcccgcaaaagcagctaagttttcaaatgctttatccccctttcaa

SEQ ID NO: 23368 - DNA, 447 bp, Gossypium hirsutum
  unsure (1)..(447): unsure at all n locations; Clone ID: LIB3147-004-Q1-K1-A9
cccacgcgtccgcccacgcgtccgcccacgcgtccgcccacgcgtacgcccacgcgtccgctcagttggagcagatccacggcgaaatccgggatcttttccgtgctctttcaaatggcttccagagactggataagatgaaagattccaataggcaaagcatacagctggaagagcttactggcaagatgagggaatgtaaaagattaatcaaggagtttgatcgtgaaattaaagatgaggaaagcaaaaatcctcccgaagtgaacaagcaactcaatgatgagaagcagtctatgatcaaagaactgaattcgtatgtagctatgaggaaaacatacatgaataccctnggtaacaagaaaattgaactctttgatatgggagctggagtcaagtgacctacagctgatgaaaatgttaaaatggcttcatcaatgtcaaacc

SEQ ID NO: 23369 - DNA, 382 bp, Gossypium hirsutum
  Clone ID: LIB3147-004-Q1-K1-B1
gcttcctccatcgagcagaaagaggaaggacgtggcaacgccgaccacgtctctgtcatccgtgagtacagggccaagatcgaggccgaattgtccgagatttgcgccggaattttgaagcttatcgacgagaagctcgttccggccgacgggaccggtgattccaaggtcttttacctgaagatgaagggagattaccataggtacttggctgagttcaagactggcgatgacaggaaagcggctgccgagaatacgctcactgcgtataaatctgctcaggcttttgatgaagccattgccgagctggatacacttggagaggattcatacaaggacagcactttgataatgcaacttcttcgtgataacctcactttgg

SEQ ID NO: 23370 - DNA, 376 bp, Gossypium hirsutum
  Clone ID: LIB3147-004-Q1-K1-B10
cccacgcgtccgctaacacgtgctgttaaatttgctgtaatcctaacgagataccagcgcgtgtgtccttgatgtgattttgcttatcatgagctgagatgcttgtacagtaacagccaggtttggtcaagttgtaaaattccgaaaccatacccataaaacttgtaattgatcccataatatggtccggtgcagcaggggaccatctagtatctggtttcatgtttctgcaaaaaacagagcacatttcatgactttagtttgatgcttgtttgttttgctctgacattccccccattgttcctctaaaaggtgggaagatgtgctagttttaagttctgtatacttaagcttcattatgattgtaaatttcttg

SEQ ID NO: 23371 - DNA, 455 bp, Gossypium hirsutum
  Clone ID: LIB3147-004-Q1-K1-B11
tcgcttgtaagattctttaaatggtgtacttactctcgtagaatgccttctcatatacagtttcggtacgtataaaaataacatcaaccgatcccgattctgagatagatgtgaccagacgagagacatacctgtcattcgaggagttcaaggagaaattcggtatgaaaaaagacgcattctataaatagccgatatgtaaacaaaacaatctaataatggctcttcaactgttctaagttccccctttgattcatctgtgctatttattcaaaacccgctttcaaatgatatttcattgggaagaactttaaccctttttctcaggatcaaactttatgtacatcattattgcatatttagctgcttctgcttttttaaaaagctgttatattttatatattctgtgtcattaatagtcttatatagattttaacccctatttctgttttttt

SEQ ID NO: 23372 - DNA, 428 bp, Gossypium hirsutum
  Clone ID: LIB3147-004-Q1-K1-B12
accacgcgtccgatataactaagataacttctgctgccatttccttgtttcggcgagtccggataccctaacgaaaacaaaactttgatccaatcagaggaaattcttggtcagggctgtaatggctgccaacaacatgccagctggaatagacaaagagcaggcctttggcatggcggaaacagagatggaatatagggtagaactttttaacaggcttgcacaaacatgtttcaacaagtgtgttgataaaaggtacaaggaatctgatctaaacatgggggaaaacagttgcattgatcgcttgcgtttctaagtattggcaggtgaatagcatgattggtcagatgctcagtgctggtggtcggcctccgatgtaaaacagattcattgtcatccttcttccatcttgaattcgtttaaaatgt

SEQ ID NO: 23373 - DNA, 356 bp, Gossypium hirsutum
  Clone ID: LIB3147-004-Q1-K1-B2
cccacgcgtccgcccacgcgtccgcccacgcgtccgcccacgcgtccgaagaaaaggcccgaggattccaaaacatgtccctactttcaccaacttgatgctttatatagagaaaagaacaaacatgacagctcctccactcaattcaaaccccagaactcagtcccattaatggtacgcccagagcagcaatggccccctcttcctccttccgatcccgaccatcaacaccgtcgcgaccccgaagacttagaaagctatcaaaatcatcaggacgaagacggcaatgacgagtatgaagatgaagatgaagatgaaaggggtgagtatgaaattgtagccagcaaaccagtgtc

SEQ ID NO: 23374 - DNA, 291 bp, Gossypium hirsutum
  Clone ID: LIB3147-004-Q1-K1-B3
cgacggcgtgttgcctctaccagagaactgtagggtttaagaatgatccgaagcttggtgttttgtacgactgacttcccttctcttcgtgattctggttatttcggtttgctgtcgtgtttgagacggatcggacatgcggactttgttatgtaaggctgaacttttgtaatttagttgcttctgggtttgttaggttccaatttttgtgtaaattttggtgtcttaaagaacttgattgaaataaaataagaacccaccttcttggtttctaaaaaaaatagctttact

SEQ ID NO: 23375 - DNA, 453 bp, Gossypium hirsutum
  Clone ID: LIB3147-004-Q1-K1-B4
cggacgcgtgggcggacgcgtgggcggacgcgtgggcgagaaagagcttccttatgaagttgcggagagcattcggttacttcgctgcaagcctcccactgaagctgaagatggtgaggcagtggttgttcctttgagagagaaacaaatccggagaatacaaaaagctttagactccgacgatgttgagcttgttaaactgcttttaaccgagtccgatgtaactttggatgatgccactgccctccattacgccgcagcgtattgtgatcccaaggttgtttctgagattcttgccctacgtctggctgatgtcaatcgacgaaactctcgtggttatacggttcttcacatagctgcaatgcgtaaagaaccggccgtgataatgtcacttttagcaaaaggggcatctgcttcggagttgacgttggatggacgaagtgcttttaacat

SEQ ID NO: 23376 - DNA, 424 bp, Gossypium hirsutum
  Clone ID: LIB3147-004-Q1-K1-B5
gtcggagaccagttgaggaaacatgtagaatctaagggtttgttgcagtttgtttgagcgcctgtcaatgattctcagttttgtttaagtggggccgtgtttgaatccagaagaagggaaggaaaggacttaaatagtactagtctagtttgttttctttagctctatgatggatcgctgtatgtacgaaattagtgggatttgaaatgctgaaagtgattggaatgctttgctgcttgctgggataattgtatgatcaaagactaacttttgttagttgcattgctacagatgtgttagtaagtgtaggatgcatgggaaccttaaccgagcattttaaaatcaataatgacatgaccttctggtagcttacaagctaagtgaaggaagtgggaatgaagcaaaagacaccatttaattatat

SEQ ID NO: 23377 - DNA, 393 bp, Gossypium hirsutum
  Clone ID: LIB3147-004-Q1-K1-B6
attggggtcagtcgctactgatgtcacatgaaaggagctacgcttgaagagaccgatggcgatggcaatcgctgtggagacaggatacgagccgtgagagaggaacgaaatgaggcactgaggatctgtcagttgcgcaactgacatctcgaatctctcatatatctagagacttgagtaaaatgagctgaacgtgtgttagaatacatgatcagagggtcactcgctagacatgctctgtgggattgggaaggattacgttccactgtcttggatacataggttacacttatgtatcggtgcaacacgtggattacattaccttcacaccgttgctaagcatgctgtaatcgaccgacacatcaacagctgcaacatacttttagatgaaga

SEQ ID NO: 23378 - DNA, 389 bp, Gossypium hirsutum
  Clone ID: LIB3147-004-Q1-K1-B7
gcggaaaggaagggaaaggaatcaaagatggggggaggaatggaggcaaacaagaacaggttcattgaagattggagcagtgcgagagagaatctggagcataactttcgctggactcgccgcaacttagctctcgtcggcatattcggcatcgctatccccgtccttgtctacaagggcattgttcgagaatttcatatgcaggatgaagataatggtaggccatacaggaagttcttgtgagtttttctccgcaaagctggataataaatgttgacgagttcaactgggttttatcttggacaacaatttctgttatttacttggttttggaaattgtcatgttattatttgctcggtttagaaacaaattctgtgctctgcttctt

SEQ ID NO: 23379 - DNA, 300 bp, Gossypium hirsutum
  Clone ID: LIB3147-004-Q1-K1-B8
atggaaagtacttgccatacagtgaacagaaatctgagcatatggtttcaagattaaggctgcaatgaaagctgatgaacagccatatcctgaaaccttggagcttcttgttgaaaggaaaacaataaaacttggtttgtatattcatttattatgttactcgaactatttatttttctgtctccgaacatgctccggcatatatccggacatgtattggatatactcgtggttgacattaattttggagttcaaataaacatgtcacaagtttttcagtggcattaaattatcatttgc

SEQ ID NO: 23380 - DNA, 469 bp, Gossypium hirsutum
  Clone ID: LIB3147-004-Q1-K1-B9
acgtagacgcacgcgttcgcaagaacatgcttgagagggtcagatttctatacgaggaatgccttccaatataccggatcggacgttttagaatcacatcaactctgaccgtttaagagatagatgtgaccagacctgagacatacctatcatacgatgagttcaaggagaaattcatgatgaaaaaagacgcattctataaattgccgaagtggaaacacatcaagctaaaaatggctcttcaactgttctaaaagccccctttgattcatctgtgctatttattcaaaacccgctttcaaatgagagtgcagtgggaagaaccctaaccctgttattcaggatcgaaaaaaagggacagcttcagtgcatatttagctgcttctgttcccctaagaagctgtggggtattctcttacttgggacattaatagacatatcttggattttaactcccttcccttttatt

SEQ ID NO: 23381 - DNA, 414 bp, Gossypium hirsutum
  Clone ID: LIB3147-004-Q1-K1-C1
gccaatgttacatatgaggacattcttttgaaggaagagttggatagccttgttgccaactaccctggtcgcttcaaagtctactacgttttgaaccagcctcctgaagtctggaatggaggtgtcggctttgtgtcaaaggaaatgattcagacccactgcccagcaccggctcctgatatcaagattctaaggtgtggccctccaccaatgaacaaagccatggctggccatcttgatgctcttggctattcacctgagatgcagttcccgtttctaatctcgctagacgaggtcaagctttactcagacctattaatcttcttcattggtgagaacaaaaccatttgctatcaactcttggtgtaattggaactttttaagcattggaaccaagattcagatgtttttaac

SEQ ID NO: 23382 - DNA, 429 bp, Gossypium hirsutum
  Clone ID: LIB3147-004-Q1-K1-C11
acgccacgcgtacgggtcgcctcatttttttcactcggtcaatctttggttggttttgggcggggttgaaaatgctcgctcggctcgcgtctcgacgttttctcgagatccgtcaagctttccgtcaatcttctcaggcctctcgatctttgtccactgccctgaactatcatcttgataccccacataataatcccgaccttccatgggaattttcggaggcgaacaaacaaaaggtcaaggagatattgtctcattatccatccaactacaagcaatctgcagttattcctttgctagatcttgctcagcagcagcatggaggatggcttccagtttcggcaatgaatgcacttgcgaaggttatagaagttgctcctattcgtgtgtatgaagttgcgacattttattcaatgttcaaccgatcaa

SEQ ID NO: 23383 - DNA, 391 bp, Gossypium hirsutum
  Clone ID: LIB3147-004-Q1-K1-C12
tcggagaactactacttaggcttataatattccctattacatcattctgctggtatcaaggtaagctgttaatctttgagggaatgggatctgcaaattatctcagtatacttaaaatttagagactgcatgcttgggaggtcattcagacaataaggtggtttttgaggctacatgactaaattttgagcttgaggtggggaaaagaagacataatgttgacaatcttagttggtggttctgtttgttacatttggtattgaggctctcgagctttctatattcttttctgtgttaatcatttcttcttcttatttcagtgttatgtataggtaatttgtacttgttgtacattgtattactccatataagaatttggacctatgatatt

SEQ ID NO: 23384 - DNA, 293 bp, Gossypium hirsutum
  Clone ID: LIB3147-004-Q1-K1-C2
cccacgcgtccggtgagatgcaaataaaggtagtaaaataactgaaaatttcccgttaataggggactcctagttttccttcagtttaggtttttaggacaggccttgcctgtctgtcaataaacaaaattacttcaagaaatttagctttttttttttctcattgacctaatggggatatttcgattggcggactttgtcgatttgtattactgattagacattaaattattggactttgttgaattatagtacacaataaagcaccttgagaattcaaggttatcttttct

SEQ ID NO: 23385 - DNA, 450 bp, Gossypium hirsutum
  Clone ID: LIB3147-004-Q1-K1-C3
ctaaaattcattatgctggaatgcttcaatatgatggtgagttgaagcttccaggccactaccttgtttctccccccgagattgacagaacatccggcgaatatttggtgcacaatggtgtacgtacttttgcgtgcagtgagacagttaaatttggccatgtcacattcttctggaatggaaatcgctccggctatttcaaccctgaaatggaagaatatgcggaaatcccaagtgatgttggcattacattcaatgttcaaccaaaaatgaaggcactggagattggtgaaaaggctagggatgcaattctgagccgcaaatttgaccaggtgcgtgtgaacattccgaatggtgacatggttggtcatactggagatatccaggctactgtcgtggcatgcaaggccgctgatgaagctgtcaagatgatcattgatgccatagagc

SEQ ID NO: 23386 - DNA, 372 bp, Gossypium hirsutum
  Clone ID: LIB3147-004-Q1-K1-C4
gggatatgaacaccccagaaaagattgaagccgcaggtaaaaagaaggaagaaggaaatgtattgttcaagtctggaaaatatgcgagagcttctaagagatatgaaaaggcagtaaagtatatcgattatgattcttccttcagcgaagaggagaaaaagcaagccaaggcattgaaggttgcttgcaatctgaacaatgctgcttgcaagctgaaactgaaggatttcaagcaagctgagaaactgtgcaccaaggttttagaaatagaaagttcgaatgtgaaagcgttgtatagaatggctcaagcatacattcatctggcagatttagatttggctgagtttgatgtcaagaaagcccttgagattg

SEQ ID NO: 23387 - DNA, 343 bp, Gossypium hirsutum
  Clone ID: LIB3147-004-Q1-K1-C5
aacgtcatcgcgtagggatgctctcatatggaggtgagttgtagctttcatgccaatggcttgggtctctccaaaagattgtccgaccataaggagaatatttgaagctcaaaggtgtagcgtactctttcttgcagagagacagattaatacggacatgtcacaatcttctggaagaggtaatcactctaactatttgaaccctaccaatgaacaatatgctggcttgccatcttaaggctgcattacattcaacggtgaagcagaaatgaaggctctggtcattggacaaaatgctactgatgtaatacctattcgtatatttgaccaggggcaacagaac

SEQ ID NO: 23388 - DNA, 434 bp, Gossypium hirsutum
  Clone ID: LIB3147-004-Q1-K1-C6
ctagattttctctgtaagctctacctagagaagaagccatggctaatgcagcgtctggaatggctgtgcatgatgactgcaaactgaagttccttgagttaaaggccaaaagaacataccgctacatagtattcaagattgaggagaaacagaagcaggttgttgtagaaagcttggtgagccaagtcaaagctatgatgatttcacttcaagcctccctgctgatgaatgtcggtatgctgtctatgattttgactttgtgactgctgagaattgccaaaaaagcaggattttcttcattgcatggtctcctgacacctaaagggtgagaagcaagatgatttatgcaagctcaaaggacaggttcaagagagagttggacggtattcaaatagagctgcaggcaactgacccgactgagatggaacttgatg

SEQ ID NO: 23389 - DNA, 437 bp, Gossypium hirsutum
  Clone ID: LIB3147-004-Q1-K1-C7
cccacgcgtccgattcaccatgtgtacgttggagaaacgcggcaacctctttattttaacgtttaccggcgaagaccagcaccggtttaatcccaatgtcatcggctcccttctcagccttctctctcaggtcaaggctgaagccactcgtggctcagctcttattacccaagcccaaggtaagttcttctccaacggcttcgatctcgactgggctcaagccgccggatctgaacaaggagccgcggaacggttacaccacatggtggatttgtttaggcccgtcatcgcggctcttctgtccctcccgatgcccaccgtcgccgccatcaccggtcacgccgctgccggtggatttgccctcgcgttgtctcatgattacctcattatgaggaaagaccgaggggttctttacatgtccgaggtggacatagcgc

SEQ ID NO: 23390 - DNA, 260 bp, Gossypium hirsutum
  Clone ID: LIB3147-004-Q1-K1-C8
ctttaccttacgcgaccggaatgccatcgtactgactgtcgtatacttcagcattgccacggacgccatacttgggagctgaactacacctgaacgtgctggcggccagccatcaagctggacgcattggcagcgagtcatcctacggggtgataaatactgaccaacacgtggtcggaagactctcagcaccgactacctcacaggctgtctcttacgacggtaggggcaacccatacggctgaacatatgagaacaaa

SEQ ID NO: 23391 - DNA, 221 bp, Gossypium hirsutum
  Clone ID: LIB3147-004-Q1-K1-C9
tcgaccaatatattataggccccaatttgatttccgtggactgacaaattttgcttgaattgtttcttacaaatcatcggtgaaccatgcttcttaaatggatgtttggagctggagactggattgtgctgcttgttttatttattttatattcaaggttcttgataacattaatgttaatatctattattgtactatattatttttatataaaatttatt

SEQ ID NO: 23392 - DNA, 87 bp, Gossypium hirsutum
  Clone ID: LIB3147-004-Q1-K1-D1
gtaaagaggcagttaattatttagttcatatatatggaaaaaaaaagaaaaaaaaaggagagagtaagagaggaaaacatttccttc

SEQ ID NO: 23393 - DNA, 170 bp, Gossypium hirsutum
  Clone ID: LIB3147-004-Q1-K1-D11
tcgaagcgacatcctctgatcgagatctttattttacttgtcacttgttcatggatattgtgagtattttaccgtaatcccggattttatgctccaattttaaatgggttaatcgacactgttggtgaccaaaaaaaaataaatataaaaaaaaaaataataataaaaat

SEQ ID NO: 23394 - DNA, 456 bp, Gossypium hirsutum
  unsure (1)..(456): unsure at all n locations; Clone ID: LIB3147-004-Q1-K1-D12
tcgnccacgccgttcgcagaagaagatgcttcatgcactaataaaggaaagtgggactgaaggagcggattgttgccttcattgctggacttactgctcctccaggacggcgtatgggtcatgcaggagctatagtatcagggggcaagggtactgcacaggacaaaatcaagactctaagggaagctggagtgacagttgctgaatctcctgcaaagattggtgtagcaatgcatgatgttttcaagcaaagaggcctcctgaattaacacccttttttttttcctagaaaaaggaaaactttttttcctgaataagtttcaggtggacatttttcatataattccattgtttttcttttgtccaaaattatttttatactaaaaaatgagggaaaaatcttataccttagtcaatgaaaccagatttggcttaaacaagacgggcaatactttt

SEQ ID NO: 23395 - DNA, 451 bp, Gossypium hirsutum
  Clone ID: LIB3147-004-Q1-K1-D2
gcgcctctcccgatttcttcttcttcactttgaggtttgagcagatcgtatggcaccaaagaaagacaaggcccctccaccttcttccaagccagcaaagtctggtggtggcaagcaaaagaagaagaagtggagcaagggaaagcaaaaggagaaggtgaacaacatggtgttgtttgaccaggctacttatgataagcttttatctgaggctcctaaatataagctcatcactccctcaattttgtctgatcgtatgaggattaatgggtcccttgctaggaaggctataagggaattgatggcaagaagatcgattccgttggtgtctgcccattcgagccagcagatttacactaaggcaaccaacacctagatcctttggtatatttttgcttaaattagttctatgtagtatttgcctttcttgactttctataaatgatttttc

SEQ ID NO: 23396 - DNA, 112 bp, Gossypium hirsutum
  Clone ID: LIB3147-004-Q1-K1-D3
cggacgcgtgggattactttagtctcatcttggagaagtgtgtaatctagcttttcatcgacttctgtaaatttatcggacatataaaaatagaactgtttgcattcaaggc

SEQ ID NO: 23397 - DNA, 410 bp, Gossypium hirsutum
  Clone ID: LIB3147-004-Q1-K1-D4
caaaatctgagtttttattatttctacgttgaaaaacattgtataattttctttgttagttgtctgagatgccgaaagtttgcttctctaaagacattatgatcatgtttgtggctcttgtgctctccgtcgccaccattgtatcagctcaggacagtgcaatggcgcccgcaccgtcaatggacactggatctgccttctcaacgccgattactggtgttgccgttacgttgtctcttattatttcccttcttgctcttttgaagcagtgagttacataatttgagtggttggttgtgtagtgtattgtaatatattgaatctattattattattattattattaataatggatcaataattttttaattggaattaattaatattccaaaggtttggaattttctggc

SEQ ID NO: 23398 - DNA, 337 bp, Gossypium hirsutum
  Clone ID: LIB3147-004-Q1-K1-D5
gtgagagagagagagagagagagagaagtgaaagatggtaagaggaaaagcactaagcgcgtatagggctcttctaagagccacccgcaaatcatttgccggcgacaccttgatgttgaacgcctctgccgttgaggttcgtcagaaatttgaagccaatcgtcatgtcacctcggagcctgagatccagaaactcctcgaggaagcacgggaggcctcccatttcgtttccaccatgattgttcaagccaagctcaacgaacgcggcggctacgaggtgaagccgagtaaggagcatgcaggagctactttggagattccttccgaagagatcatc

SEQ ID NO: 23399 - DNA, 349 bp, Gossypium hirsutum
  Clone ID: LIB3147-004-Q1-K1-D6
ctgaaacatgaactatcagtgctgcggagcacagcacgggcagcagatcagcgtctgcaggtatacatatgtgttggaactggccaccatactaggggttctcgtactccagcgagacttgcagttgctgtgcaacggtatctgcttgaagaagagggccttgactatacagaaccacagccagggctacttcgagttgtcatatattgaagccatggaccttgacagcgttgaggtataggagtttttgacactacagaaaaaagaaaccatcaagtcatagtcaccatagtcattcttgtatctgtacatgggaagaaaatgaaaaggggaatgtagttgaatctgg

SEQ ID NO: 23400 - DNA, 321 bp, Gossypium hirsutum
  Clone ID: LIB3147-004-Q1-K1-D7
gatccccacaaccctcccaagagcaacaggtaaaatttaacacgaattctgttgcatgcatgttggcatcgatttcacagctcttacctgttccatgtctaatagtggaggggacaccgttaggaggggatttttttttcagtcggatggtggggtggcatgctgaaagtctttgtacaataatctcaaaatgtgctcattgtaggccatttattcggcatgcaatacaacttgctatcattttatgcttccacctagactgtatcacaagtgctattcagaggccttgttgtatatatatagagatgattgtttctgttt

SEQ ID NO: 23401 - DNA, 426 bp, Gossypium hirsutum
  Clone ID: LIB3147-004-Q1-K1-D8
cggaaccacttcgatccacagtgtcttctactttcagcggcgatgaaacggcaccgttcttggtcttcctcggcgccgatgctgctctcgtcttctcctgtatgggagctgcatatgggacggctaagagtggtgttggtgtggcttcaatgggtgtgatgaggcctgcattggtgatgaaatctattgtaccagttgttatagctggtgttttgggtacttatggcttgattatcgctgacattattagtactgagatcaatcctaaggccaaatcgtattacctattcgatggttacgctcatccatcttatggtcatgcttagggccatgctgggctgtctgctggaatggctcttggaattgtcggcgatgctggctgtagagctgacgcacagttaccacagctttatgctggaatgatcc

SEQ ID NO: 23402 - DNA, 290 bp, Gossypium hirsutum
  Clone ID: LIB3147-004-Q1-K1-D9
cccacgcgtccggaaggttgtcaaccttcattaagtatctcgacattgatgtcctggttcatggagagcctgagagaaacgatatggttgagtactttggtgagcagttgtctggttttgctttcactgttaatgggtgggtgcaatcttatggttctcgctgtgtcaaaccaccgatcatctatggtgatgttagccgccccaaggcaatgactgttttctggtcatctactgtccaaagcatgacttaacgcccaatgaagggaatgcttaccggtcctgttaccatt

SEQ ID NO: 23403 - DNA, 296 bp, Gossypium hirsutum
  Clone ID: LIB3147-004-Q1-K1-E1
aaaagaatggtcgatgtttcagaaccgactcgcaaatgcagacaaggcgtatcagcttggaaaggaataattatttactgtctatttttattttattgatttcttttaccccaatccctccctgattttcaaccccgtttgtacatgtataatatctcacctgacgtttgttagggttcagtttgggtgacattttattttatttttgctgaacgagggtggactcatttacctgagccacatttttttgtacattaagatttccacagctatagaaaagggggagtaattttttt

SEQ ID NO: 23404 - DNA, 359 bp, Gossypium hirsutum
  Clone ID: LIB3147-004-Q1-K1-E10
ctcagtgctgaggagtctcgcaagattagctaacttccacagttcaaagggtttccagctggggaatttgtatcagatgatggtccttacaagtctcttgaagagctttgggatggagagatttgattttcattatctaccggatttattacaaataaaccaaatggacccatatgcaaatctttatagtttggtggtattgtgtatatatgggaccatcattttattgtgttggaaccagcatttagcagacgagaactatggggacaataaaatgtgattgtggagcttattgagtcaagagtcatcctatttttctgtttgtcctttcttgtggagtaacatgttgcaagtattag

SEQ ID NO: 23405 - DNA, 274 bp, Gossypium hirsutum
  Clone ID: LIB3147-004-Q1-K1-E11
tcaaatacttgttcacactttgcgtgtcggatgctgagaaagcttaccagcttaaacaatccctttcttcaagttttagtggtcaagacctgttaaaatattgcaatctcaaggttgtcacccgatttatatgtgatgaaagctatattttaattttgggcttaatggatttcttggcattctgcaacaatgaaactcaaatttctgtaattggatctatgtttttttgttgattaatgattttaatgatatatgcaccttttaatttccatga

SEQ ID NO: 23406 - DNA, 366 bp, Gossypium hirsutum
  Clone ID: LIB3147-004-Q1-K1-E12
cccactccttcgaaatctttcaatgtattattcactggtggactgaaaaggaagctggaaggtttgcttggagtacctaaaagtgatgatgattgacaggatgaaattgatggtggtgctagaaatccaccatgtgtacaatgttgcttgaaatctcattccattaaacggctccgctggatatttgataccaagcttgttggttaacaagtttgactgtacttgctttgtatgtaactaggtttgttcaagctaaggactaacaaggaattaagttaagattgattaggcctttacttttgcacttgctggctatgagaataatctgtatgacattagtgactccattatgtgtatatatttaaa

SEQ ID NO: 23407 - DNA, 415 bp, Gossypium hirsutum
  Clone ID: LIB3147-004-Q1-K1-E2
cccacgcgtccgcccacgcgtccgcccacgcgtccgcccacgcgtccgcccacgcgtccgattactttccctggagaagcagatgaagcacccgacacagttactggggatattgtatttgtcctccaacagaaagatcatccaaaatttaaacgaaagggtgatgacttatttgtagaacatacgttgacacttactgaggcagtttgcggcttccagtttatactgacccacctagatggtaggcaacttctcattaagacccatcctggtgaagtggttaagcctgatcaatgcaaggccataaatgatgaagggatgcctatgtatcaaaagccattcatgaagggtaaactatacattcactttaccggtgattttcctgactccttggcccccgagcagtgcaaggcac

SEQ ID NO: 23408 - DNA, 454 bp, Gossypium hirsutum
  Clone ID: LIB3147-004-Q1-K1-E3
cccacgcgtccgcattctttcttccgagacgatggacatccccgatggggttagcgtcaaaataaaagccaaggttatcgaagttgagggtcccaggggtaagcttatccgcgacttcaagcacctcaacctcgacttccatctcattaaggacgaggagaccggcaagcgtaagctcaggattgaggcttggttcggctccaggaagactagcgccgccatccgcaccgctctcagccacgtcgagaacctcatcaccggcgtcaccaagggataccgttacaaaatgaggttcgtctatgctcactttcccatcaacgccttcatcactaacgccaacaagtccatcgagatccgtaatttccttggcgagaagaaggtgcgcaaggtggatatgttggaaggggtttccatagttcgatctgagaaggtgaaggatgagattggtttggat

SEQ ID NO: 23409 - DNA, 284 bp, Gossypium hirsutum
  Clone ID: LIB3147-004-Q1-K1-E4
atcatatttgcaccagtagcagtgttgtcatggttcccattcatctcaaccttccagtctcgccttctctttaaccaagcctttagccgtgggctggagatttctctcatccttgccggaaacaaagctaatgtcgagacatgatttctactttctggctgcggttaggtttgcttgaactagttattgtttttattttttggcctcgatttattaatttatgaatttaactacaatccttttatagtatatattatttttgatggaaaaaaacagtcacatac

SEQ ID NO: 23410 - DNA, 346 bp, Gossypium hirsutum
  Clone ID: LIB3147-004-Q1-K1-E5
cccacgcgtccggaagatcacagcggttgggttttatcaaagcaggagtagcaagcggcaacttcggcttccggaccgagcagaaaaggccctggtctttagtacaaatctctctcattctgatttatgttgctcattactttccttatgtccttctggcttgtaatattcaggactctagtattggtacatatgttatataagttgagtttctagctggcatgtgtacagtttaaccatgtagtctggtaaacatgtcatcttgaacatggttgttacattattatattatacatcttgcagtttataaaataattctgcacgaactttctcgtggagtaacatg

SEQ ID NO: 23411 - DNA, 447 bp, Gossypium hirsutum
  Clone ID: LIB3147-004-Q1-K1-E6
cccacgcgtccggccacgcgtacgcaaatctttcgtctcttaattttggttggatatcgaagatgtcaggaagaggaaagggaggcaagggtcttggcaagggaggagctaagcgccaccgtaaggttctccgtgacaacattcagggcatcacaaagccggcaattcgacgccttgcccgtaggggaggagtgaagcgtatcagcggcttaatctatgaggaaacccgtggagttctcaagatcttcttggagaacgtcattcgcgatgcggtcacatacaccgaacacgccaaggagaaagacggtgactgccatggatgtggtttatgcgctgaagaggcagggtaggactttgtatggatttggcggttagttgatttagggtctaggttttaaaataggggaagaattgtaagactcagttaaagttacaagctgggttttg

SEQ ID NO: 23412 - DNA, 454 bp, Gossypium hirsutum
  unsure (1)..(454): unsure at all n locations; Clone ID: LIB3147-004-Q1-K1-E7
tttgcatccactgattttgcgttctttgttttgtggaatcaaagcttcgccgttgaccatgattctccggtcagtattggtcttggttctgttggtgggggttttattccgtgcatcgcaatctttgcgtttcgatctgcaatcgggacaaactaaatgcatcgccgaagacatcaagagcaattcaatgactgtcggaaagtaccacgttgttaaacctaacgaagatcatcctttgcccgattctcacaagctcaccgtcagggtaacgtcttcgtatgggaataattttcactcggcagaaaaggttgaaaaatgggcagtttgcattcacggcgacggaacatggtgattacatggctttgctttgngcgccggagcattcgccgncgatcacggtcaccngtgatttcggttggaggactggagtccacaccaaggactggactaacgt

SEQ ID NO: 23413 - DNA, 268 bp, Gossypium hirsutum
  Clone ID: LIB3147-004-Q1-K1-E8
ctcctttactgccttactgcctgtttagatcttagcaagttgttacattttcatttttcatgtatgcgtgaattagactatcttgggtgacattgggctcttttcctagttaggagaagccatttttcaggataaaatcgacaatattatgagtatgtcttttgaaaaacaccttgatcgtaagggaggagtgaagcgtatcagtcggcttagtatatgaggaaacccgtggagttctcaagaatcttctaaaagggcggccctctct

SEQ ID NO: 23414 - DNA, 434 bp, Gossypium hirsutum
  Clone ID: LIB3147-004-Q1-K1-E9
caggcgtcctctgaacaagatgcttcagttttaacaaacgatgttcatgaatattgagcgtattttaccctaaatccctgagtcttactcttccttcattactgtcgtatggatcatccatgagctatagaatcatggtacaaggttacatgcacaggacataatcaagactttaaggcaagctggagtgacatttactgaatcttctgcatagattgtagtatcaatgcatgatgtattcaatcttaaaggccttctgaattaacacccttattttcttcctataaaaaggaaaacttttttttctgaataaatttaatttggacatttttcatataattccattgcttttcttttgtacaaaactctttttaaactaaataacgaatgaaatttcttacacattattcaattatacctgatttgttatatac

SEQ ID NO: 23415 - DNA, 449 bp, Gossypium hirsutum
  Clone ID: LIB3147-004-Q1-K1-F1
caagaagatgctaaagagggtgaagctgaagacgaggaaggccttccaatatacccttacgaacgtgtcaaaataacatcaaccgatcccgtttctgagatagatgtgaccagacgagagacatacctgtcatccgaggagttcaaggagaaattcgggatgaaaaaagacgcattctataaattgccgaagtggaaacaaaacaagctaaaaatggctcttcaactgttctaagtcccccctttgattcatctgtgctatttattcaaaacccgctttcaaatgagagtgcagtgggaagaacccgaacccgttttctcaggatcgaaaaaaagggacagcatcagtgcatatttagctgcttctgctcccctaagaagcttttggtttttctcttttttgggtcattaatagacatatctggatttcaacccccccccctttttttc

SEQ ID NO: 23416 - DNA, 441 bp, Gossypium hirsutum
  Clone ID: LIB3147-004-Q1-K1-F10
cccacgcgtccggtgctataattatgtttgacgttactgcccgtttgacatacaagggtggtcctacctggcaccgtgatctttgcagggtgtgcgagaatattcctattgttctatgtggtaacaaggttgatgttaagaacaggcaggttaaggcaaagcaggttacattccacaggaagaagaatctgcaatactatgaaatctcagccaagagcaactacaattttgagaagcctttcttgtaccttgcccggaagcttgcaggtgatcctaatcttcactttgtggagtcacctgctcttgctcctcctgaagtacacatcgacttggctgcacagcaacaacatgaagctgagcttgcagcagcagctatccaacctcttccagatgatgatgatgatgcatttgagtagagaagagaatacaatattagctttt

SEQ ID NO: 23417 - DNA, 450 bp, Gossypium hirsutum
  Clone ID: LIB3147-004-Q1-K1-F11
tccacgcgtccgccaacatcgatagttagttacaaccatctgggaaataatgatgggatgagtctgtcagcaccccaaaccttccgttccaaggagatctcaaagagcaatgttgatgatgacatggtttcaagcaatggaatcctctatgagcctggtgaacatcctgatcatgttgtggtcatcaagtatgtgccgtatgtgggagacagcaagagagccatggatgagtacacatcatagatattcatgggaggcaagaacaccattgtgttgcacaacacatgtgaggattccctgttggctgctcccattatgctagacttggttctccttgctgaacttagcaccagtatccagttcaaggctgatggacagggcaagttccacactttccatcctgtggctacaatcctcagttacctcaccaaagcccctcttgatccacca

SEQ ID NO: 23418 - DNA, 458 bp, Gossypium hirsutum
  Clone ID: LIB3147-004-Q1-K1-F12
gggatatgaacaccccagaaaagattgaagccgcaggtaaaaagaaggaagaaggaggtgtgttgttcaagtctggaaaatatgcgagagcttctaagagatatgaaaaggcagtaaagtatatcgattatgattcttccttcagcgaagaggagaaaaagcaagccaaggcattgaaggttgcttgcaatctgaacaatgctgcttgcaagctgaaactgaaggatttcaagcaagctgagaaactgtgcaccaaggttttagaaatagaaagttcgaatgtgaaagcgttgtatagaagggctcaagcatacatccatctggcagatttagatttggctgagtttgatgtcaagaaagcccttgagattgatcctgataatagggagataaagatggaatacaaattattgaaggagaagatgaaggagtacaataagaaggaagccaaattctat

SEQ ID NO: 23419 - DNA, 422 bp, Gossypium hirsutum
  Clone ID: LIB3147-004-Q1-K1-F2
gtcctttacagatcatctttctctctctcattttccacttgagcactttatttgccttttcttttttttttttccccttcggagtttgcttttttgcagatcaaggaagaaagttatggcagaagaagaaactgaactgagcgacaagcaaaagaaagagatcgccaaatggttcctcctcaatgctcccgcaggcgaaatccagtacgttgccaaagatttaaaatccgttttgaataatgatgacgtctacgatgaggcggcatcggaagcatttcctgtttataacaaatctcacatgatttgcctcgaaatgcctggtagattcggagatgtgctggttacatcatatggggagcttcagggtaatgagtatctaaaccccaagactggccaagttgctatagttgaccatgtcaaac

SEQ ID NO: 23420 - DNA, 409 bp, Gossypium hirsutum
  Clone ID: LIB3147-004-Q1-K1-F3
ccagaaaccctcgttattaatcggcggaagcagatagcctctagccatgactttcaagcgtaggaatggtggccgcaacaagcatggccgtggccatgtcaaattcatccgctgttctaactgtggcaaatgctgccccaaggataagtcaattaagaggtttcttgtgaggaacattgtggaacaagctgctgttagagatgtccaagaagcctgcgtttatgacacttatactttgcctaagctgtatgttaagatgcaatactgtgtctcgtgtgcgatccactcccacgttgtgagagtccgatcccgcaccgataggaggaaacgtgatccacccgcccgcttcatcagacgcagggatgatatgccaaagcctggtcagccttgtcaagcaccacgtccaggt

SEQ ID NO: 23421 - DNA, 453 bp, Gossypium hirsutum
  Clone ID: LIB3147-004-Q1-K1-F4
cccacgcgtccggcaattttagctgaggagaaacaccttcccatgtatcaagaaatggcatccaagcccaatgtagagtatattgctggaggtgctactcaaaattcaatcaaagttgcacagtggatgcttcaaattcctggtgcaactggttacattggctgcattgggaaggacaagtttggggaggaaatgaagaagaactcaaaagctgctggtgttaatgttcaatatctcgaggatgaaactgcaccaacaggaacttgtgctgtttgtgttgttggtggtgaaaggtcactcattgcaaatctatcagctgctaactgctataagtctgagcatttgaagaagcctgagaattgggcgttggttgagaaggccaagtacttctatattgctggatttttccttactggatcttcggactccatacagcttgttgctgaacacgct

SEQ ID NO: 23422 - DNA, 447 bp, Gossypium hirsutum
  Clone ID: LIB3147-004-Q1-K1-F5
cagaaaaacatggtgacagcccaaggcaggaccgaccctaaccaaaacacgggcattgtgatccagaaatgtacgataggtgccacttctgatttacagcctgttcgtaaaaactttgcaacatatcttggcaggccctggaaggagtactcgaggactgtggtaatgcaatcaacaatcagtgacgtgattcaacctgctggttggcacgagtggagcgggagtttcgtcctgaaaacactgttttatgccgagtaccataacaccggtgctggtgccataacttctgcgagagtgaaatggggagggtacatggtgatcactagtgcacgtgaagctcaggcttttactcctggcaggttcattgctggaggaagttggttaagctctacaggctttcctttcgctcttgggttggaataattttaaagattgtattgtcaatgt

SEQ ID NO: 23423 - DNA, 454 bp, Gossypium hirsutum
  Clone ID: LIB3147-004-Q1-K1-F6
cccacgcgtccgcagacctcgtccgtggtctccgagagcacaccgatgccggtggcataatcttacttctccaagacgaccaagtccctggcctcgaattcctcaaggacggtcaatggtttagaatcccaccgtcgaaaaacaacaccatattcatcaacaccggcgaccaaatcgaagtgattagcaatgggaagtacaagagtgtgttgcatcgtgtaatggctgagaaacaagggaataggctttccattgctacgttttataaccctggtagtgatgctgtgatttcgccggcaccggaattgttgtacccgggaaattaccagtttggggattatttgaaactatattcgactactaagtttttggagaaaggaccaaggtttgaatcgatgaagatgacgatggttaatggtcaccatggttgaaaaaagcagtgatttgcatggcc

SEQ ID NO: 23424 - DNA, 199 bp, Gossypium hirsutum
  Clone ID: LIB3147-004-Q1-K1-F8
ccttgaaccaactgctacatgctagccttttgaggagtacatattatagaaagaactaaggaaaggaaaagaaaggccttataaagagcgtcaaaaaggaaaaagaaaaacagttcatgaattgaaatttaaataataatttaatttttttattgttttcaattcagtattttcttctaattcgattagttgaatttct

SEQ ID NO: 23425 - DNA, 439 bp, Gossypium hirsutum
  Clone ID: LIB3147-004-Q1-K1-F9
cccacgcgtccgccaacatcgatagttagttacaaccatctgggaaataatgatggcgtggatctgtcagcaccccaaaccttccgttccaaggagatctcaaagagcaatgttgttgatgacatggtttcaagcaatggaatcctctatgagcctggtgaacatcctgatcatgttgtggtcatcaagtatgtgccgtatgtgggagacagcaagagagccatggatgagtacacatcagagatattcatgggaggcaagaacaccattgtgttgcacaacacatgtgaggattccctgttggctgctcccattatcctagacttggttctccttgctgaacttagcaccaggatccagttcaaggctgatggagagggcaagttccacactttccatcctgtggctacaatcctcagttacctcaccaaagcccctc

SEQ ID NO: 23426 - DNA, 359 bp, Gossypium hirsutum
  Clone ID: LIB3147-004-Q1-K1-G1
cccacgcgtccgcccacgcgtccgacaggagaaaagatatttaacatgatttatatgctattcaacattggtcttacagcctacacaatcggtaacatgactaacctggtcgttcatgctgctgtcagaacctttgccatgagagatgctctgaatgagttattgcgttatgcaagcaaaaatagactcccagaagggttgagagaacaaatgatggcacacatgcagctcaagttcaagacagcagagttacaacaagaagaagtgctacaggacctgcctaaggctataagatccagcattgcccaacaccttttccgtagaactgtcgagaaaagctacctattcaatggagtctc

SEQ ID NO: 23427 - DNA, 354 bp, Gossypium hirsutum
  Clone ID: LIB3147-004-Q1-K1-G11
ctagaagcctagctgatgccatggtttggttggtatgctccgacaggaagagcggcgaaggtgtcttcaaaaaggagggatacaccgacaaaaccggaaaataccagattcgtgtatccgaggatcacttggatcagatctgtgatgcagttcttgtgaagagctcccagcttggttgtgccacaatgtcccccggtcgtgaacgtgcccgtgttatcttgaccaacttcaatggcatttcatccaccatccgttatgccaatgccatgggcttcatggttgacgagcctgaagcatgctgtgctgagatgatgaagatttatcaggaggatgaggagaattcttagtgtgttg

SEQ ID NO: 23428 - DNA, 287 bp, Gossypium hirsutum
  Clone ID: LIB3147-004-Q1-K1-G12
ggaaaaaataaatctagatcatgtttttgttcgattggttctatgggattcttgcgtcccgcggtctatggcataaagaggccaagatcttgtttttagggcttgataatgctggcaaaaccacgctccttcacatgctcaaagatgagagattagttcagcatcagccaacacagcatcccacatcagaggaattgagcattgggaaaatcaagtttaaagcttttgatttgggaggccatcagattgctcgaagagtttggaaagattactacgccaaggtggat

SEQ ID NO: 23429 - DNA, 356 bp, Gossypium hirsutum
  Clone ID: LIB3147-004-Q1-K1-G2
cgttcgagataacagctacactggttctagtgttggaggcacctattggttatacagggtgcggattacaatcaagcgactgcttaagagacggatatttcaccagatgatgatgcttatgtgaagagctttccattgtcacattctccagattctgtgatgactaaatgccatagctcctctacaatacagtcaaatagtacaacttaacttaaatttcactaaatttagaggcataatcataaggaaacactgtcaacctgtactataagagctgtctacatttgtgactcacctttaatggtaaatggtattgcaatattatataggataagctgtctatgaaaaccgttatc

SEQ ID NO: 23430 - DNA, 279 bp, Gossypium hirsutum
  Clone ID: LIB3147-004-Q1-K1-G3
ttcgacctacgacgtacgcgtacgcgtacgcctacgccttcagacatgcttcatgttcatagcactgaacctatatctatggcccgggagctatcacagcctccacagtctggggcttaactgaactagtcccctattcagacaaagaaaacctctatcatgacatatgcatagaccctgatactaagatgatctagcaagattaaacacgcatcaagaagtggagaataagaagggccttacatgacgaataacatccctatctgccaaagcatatcc

SEQ ID NO: 23431 - DNA, 438 bp, Gossypium hirsutum
  Clone ID: LIB3147-004-Q1-K1-G4
ggccgatcaacttacggacgatcagatctctgagttcaaggaggctttcagcctttttgacaaggatggcgatggttgcattactaccaaggagctggggactgtgatgcgatcacttggtcagaaccctactgaggcagaactccaagatatgatcaatgaagttgatgctgatggaaatgggaccattgattttcctgaattccttaacctaatggcaaggaagatgaaggatactgattccgaggaagaacttaaagaggctttcagggtgtttgacaaggaccagaatggtttcatatctgctgctgagcttcgccatgtcatgacaaatctcggtgagaagcttacagatgaggaagttgatgagatgatccgtgaagctgatgttgatggtgatgggcagataaactatgaagagttcgtcaaagtcatgat

SEQ ID NO: 23432 - DNA, 423 bp, Gossypium hirsutum
  Clone ID: LIB3147-004-Q1-K1-G5
cccacgcgtccgccgggagacatgccgcaagatcaaggcccttcaccaatatgattgcctgagagctaacaaagcaacgtcagcatggggattagaggcacgagtccccttcttagacaaagaatttatcaatgttgccatgtctatagaccctgaagcgaagatgatataaaaagatgaaggacgcatcgagaagtgggttctaagaagggccttcgatgacgaagaacatccctatctgccaaagcatatcctctacagacaaaaagaacagttcagtgatggtgtccgttatagttggatcgatggtctcaaagcccatgcttgccgacatgtgacccgataagatgatgttcaatgcttctttcatatttccctacaacacaccaactacaaaggaagcatattactacaggatgattt

SEQ ID NO: 23433 - DNA, 394 bp, Gossypium hirsutum
  Clone ID: LIB3147-004-Q1-K1-G6
gaaagagatgagaccaacaatggcacgagtgttggaggccctaaagggtatacaaaatgaggattacaataaagcaaaggcagaagagatggatatttcagcagatgatgttgggttgttgaagagtggaccattgccacattctccagattctgtgatgacaaaatggcatagctcctctacaatacagtcaaatagtacgagttaacttaaatttcactaaatttcgaggcatatagtaaaggaaacactgtcaacctgtactataatttttctttccatttgtgtttcaccttgaatggtaaatgggatgtaaatattatataggataagcggtgtatgaaaacccgtagctttggcatttaaaattttagctgaatccaactttttgatt

SEQ ID NO: 23434 - DNA, 381 bp, Gossypium hirsutum
  Clone ID: LIB3147-004-Q1-K1-G7
gtgcggacgagatcatatggcttacagatctgcttatttccctgtcaaggatgtgattgatggggatttgtgtgagcagtttccgaccctacctctggatctgcagagaaaaattgcagacgagttggaccgtactcctggggagatactgaagaaactcgaagaagtccgaaacaagatcatttgagatagcagatagcatcaaaggtcaagttctcttttacccggattgcgggataccaattgcggttaagaaggctttagcacgtcagaatccaaggcagatgagggagaaaatgggacgatggaagtcgagaacacgagaccaagaatgggagtattgtataagtagttattagacaaactaggtgtgttagaggc

SEQ ID NO: 23435 - DNA, 451 bp, Gossypium hirsutum
  unsure (1)..(451): unsure at all n locations; Clone ID: LIB3147-004-Q1-K1-G8
gtttggaccggatgcttctaaagtgttggtagcgaagctaattgacggctacctagctgaaattgctcgagatccgaatttaccggtttcaaatttcgttaaccttgctgaaattgtatcaagcgtctcgagaccttgtcatgacggactttaccgtggcatagacatgtatctgaaggaacacccgggaatcagcaaaagtgagagaaagagaatatgcaggttaatggactgcaagaagctatcggctgaggcctgcatgcatgctgtgcaaaacgagaggcttccattacgtgtcgtcgtgcaggttcttttcttcgagcaagccagagccacaacgtcctncggcagtagcacccccgatcttccggggtccattagagcccttcctcccggaaggtctcaccgtagctcaaggtccacaacaaccaacactgaagaggattgggat

SEQ ID NO: 23436 - DNA, 313 bp, Gossypium hirsutum
  Clone ID: LIB3147-004-Q1-K1-G9
ctagaagcctatctgatgccatcggtttgtttgtatgctccgactggaagagcggccaaggtgtcttcaaaaaggagggatacaccgacaaaaccggggaataccagattcgtgtattcgaagatcacttggatcagatctgtgatgcagttcttgtgaagagctcccagcttggttgtgccacaatgtcccccggtcgtgaacgtgcccgtgttatcttgaccaacttcaatggcatttcatgcaccacccgttatgccaatgccatgggcttcatggttgacgagcctgaatcaggctgtgcttagatgat

SEQ ID NO: 23437 - DNA, 445 bp, Gossypium hirsutum
  Clone ID: LIB3147-004-Q1-K1-H1
cccacgcgtccgcccacgcgtccgcccacgcgtccggaaatctttcctttctttttttgcattcctctcacttctcctgtttgtagacaccattgcagcagctaggaaagatgctggagagtactggggagctgtaacgaaagatcaacctatgcctgaggcactccaagagcttgttcggattgaggctgccgttgtcagccccgatgagaaaaccaagtgccatacatcaggtaatattgagcttaaggaagagaagattattgttaatgaggagttcgaaccaaggccaaacgtttcagcttatggtgatgacgctaatctaaaaagaggataatcatcatcttttgctgaagattttgaaccgagacctaacgtttcggcttacgggggcgatgatgctggtcttaaaggacagaaagaatcattcactaaagaattcgat

SEQ ID NO: 23438 - DNA, 419 bp, Gossypium hirsutum
  unsure (1)..(419): unsure at all n locations; Clone ID: LIB3147-004-Q1-K1-H10
ctgagggcgagtatggatcgggttatggaggtagaacagagactgaatacggntgcgggtgtgagaggaaaccaagttatggtagatccgaggaagaggaagaaggatataggaagccaagttatggtagatccgaggaggaggaagaaggatataggaagccaagttatggtagatccgaggaagaaggatatggccgcaagaaacatggcgatgacgacagtgatgatgatgatgaagagaagcgtcaccaccaccgctataagcaccaccaccataagcgccacgatgactatgacgactagtcagactggccattccctctacaaatggaaatctgcagtaatagctattaaataaatgatcgaggcatgccacctttgatcgtttcttttaccatttccgtgtgctttttgtgt

SEQ ID NO: 23439 - DNA, 410 bp, Gossypium hirsutum
  Clone ID: LIB3147-004-Q1-K1-H11
gattcctctcaacaatattccaggctttggggattcgagaagcttctgtttagagagtcaggaacgggaattcggcgtgacaggaaatatgcaattcaggcgaagaatgcattcgcaacgggagtgcatatgtcggagaatgttattgggaaaacattacataatacagaaacaaagattcgttattatcactatcacaacaccattaccgtacaccaagagctatgcagagagtacctccctccctctgccaaaaacaatgtcacttggttcaataagctaccctatgtctacgatgataacatgaagaaactggccaacaccatcaaggaattcgagcataaaaccattggagacctcggttctctattaccccacaccccacattttattccagcagctaccacatg

SEQ ID NO: 23440 - DNA, 383 bp, Gossypium hirsutum
  Clone ID: LIB3147-004-Q1-K1-H2
accacgcgttcgtgagcactatcatgagctcttcatgtatgcttcagagactgggtatacgcctcgggaaatattcggctgctgtgctgcctacatagtgactgatatcggcatctgacggattatatcacgcaatggtacatgatatacatgacatgatgctgtttatggttttgtttcaattgaggcagcccttttgactcatctccaggctcagctcatctctatatgttgtggactccattctacacacgacactgaacacgcagatgaccactgagacaccctggcaacatggaacgttacataaatttttatgcaggattggctgcgctctctttggcgtacgctccaggacacccaacgcgatcaaacatgctatc

SEQ ID NO: 23441 - DNA, 447 bp, Gossypium hirsutum
  Clone ID: LIB3147-004-Q1-K1-H3
ctgctttggtgaagatggcgaaatgctcaaaagattatgaaccagccatcgagactttccagaaagctcttactgagcatcgcaatcctgacacgttgaagaaactaaatgatgctgaaaaagccaagaaagaactagagcagcaagaatattttgatccaaagatagctgatgaggaccgtgagaaagggaatgaaagtttcaaacagcagaagtatccagaggctgtgaagcattataccgagtcattgagacgaaaccccaaagatccaaaggcatacagcaatagagcagcatgctacacgaaattgggcgctttgcctgagggattgaaagatgctgagaagtgcattgagctagatccaacattttcaaagggttacacaagaaagggagctgttcaattcttcatgaaggagtatgacaaagctttagaaacataccaag

SEQ ID NO: 23442 - DNA, 364 bp, Gossypium hirsutum
  Clone ID: LIB3147-004-Q1-K1-H4
cttctttctgcttccctttttttaaaaaaataaaaaataaaaatcccattaaggcttgaactgttcttcagccaaaatgggtatttctcgtgattcaatgcacaagaggcgtgccactggtggcaaaaagaaggcttggaggaagaagagaaagtatgagcttggaaggcaacctgctaacacaaagctgtcaagcaacaagacagtcaggaggattagggttcgtggtgggaatgtgaagtggcgtgctctgaggctcgacaccggaaactactcatggggaagtgaggctgtgactcgtaagaccaggattttggatgtggtgtacaatgcatccaacaatgagctgttcgcactcaaactc

SEQ ID NO: 23443 - DNA, 457 bp, Gossypium hirsutum
  Clone ID: LIB3147-004-Q1-K1-H5
cagaagcagcttatgcaaccagttcgcagccatggtgaagtattcgaaggagtcagataatcccaccaagtcctgcaaggcaaggggctctgatctcagggttcatttcaagaacacacgggagactgcgtattgctatcaggaagttggctttgggtaaggctaagacgtatttggaggatgttatggctcacaaacaggccatacccttcagacgcttatgtggaggagttggacgtacagctcaggcaaagaacaggcattctaatggacaaggtcgctggcctgtaaaatctgccaaattcattctagatttgctgaagaatgctgagagcaatgctgaggttaacggtttggatgtggatgcactctatatttctcacatccaagttaaccaggctcagaaacaaatgcgtcgtacataccgtgcccatggcagaatcaatccttacatgtc

SEQ ID NO: 23444 - DNA, 423 bp, Gossypium hirsutum
  Clone ID: LIB3147-004-Q1-K1-H6
cggtctcctaccacctaccctgcttcccagaccggcggccccaaggtaccggctaaagatctcgtgatgggtcaagttaagatcctgaaacgcggtgaggttctaaaaaaaccgacgctggaaaagtgcgtcaggttcgaaaaggaaaacattgacgttggagatctgggttccactaaccgtttgggtcctgatcccggttacgttccgacccagatccgactgaccaagtcaaacaacaattagaaggtcgtcccagcctctttttatgctgggtcggtctttataacctcgccgactacgagttccgtaccgatgccggtgttttgcaccaagaagatcagcgttaccgtaaagaacgactacgccacgagcgacttacggaggatattaaggctcgatttgtagtcatacccaggaatt

SEQ ID NO: 23445 - DNA, 442 bp, Gossypium hirsutum
  Clone ID: LIB3147-004-Q1-K1-H7
ggagaatatcacaaggaaggaagaaccctctcctcaaacagtgtcaactattttacatgatgagagaaaaaaagaagtaaataaagttattggtgaacaacattgtggcgacattgaatcgaagacttcagtaaaggcttcaaccccgcaaatgcaaactaagctgcctgcaattccatctttctctcagtttgtaaacagcagaaagtcaaaagagatgcagcaaccgaaggcatcagaggaaaaggagcatcaccattcacccaatatacatacgaagaagagaatgaagttgcagtaggggtgagtgtcccaagccttgtgtgttattttcagttcaattggttcggtaggactgcaaaatcccaatggttccagtttgcttataatatgtgcttttgacttttccctgtctcagaatgcatcttttttttggtttctt

SEQ ID NO: 23446 - DNA, 356 bp, Gossypium hirsutum
  Clone ID: LIB3147-004-Q1-K1-H8
cccacgcgtccgtaggatttctgccttgagtcaggctagagttatctacgttatgacccatgattccattggtcttggggaagatggaccaactcaccagccaattgagcacttggcaagcttccgtgcaatgcctaatgttttgatgctccgtccagctgatggaaatgaaacggctggagcatacaaggttgctgtcctcaagaggaagacaccctcaattcttgccctttccagacaaaagctaccccaattagctggaacttccattgagggggttgaaaaaggtggctacatcatttcagacaattcttcaggcaacaatcctgatgtaattctgattggaacttggtctg

SEQ ID NO: 23447 - DNA, 317 bp, Gossypium hirsutum
  Clone ID: LIB3147-005-Q1-K1-A1
tcgccacgcgtccgaaccctgacaagattcatttgttcccatttctggttttgagggtgataacatgattgagaggtctaccaacttggactggtacaagggccctacacttcttgaggctcttgaccagatcaatgagcccaagaggccttcagacaagcctctgcgtctaccacttcaggatgtgtacaagattggtggtattggaactgtcccagttggtcgtgttgaaactggtgtcttgaagcctggtatggttgtgacctttggtcctactggtctgaccactgaagttaagtcttgtgagatgcaccatg

SEQ ID NO: 23448 - DNA, 446 bp, Gossypium hirsutum
  unsure (1)..(446): unsure at all n locations; Clone ID: LIB3147-005-Q1-K1-A10
gagttttacttacaatagtaacatcaacattgcagtagctgttgctatcaatggtggcttgattacccctgttcttcaagatgcagataagttggatttgtatctactgtctcaaaaatggaaagaattggtggagaaagcccgggcaaagcagcttcagcctcaagagtataattcggggacattcactctgtccaatctgggcatgtttggagtggacaggtttgatgccattcttcccccaggccagggagctatcatggctgttggagcatcaaagccaactgttgtagctgatgctgagggattcttcagcgtgaaaaacaaaatgctggtgaatgttactgctgaccaccgaattatctatggtgctgatttggctgccttccttcanaccttctcaaagattgttgagaacgctgnaagcctcactttgtagatgattc

SEQ ID NO: 23449 - DNA, 452 bp, Gossypium hirsutum
  Clone ID: LIB3147-005-Q1-K1-A11
cccacgcgtccgctctttatatatatagcaccaccattatagtctccaaaaaccagtaagaatcaaccacttcgataatggccatgcataacctagttcaagctcttgtttttgttgctgtttttttcaacacattggcacccacagtcgcaaatgttgaaggggatgctttgtatgcattgaggagaagtgttaaagaccctaaaaatgtgctcaagagttgggatccaaccttggtggatccttgtacttggtttcatgttacctgtgatgctgataatcgtgttactcgtctagatcttggaaatgcaaaattgaagggcagattggtacctcagttgggaaagcttgaacgtcttcaatatttagagctgtatatgaacaacttggagggttccataccagaagaaattggagggttaaaaacctttagtgagttggatctttacaat

SEQ ID NO: 23450 - DNA, 395 bp, Gossypium hirsutum
  Clone ID: LIB3147-005-Q1-K1-A12
cccacgcgtccgcccacgcgttcgcccacgcgtccgcgtgacccacctcagcgcttcattagacgcacggatgatatgccaaagcctgttcagcctggtcaggctcctcgtcctggggttgccgctcctgctcgtgcataaggctcttgaagtttaagatgaatttgtatttcgtgtcttgctttgagatatcgttgcttgaattttgagaacttggatcatgtaaggagttcttttttattgctttaaagttcgatacttagttaaatctggaaggtattgagtggctgagaatacatgttggaactcgaaacttcataatttctgtgttagctgcatatgattatccaaaacgaaaaccgtgcaaggagaatggtattatataattgtatgtc

SEQ ID NO: 23451 - DNA, 390 bp, Gossypium hirsutum
  Clone ID: LIB3147-005-Q1-K1-A2
ggctaatcctggtttgggaatttgaattagagtacttcaatgctactgaatttgagtcaaattttagaaaagataaaaacagattgccagtatgtatgatattgtgtgttattatgcttagaacttttgcattttattttcagcattacatcatcatcagagtctttctagaggtaactgaagctttacatactataggaataaaatccttgtataaagggaaatttttaggatggttgaaaaataaaaatatggttaaaaatttcctggggaacatttgttttgcctagaaggctattacattaaaaaaaaaaagggcgggcggtttttatggttccagcttaacttcccctgcattccaaggcataacttttttattggggcccctaa

SEQ ID NO: 23452 - DNA, 244 bp, Gossypium hirsutum
  unsure (1)..(244): unsure at all n locations; Clone ID: LIB3147-005-Q1-K1-A3
cctgaactacttatgatttcttccattagaccaatccaaaattcttataaaggttttttgtgctactgttgtatttcatgctgcaagcagcatcggctttactgaataggataggccctacataccatcaagttttcaagtaataattcccagtgacctgttacaaaggagggtttggtttaaaaaaaaatctatttttccagtttaaaaaangataaaaaaacttgaataaaaagaaatttat

SEQ ID NO: 23453 - DNA, 382 bp, Gossypium hirsutum
  Clone ID: LIB3147-005-Q1-K1-A4
ggaatacggaaagatgatggaagctgagggcccaccaaaatttgatgagacggctgtaccagacttaaaaaagaacttggatgatccacctggtgagggaccaatccttaggtggcaaactcgggcggtgtttgctcctggtggtgatgcgtggcatcccaaaaacagaaaagtaaagatgtctgttacagtgaaggagctcgggctttcaaagcatcaattccgcccggtacgagagcttgttggaaagaaataccatccaggcaaaaatgaacttacatttactagtgaaaaggttggacccccgggaaaagaccaaaaaaaatggcttaaaaccatttttttttttatttgaggaacccggaaaagctaccaaatgggg

SEQ ID NO: 23454 - DNA, 259 bp, Gossypium hirsutum
  Clone ID: LIB3147-005-Q1-K1-A5
cccacgcgtccgcttcgcccttctgtaaatttcccttcaaagaaaagaagaagaaaataccaacaactatcagctaacgatgagttattacaatcagcaacagcctcctgttggcgttcctccttctcaaggttatccaccggaaggttatcctccaaaggatgcttatccaccaccggggtatcccccacaaggatatcctcaaggttatcctcaacagggataccctccgcagggatatccacctcaatatgctcag

SEQ ID NO: 23455 - DNA, 311 bp, Gossypium hirsutum
  Clone ID: LIB3147-005-Q1-K1-A7
aattgacggacggatccacgcgtactaccactcgttccttcacgcgtgagcaacgcttgcgatcaatatgtcggattgggagtagtgaaagggttcatggggaatacatagtatggtgctatgggtgggggagctaactctacgaatcatggctacacaattggagatggacgtggtgctgaaatagatgcacctttgtgcttgtttacactgtgttctcagacactgatgccaagcgcagtgccagagactttcacgttcatattctggcaccattgccaattgggttctcagtgttcttggagcactta

SEQ ID NO: 23456 - DNA, 136 bp, Gossypium hirsutum
  Clone ID: LIB3147-005-Q1-K1-A8
gaagtccggaattgaccgacgcatccacgcgtacggccagacgtacggaaaaagtgggccctaccttatttgatgatactactggcccggacttatttgagaaccttatggatgctgctgaggagggaccaagcct

SEQ ID NO: 23457 - DNA, 357 bp, Gossypium hirsutum
  Clone ID: LIB3147-005-Q1-K1-A9
cccacgcgtccgcaagtagaaaaattgtgtgaatggattgatgtattagtctaaaacttggttcactcttaaaggaaacatcttaattttatcttctcacgagtgaattgaatgttactaatatttactctatcaggatatatgaatttgactgatttttggctttgctgttctgatttgagttgtgttggggactgaaaactagacaacatttggatggttttctttatatatgcagctcttagatcttcatatgcaattaccgttatgcacttgataatatcaatttcttgtgtcaagtggttgagtatgtgaatgtgcacaggtgtggcagatgagaactggaccacgtctctt

SEQ ID NO: 23458 - DNA, 310 bp, Gossypium hirsutum
  Clone ID: LIB3147-005-Q1-K1-B1
cgttgacaagggcaatatactacatggtgatgcagtgcttgggagccatatgtggggctggtgtagttaaagggttcatggggaagacaaggtatggtgctttgggtggtggagctaactctgtgaatcatggctacacaaagggagatgggcttggtgctgaaattgttggcacctttgtgcttgtttacactgtgttctcagccactgatgccaagcgcagtgccagagactctcacgtccctattctggcaccattgccaattgggttcgcagtgttcttggtgcacttagccaccatcccaatcac

SEQ ID NO: 23459 - DNA, 356 bp, Gossypium hirsutum
  unsure (1)..(356): unsure at all n locations; Clone ID: LIB3147-005-Q1-K1-B10
gctaaattatctatgcgctccctaaatcttgattcgccctctcttcgatcaaagagcatcagtgtaggaaaagagaattctaacagaaaggagatatctgcaagcaggaggagcttataagtggagcttacagtccctgttgctgtaaaaaaaatggatgctgtttcaacctctcataccacttcatgttcggaggacatagcattatcttttaagtctttgggatgacgttttccaccattaaactatgaattgtagctgtaaaaaaaatggatgctgtttcaacctactgaggaggatgctactcattaaatatgtttatgaactgaacatttaccgaatttattgtctntctt

SEQ ID NO: 23460 - DNA, 393 bp, Gossypium hirsutum
  unsure (1)..(393): unsure at all n locations; Clone ID: LIB3147-005-Q1-K1-B11
aaactccaacactaaccgcttcggttgccacggaagctgtcactgagactgaaacaccatccgacttcatcattcctcagaaacctgaggaggtggtcaagcaagttggaaagccaagactggttttgaaattcatatggatggaaaagaacatcgggcttgcccttgatcaagtcataccgggccacggcactgttcctctaagtccatatttcttctggccaaggaaagatgcctgggaagagctcaaggccactctagaaagtaagccttggatttctcagaagaagatgattatccttctcaatcaggccactgatatcatcaatctatggcagcaaagtggtggcaacctttcccagagctagatgtgcatntttttatataattttt

SEQ ID NO: 23461 - DNA, 419 bp, Gossypium hirsutum
  unsure (1)..(419): unsure at all n locations; Clone ID: LIB3147-005-Q1-K1-B12
gttccatccaaatatttatgctgatggtagcatctgtttggacattctacaaaatcagtggagtccaatttatgatgtagctgcaatactgacatctattcagtcattgctttgtgatccaaatcctaattcccctgcaaattctgaagctgctcggatgtttagtgagaacaagcgcgaatacaataggagagtacgtgagatagtcgagcagagttggactgctgattgatctctcatgttggatttccatagtcagaacaaagcgtggatacattaggagagcatgtgagactgtcaagcatagttggactgctgattgatagctcaacgtttggtttggtttctatggaacgtcaaaaatagtccaatgtcgtgtctaaataacattgaacaccgcanatgtgttgcaaactact

SEQ ID NO: 23462 - DNA, 424 bp, Gossypium hirsutum
  Clone ID: LIB3147-005-Q1-K1-B2
ctcaaccctcgctcgtcgccagtccctgccaatttcagccaatagtaaaatccactcacagtcaccaaggacgcagagactggttcatgcagggaaggaagggagcaaaagcgacagaccactgtcatccagagacagaaatgccaaggcgactcaagtagagtggaggaggtgatcttattgagatttgaggagttgttggcactattaggttcaaaattcatatgctttgtggggtaaattaataaaactggctttgaaactgaaaccgggtcaataggatgtgtgcccggtttgagggcctttgaaaattaaaggtttttaagggttgggaagggaatttgatggtaaataaataaatttggaactttcaacattgccgaaaaaaattcatggtgggaataaatggctcaattccgttggt

SEQ ID NO: 23463 - DNA, 390 bp, Gossypium hirsutum
  unsure (1)..(390): unsure at all n locations; Clone ID: LIB3147-005-Q1-K1-B3
cccacgcgtccggttcttcatcatcatctaccctttcttgaattatatatagcagaactcatagcaacatttccaaatatatacatatcaaccacagttcaatacatcgatctatcgaccaatcaatcagctatcaacgttcaatcaatcatggtgtttgagaaagatcttaacctttatgccacggagctccgattaggcctaccaggctcatcggaggagtctattaggatcagtaacanaagagccttgcctgatatgaatgatgattctggtgttgcagctgctaaaaaaggggaccaaaaaactgttccacccaccaaggacaaagtggtaggggggccaccgttccgtccttccgaaaaaaccagccttcaaccaaagaaaact

SEQ ID NO: 23464 - DNA, 408 bp, Gossypium hirsutum
  Clone ID: LIB3147-005-Q1-K1-B4
ggtcctcaaggccagatcgttggtgggttcgtagctggctcgttggtagcagcgggcaacgtgtttatagtggctgctacgttcaacaacccttcgtaccatcggttgcccgttgaagaagaagggaggaacgcggggtcgtctggtggtgccggtggacagtccccacctttatccggtggcggtggggatagtagtcacggcggtggggcagattcttgtggggtttcgatgtacaacaatcacatgggtgggtaaaatgtcattggggctccaacagttaaaccaccaccacggccttactaaggacttacaagttttttttacctttttgggttttttttaaaaaaaaaattttattttttgaagccccggggaataaaggaaggttaaaattttttccccttt

SEQ ID NO: 23465 - DNA, 211 bp, Gossypium hirsutum
  Clone ID: LIB3147-005-Q1-K1-B5
cccacgcgttcgcccacgcgtccgatcttttcaagctagaaaagccgaggcttagcacttcttcaagtggaatgttatttaatgttgcattccatggtcattcatcttagttggaacttgaattttttgttatggaaatagggttttgtagctaccttgtgtattagcttctttaaccatgatggttaattattacgagttttgtagtgtt

SEQ ID NO: 23466 - DNA, 115 bp, Gossypium hirsutum
  Clone ID: LIB3147-005-Q1-K1-B6
ataaaaaaaaaaaaaaaaaataaaaaaaaaaaaaaaaaaaaaaaaaaaaataaaagggaaaaaaggaaaggggagagtggtttatggaaagaaatgtaaggtacaaatacatggg

SEQ ID NO: 23467 - DNA, 219 bp, Gossypium hirsutum
  unsure (1)..(219): unsure at all n locations; Clone ID: LIB3147-005-Q1-K1-B7
gcggattttgaagttgggaagggaatgtttatttgtagcatgctttatctgcgaaacaacacaactgaaagttaatgagcatgagaatgtaagattagcagaacaaattggtgttggtattcaccatgagaattgcatgcttaacatcaagaagacacttcaaattatcaaagtnnaaaaaaaaaaaaaaaaaaaaaaaaaaaaaaaaaggggcggccg

SEQ ID NO: 23468 - DNA, 366 bp, Gossypium hirsutum
  Clone ID: LIB3147-005-Q1-K1-B8
cccacgcgtccgcccacgcgtccgttctccttctccaacttgttgctgctgatcaactggtgacaagtgccagcaagcgcaagggaactgccccccctgcgaaaattgactgcggcggggcttgtgcggcgaggtgccgattatcatcgaggccacacctatgcaagatggcatgcgggacatgttgcgcacgctgcaactgtgttccaccggtgacagccggtaaccaagaaatgtgtccttgctatgctagcttgaccacccacgggggccgacgcaagtgcccttgagtgttaatcaacaatcggaacggattttttcttttgaaggtggtatgaaaataataaaccgatgcctgggttaagt

SEQ ID NO: 23469 - DNA, 153 bp, Gossypium hirsutum
  Clone ID: LIB3147-005-Q1-K1-C1
agtatttctgcaaatcttaccgttttttaaccgttcatcgaataatcgtagctcatacgggggtggtggacaaacggatcctgtagtccattgagcacctacagagccaaacgatatcaatggctgatgttgaaagaggcgacttctctgagc

SEQ ID NO: 23470 - DNA, 397 bp, Gossypium hirsutum
  Clone ID: LIB3147-005-Q1-K1-C10
cccacgcgtccgagtgtcgtatcatgtactattggtataagaagcagaaggacttacctgggtcggagatgggaggtttcactcgtattttacactctggaaatcctgacaatttgatgaacgagattcctactgtcatagtcgatcctcttccagcagggcttgatcggggatacatcgtcttaaatcgaccatgggcttttgtgcaatggctggaaaaggctacaattgaagaagaatacgtattgatggcagagcctgaccacatttttgtcactcccctacctaatctagcacatggaggatacccggctgcattcccctttttctacattaagccggatcagaacgaaaagttgttaaggaagtttttcccggaggagatgggaccggtgac

SEQ ID NO: 23471 - DNA, 429 bp, Gossypium hirsutum
  Clone ID: LIB3147-005-Q1-K1-C11
cccacgcgtccgcagcatgcacagggttagttattggcggaaaggtgcatgtgttgcacaagggattatctaaagtgcaagtcctggacaacgtgtgctctgggtggacagtggaggattacggttggctccagggtccaatggcagttgtacagggagccctatatgtgatgagccatggacttattttcaagcaagaaaaggaagtgagaaaggtcgtaacctcttcttcagagtttcgcaggagaatcgggtttgcaatgacaggagtgagagatgaaatttacgtgatcggaggcgtaattggcccggatcgatttaattgggatatcaaacccatgtctgttgttgatatcttgacagttgggggtgatagacctacatggcgtcaggctgctccaatgacaatgtgccgaggaacaatttttg

SEQ ID NO: 23472 - DNA, 377 bp, Gossypium hirsutum
  Clone ID: LIB3147-005-Q1-K1-C12
cccacgcgtccgcggacgcgtgggagaaacttttctttatttagcacatagcaaagtgtagtgaatagtgattgctccctttgattttggtagaagaaaattcatgtctggcctagcctaatctagcattgggttcttgttaagttccatgcttcttggctatgtctgaactttattattattatcgttaatgcaaatattcacttcacaacaaagaaaaaaaaaaaaaaaaaaaaaaaaaaaaaaaaaaaaaaaaaggaaggacaaaataaagaaaaaaaaaataacaaaaaacagaaaaggaaagaaacaacgatagaataaaggatagaaaaaaaaaaaacactggcacgaaatattactggggggcccctttt

SEQ ID NO: 23473 - DNA, 355 bp, Gossypium hirsutum
  Clone ID: LIB3147-005-Q1-K1-C2
gatctacgcaagcttgccgtcaatctcattccattccctcgcctgcatttctttatggttggctttgctccccttacttctcgagggtcacagcaatacagggctcttactgttcccgagctcactcaacaaatgtgggatgccaaaaacatgatgtgtgctgctgatcctcgccatgggcgatacttgactgcttcagccatgttccgtggcaagatgagcaccaaggaagttgatgaacaaatgattaatgtccagaataagaactcatcttaacttgggggaggggacccccaataatgggaagtctcctgttggggatatccctccaataggctggaaaatggcctaaccg

SEQ ID NO: 23474 - DNA, 397 bp, Gossypium hirsutum
  Clone ID: LIB3147-005-Q1-K1-C4
caaaggatgtgagagttgatgtcaagctgaacaaacatatctggagccgagggatccgaagtgttcctagaaggattagggtccgcattgcccgcaagagaaatgatgatgaagatgcgaaggaagagctctactctctagtaactgttcctgaaatcccagctgaaggactgaagggtttgggcactaagcccatcgatgatgatgatgagtaatttattgatgtttagttttatgaaaacttgcatttgttcaccaagaaatttaccccgattttgggctagtggtaccatttggtgaacctgggaaacatcattcctactcatatatttgggttattggtggcaaaaacttttaaacctggttcctggggcaatggaggttccaaccgattttt

SEQ ID NO: 23475 - DNA, 245 bp, Gossypium hirsutum
  unsure (1)..(245): unsure at all n locations; Clone ID: LIB3147-005-Q1-K1-C5
tcgtccacgcgtacgaaactctccacaaaggtaacctaattaaaattcctttttctccttttttgcccccctgaaatctaagttcttttatcgagaccaaagcagaaaagggaaaaaaaaagagggagatggggttgtcttttacaaagcttttcagccggcttttcgccaagaaggagatgcgtattttaatggtgggtcttgatgcagctggtaaaacntactatttatacaagctcaagctc

SEQ ID NO: 23476 - DNA, 396 bp, Gossypium hirsutum
  Clone ID: LIB3147-005-Q1-K1-C6
caagattgagcaggtggccgtgacccgtgatgaaatggaaatgtatgttgatttacatcctctcaccaacacaacccctttcactgtggtggaaagcttgtcagtggctaaagccttggtgctgttcaggcaagtcggactccggcatttgctcatcgtgccaaagtatcaaggtgcaggggtggctcctgtagttgggatcttgaccaggcaagacttgcgggcttacaacattttgagtgcctttcctcatctaaaaagacccaacctttcttaagggaaaaataaaccaaaggtccattaccggttttgtttgaaccacccttatttggttttttggtttcaaccttcttaagtcaagccttcacaattggacctattttttggagatttttt

SEQ ID NO: 23477 - DNA, 315 bp, Gossypium hirsutum
  Clone ID: LIB3147-005-Q1-K1-C8
cccacgcgtccgcccacgcgtccggcttcaaaaaaaatggagaagatgatggcgttgagatccgtttatagagcagcatgtttcagatcttcccgttttacccccatcgccgtcacggccgccgtcaaccacaatcgccacttggtttcccggagtttcttctctatctcatcgcctatcgcccctaatccgcctagaaacaccccttctggtgggaggtcgtcctttgcgttgagatcgggaagcatgcgcttttttagtgaaaatgcagctcattggcctgacttaaacaacactgaaattctgattgttttc

SEQ ID NO: 23478 - DNA, 432 bp, Gossypium hirsutum
  Clone ID: LIB3147-005-Q1-K1-C9
caagaagataagctgtttcagttaccatcggcttgtcaattgaagaacgctagcgtcagtgattgcccaaagcttcttgggttatctccgagctcaccagacgccgccatcttcaccaactcctcctctaaagcaacgacacccagtacttcagcaaccaccgcaacgccgtcttccgcggcggataaaaccgatagcaaatccagtggaaccaagcttggtccccacttcgtcggttccacggcggcgctactggttgctacagcggccgtgtttttccttgtattcccagctggatttgcttcaatagtttagggtttttgcatgggatttcgagatttgggggtttatttattgttgaagtccttttgtttttaaacagtctcagaaaaaagatggactgagttgacaattatgattattttcgtttat

SEQ ID NO: 23479 - DNA, 449 bp, Gossypium hirsutum
  Clone ID: LIB3147-005-Q1-K1-D10
atttgatcagcttggaaaggttaaaatgatcatggctacaaaccgacctgatgtacttgaccctgcacttcttcgtcctgggcggctagatagaaaaatagaaattccattgccaaatgaacaatcgagaatggaaatcctcaagatccatgctgctggcattgccaagcatggtgaaattgactatgaagctgttgttaaacttgctgagggttttaatggtgctgatctacgaaatgtttgcacggaggccggaatgtcagcgattcgtgcagaacgtgattatgtaatccatgaagatttcatgaaggcagtaagaaagttgaacgaagccaagaaactggaatctagtgcacactacagtactgattttgggaaagagtagagagattacttcttttccgttttggaagccatggagtacggggcagtgcattatattttagatg

SEQ ID NO: 23480 - DNA, 454 bp, Gossypium hirsutum
  Clone ID: LIB3147-005-Q1-K1-D11
accttgccccaaacaattatcatttcgtttgctgttcaggatgtgcagcaaattactgagcagtggagcttcatccctcgtgtggtcaaggagcttgccttcttagatgccagtaaccatggctcactcaccaaggaagatcttttgagagaggccaaggtatgcaagcaaatatacgaggatgaattaagccggataaacagtggttctttgaaaagaaaaaggccaaagactgatggaggtgaagaaggcaacaagggtgaaaccaaagccatttttgcatcaggttatgacagtgatgaaacaatcaagatgacggaggaagaaatcgagcttgcttataaaaatttcaattctggaactttgtaacttgagctttatgacgatgggctgaaaacaccggttttatgatataagctagtctgacttttggcctatgcattacagtacaaag

SEQ ID NO: 23481 - DNA, 446 bp, Gossypium hirsutum
  Clone ID: LIB3147-005-Q1-K1-D12
ctcaatttttcttgcgccgtcagtatccctcccagccaaaggtaagccatggttaaacataacaatgttgtgccaaatggccatttcaagaagcattggcagaactatgtgaaaacttggttcaatcagcctgcaaggaaggctagaagaagaattgcaaggcaaaagaaggccgtgaggatcttcccaaggccaactgctggacctctacgccctattgtccatggacagactttgaagtataacatgaagttgagagctggcaagggtttcacccttgaagagcttaaagctgcgggtatttcaaagaaacttgcacccaccatcggtatatcagttgatcaccgtcgtaagaaccgatctcttgaaggtcttcaagccaatgttcagaggcttaagacttacaaggccaaacttgttgtcttcccaagacgtgcacgcaagtc

SEQ ID NO: 23482 - DNA, 312 bp, Gossypium hirsutum
  Clone ID: LIB3147-005-Q1-K1-D2
gcagtttgttaggagccaagattctaatcgatgataatcccagatatgctgttgagtgtgctcaagttggaatcagagttctgctttttgattacgagaactcgtatccatggtgcaagacagagtcaattgataaacatcctttggtgactagggtaaataattgggaagaagcggagcaacaaatagctgcttggatttttagttctactatcccataggatggactctatagagccttccactgcatatcattgggtattggttcttatgccccgaacattcaataaggccaaaatggtggcttattgg

SEQ ID NO: 23483 - DNA, 280 bp, Gossypium hirsutum
  Clone ID: LIB3147-005-Q1-K1-D3
gggggcattccaacatcagcaaatccccaagtatatgccaaatggtccaaaaaccattccttcaagctcggagactctctcttgttcctatacccaccaagtcaagattcagtgatccaagtgacggaacaatcctacaacagttgtgacctcaaagatccaatcttgtacatgaacaatggcaactcactgttcaacatcactaagcctggggagtatttcttcaccagtggggagcctggtcactgtgaaaagaagcagaagctgtacatcgctgtgc

SEQ ID NO: 23484 - DNA, 351 bp, Gossypium hirsutum
  unsure (1)..(351): unsure at all n locations; Clone ID: LIB3147-005-Q1-K1-D4
agatcgcgagcggcccccttttatttttttttttcatttcccactctacaagtactgggactcagttattcacatggagactgatccatatgctatgcattcgcagctcctatattcccatggatccatagattgagaaggagaaagcaaaggactactctgtggcagcaacaactgttggcccttccaccttgaatttagcaccccatatctcctcttcttcagcaggcactgcaangatcttgctcttaggattctcatagcgttgtaatcctcctactgctggggagtagaaacagccttggggaaaagaagcaagagatttgccacaagcacctttcaacagttcgg

SEQ ID NO: 23485 - DNA, 343 bp, Gossypium hirsutum
  Clone ID: LIB3147-005-Q1-K1-D5
gattcttgttgctgtcaaaacatactggactggtgaagcaactcaaaaacagctctaactgggatttcaatcatctctcttttctgcacttcatttgtcacaatttttcgtcttgggaacagtcaaaatcactgaaatttcacccaagataagggtaaaagggtgggtttgattaaaattattgatggtataatttcattgatgcactgtaatactaagcagattctctttgtactacaaatctagcggatactgccattgtcttaagctaataaatatgtacactgtctgcagtattggaaaagaaggcttttttagccctccccctccagttttggatttt

SEQ ID NO: 23486 - DNA, 422 bp, Gossypium hirsutum
  Clone ID: LIB3147-005-Q1-K1-D6
ctggattactttcttatgggatttggcttatacaggtcgactctaagtgttagccggagaagcccattgagtccaacttgtatctccccggagcttctttcaccggaaagcatgggcttgaagttgaaaccgattaaaacccggatttcttaggaagtccaagagaagatgacagagaaagggcaagatcagcttcttcttctttttttgtttataataatataatatattatgtaagggtgtttatgagcattactagggatgtagatagagaaaggaagtagagagagaagataaaaaggagattattgtcaattctttaattagttgagttgaagtcattatcaatatctgtgaatcatgggaataattattttacaagagaaaacgctaataatggtatgctttacttttttcaaaaa

SEQ ID NO: 23487 - DNA, 397 bp, Gossypium hirsutum
  Clone ID: LIB3147-005-Q1-K1-D7
aattcccttctgccctacgaacttaaagaaatagttcatgccaacgctgaggtattggaagattttgcaaaactcaacatggttcttaaagtgaagagaggagacaaggaagagaagttcaaggtggaggtacaccataagaacgaagggacttaccatgtgaaccacatggagcaagaccagtcttgaaagctaacggtatggtaaaactgttaaaaagagtttgaatcttaatatgatgatatgactataaaaaagggtgaacctggtttcatgggtgcatctttactccggtggaaaaacctatgtttgtaaaaatgttcggaaaacatccccaattaaaaggccttggattatggggtaaacccttggaatataatggcgaaccttggaattt

SEQ ID NO: 23488 - DNA, 279 bp, Gossypium hirsutum
  Clone ID: LIB3147-005-Q1-K1-D8
gcgaggacgcgtgggtgattatctgccacctatcctcactacttaagggatctttactttgttcttaaacaataatcacttgtctagtttggtgttactggctttggtagtaacaataaaacttgtttttgtgcttgtgtcatagtctgcagagctgcagtgttgtgttggtattgcttttccgtcagctgtgataccgcgttgtgattttagtgctgactgggataataaaacttgtagcctccgtgtatgtgttctgcgggtattgctaattatctg

SEQ ID NO: 23489 - DNA, 318 bp, Gossypium hirsutum
  Clone ID: LIB3147-005-Q1-K1-D9
cccacgcgtccgcccacgcgtccgcggacgcgtgggcggacgcgtgggctgtcgcgtagagagacccgtgcttagtgaacagagaccagctgacatgtacacattgagcgcatattttttagcgaggactacaagcgaccttccacttgatctaatattaccagtacttttccttctggtagtctacttcatggctggcctgagactgagtgccggccccttttttctcagcatgcttacggtttttctctgcatcattgccgcccagggtcttggactagccattggtgccacactaatggacttaaagagggctac

SEQ ID NO: 23490 - DNA, 296 bp, Gossypium hirsutum
  unsure (1)..(296): unsure at all n locations; Clone ID: LIB3147-005-Q1-K1-E1
tacctttcctcaactttatatcgaaggagagttttttggtggctgcgatatcactgttgaagcatataaaaatggggaattgcaggaactattggagaaggcgatgtgctcttaaatacttatctgcattgaaaaacagatgtagttgtacttgttcgtaattagctgattacttattgtctcggctggcttaacttcttttgtgattgattntgttggtttcacattggaaataatccaagttggtggttggataataaaataaaaggatttaaatttggaccccatttttattc

SEQ ID NO: 23491 - DNA, 310 bp, Gossypium hirsutum
  Clone ID: LIB3147-005-Q1-K1-E10
cccacgcgtccggctgaaacttgggcggtatttatttttgatagattattgatatatgagatgcaattggcaaatttcgcaatgtgcatgtttggatcttttttggttctaggcttcaaacattatctagatttgatgaattaatcctcagagactgaagcatttgttgaagtccattgttaattgtgtatttcttattgtttttcttttttggcatttttatttttttaaattatcattcaattcgagagtgtcttgaatactcgacttgtatgaatatacatcatatttcagaagtttttttgattta

SEQ ID NO: 23492 - DNA, 432 bp, Gossypium hirsutum
  Clone ID: LIB3147-005-Q1-K1-E11
cccacgcgtccgaatccatcggatccattgaatggagaagctgctgcacttatgatgcgtgatcgtacatcttatgaacaaagagtgaaagagtattgtgagaagtatgccaagccagaagacattggagcagcccctgaagagaagtccagtgatgaagaactaagcgatgacgaatatgctgcctcggatgacgaggaaatagctggaaaagctgacccttaagctgatatgtgcctttagagaaaaaattcccttgtgttgtacataatttaaaacctgacaaacaacttgtggggggggggtatggaaaaattcctgcctcccccctctttgtgtctttattttcaatggatgatgatgtgtaaataaaaaatcccacttgctgtttaacatttgaaaaatattcattcacagtttgcaatttgcatc

SEQ ID NO: 23493 - DNA, 245 bp, Gossypium hirsutum
  Clone ID: LIB3147-005-Q1-K1-E12
attttctcctttttatctttaaaacacgcacccaaaaaaataaaaccctttgaaaaccaaagaaggaagaagaagatggtcgggcaaagcttaacgtaaaataataacttggttgggggaaatcgaaggaaaccttttttttgccgccgttttattggccaacgacggcagcgttgggccccaaagcgccattttccttaagttcaggcccgagaaaattaaggccttcttgattgactttattg

SEQ ID NO: 23494 - DNA, 281 bp, Gossypium hirsutum
  unsure (1)..(281): unsure at all n locations; Clone ID: LIB3147-005-Q1-K1-E2
cccacgcgtccgatctcaaatctcctcctcctcctcagaaatcttagtatcatcaccatggcctcaaatcccaaggtcttctttgacatgactatcggtggtcagcccgctggtcggattgtgatggagcttttcgcagattgcactcctcgcactgctgagaacttccgtgccctctgtaccggcgagaaaggcgtcggccgcagcggtaagcccctccactacaaaggctcctctttccatcgtgtgatccctaactntatgtgccaaggaggtgactt

SEQ ID NO: 23495 - DNA, 199 bp, Gossypium hirsutum
  unsure (1)..(199): unsure at all n locations; Clone ID: LIB3147-005-Q1-K1-E3
cggcgcgtgggccaaaatgaacctcgctcttgaatggggtttttcaaaaaaaaaaaaaaaaaaaaaaaaaaaaaaaaaaaaaaaaaaaaaagggcggncaatataaaagatccaaaggggggggcccttttataggaaccaaattttcttcccctggcgtgccccaaattaatttttttgtggggcaacttaaatcaat

SEQ ID NO: 23496 - DNA, 227 bp, Gossypium hirsutum
  Clone ID: LIB3147-005-Q1-K1-E4
ggacatgtatgtatagcataggtattctatttctaagttcagtttagtattttaattgtttgccaaaagtaaataattgtgcctgctgggtcagacaagggatatacacttgtggttctcttttgtggttggatttgtacagcactggatttgatcactttgcactttggatggacattgtgtgtaaacttttatacaaattaccaaatgatactcattttctaatt

SEQ ID NO: 23497 - DNA, 341 bp, Gossypium hirsutum
  Clone ID: LIB3147-005-Q1-K1-E6
tcaaaatcccgctcactcttacccgctcgttactccctccttttctcatctatgtcgcttgccctaaatctcccaaataaaatttagctacttttcttttctcgatctggaataaaagaaaaaaagaaactgaaaaaggcacaaagggtttttggaagcaaagcagagcgaagaactgtgtgaagccagagctatcgagcatgttcgagttttagcacatgaaatcgatggtcgtcaagaaaaggctactgaacaagatgctgttgaaatcttgatgtatgaaagtttacgttttgcttacggcttgcttgaggggtggacctttgtgacttctttcccct

SEQ ID NO: 23498 - DNA, 296 bp, Gossypium hirsutum
  Clone ID: LIB3147-005-Q1-K1-E7
cccacgcgtccgcaataagaaacttccagagatccgcaagtggctttttggtcaggttgctgcttgaaggcttaagatggtattgtttttctcagcagcttttgtcatcggccatagagcatagtgattaagttatttgttccatgtatttgctttctcatattgttctccccgaatagtttatttgtttgataaaagtcagtgaaactcttgttcgatgggtccgttttcatttggtggaatggggaaagtcctgtttttaattatggataaaaattggaaaggttggctattcc

SEQ ID NO: 23499 - DNA, 334 bp, Gossypium hirsutum
  Clone ID: LIB3147-005-Q1-K1-E8
tcgtgcattcaaaacacccccaaaaaaaattccaaaaaaatataaaagaaaaagaaaatgagccgaggaagtggaggcggctacgatcgtcatatcacaatcttctctcccgaaggtcgtcttttccaagtggagtatgcgtctaaggcagttaaagcagctgggatcacgtcgattggtgttcgaggcatagactctgtctgcgttgttactcaaaaaatagttcccgacaacctatgggatcaaactagggtcactcatcttttccctataaccaagtcccttggattgttggctactggcttgacagctgatgcaaggcccttggtccacc

SEQ ID NO: 23500 - DNA, 335 bp, Gossypium hirsutum
  Clone ID: LIB3147-005-Q1-K1-E9
gtgtttttaggcctccgttccatagactagttattatggccatttcttagtaataccaggggattgcgattcacatatgttgcttatttcacaggttaatgtatgttagtagaggaagaacaatctaaaatgccctgtactctgttgttttttatttaatttttatgtcttcttccttttgggatgttgacaaatattaccgtaggtactccttccattcacggggttttaatgcttttttattttattttatatatgtttcttccttattatctggtttctttgttttgttcaatgtttcgctcacagcttgattaataacatacattggatct

SEQ ID NO: 23501 - DNA, 402 bp, Gossypium hirsutum
  Clone ID: LIB3147-005-Q1-K1-F10
gtcaaaccctttggaaacgaggttgccgaacgcaccggatatggaaatctattctctgtatggagttggcctaccaactgaacgagcatatgtgtacaagttatcacctcatgccgagtgtagcattccgtttaagatcgatacatctgccgatgatgaagatacctgcctgagagacggtgtgtattccgtggacggggacgagacagtacctgttttaagtgcaggtttcatgtgcgctaaaggctggcgtggtaaaacccgatttaatccctccggaattcgaacatacattagggaatacaatcatttgcctccggccaacctattggaaggccgtggcacccttagcggtgcccatgtagatatcatgggaaactttgcattgatcgaagatgttat

SEQ ID NO: 23502 - DNA, 411 bp, Gossypium hirsutum
  Clone ID: LIB3147-005-Q1-K1-F11
cccacgcgtccgttcatggcgtctccttcgctcttacaatccacatcctcctccttccacggcccctcccctttccttgcaccaccattctccgcgcgcctgccctactctaaccccagaaatggatacgccggcgtcgtttcggtgagggcaacgggagagattgtgttggtggataaatcggaagccgaaaaaccctaccgtctcaaaactacttacctagacaaaattattcctttgcttaaagaagagttcaagtacaccaatattcaccaggttccaaagcttgaaaagattgtggtgaattgtgggattggagatgctgcccagaacgcgaaaggcttggaagccgcaatgaacgagatggcattgataacggggcaaagacctgtgaagacgcgagccaggaat

SEQ ID NO: 23503 - DNA, 384 bp, Gossypium hirsutum
  Clone ID: LIB3147-005-Q1-K1-F12
cccacgcgtccgatcgaagtttttgatcaccatgagtataaacaatgaagctcctttcacggggcgtccgctttccttgcaacaccattctccgcgcgcctgccctactctaaccccagaaatggatacgccggcgtcgtttccgtgagggcaacgggagagattgtgttggtggataaatcggaagccgaaaaaccctaccgcctcaaaactacttacctagacaaaattattcctttgcttaaagaagagttcaagtacaccaatattcaccaggttccaaagcttgaaaagattgtggtgaattgtgggattggagatgctgcccaaaacgcgaaaggcttggaagccgcaatgaacgagatggcattgataacggggcaa

SEQ ID NO: 23504 - DNA, 385 bp, Gossypium hirsutum
  Clone ID: LIB3147-005-Q1-K1-F2
cccacgcgtccgcccacgcgtccggtcatctctggatctgtaggagatatggcagagctaggaatctctgaagccttcaaagtcaagcaagccgtattgctatctgcaactgaggctgctgaaatgattctcagagttgatgaaatcatcacatgtgcgccaaggaagagagaagacagaatgtgaaaatgacgatagtcaacggcacgttcatttgttgtaatggattactgtctttggcatttgcttgttgattttgattgtttttcactgcagtatggttgaattctaaaactgaagtttgggggcttggttcaatttttaactgaaaaggaaaccattcttcattcctttaaaaatttaaacctaccaattttcaatggct

SEQ ID NO: 23505 - DNA, 111 bp, Gossypium hirsutum
  Clone ID: LIB3147-005-Q1-K1-F3
gaccccccctttaacggggccttaaacgccgggggtgtggggggttccccccacgggacccgttcacttggcaaggcccttacggccggttcttttggtttttttcctttc

SEQ ID NO: 23506 - DNA, 368 bp, Gossypium hirsutum
  unsure (1)..(368): unsure at all n locations; Clone ID: LIB3147-005-Q1-K1-F4
cccacgcgtccgcaaaaccatggcaggttagaagcaatagcatgggtggaccacctagtcttactaaaatccctcaactcgatttgcatcatcgtcatcccatgcctgttgattgcagtaattcgcagacaaatgtggcgcctgatttggagcttacacttgccgccccaaggccggctttagaagaaaacaagtcatccccaacaacaacaactctccttattagacccattagtgttacttgacaacttttcagttcatgctgataaagatgaacacagtactatagtaatcagtagtaattatttaattaattaatccttgtaatcataattagtagtatncctttcatcaatcgcccttgatgg

SEQ ID NO: 23507 - DNA, 242 bp, Gossypium hirsutum
  Clone ID: LIB3147-005-Q1-K1-F6
gcgggatctaagccttggaggtacacagggaaggaggctaacatgcaaagagaagacattaagatgcttgttcagaaatggtgggacatttacaacgacgagtcacttgattaccgtaccatcgcggctgtaggagggacatagaccgtgaacctgcgaccgttcctggcggcactctctgaagttggtgcagtccatttcgtggccgccccatctgcggcgtatatatgttgtgtaacgac

SEQ ID NO: 23508 - DNA, 296 bp, Gossypium hirsutum
  Clone ID: LIB3147-005-Q1-K1-F7
gggaaatcagctgctcgtattcaagatcatcttcggcctaatggtgcacatagatggcataactacatgaagacaccaaatgagatcaaattggatgaggctgctgttctgcattatacataccccaaattttctgatctaacttcaaggcacgatcgatgtggctgcaagcctacaaaggaggatgttaaaagatgtttcatgttagagtttgatagagctgcattcataattgcgtcaactgcaacggaggaggaaatgcttcgctggtaccgggagcatgtagtgtggactga

SEQ ID NO: 23509 - DNA, 334 bp, Gossypium hirsutum
  Clone ID: LIB3147-005-Q1-K1-F8
ggattattgaaggagggttgactttgatcttgatggaatatacacacctttcattatgttgtgatttgtgatgcccgctggtgtcactgtgatagagatgatgggtctttggagctggtggtcggcagacaaatgggtgcttatttccatcctttccatgcatctttcaaccatgttgctgagtagaatgtagctggagagattgagtcgctttattatactatttttcttcacatgaaaagcttccaccccctgctgataaacatgaacgcagttcgctattgtacaagaaattttaaataacgaagggaatcttgtttattactgggttttg

SEQ ID NO: 23510 - DNA, 365 bp, Gossypium hirsutum
  Clone ID: LIB3147-005-Q1-K1-F9
cccacgcgtccgtgattgcgctatgggtaacggactgttttgagaggaaagacatagagcgggatcttttggcgaagctacttgtcaacctgacaaggtcccatgatggtgtattgagccaggctgaacttgttaaagggtttgaatctgtcctgagtacattggaggacgcagtgaatgacgcgccaaaagctccagaatttctgggacgtatttttgggaaaatgatagtagaaaatgtgatgagtctgaaggagataggacggttaataggtgagggtggggaggaacctgggcagctagtggaaatagggctgggcggggatgttatgggaagcaccttggggatgattaaaagagagaaa

SEQ ID NO: 23511 - DNA, 279 bp, Gossypium hirsutum
  Clone ID: LIB3147-005-Q1-K1-G1
gagaattgggcgttggttgagaaggccaagtacttctatattgctggatttttccttactgtatctccggaatccatacagcttgttgctgaacacgctgctgcaaagaacaaggtgttctcaatgaatctttctgctccatttatttgcgagttcttcaaggatgcacaagagaaagcactaccgtatatggactttgtctttggcaacgaaactgaagcaagaaccttctcaaaggttcatggctgggagactgatgatgttgcagaaatagccctg

SEQ ID NO: 23512 - DNA, 431 bp, Gossypium hirsutum
  Clone ID: LIB3147-005-Q1-K1-G10
cggacgcgtgggaacagattgagagcctacagcgtcctattacaatggaagcaggctcgattgttctaatggatttattatggtctgatccaacagaaaatgatagtgtggaagggttgcgaccgaatgctcgaggtcctgggttggttactttcgggcctgatcgtgtcatggagttctgcaataacaatgatcttcagttgatcgttcgagctcatgagtgtgttatggatggctttgagcgctttgctcagggacatttaatcacccttttctcagcaactaattattgtggtaccgctaataatgctggtgcaatcttagttttgggtagagatctagtggtagttccgaaactcattcatcctttaccccctgcaatgtcatccccaagagcatcatcggaacgtcatatagaggatacatggatg

SEQ ID NO: 23513 - DNA, 350 bp, Gossypium hirsutum
  Clone ID: LIB3147-005-Q1-K1-G11
cccacgcgtccgggtcttgatgcctagagaattgttcaaggcagcccctactcctgccccggcaccagccccagaggaggcagcggatgcaccaaaagcatccaaatcaaaatctaagtcaaaatcgaagtcgaagtcagccccaacacctgaatctgatgcaccagcggattcgccggacgatgatccagctgatcagacagcagacgataatgctgcattgagttttaaaggtggaaggtttgttgctgttggattgaacttcttgctagtgtttttgttgctctaaggtttctagtttcattttttgttgtttcattttcattttcattttaaattatatagatact

SEQ ID NO: 23514 - DNA, 441 bp, Gossypium hirsutum
  Clone ID: LIB3147-005-Q1-K1-G12
cggacgcgtgggcggacgcgtgggctgaagctgccaaagctcgagaattcaaaccgaaacaaaaaagaaaaagagctcttaaacccccaaaatacctaaaaagaaatggctctgaaattcaaccccatcacttttcaatctcagaaactcccttcatttgctcttccaccaatggctggccttaggtctcccaagtttttcatggcctctactcttcgttctggttccaaagaggtcgatctcaagaagcctttcatgcctcctagcgaggtgcatgttcaggtcacacactcgatgccccctcagaagattgagatcttcaaatctttggaggactgggctgagaacaacattctaacttacctcaaaccagttgagaaatgttggcaaccccaagattttcttccggatcccgcgtcagatggatttcatgaagcaggt

SEQ ID NO: 23515 - DNA, 340 bp, Gossypium hirsutum
  unsure (1)..(340): unsure at all n locations; Clone ID: LIB3147-005-Q1-K1-G2
cccacgcgtccggaaattcgaacttgctggagcttctcctacagatatagctgttatgataaagaaccactgctccaacgtgactgcatcggaaggtgtaggattcaagattgatgagattgtacaggcatggaatgaaatgtatgatgtgaaaaggtggcagattggtgttccatcattccggctggaaccattgttccgtcgccgggctccaaagcttcaatctgccttggagcaagtctgagtttttcatgattggatattctttggaggcatttgacaagtacaagtgcttcagttttgtttaattctttttncaagatcagttttgtgtgctact

SEQ ID NO: 23516 - DNA, 402 bp, Gossypium hirsutum
  Clone ID: LIB3147-005-Q1-K1-G3
ggttaccgcacaagatgtgtccacaatgctgcgatgtgggcagaagaccgtaatcttcctcataaacaatggtggctacaccattgaagtcgagattcatgatggaccatacaatgtgatcaagaattggaactacactgtcttggttgatgcaattcataatggtgaaggcaagtgctggacagccaaagtattttgtgaggaagagcttatagaagcaattgagacggcaacgggagccaaaaaggactgcttattgcttattgaagtgatagttcacaaggccgatactaccaaaaacctgttggagggggggcttagggtttttgttgccattagccgacccccaaatcctaagtaaattttacagatggcttattgcattaacctttgaagtttttg

SEQ ID NO: 23517 - DNA, 397 bp, Gossypium hirsutum
  Clone ID: LIB3147-005-Q1-K1-G4
gaacttgacaccaaaactggatgcggaaaagcaagagtccttcaagaaaaacattgagggagcaaccaagtttttgctttcaaaattgaaggaccttcaatttttcgtaggagagagcatgcatgatgatggatgcttggtgtttgcttactacaaggatggtgctgttgacccaacatttttgtactttgcatatgcattgaaggaggtcaagtgctgaggtttgaagcaaagaaaaaaaaagtggttgctgaagaatttagtcctttttattattgcttttgtctcttgttttcagtactctgctaaagacataaattatttgtgggtgttgatgcttttggtttaattgttcgtagtttatcatggaatgggttctatttttatggggtggcgt

SEQ ID NO: 23518 - DNA, 403 bp, Gossypium hirsutum
  Clone ID: LIB3147-005-Q1-K1-G6
gcgatcagaagcaaaaatcgcgcgaggaaaacatgatgtcggggcagcaggaataagataagaaacccggcgatcagtccgtcgctcacatcagcctcaaagtcaaaggccaggacgggaatgaagctttcttcaggatcaaaagaagcgcacaagtgaagaagctcatgaatgcatattgcgaccgacaatctgtggatttcaactcgattgccttcttgttcgatggtcgccgcctgcgaggtgagcaaactccggacgagcttgagatggatgatggtgatgcgatcgatgctatgcttcaccataccggtggtactgtgtgaagcgagtgctactttgccgcatttagtatttgatgaagcaggtatggtccgattatgtaagatgtttccaatgtttt

SEQ ID NO: 23519 - DNA, 193 bp, Gossypium hirsutum
  unsure (1)..(193): unsure at all n locations; Clone ID: LIB3147-005-Q1-K1-G7
atcatgntttgaccttgcatggatgaaccggcagtcttactcatctttgcagactaatctactcttgtgaaaagattgtggttggtgcattcacttgtccgctctttattgaaacttcctttgggaatcggatgcttgatgtattagcacatgagttgcgattgctatcatgattaaaacgagctctgtgatt

SEQ ID NO: 23520 - DNA, 317 bp, Gossypium hirsutum
  Clone ID: LIB3147-005-Q1-K1-G8
tcggtcaaaccacgcatcggatgaagtgtatattggacagcgaacacccatctgggccactgatgcagttccgctacaagcttcggatgctttcaataggagacttgctgaaatctacggggtgatcttaaagatgaacatcgacaagaaactgaagaaccggatcggtcccgttaatgttccttataatttgctccatcccaccggtgaaattggaatttctggtaagggaattccaaatagcatctcaatataatttaagtaaaagatgaataaggaataatttgcatgaaataaatgttggtgcaacacatcaa

SEQ ID NO: 23521 - DNA, 275 bp, Gossypium hirsutum
  Clone ID: LIB3147-005-Q1-K1-G9
cccacgcgtccggaaaaagcctcgaaatgtggctagctaatagtggcaatgttcctttttcctctattgctgaagctgttctaaaattctgcaattatccaaaaggggggaaaaagggccttaaaaaacattgaggctttgctgtggcattgttattctgaaaaaaactttttattgcaggcaaggaccctcatttccaagctaactgaggagaaaaactctgccattcagcaaaatagcaagcttcagcaagaactggaactgttgagacgcga

SEQ ID NO: 23522 - DNA, 419 bp, Gossypium hirsutum
  Clone ID: LIB3147-005-Q1-K1-H1
agcatttacaggcattctcaggtcatcaaaagcctgtgtcatgtttaagttttaggcaaggtactacagatcttttttctggatcgtttgatcgaacaatcaagtattggaacatggaagaccgagcttacattgacacaatatgtggtcatgaaagtgaagtgttgacccttgattgcctaaggaaagaacgagtattgacagttggccctgatcaatgtatgatgtggtttaaggttctcgaccagcctgaatgggtttttcgtccccaaccaacatcttgggagtgctgttgcttaattaacaaggataaattttaatttgcctcggccaatggaagtttccacctttggaccgttttaaaaaaaaaaccgtgttttttggggaaaatggctattcctttgttgccggttggccaa

SEQ ID NO: 23523 - DNA, 374 bp, Gossypium hirsutum
  Clone ID: LIB3147-005-Q1-K1-H10
gaattgtctatctggggaatgtgtcataaccttcaaagggcatgaacatgctatccagtctctctctgtatcttccaatctggaatttctcgtttctgtttccatggacagcactgcacgtgtattcgaaatcaggaacttccattgataaaagtaagcctccaagatcctcacttcttgattaattagtgatttctttttttttacggtgaggaatttgcttacaagtatgtatactgaaatactttgtattctttttttcttttcaaatctttataagttgcgggcaacagtgaacatttaaaagaatatctcctaattgtaagcttttatgagtgcgtcttttgcatcagattaaagaaaatttaattttt

SEQ ID NO: 23524 - DNA, 440 bp, Gossypium hirsutum
  unsure (1)..(440): unsure at all n locations; Clone ID: LIB3147-005-Q1-K1-H11
atctagtcaagatcaagctagaaaataccaaaaaaagagaagagaagaagaagaagaaaaagaaggagaagaaggggctgaaagaaaagattgaagagaagttagaaggagaaaagaaagaagaggacacctcagttccagtagagaagtgcgatgagccagtagtccagccagagacgccagagaagaaaggtttcctcgagaagatcaaggagaaactccctggacaacacaagaaagctgaagaggccagtagcccagctccagccccagcagctgagccccatcacgaaggggagtcaaaggaaaagaagggaattctggagaagatcaaggagaagcttcctggtaaacactccaaatcagatgaagaaaaagaaaaggcttgagattcaagttcacataaaaatactgatgggnatgtgtgttctttaattggt

SEQ ID NO: 23525 - DNA, 311 bp, Gossypium hirsutum
  Clone ID: LIB3147-005-Q1-K1-H12
cgggatacaactagaaatttaagaacaagttgtaaaacaaagatatagtttgtcatattaaagacggtgattaaatgttgtttgatcacctgttattattattgttacttcactcttaggttgtctcatgtaatgctattattatacatgaatggttgtgttcaaattgaaatatcaacattcaagttgttacttcactcttaggttgtctcatgtaatgctattattatacatgaatggttgagttcaaattgcaatcttcagccccaacaactgatccccatcacgaaagggagtcaaaggaaaagaaa

SEQ ID NO: 23526 - DNA, 425 bp, Gossypium hirsutum
  Clone ID: LIB3147-005-Q1-K1-H2
agaaaaccctagccaacctttgcgcagctcgctaatgggggcttacaagtacgtgtcggagctatggaggaagaagcaatcggatgtgatgaggtttttacagagggtgaggtgctgggaataccgtcagcatccatccattgttagggtcaaccaccctactcgtcctgacaaggctcggcgcttgggttacaaggctaagcagggttatgtagtttatcgtgttcgagttagaaagggtggtcgaaagaggcctgttcccaaaggtattgtctatggtaagcccacaaaccaaggtgttacccaattgaagttccatcgcaacaagcggtctgttgcagaggagcgagctggtcgaaaattatgaggtctcagaagtgttaactcatactggatcaacgaggattctacttacaagtactttg

SEQ ID NO: 23527 - DNA, 124 bp, Gossypium hirsutum
  Clone ID: LIB3147-005-Q1-K1-H3
ttcaagtgttgtcttccaatgcaattggatttagtgaagtgtgtggggtccggtatgagaagagttcctccacctcctcattttcagtgtttccattgtgtaataaaaatctgctatcttcttc

SEQ ID NO: 23528 - DNA, 429 bp, Gossypium hirsutum
  Clone ID: LIB3147-005-Q1-K1-H4
ggaagcttgctgataactgtaccggccttcaaggtttccttgttttcaacgctgttggtggaggcactggatctggtcttggctccctccttttggagcgtttgtctgttgattatggcaagaaatccaagttgggtttcactgtcttcccatcaccccaggtctccacatctgttgttgagccctacaacagtgtcctctcaactcactcccttttggagcacactgatgtggctgttcttcttgacaatgaggctatctatgacatttgcaggcgctctcttgacattgagcgacccacttacaccaatcttaaccgtcttgtctcccaggtgatctcctctttgactgcttcacttaagttcgatggtgccttgaacgtggatgtaacaaaattccagaccaacttggtcccttacccaagaatac

SEQ ID NO: 23529 - DNA, 378 bp, Gossypium hirsutum
  Clone ID: LIB3147-005-Q1-K1-H5
atcactctcgaggtcgagagctctgacacgatcgacaacgtgaaagccaaaatccaagacaaggaaggcatcccgccagaccagcaacgtctcatcttcgccggaaagcaactcgaggacgggcggactttagccgattacaatatccagaaggaatcgactcttcatctggttctccgtcttcgaggtgggatgcagatcttcgtcaaaactttgaccggtaagaccattactttaaaagtggaaagctcggatccaatggataacgtgaaagcgaaaattcaggccaaaaaaggaattcccccaaatcaccaaaggtggattttggctggaaaacacctggaaaatggaaggactttggctgattccatttttcaa

SEQ ID NO: 23530 - DNA, 313 bp, Gossypium hirsutum
  Clone ID: LIB3147-005-Q1-K1-H6
acggtcacaggcctttgctaagtcttgctcgggcatgattgcagagaccaaacatacctgttcttgatgaagcaaccgcgggtgacgatgtcttaactgatgctcttattcagaaaacaattcgggaagaaatcacattgtgtaccatgctcatcattgttcacatacctaatacagtaactgactgtacatcgcttctcttgcttgagtctggcatggtgctggaatatgatacgccagacgaactatggctaaatgaaaggtgttgtttatgcgaagggctcaaaccacaggggatgctaatgcacaatac

SEQ ID NO: 23531 - DNA, 360 bp, Gossypium hirsutum
  Clone ID: LIB3147-005-Q1-K1-H7
gcgcataaatactccttatagttagtgtaatattaaacgacttttcattttgcttagcttttactctgtctttttacaggtgatggatgaatttgatcagaatgtacattttatcgaaattgatattgaggaagatccggagatagctgaagctgctggaattatgggtaccgcatgtgtgcgaggtttcaaaattaaaaaaatgctaaggactgtttctggggccaaattgaaaaaggattccctggaattattggagccaataaaagaataatggggggggttcttgggcatcattaatttgaaaatcaaatttggttcttatgaaaaggtaattgaattataaagctttccattatt

SEQ ID NO: 23532 - DNA, 158 bp, Gossypium hirsutum
  Clone ID: LIB3147-005-Q1-K1-H8
ttccggaattcccccatccacccacgcagtccgtgtcaagtgctgtcttccaacgcaattggattcattgaagtgtgtggggtccgggatgagaagagttcctccacctcctcattttcagtgtttccattgtgtgataaaaatctgctatcttcttc

SEQ ID NO: 23533 - DNA, 349 bp, Gossypium hirsutum
  Clone ID: LIB3147-005-Q1-K1-H9
cccacgcgtccggcttgtttctcaaaacattcgcagtggccgcctgagagctttcgcttttcgccgggcttgagagcttgtgctgcttttatccttccttggatgtctgagaccttttattatatctttataattgtttcacattttaaatataatttgtgattgaaatccagttatattcggtgagaaggagtttttaaattgatgtatatgtgttgatgatgacaaattcaaaggcttgtttctcaaaaacattcgcagtggccgcctaagagctatcgccttcgccaggcttgagagattgtccgatttatataataccgaaacccaaagaataacctgattcgag

SEQ ID NO: 23534 - DNA, 442 bp, Gossypium hirsutum
  unsure (1)..(442): unsure at all n locations; Clone ID: LIB3147-006-Q1-K1-A1
cccacgcgtccgaagtaatcgcggatcccgaagcagattcagctgaagatatcttgctgaaacagttcatgaagaaggatctggagaaggtattggacagtctgagtccaagggaaaagcaagtgattagatggaggttcggaatggaagatggaaggatgaaaacattgcaagaaatctgggagtcgatgggtgtaagcagggaaagaatccggcaaattgagctatgcgcttttcggaaattgaagaacaaaaggaggacaaaacatctacagcaatatttactttcatatgcctcatagatacttcatttctttccttctagttttcctttttcattcctacaagntcagagaaaacatgcaattttttttactgtatcaaacataaaatccaggtactaataacatttttttctcattaattatcaaatgtagatgaa

SEQ ID NO: 23535 - DNA, 434 bp, Gossypium hirsutum
  unsure (1)..(434): unsure at all n locations; Clone ID: LIB3147-006-Q1-K1-A10
gcgaatccagaagaatgcttgcagccatcatatagtcgattagatctttctgttgggggattgtgacatttaccagtactggtatacggctaggataatacctgaaagtaaaatgtagttttcttccaaggaggctactgcggagatgattgggggacagagaactcaaagaaagcccaagggtcctgtgaagcagctggagggcaaaaaatatataatatatgcaaataatcagaagcatatgtagaagagctgccctgcctttataggctactaccagatcaaaatgtgttgtacaaaagagggatgcaagtttaaattcggattaacgatactggacatggaaggttaatccctctcccttcttgcactatntctttttggtttccttttagaatgctaatgatctcagtttctagcatatatcactgtct

SEQ ID NO: 23536 - DNA, 320 bp, Gossypium hirsutum
  Clone ID: LIB3147-006-Q1-K1-A11
aattgctattaagcccaggccaaataatggatctctaaatgaggctaatcaaatcggcatcaaaagaagtcctgtgagaagtgttgaagagaggaaggaagagtatgacagagcacgggcacgtattttcagtagccctagtactcctgattctgacgattcttcacctcagaactctgttgatggaaaaaatgaatctcttatcagagatgagtttgaaaattaccggagctccatggttgatccagataaaaatatgactgtcagagatggtacatctcgagtagccattttcagagacagagagaaggatcgtactg

SEQ ID NO: 23537 - DNA, 426 bp, Gossypium hirsutum
  Clone ID: LIB3147-006-Q1-K1-A12
aatcagtattatagattgttcatccagagatctaagcttattagcttaagctataaaaatggtgaaaagatcgttgggctttttctttcttctcctcattgtcttagcctcccaatggggggtgcagccaactgaggcaagggtttgccagtcacaaagccataagttccacggtgcatgtgtgagtagccacaactgtgcgatggtgtgcagggacgaaggtttctccggcggcagatgtcgaggattccgtcgccgctgcttctgcactaagctttgctaatgcaagcttgcccttagctcatattttaaggatttttcttgagtaaaagacctttatgtttttcgtgcatgcatgtcaatgtttcaataaggtatctcctaattacttctgttttgggagatcattttcgtctctttttcatg

SEQ ID NO: 23538 - DNA, 392 bp, Gossypium hirsutum
  Clone ID: LIB3147-006-Q1-K1-A2
acgccacacgcgtgcgggcagtgtttcgcgaaggaggaacacgctgtggttggacatttggacaagaaatcgcaaatcatgcgtatcaactctacaggttggacacaatggctgcacaagccaaatttatggattggtgggaaaacaagtgccggaggtgatctttaaaaaaccttattgtgatgtcgaaagcagcacctggactcgctttccatttggttaaataatggcggcatgtcgaaaacataacgtttggtccaatgctttggcttttgttataaactttcgcatctgagtttgaaaggatttggagttgacttatttttcccttttggaagcaacttgacggaaccagttgtttacattacagtactttgaataaatttgacgct

SEQ ID NO: 23539 - DNA, 214 bp, Gossypium hirsutum
  unsure (1)..(214): unsure at all n locations; Clone ID: LIB3147-006-Q1-K1-A3
gacgcacacgcgtcgcaggtatgcagtagcgcataacctatatacccaacgactttatgaggttgaaatcacttgtgcctgcaaataacaaggctgacagggttctatactagatgtcacgatagaatacttacaaaccctncaaagaaaggttgcggaattggaatcttgcagaagtcagaagcagaacgaaaatgagcgaacatcaatacta

SEQ ID NO: 23540 - DNA, 201 bp, Gossypium hirsutum
  unsure (1)..(201): unsure at all n locations; Clone ID: LIB3147-006-Q1-K1-A4
gaattccggtcaccacgcgtccgtgagtgataatggtgaaattacatcccgggtatatggaatggtcaaaatggaaactaaccttaaagggatctaattttggagcaataataatagtccccaanaaaaaacaaaaaaaaaaaaacaaaaaaaaaaaagaaagagagcagaaaaaaaaaaaaaaaaaaaaattgggaaggg

SEQ ID NO: 23541 - DNA, 144 bp, Gossypium hirsutum
  Clone ID: LIB3147-006-Q1-K1-A5
tgctagtgccttcttcgttttcatggaggagttccgtgagcaatacaagaaggatcaccctaaaaacaaatccgttgccgctgtcgcaaagctggtggagataaatggaagagcttgtctgaagctgaaaaagcacccttatgt

SEQ ID NO: 23542 - DNA, 444 bp, Gossypium hirsutum
  Clone ID: LIB3147-006-Q1-K1-A6
cggccggaatcccggtcgccacgcgtcggctgcttggctaacttggggcaggctgctgtaattgaacttaattgcgagacggatttcgttgcaaggaatgaaattttgagtacttggctttggcattggcaaagaaagctttgtttgtccaaaactcttcccaacagattcctggggttttctcatttgggcctgagtgtttagaggacttaaaattaaatcttgaccatccaaaaattagtggggagacaaccattcaaaatgcagttacagaagtggctgcaatgatgggagagaatataaaactcaggaggggtgttgtgatgtcaacatcttcgcatggagttgtttctgcttacctccatagatgtcctcaaccaggtttgggtcgaattgctggaattttatctcttgaagttgagaatgagaattctcaatgggatg

SEQ ID NO: 23543 - DNA, 460 bp, Gossypium hirsutum
  Clone ID: LIB3147-006-Q1-K1-A7
acgctcgcgtagttccactcgtgcgggcagtcttccgtgaaggagtgaagtacggtgctggaattggacccggtgtctatgacatccactctcccagaataccatcaaccgaagagattgctgacagaattaacaagatgcttgccgtgctcgagaccaacatcttgtgggttaaccctgactgtgggctcaagactcgcaagtacgctgaggtgaaaccagccctgagcaacatggttgctgctgccaagctgctccgcacccaactcgccagcgccaagtgataggctcccgagatattggaaatccgaatcccataccattccagagagattaaaaagaaaaatggcaaagaagtttcttctatcttatcatttgaataactctggtggtgatgaaatatttgttacatgcccttggcgtccctttgatttcctttatttttggtgggtctttctct

SEQ ID NO: 23544 - DNA, 373 bp, Gossypium hirsutum
  unsure (1)..(373): unsure at all n locations; Clone ID: LIB3147-006-Q1-K1-A8
nnncnnncnnncnnncnnncnnnaannnnnnnnnnnnnntnttcccatttcattcttggatgtcaccataaaaggtggccaagttgagaaatctgtttgaggaatccaatttgcaggtcccagcttccttgtgtatataggttttcataattttcagggtcttgatgttagcagttttagaatgtttatcgagcaggtttactttgttaaaagcatttttcctttctcttttgcttatttcctcaagtgacacctaacttctctgcctgtacagaaaagtaacaaattgagcaatgaagtaattctttgtaattttataactgtgatgccagtccttggaaatgatatataaatataagtggtttttgggttt

SEQ ID NO: 23545 - DNA, 336 bp, Gossypium hirsutum
  Clone ID: LIB3147-006-Q1-K1-A9
ggaaaacattagaatatctgttattggagatctaactaagctccctaaggcccttcaggaactgatgatcaacttagaggaagccaccaagaacaatacactttttcaactaatcgtagcggtcagttacagcggacactatgatgttgttcaagcttgtcaaaggcttgctctgaaggcaaagtgtggtcttatcgaacccagtgacatcaatgtctctctaatggaacaggagctagaaacaaattgcacagaattcccccatcccgacctgcttataaggacaagtggagagttcagaattagcaatttcatgttatggcagctggcatatac

SEQ ID NO: 23546 - DNA, 486 bp, Gossypium hirsutum
  Clone ID: LIB3147-006-Q1-K1-B1
accggcccggaagacccagcgcgtacggacgctaccatcaaaacgaagaggaccgtgcagtttgttgactggtgcccaactggtttcaaatgcggtattaactatcagcccccagctgttgtccctggaggtgatcttgctaaggtgcagcgagctgtttgtatgataagcaataacacagcagtggcagaggtgtttgcacgcattgaccacaagtttgatctgatgtactcgaagagagcttttgtgcattggtatgttggagagggcatggaagaaggtgaattctcggaagcccgtgaggatctggctgctcttgagaaggattatgaagaagttggtgctgaaggtggagatgatgaagaggaaggtgaagaatattgatgctactatcgcaatatcatttattttgaagatgatgggttcaccctgtgagggtatcctgttctttcttattcgtgtgagggttctcaaattatgcctatg

SEQ ID NO: 23547 - DNA, 343 bp, Gossypium hirsutum
  unsure (1)..(343): unsure at all n locations; Clone ID: LIB3147-006-Q1-K1-B10
cccacgcgtccgcccacgcgtccggctttcgtcctttttgcaggtacggagtatgcgtggtggtcgtacggtgctggaggcgcatggaggctggggcttggctgcggcgcaaagtgggagaagccctagggtttctattagggttttaattttttgggcttgctgggctgtgaattcttgggtctagacttgtttgggcttgtattgggtttgtattgggtctgggacttgggttatgtaattggacattttaatggactgttaacgtttgatttanaaaaaaaaagactaaactttttatttcctcataaatataataaaagaaaatagggggggggcgttt

SEQ ID NO: 23548 - DNA, 83 bp, Gossypium hirsutum
  Clone ID: LIB3147-006-Q1-K1-B11
attttgacagcagctagactaagacattcttcaaaaaaaaaaaaaaaaaaaaaaaaaaaagaggaaaaaaaaaaaaaataaaa

SEQ ID NO: 23549 - DNA, 392 bp, Gossypium hirsutum
  Clone ID: LIB3147-006-Q1-K1-B12
actacgccttctacttgactcatacatttttctaaccttattcactcaaactgtgcaaagggataaaagatcgggggacttttcccttcttctcctcattgacttagcctaccaatgggcacttctcccaactgatgcaagggttttcctgtcacaaatccatatattccatcagtcatgagttattatccacatctgttcgatggtgtgcacggacgaatgtttttcctgccccttatttttagtatttcttccccgttgcttttgcactaatctttgctaatacaatcttgcccttagctcatattttaaggttttttcttgaaaaaaaagacctttatctttttttcagcatgcatgtcaaatttttaataatgtttctactaattact

SEQ ID NO: 23550 - DNA, 335 bp, Gossypium hirsutum
  Clone ID: LIB3147-006-Q1-K1-B2
acccacgcgtacgcctttgcttattacaacaaacctttttcttctttatttttcacctttcagttcaaagcatcaaacccagaaagcgtggctacaacaaactgcaaaaaaaaggaaacaattagagaaagaagctatgggagttggcttaaagatgacgatgaaaggaggcggaggagatcatgttggaagttgcgacaaagagaagatggggtttgaaagatacttgggagggttaaatttggagaatattgatgaatgacatgatgatgaagggttttgtacgataaaatatgtaacattttcagcatatgtattagaataaagttactggt

SEQ ID NO: 23551 - DNA, 394 bp, Gossypium hirsutum
  Clone ID: LIB3147-006-Q1-K1-B3
cggacgcgtgggcggacgcgtggggtggacaagtaacggataagtggaggaacttcatgaaagatcagataaaacgagcgaggatgttcttcgacgaggcagaaaagggtgtttccgagctaaatgcggcaagcagatggccggtgtgggcatcattgttgctgtatcgacagatattagacgtcattgaagaaaatgattataacaatttcagcaaaagagcgtatgtatggaaagtaaagaaatttgcttcactacctgtggcatatggaagagcacttatgggcacttccaaattgttctgaagttagtcatttttactttaatttcccctcttcttttttttttttttttagttttatccataaaatttgtttttgatttgttgcaatgc

SEQ ID NO: 23552 - DNA, 410 bp, Gossypium hirsutum
  Clone ID: LIB3147-006-Q1-K1-B6
cgccacgcgttcgacctggtgctggtacctggagtgcatatgacatgccgagagctcgaggacatcgctaggggggtttttaaaagcatgctgagatgaatcatctggtttatgaatttgcacctttcaaattttctggttcagcagttattcattggtggtggagttccctgggctcattatatgcgatggtgatgaagatgaagatgataactttgccatggtgtgcaacagctttgtttagctgtatgacagacaatccatttgaggaagaggtgtttttaaggtcttaaagctttatttactctagctattatgaatggagatagtttgagatgttttctagacatcatgtgaatcaatatcttcttattcccattttgtaatgcattctatgataccctttccac

SEQ ID NO: 23553 - DNA, 458 bp, Gossypium hirsutum
  unsure (1)..(458): unsure at all n locations; Clone ID: LIB3147-006-Q1-K1-B7
cccacgcgtccggggtttatgaggttccagctttgaaggttacagctcttaggtttactgagactgctagagctaggattgagaaggctggtggagaatgtttaacttttgaccaacttgctttgagggctccattgggtcagaacacggttctcctcagaggtccgaagaatgcacgtgaagcagtcaaacactttgggccggctcctggtgtgcctcacagccacactaagccatatgtgcgctcaaggggccggaagtttgagagggccagaggacgaaggaacagcaaggggtttagggtttaagatgacttcagtgtttgttctgaggcttgtttttcatttattactgcaaacaaaattntgctatacattangtttctctggcatttgtttacttcatgttggattttgtttaaatatggagtagttttctggttgacattgacattctta

SEQ ID NO: 23554 - DNA, 458 bp, Gossypium hirsutum
  Clone ID: LIB3147-006-Q1-K1-B8
gtttgaaaaagacacggaaacttggcgtcatcgggttgagagctattggaatctcttgagtccaaagattgaggatgacacttcgagaaatttgatggacatgaaagcaaactggggatcatttgcagctgctcttaaaagcaagaatgtttgggtgatgaatgttgtcccggaggatggaccaaacacacttaaggtgatatatgacagaggtctgattggcactactcataactggtgtgaagccttttccacataccctcgaacctatgatttacttcatgcttggactgtcttttctgatatcaagaagaaaggctgcagtgccgaggatttgttactcgagatggatcgtattctccgtccaagtggattcgttatcatccgggacaaacaaccagtgatagatttcgtaaagaaatatttatcagctttgcactgggaagcggtagcaacag

SEQ ID NO: 23555 - DNA, 283 bp, Gossypium hirsutum
  Clone ID: LIB3147-006-Q1-K1-B9
cccacgcgtacaacctgaatctggtacctgtagtgcatataacattcagagagctttaggacatcgctagtgtggttattaaaagcatgcttagatgatccatatggcttattaattttcaccttccaaattttttgtttcagcaaatatccattgattgaggagtttcctgagctcatgacataccacacttatgaggattaagaacataactttgtcatgcgctgcttaaacttgttttaaactcttttacccacaatcccttaaacgaagatgtgttttt

SEQ ID NO: 23556 - DNA, 374 bp, Gossypium hirsutum
  unsure (1)..(374): unsure at all n locations; Clone ID: LIB3147-006-Q1-K1-C1
cccacgcgtncgcccacgcctnccggcgaagataaggtcaagaaagtcacactaaaaggtggtgaaaccggcatctcctttgctttgcagggagttcggttggttaaggaatggcttcaataatactggcttacttggaataaggtgatatgtgggcttgttccaatcttcagctttcctgctcaattcatgacttaaaggcatggcattcctgggcggtgggcaggtttagtctgcttcagtattgcaacaccttgaggatgggaatgggaaagtggaactattggctattcggccactatttcttccagcagaacttgcaattgttaacaatttgataccaattgtaaatttcaaatatatttatttatttt

SEQ ID NO: 23557 - DNA, 421 bp, Gossypium hirsutum
  unsure (1)..(421): unsure at all n locations; Clone ID: LIB3147-006-Q1-K1-C10
gtgaccgtcaagctcactgtccagaaccgtcaggcgaaagtcatggttgtcccgtcggcggcggcgctggtgattaaggctttgaaggagcctgaaagggataggaagaagaccaaaaacatcaagcataatgggaacatcggccttgatgacgtcatcgagattgctaaagtaatgaggccaaggtcgatggccaaggacttaagaggtacggtgaaggagattctgggcacctgcgtctccgtgggatgtacggttgatggcaaagaccccaaggatttgcagcaggaaatcgacgatggcgatgtcgatgttcccctggagtgagaatgcttgntttctttttttcttttattatcaatattattctcccgttttactttcctttttttttaaattttgttagtttaatgtttggaca

SEQ ID NO: 23558 - DNA, 347 bp, Gossypium hirsutum
  Clone ID: LIB3147-006-Q1-K1-C11
cgcgagcgccgcccttttttttttttttttttttttttttttttttttttttagaaagagggggagatggaaaggaatgttttaaaaaaaacaaacaaggagggtaaagggccaaaagcaattaacaaaatgcgaacagcagcaaagaagacaaaaaccagaaagctaaagaaatgagggggcggcccatgaccaacgacttaacaggtgccgagaaagagaggcgaatgacacgcgccttcgagcgatgcacaaaggacggcgggagcacaaggacacgcagaggaaacggacaatggccagcgccatgatgcccgtagagagaatgcctgccctctctttctcgt

SEQ ID NO: 23559 - DNA, 291 bp, Gossypium hirsutum
  Clone ID: LIB3147-006-Q1-K1-C12
cccacgcgtccgctaatcctcgaacttacaccagctccaaaggctattcttttcccaagaagacagaggtcctcttgacaaaaatcataccccttaaggagaaagtggagatcatcgaaggaggcgacgccatggaagaatgaagcacttacgcaactgatgattagtatatcaactctctagcgttcatttatgctctatcaaagaactattttctgatcagtattgtgcaattgctcatctgtttgaccaaagattttgttggtaatcaaaccttttgagtttgtttta

SEQ ID NO: 23560 - DNA, 366 bp, Gossypium hirsutum
  unsure (1)..(366): unsure at all n locations; Clone ID: LIB3147-006-Q1-K1-C2
aacggaatctccttttcggtggctacaagaacgtgatcggcgcccgccgggcttcctggaggatcggttcttccatcgagcagaaagaggaaggacgtggcaacgccgatcatgtctccatcattcgtgagtacagggccaagatcgaggctgagttgtctgatatttgtgccggaattttgaagcttctcgaagagaagctcgttccggctgccgggaacggagattccaaggtcttttatctgaagatgaagggagattaccataggtacttggctgagttcaagactggtgatgaccggaaagccgctgctgagaatacgctctctgcgtataaatctgctcaggacattgcagnttccgagc

SEQ ID NO: 23561 - DNA, 362 bp, Gossypium hirsutum
  Clone ID: LIB3147-006-Q1-K1-C3
aaagaagaagaaggatgaggtagaagaagatgaagatgaagaatcagaagaggggaaggaaggaaagaagaaagaccaagaggcaaaggagaagaagaaagaaaagaagaagaaggatgaggtagaagaagctgaagaattagaagagggaaagaaagaaaagaagaaagacaaagaggccaaggagaagaagaaagaaaagaagaaggatgaagtagaaggtgaagagaaagaagaagaggaggagaagaaagacaaagaggataaagataggtagtacaaggatgaagaggaagaaatcgacggggaggaaaagaagaaagtcaaagtggaaaagaatgttgtgaagggtgagagtggca

SEQ ID NO: 23562 - DNA, 230 bp, Gossypium hirsutum
  unsure (1)..(230): unsure at all n locations; Clone ID: LIB3147-006-Q1-K1-C6
gatccctctatctgttataatttttattgtctcagtatcattaattttattgttctttttcccattttatgattcagaagaataattgacctcgaatcaatttcttaaagttatcagccgattgtgttgatccctctattgtaagcattaacctcaaactaagtaatgactggttccatttatcttgtactttggcattgaattcatttctcgtaattgcttttaanana

SEQ ID NO: 23563 - DNA, 440 bp, Gossypium hirsutum
  unsure (1)..(440): unsure at all n locations; Clone ID: LIB3147-006-Q1-K1-C7
tttcaccattcaaaacgacggcgaggtggtgacattggagactaaagttatgactgcaaagattacagggactttgaaggatgaagagcctttgattgtttacaaaattaacaaggtattgttgcccagggagttgtacaagccagtggaagcaccggctgagtcacccaagccatccaaatccaaatccaaatccaaacacaagatagccgatgcaccggaatccgatgcaccagcggagagtgatccagctgatgatcagacggcagacaatgacaatggngttgcaggactggacggtaggagattggtgatggggatgctgagcctgtgcatttgggtattgctgatttgaatacactgatatagaaatatttatcagattgatacaaatggtatgggagacaatactttttagccattggataacgagaaatggg

SEQ ID NO: 23564 - DNA, 455 bp, Gossypium hirsutum
  unsure (1)..(455): unsure at all n locations; Clone ID: LIB3147-006-Q1-K1-C8
cccacgcgtccggagaagcaattcgacaatgttgtagagagagttttgcaggaaacaaagagcggaaaagacgggctgcagaagacaacagagctaatcaggagtttcttcgagaaacatggaaaggatttcggcttgccaccatcagaatctaatgacgctgtgattcttctctacgatgcagtcttttctgaagtagaaaatgaagagagtgttgtgaaagcggacaatgaattcagggaatacatgaaagacgtcctcaagaagtttgcagaacagctngaagataatcccatctattgtgaccttgatgattaagggagtganttaacaatggatccggttcttcgggtgatggaggctgttcatatttatccggcatttgcttctccccacagggattcttatgtttataattatatgcttaaatatattggatgtatacctgatgatga

SEQ ID NO: 23565 - DNA, 448 bp, Gossypium hirsutum
  unsure (1)..(448): unsure at all n locations; Clone ID: LIB3147-006-Q1-K1-C9
gtggcactcggagttcatttcacggtctccggagtttcaatcaccggcctttacgttgccatcaagaacaacgttgacgttgaatctttgttcgacaaattacatctcccaggcttttccaatgatcaaaagaaccaaaatccaccatcacaatcgacggaatcagataggtttttgattgaagaaccgatcggggagaaatcaacggcggtggtcggtgagaagcagagaaatcggacggctgagcttgctgcttctaccggtggagcccttgcattggctgtgctttgtaacaaggcattgatccctgttagggttccgatcaccgtcgcgcttacgcctccgatcgcaaggtttttggctaagaggaggataattaagaatagtgtatgattntttacaacgaatttgcagtaattatttacttggaaatcattagaatagtact

SEQ ID NO: 23566 - DNA, 379 bp, Gossypium hirsutum
  Clone ID: LIB3147-006-Q1-K1-D1
gccggttctaccagcactggtgccagtccaagaagaaagcttttgtcaagtactcaaagcagtattaaagggaaaaaaggaagaagagtatcccagccccggtggaaaagatgaaaaaatatgccactggtattaaggtcttggctcacactcaaattaagaaaatgaaaggattggagcaaaaaaaagcacacctgatggagatccaagtcaatggtggaacaattgctgacaaggttgattttgcttacaagttctttgagaagcaagtccccattgatgctgttttccagaaggatgaaatgatcgatattattggtgtcacaaagggtaaaggttatgaaggtgttgtcactcgttggggtgtcacacgtctgcc

SEQ ID NO: 23567 - DNA, 106 bp, Gossypium hirsutum
  Clone ID: LIB3147-006-Q1-K1-D10
gttgacaatgcttggttgtgacaatctcgtatgcttggttttagaaccatgtatggggagacagattagttggtcgtaatattgattatactcaactttttggttt

SEQ ID NO: 23568 - DNA, 267 bp, Gossypium hirsutum
  unsure (1)..(267): unsure at all n locations; Clone ID: LIB3147-006-Q1-K1-D11
cccacgcgtncgtgaagcaccacaaagatggcgaaagctgatctgatgggtatttctttggtggtactaataacactgggtttcacggggggtgaccggtaccgaaagattgggggagggagaacagagataaccgacgtgaaaaccaacgaggaggtacaagagctggggaggttcgcggtggaagaatataaccggagccacggcctggggcggtggcggggatttgtaagtagtagtaacggaagaccggcggagttggttttt

SEQ ID NO: 23569 - DNA, 442 bp, Gossypium hirsutum
  Clone ID: LIB3147-006-Q1-K1-D2
ttgggcctgtcccttatgctctttatgggacgggtctaccttggcctaatcattatcctgggtaagcttttctggaaaaaaccagagaagccgtacaaatttgggcttattcaagaagatggggaacttcgtagctttaatttccccggcggtttaatccaaattccaatggtcaatggaaaagaaggttaccagaatctcattggagcagcttggtgactttcatggccgtcggatcgtctcgtgatccaagtacttgatgattcaactgaccctgcaatcaagttgatggttgagcaagagtgccaaagatgggcgagcaaaggcatcaacataacgtaccaaatcagggaaaatagaacgggttacaaggcccgagcttttgaagaaggttaaaacgaagctacgttaaacactgcgaatacgtggccattttcgatgc

SEQ ID NO: 23570 - DNA, 110 bp, Gossypium hirsutum
  unsure (1)..(110): unsure at all n locations; Clone ID: LIB3147-006-Q1-K1-D3
ntccgnnnaaaaaaaaaaaaaatgaaaaaaataaaaaaaaaaaaacataagaaaaaaaaaaaaaacagaaaaaaaaaaaaaaaaaaaaaaaaaaaaaaacaaaacaaagg

SEQ ID NO: 23571 - DNA, 134 bp, Gossypium hirsutum
  unsure (1)..(134): unsure at all n locations; Clone ID: LIB3147-006-Q1-K1-D4
tcgnccacgcgttcggccacgcgttcggcgagcctctcgtcacagaggaaaagtgaaggcattcccaaaggatgaccctaccaaaccttgcaagctcactggctttctggggtacaaggctggtatgacacaca

SEQ ID NO: 23572 - DNA, 453 bp, Gossypium hirsutum
  Clone ID: LIB3147-006-Q1-K1-D6
ctatgatattgttcttgatataacagttatcaataggaccaaggaaacccttcagaattggtgcttggagttggcaactatgggtgatctgaaactcgttgagcgtccacaaaactataccctagcccctgaatctagcaagcaaataaaagccaacatcaaggtgtcatcaaccgagaccggagtcatatttggcaacattgtttatgagacttcgaatgtgcttgaaagaactgttgttgttcttaatgacattcatattgatatcatggattatatttctcctgccgtttgtaccgatgctgcattcagaactatgtgggcagaatttgagtgggaaaacaaggttgctgttaacactgtaatccaagatgagaaggaattccttaatcatattatcaagtcaaccaatatgaagtgtctcacaccagtatctgcgctagatgatgagtg

SEQ ID NO: 23573 - DNA, 348 bp, Gossypium hirsutum
  Clone ID: LIB3147-006-Q1-K1-D7
agctaataaaggagcttgaagatgaccaacctccgaatgttcagaatcagaaccagacccagaaccatggtcatggtgtatattctgaaccggaagtctcataggaaatcatttcccctctcttgatgcaagcaaattattttcgaaatcctttatttttatatgttaaacgttttttctttttgttattttctcatattaacgattcctccccttctgaatcccacagcacagttttatgttggtatatttatgttttgtattcaagggagggacttatttacacctgtgtaaaatcaaagagttctacagtttctttaacccttgaatcaagattcaatctactgt

SEQ ID NO: 23574 - DNA, 302 bp, Gossypium hirsutum
  unsure (1)..(302): unsure at all n locations; Clone ID: LIB3147-006-Q1-K1-D8
aaaaaaaaaaaaaattatatatataaaaaaaaaaaaaaaaaaaaaaaaaaaaaaaagagaaaaatggaaattatagaagtgaaaaaagggtggaaagttttaaatggttaaaggattttttttgctttgttgtgaaagtatttgttttttttttgggtaaggtgtattttttttgttgggggaagttttacattggngtttctgggaaaggtttgtttttttacatgttatttgctttggacacttcccttttttccatctgtttatttgttaaaaggcgggactttttcctttcccatttt

SEQ ID NO: 23575 - DNA, 404 bp, Gossypium hirsutum
  unsure (1)..(404): unsure at all n locations; Clone ID: LIB3147-006-Q1-K1-D9
ctctgatataggtcttgatatatcacttatctataggaccaaagaaaccctggataattggtgcttggagtagggaactatagtttaactgaaactcgtttagcgaacacaaaactataccctagaccctgaatctactagcaaataaaagccaacattaatgtgtcatcaaccgagaccggagtcatattttgcaacattcgttatgagactttgtatgtgcttgaaagaactgttgttgttcttaatgacatttatattgatatcatggattatatttttcctgccgtttgtaccgatgcatgtattcatatctatgtggccataatttgagtgggaaaaaaaggtcgctnnntacactgttttccaagattagaaagaattcctttatcatattattaagt

SEQ ID NO: 23576 - DNA, 52 bp, Gossypium hirsutum
  unsure (1)..(52): unsure at all n locations; Clone ID: LIB3147-006-Q1-K1-E1
nncgccacgcgtnccggccacgcgtnccggtggatctactttttggacccaa

SEQ ID NO: 23577 - DNA, 430 bp, Gossypium hirsutum
  Clone ID: LIB3147-006-Q1-K1-E10
gaaaaacagaaggctgaggatgagtccactgattcagatggattttcagccgtccagaagaaggtctttgatgtcctttacaaggttgctgatattcctttcttaagtgaatacaagcttcaaatccttgatctcattgagaaggctgagaaacagccaaacatcaccattggtgtcatcgtctccattttggtgattatggtcacagttctcttcagacttcttttcggtggcaagaagcaaccaaaagtagagaagaaaccggaggttgctgagacatcaaacaatcaatcaaccagtggagaaaaggctgaagaagaagaagaagaagaagagaaagaaggaaccgctgctgctcctcgcaggaggaggcgtgacacttaaaacagaggtgaatggtgataatctgttttagtatgggcaaattttt

SEQ ID NO: 23578 - DNA, 366 bp, Gossypium hirsutum
  Clone ID: LIB3147-006-Q1-K1-E11
ccgtcgatgaggtcggcggtcctggcaaaagctacgatgatctcgctgcttctttgcctaccgatgactgccgttacgctgtctttgatttcgattttgtcaccgttgataactgtcggaaaagcaagatcttcttcattgcatggtccgtcgccttttctacttataccgtcactactgtacattttcttgtaggaactttattatttatacaaggataacatgttatatggcatacataaagaacaataatgaagagtattattttctttagtgggttaataataaccaaataattgaggtttatataagaatggtcgggaacatgtattaataatttatgaattggaatccaagtatctcttt

SEQ ID NO: 23579 - DNA, 409 bp, Gossypium hirsutum
  Clone ID: LIB3147-006-Q1-K1-E12
ccaacgttgatggaaagcagaagatcatgtttgctttgacctccatcaagggtattggaaggcgtttcgctaacattgtttgcaagaaggctgatgtcgacatgaacaagagggctggtgaattgactgcacaggagctggacaatctcatgaccattgttgcaaaccccaggcagtttaagatccctgactggtttttgaataggcagaaggattacaaggatgggaagtattcccaagttgtgtctaatgctctcgacatgaagttgagagatgacttggagcgattgaagaagatcaggaaccaccgtgggctgaggcactattggggtcttcgtgtccgtggtcagcacaccaagaccactggtcgcagaggaaagactgtaggtgtctctaagaagcgttgaat

SEQ ID NO: 23580 - DNA, 233 bp, Gossypium hirsutum
  Clone ID: LIB3147-006-Q1-K1-E2
tcgcccacgcgttcgtgcacgcctttgctatatttccaagcttaaggcccttattttgttagacaagatttcttcagaatggctttaacccacaactcatttcaagtgaagattatggtgggtttcttagccatcatgcttctcatgttctcagccgcagctgctctacccatacccctcttaaccttgggggtcggaagcttcttcaatattataacattttcgactcatat

SEQ ID NO: 23581 - DNA, 65 bp, Gossypium hirsutum
  Clone ID: LIB3147-006-Q1-K1-E4
cctgacttgaaaatgttcacattgcaagtatattttaaaacccagccactagaggtgaacaaacc

SEQ ID NO: 23582 - DNA, 329 bp, Gossypium hirsutum
  Clone ID: LIB3147-006-Q1-K1-E5
atttcatggctcggaaattctttgtcggtggcaactgggaaatgcaatgggacaactgaggaggttaaaaagatcattacaacattgaatgaagctgaagttccttctgaggatgttgtggaggttggtgtgagccctccatttgttttccttacctttgtgaaaagtctgttgcggtctgatttccatgttgctgctcagaactgttgggttcgcaaaggtggtgcttttaccggagaaattagtgctgagatgcttgtaatctgagcattccatgggttatcatcggtcactctgaaagaaaggctctcttgatgagtccaatgagt

SEQ ID NO: 23583 - DNA, 327 bp, Gossypium hirsutum
  unsure (1)..(327): unsure at all n locations; Clone ID: LIB3147-006-Q1-K1-E6
aaggttccaatactgacaccacaggcaatcaaagtataattgatgaatcccattctcaccttcttcttgttctacgtgtaagcttatttagcttctcaccagcaccagcatgttcatgttccttggngtttatttaccctatttatttttcaccattagtttagtctagtcaggtgattagatagccttatccagctgttgtgtcaagtagaatgttttgaatgtaatgtttactgagagagtgggactttcctcgaagtgatgatggatttgtttattgcttgtttatgtagcttcaactcagttctatttctgacccattcaagt

SEQ ID NO: 23584 - DNA, 456 bp, Gossypium hirsutum
  Clone ID: LIB3147-006-Q1-K1-E7
cgctgatgatcaccgccgtaagaacaaatcacttgaaggtcttcaagccaatgttcacaggcttaagacctacaaggccaaacttgttgtcttcccaaggcgtgctcgcaagttcaaggctggtgattcacctgccgaggagctcgcaactgcaacccaagtccaaggaccatacatgcctatttctcgtgagaagccttccgttgagctcgtgaaggtcaccgactacatgaaatcattcaaggcatacaacatgctccgtgttgaacgtacgaacaaacgtcatattggtgctaggatgaagaaggctgccgatgccgagaaggcagacaagatgtaaggttacccttttggggacagtgttttgatatttggcttgctaaaaagaccttacattttgtattcattttgtcaagtgaactgagacagctatagaaaactgtggtattatgacag

SEQ ID NO: 23585 - DNA, 452 bp, Gossypium hirsutum
  unsure (1)..(452): unsure at all n locations; Clone ID: LIB3147-006-Q1-K1-E8
cccacgcgtccgtatgaagccttacaacatgacaatgaagctcttctcaaagaggtaataattaataattaataacccaaagtgttcaattttcctacatctagtttgaacatgaaatgatttgttgcagataagagagttgcaggcaaagcatagtggagaaagcactgagacagagagcaatgtttcagtgaaagaagaagtgattgtatctgaaaatactgataacaaaacacttgaacaaagtgaaccagctgcagatctcaactacggatcagttgttcttggtgcaaccctttttccagacatgaaagatggatcatcggacagtgattccagtgctatcttaaatgaagacatcatcctcaacaccaacaccaacaagggcaatagccctaacaacgcggctttttcatcatctggnngtgtagagctagacagccaacaccacc

SEQ ID NO: 23586 - DNA, 319 bp, Gossypium hirsutum
  Clone ID: LIB3147-006-Q1-K1-E9
cccacgcgtccgaaccaaacaaaaccttccattgtcttctagaactatccaagcacactggtattaatcaatggctcgtacaaagcaaacagccaggaaatcaaccggtggaaaagctccacgtaagcaattggcgaccaaagccgcgaggaaatcagctccagccaccggaggagtgaagaagcctcaccgtttcaggccaagaacagtggcgttgagagaaatcaggaagtaccagaagagtaccgagcttttgatccgtaaacttccgttccaaaagctagtgagggaaatcgctcaagatttcaagacggatctg

SEQ ID NO: 23587 - DNA, 435 bp, Gossypium hirsutum
  unsure (1)..(435): unsure at all n locations; Clone ID: LIB3147-006-Q1-K1-F1
gatttttgggttggtgggtttggctcaagacaggggagtccaaaaaaaagaagaacctaccatctaagtgatgctcttaccaaaaccaacaactaagggtatcccaattcatgggccggcctattggtgtcccttgacaacccaggtatgtgggacatgagggctgcatcaatggaaaaggcatatctggggcaacaattttatctgagagtctggaaatcctgtcggagtcttgctaacgaatacgacattccttctaatgtcttactctgcggtaaagtagttgggcgccatccttagccagccggtatgcccctagtggctattgtctgttaccagtcatcagagtttgactgctgataaaatagattgagagaaagaaatnngattgaatgttggcccttattcatttgatatcttagaagcatagactaa

SEQ ID NO: 23588 - DNA, 311 bp, Gossypium hirsutum
  Clone ID: LIB3147-006-Q1-K1-F10
aaaaaaatgtaccatatgtaccccacgcgtgtgctgaagctcaaccaaaaaaccctagcacaagtgtactaattccccatttatcacatcctttacctcaaataccctttcttttaaaaccatatgatttgactaattaaatgtcaccttcttcatgaatctgcttattgctttcaaattatcttcagtcccattatctgacattggcacagacccacgtccacttttgcatttattgataaagcggtgaataacgaaaattccgttttcaaaggaaaaaaacggtatcagagattgaattgatcaccgag

SEQ ID NO: 23589 - DNA, 443 bp, Gossypium hirsutum
  Clone ID: LIB3147-006-Q1-K1-F11
catcgccgctaaaaacttgaaagaacaaaaaaatatcttgaaacccggagatgtcggacgaggagcaccatttcgaatccaaggccgacgccggcgcctctaaaacctttcctcagcaggccggtactatccgcaagaacggctatatcgtcataaaaaaccgcccatgcaaggttgttgaagtttccacctccaagactgggaagcatggtcatgctaagtgtcactttgtcggaatcgacatcttcactggcaagaaactggaagatattgttccatcttcccacaactgtgatgttccacatgtcaatcgtactgattaccagttgattgacatttctgaggacggatttgtgagtttgctgactgaaagtggagacaccaaggatgatttgaggcttccaactgatgacaacttgttgaaacagataaaggaaggtttt

SEQ ID NO: 23590 - DNA, 446 bp, Gossypium hirsutum
  unsure (1)..(446): unsure at all n locations; Clone ID: LIB3147-006-Q1-K1-F12
aagccagtcttcatcaggcgccgaactgatgaggatatcaagttagcaaacagtgttgatctagggtctcttcgtgatccacaggaggatgcagcaagggttaagaatccagagtggttaattgttgttggggtttgcacacatctgggttgcattcccttgccaaatgctggtgattatggtggatggttttgcccttgccatggttcccattatgatgtctctggcaggattcgcaagggtccagcaccatacaacctggaagtacccacttacaccttcttggatgagagcaaactgcttatcggttaagaattggtagcgttcctttgggttttcgtaattnttataattttattagataatgccgaaggtttgttacagaattttgcttttccttgccttggactttgagggcattgntagtgttgtttttgtaactggaa

SEQ ID NO: 23591 - DNA, 332 bp, Gossypium hirsutum
  unsure (1)..(332): unsure at all n locations; Clone ID: LIB3147-006-Q1-K1-F2
gccaccaaaaagggtcttacaaaactttctttatgctccagtgaatcatcaggaggggaagtctgtacttgtaaagcgtttcaaatgtcccgcagaatagcacacgtccacaagagatgagtagaagattccagttcagtcttgcacaaagggcatactacttcttcacacaatgttcgtcgtgccagatttccgtagtgaggcgccagattatggatcaaccgccatacatgtattttatttttgcaggaatatctaaagtccatagccccttatagaaatttttttactcctcggattcagaggataagttagatntattttgtaacaaa

SEQ ID NO: 23592 - DNA, 113 bp, Gossypium hirsutum
  unsure (1)..(113): unsure at all n locations; Clone ID: LIB3147-006-Q1-K1-F3
gtcaaatttaactttacgttttttgtcnnnnnaaannannnnnnnnnaaaaaaaaancctgtgttttaagtgaaatttttaanaataaaaattttaaaatttatctcatttaa

SEQ ID NO: 23593 - DNA, 229 bp, Gossypium hirsutum
  unsure (1)..(229): unsure at all n locations; Clone ID: LIB3147-006-Q1-K1-F5
cctatggtaggaaaattactaatgaacaaaattcctgngttacatgatgctcatcatatccacatggaccccaaagccaaaaacctgcctaaaacttcaagtttcatacgcgcgtgcagtgagtccttgggtaatgagagagggccatttgcaaggatggaaaaggtggagaacgttggtggagaatggaagctgagaaaggattaccctgtcagagtaaaaattgatg

SEQ ID NO: 23594 - DNA, 365 bp, Gossypium hirsutum
  Clone ID: LIB3147-006-Q1-K1-F6
cccacgcgtacgagagaggagctacatgttgtcaagagtcaggacgcagggcaaccttatatggccatgattattagataatgttcgtcctgatatgagaatagcatgggacgagccatttggacccggtttgcctgacataaggagtacttcagtcgaagaaggaattcatcattgtaatgctagcaactttggcctgcaaggttgtgtctgtacaagagatataagcgaagcaattctgatcagcgacgcaacggagactggtacagtttatatcaattctgctacggcacgtggacccgatcattttcctttccagggtctcaaagatagtggcattggatctcaaggaatcaccgacagta

SEQ ID NO: 23595 - DNA, 442 bp, Gossypium hirsutum
  Clone ID: LIB3147-006-Q1-K1-F7
cttctgaaagtgcttgctggaatagataccaacttcactgtcacttcaaaggcgtctgatgatgatggcgattttgccgaactttatgttttcaaatggacatcacttctcattcctccaaccacagtactcattatcaacctggtgggcattgtggccggcgtgtcgtatgctataaacagtggttaccaatcctggggtcctctttttggcaagcttttctttgccatctgggtgattgctcatttgtatcctttcttgaaaggtttggtgggtcgtcaaaatcgtaccccaacaattgtcatcgtgtggtctatacttctggcttccatcttctcattgctgtgggtgcgtatcgaccccttcacctcagaagctacaaaagctgctgctaatggtcaatgtggcatcaactgttagtttcgtttccggattattttat

SEQ ID NO: 23596 - DNA, 393 bp, Gossypium hirsutum
  Clone ID: LIB3147-006-Q1-K1-F8
cccacgcgtccgtgataccaatatttagaattagtactggaaaaattacatattggtatcagatataattatattaccaaacttcacatctttaaatgaacatcacttctcattactccaaccacagtactcattatcaacctggtgggcattgtggccggcgtgtcgtatgctataaacaggcgttaccaatcccgcggtcctctttttggcaagctttcctttgccatctgggtgattgctcatttgtatcctttcttgaaaggtttggtgggtcgtcaaaatcgtaccccaacaatcgtcatcgtgtggtctatacttctggcttccatcttctcattgctgtgggtgcatatcgacccctttaccttaaaagctacaaaagctgctgct

SEQ ID NO: 23597 - DNA, 441 bp, Gossypium hirsutum
  unsure (1)..(441): unsure at all n locations; Clone ID: LIB3147-006-Q1-K1-F9
caacattggtcactttgacaatgaaatcgatatgctcggtcttgagacctatcctggtgttaaacgcatcaccattaagcctcaaaccgataggtgggtcttccctgaaaccaaaaccggcatcattgtgttggctgaaggacgtctgatgaacttgggatgtgccactggacacccaagttttgtcatgtcctgctcgttcactaaccaggtgattgcccagctcgaactatggaaggagaaggcaactggaaaatatgagaagaaggtttacgtattgccaaagcacctcgacgagaaagttgctgcacttcacctcggcaagctcggagctaagctcactaagctcactaaagatcaagctgattacattagtgtgcctgttgaaggtccttacaagcctnctcattacaggtactgagagaagagtngatgagtttt

SEQ ID NO: 23598 - DNA, 166 bp, Gossypium hirsutum
  Clone ID: LIB3147-006-Q1-K1-G1
agttaaccatcaaagatattcttggctgaggactcttagcgtgagttacagcttattgctgggttttaatttttcataattgaaaaggtaatgctgtcatatattaagaaaaatattatatacttgctgaaatagataatggaaagtaaacaatattgatttgcct

SEQ ID NO: 23599 - DNA, 388 bp, Gossypium hirsutum
  Clone ID: LIB3147-006-Q1-K1-G10
accaacgcgacctatcgctacctgctaacataacgtcaacaagagacactacgggtcgtgacccttctaatgtaatatagatgaggcatatacaaccttgtccaccactaatgatgtctgactcgccctttacacctatgcaacagctgatggagtgacctaaatatgtgagagggatcacaccccaccgttacttaaaacgagcgtacactgagaacacatgtgtggacattactgccactacagctacatgaatcttgctgaacaacggacgacggacctatagcccggaatacagcgatgggaacaactgatcgatacatctaactgtgggcaagaggacatggtttactcttgttgcggctatacacaacagcaaatgcgatgg

SEQ ID NO: 23600 - DNA, 426 bp, Gossypium hirsutum
  unsure (1)..(426): unsure at all n locations; Clone ID: LIB3147-006-Q1-K1-G11
agactatttttggttcttccggttgcaatcttagatgccttcttcattctttggatatttacttcactctcttcaactttaaataaacttcagacaagaaggatggtggcaaagctggatatatacaggaagttcacaaatgcattggcagtagcagttattgtctctgtcggttggatttgctacgagatttacttcaaggcaaatgatgtttacaacgagcagtggcagaatgcttggatcatcccagccttctggcaaatcttatctttctctctgctatgtgtcatctgtgttctttgggctccttctcagaattctacgcggtatgcttactctggtgaagcaaatgaagattttgacaaagatgatactaatttgacactcataaaaccctctccaacaccttcaaaagattntagaact

SEQ ID NO: 23601 - DNA, 377 bp, Gossypium hirsutum
  unsure (1)..(377): unsure at all n locations; Clone ID: LIB3147-006-Q1-K1-G2
cggacgcgtgggcttcactgggctccaagatttggtttggctgggctgctctatttcttccttctctggtagagggttggaatttagcaaaaacatatgagttatctgggtgtgggagttagccctgggaatgttcccgtctaccatggcactaatttgaaggtcattgatagaagaatgagagttgcagaacttgttttgaagtgtctcatatgtggcttaagtgttcttgcagctgttcttgttggaacaaatacccaaatcaaagaaatcttcactattcaaaagagagctagatttacagacatgaaagctctgggtgttntggtggcggccaacggcataactgcagcttactcattggtacaaggagtgcg

SEQ ID NO: 23602 - DNA, 444 bp, Gossypium hirsutum
  Clone ID: LIB3147-006-Q1-K1-G4
acctatcgctacctgcgagcttacgtcaacagcgacaccacaggtcgtgaccctttccaggtcatctgctccggcatctccgccgctctccaccactattatcctctggctggatctctccgccgatccagcaacggtaggtatgagcttttctgtgagttggatcaaagcctaccgctcgtcagtgccagcgtggactgcacattggagtctgtaaatcaccttgatgaccctgatatgaattcggctgaacaactggctaccgacccaagcccggaagacacgttggtcaacccctgtactttacagctaacggtgttcaaatgtggtgggtttactcttggggcggctatacacaatgctttatgcgatgggcttggcgcgacccagttgttctgtatggcagctgatatcgcacgtggggtggacaaagtagaatatcag

SEQ ID NO: 23603 - DNA, 171 bp, Gossypium hirsutum
  Clone ID: LIB3147-006-Q1-K1-G5
aaatttttcagggctaatctgcaggtttgggttcgagttatgtgagattgttatctttaattttagtatttttgttgatgatgtttgtaactgatagttcatggatgtattgtgatcagtgtagagacaattgttatgtcggttagaaaaaactaatattttgcaagcatc

SEQ ID NO: 23604 - DNA, 453 bp, Gossypium hirsutum
  unsure (1)..(453): unsure at all n locations; Clone ID: LIB3147-006-Q1-K1-G6
cccacgcgtncgcccacgcgtncgtgcaaccgtcaaataacagtttcttacgcatataagagagacaccaaaggggagcgtcatggcaccccagcagagagggttttggctgcaagcaatccaagttcccagaagagcaggccccatactttgtttgcgagtggacctccaacacttccttctggtccccaggccaatggtggtataggagcaccggtgccgccacgaccttttccaaatggcactgttcctcctggctctatgccagtagcacggcctccaccccctcaaaatgttccctacccacaaatgcagcttgccggacagtcaccttggcagggtcagccacagcatcttggacaacaaattccacctccagtcatgcctcctcctccaatgcagtacagaccacctatgccaaacatgccaccaccaccacccccacaatcagta

SEQ ID NO: 23605 - DNA, 277 bp, Gossypium hirsutum
  Clone ID: LIB3147-006-Q1-K1-G7
cccacgcgtccggttcattgatatcataaaatcagctgaggtgaagaagaatgcctaaggttttcggttggaagctttgagagtacttgcagtagctgttgcttgggaatggaaggtttaggatctgttccataataagagttttataaagaaaattaaatactaattttcaaggaataattcacgcttttattcacaccagtaccttaaactggattttctgtactattaacaattttagtgtttcccgagaaatgcatttttcatttcaatttac

SEQ ID NO: 23606 - DNA, 404 bp, Gossypium hirsutum
  Clone ID: LIB3147-006-Q1-K1-G8
cggacgcgtgggcttcaaccctttcaaattgaagctcatcagtgtggatcgatcttttgccgagaagcactatgctgacctgtctgcaaaacccttctttaatgggctcgtagagtacattatctccggtccggtcgttgctatgatttgggaaggtaagaatgttgttaccacaggtcgcaagattatcggagccacaaacccagctgaatctgctccgggaacaatccgtggtgactttgcaattgacattgggaggaatgtgatccatgggagtgattccgtcgagagtgcaaggaaggaaatcgccctttggttccctgaatgccctgttaactggcagagcagccttcacccttggatctacgagtagagatcatttggtcgaagctattggccgtcat

SEQ ID NO: 23607 - DNA, 377 bp, Gossypium hirsutum
  Clone ID: LIB3147-006-Q1-K1-G9
gccaaccggacgacaaactcgattactggctgcatttatgccagtcaagctatcacttatgctgagactgctctcgaacatgggcttatgcacggaaaccaggacgaacgacgtcgggatctatgcacctacatgtaaacctacaggatgcccgagtgaatgctcgagtgacgactggaatggctatgagattggctaatacaattgcaccatctgggtgactacttgaccgactaatgatataactctcgatgaggccatcaggactggcactattaatgtatttgactacatttaaggctacatccaatgcaagcaccaaatcgagatgacagctgcggtgatcactgcagttataactggcgatggacccttct

SEQ ID NO: 23608 - DNA, 340 bp, Gossypium hirsutum
  Clone ID: LIB3147-006-Q1-K1-H1
ggatgagggatgaagtaatggaattcggtgggggcagggtctgtaattcctcgcttgagtccggccctttacaattgtaatgatctgaaatagcgacttctgattattctcgagtcttcattggacagactcgattgaaggatttcagctggagatgtatagagcctgagaagttatgataataaggcttgtgtgcactattaaatattgaccctttttgcaaaattgtgattttgtatatctttaaattaggaactatctaaatgcggtcacaaacttagtaatttatatagaaggtaacaatttcttatgaattctatatagatgtatcttgtttaaa

SEQ ID NO: 23609 - DNA, 431 bp, Gossypium hirsutum
  unsure (1)..(431): unsure at all n locations; Clone ID: LIB3147-006-Q1-K1-H10
gccagaaaggtgatcattaccaaggattcgactcaactaattgctgaggcagcctcaaaggatgagatacaaactagggtggcacaactaaaaaaaagagctagttcagacagattctgtctatgattcagaaaaattggcagaaaggattgccaaactatctggtggtgttgcagtcattaaggtgggggctgcaacagagactgaacttgaggatcgtaagctacggattgaagatgcgaagaatgctacatttgctgccatagaggaaggaattgtgcctggtggtggtgctgcattagttcatctttcaagttgtgttcctgcaattaaggagaagcttgaagacgcagatgagcgcttgggagctgacattgtgcagaaggctctggttgcaccagcttcgttgatagctcaaaatgcangaatgg

SEQ ID NO: 23610 - DNA, 395 bp, Gossypium hirsutum
  unsure (1)..(395): unsure at all n locations; Clone ID: LIB3147-006-Q1-K1-H11
nnnnnnnnnnnnnnncggaaagaggaaatagaatgagaggagaggagaggaaagtggagttttaaaacttgagagaaaggggagagttaataatttccaaagacatggggaacagctgaagatgttgtttggcttgtgatcttccctgtggagctctagacttgatccgtatagtccatttgaatgggtacgttgaatagcttactggtgctatcacagctgctgagatcctcagaggcaaccctaaccatgtcctaagcacaccaacctatcaaggtgttctacgtagaatgttgatcctctctcccgattccgagctcaaaagacgcaacatctactgtttgattccatgcccaccgtcactgccgcaaaagaaaaaaactggtgtgcaccac

SEQ ID NO: 23611 - DNA, 388 bp, Gossypium hirsutum
  Clone ID: LIB3147-006-Q1-K1-H12
tcgagaacgggagcgggccgcctggtgcacggtcaggtgagtactacactaatgccactgatctctcatgcagcatcatcaagattctcattctcagctacccctccttcaaccgccactgccattctttcatccaaacctcaaaacacaacagcagtccacagtctatgttttgctgcctcaaccagtaacaccatcaacacccctcaacatagtcggtcgtaagttcaattgtaccacaacgacggcgattacaataataatttaaatattgattcaatatacattaagacatggtagtttctgacttggtccgtgaactaaaaagagtatattctctctgtctagcattaaggcatgtaggaccacaactttcatatattcttat

SEQ ID NO: 23612 - DNA, 264 bp, Gossypium hirsutum
  unsure (1)..(264): unsure at all n locations; Clone ID: LIB3147-006-Q1-K1-H2
cccacgcgtncgcaagctgtggtgggtggtaagtccaggtggggaaaaagtaggaaatggccttagccacatatgaataaatgcgttcatgtcatgtgaaagatgcattggaaaacttttgcattaatatgctatgaattaaaatcctatcagatatatttgcaagatgtcaaaaggaaatggcaacgacgtgtaatggtcaagtccccaacaaanaanaaagagcttgatgatgggcttatattaaatatttgaccctttatt

SEQ ID NO: 23613 - DNA, 330 bp, Gossypium hirsutum
  unsure (1)..(330): unsure at all n locations; Clone ID: LIB3147-006-Q1-K1-H4
tgatggtgggctacattttgcatttagttggctttttttggtgtgccgtgttaagtgaactcaaaagtctggtttatgtcggngaagttagggatcattgtacgatggtctacttgatattaatgtactattattttagcctttcaccgtatcgccaccattaagatgacgggccctatggggctggcggtgggcggacaattggtgcttaattccctacttgcttaccttccatcttttaagcattttgcttaagaggatgtttggagctggagaactgtattgggtgcttattattatttaatattcaagggttttgagaacattaat

SEQ ID NO: 23614 - DNA, 425 bp, Gossypium hirsutum
  Clone ID: LIB3147-006-Q1-K1-H5
gcgcgcatgcgttcggaaagaccattggaaggcctcagcctctgcagtatggtgtcaatgcaggcttcttaagccgattatacagtgattatcttgatgctgctgatacacctggatggtattgtggtcccaatttctattcaactgatgtcttgcgtgaatttgccaaaacccaaatggattacatccttggcaaaaatcctccggaaatgagctttcgtgtgggttttggtaaccattacccaaaacatgttcaccatagaggtgcatctatccctaagaataagatcagatataactgtaaggggggatggaaatggagggattcaaaaaagccaaacccgaatacgcttgtgagagccatggttgctggacctgacaagcatgatggatttcacgatgttcgcacaactacaactacactg

SEQ ID NO: 23615 - DNA, 444 bp, Gossypium hirsutum
  Clone ID: LIB3147-006-Q1-K1-H7
cccacgcgtccgcttggctaactttttgttctactactaaacctttgtatcaggttttggaattaatcaagaaataataatacttaacctcttaaacaaaaaaaaaaaaaaaaaaaaaaaaaaaaaaaaaaaaaaaaaaaaaaaaaaaaaaaaaaaaaaaaaaaaaaaaaaaaaaaaaaaaaaaaaaaaaaaaaaaaaaaaaaaaaaaaaaaaaaaaaaaaaaaaaggggggggcccttttaaaagaaccaaatttaattccccggggttggaaagaaaaaatttttttaatggggccccaaaaataaaatcaagggcccgggtttaaaaaagggggaaagggaaaaaccctggggttaccaaaataaaaggctttgaaaaaaaacccctttttcaaaaggggggaaaaaaaaaaaaaggccccaacaaatcccttttcaaaaa

SEQ ID NO: 23616 - DNA, 445 bp, Gossypium hirsutum
  unsure (1)..(445): unsure at all n locations; Clone ID: LIB3147-006-Q1-K1-H8
gtcgccggcgcccatcaccgttgcgtcgtcccgctcgttcctccatcaaaacactttcgtcattccggtcaagctgctgtttcctctgttgccggcgttcatcactgccgtcgtcttctccgctgcagcattcagtcgtcgccgtcccgctgtgccgccggtcaatctcatccaattccgggtgattctagatgggagaggctcgggatggggtgaaggtaaagagagtggttttcgttacagtgggaacaacatgttttgatgcacttgttaaagtggcggattctcaggaagttaaggatgagttatatagaagagggtatactgatcttctcattcaaatgggtcgagggtcatatcttcctatnaagtctactggtgatgatggatctttggctgtagactacttcacattttcatcgagcattgggactatctgagatct

SEQ ID NO: 23617 - DNA, 241 bp, Gossypium hirsutum
  Clone ID: LIB3147-006-Q1-K1-H9
ctccatactgtaatttttatttttgagggcatgtttaagctctatagtttcttgtaaaaatttttagtaaaaaaaaaaaaaaaaaaaaaaaaaaaaaaaaaaaaaggaaaaaaaaaaaaaaaaaaaaaaaaaaaaaaaaaacaaacaagcgaaagcaaaaaaaaaaaaaaagggcaacctaaataaaattcccaggcctacatgttacaacgtctagactaaaaaaaccctgtcgtgtccc

SEQ ID NO: 23618 - DNA, 366 bp, Gossypium hirsutum
  Clone ID: LIB3147-007-Q1-K1-A1
cccacgcgtccggaaggatgggttgcttaacactgcttgcgggactccaaattatgttgctccggaggttttcactcatgaactcagaaaataattagttgtattgatgcaactcttttttttttttttttgccttttcattctggtatctgatatttttattttcaggtgttcaaagataaaggttatgatggtacatcatctgatatttggtattgcggagttattctctttattctcatggctggttatttgccttttgagccaagccttataggcttgtataagaaaatctgggaggcttctttcagttatccatcatggttttcatctggtgctaggaatttgattaagcgtattcttgat

SEQ ID NO: 23619 - DNA, 305 bp, Gossypium hirsutum
  Clone ID: LIB3147-007-Q1-K1-A10
ctccttcttcttctcctacttgtcatgcatggcgatggaagtggaaccgaggagatggctgatgatttaatctccaaagggaccagtgttctgaggctccatagcatggatcatgatcggcaaactgaagatgatggcactacagttcaatcaagggtagatccattatctcacatggatcacatggatctatcagtgatggtgtttttcaccttgaaagatctcaaagttgggaactcaatgccgatctattttcgtaagaaagactcttcaaaatcccctcggtttttgcctaaacaagaagc

SEQ ID NO: 23620 - DNA, 374 bp, Gossypium hirsutum
  Clone ID: LIB3147-007-Q1-K1-A11
gttgagtagccgcaacaatgccaagttgagcttggttcaggcgacgaaggaatcgtccacggcgagtacgaatgatagtgctgctgttttttctggtgaaaatctccaccagatagctactaacggcaaggcaacaaacattgtatggcacaaaagttcagttggtaaagttcatcggcaagaggtgcttcagcaaaagggttgtgtcatatggattacaggtctcagtcgctcaagaaagagcactttggcgtgtgcactgtgtcaagccttgtattcaaggggaaagttggcttacatccttgatggtgataatgttcggcatggtttaaaccgggaccttagttttaaagcaaaagatcgggcagaaaaca

SEQ ID NO: 23621 - DNA, 399 bp, Gossypium hirsutum
  Clone ID: LIB3147-007-Q1-K1-A12
cccacgcgtccgggagaagtttcaaactttgcgtctgcaagagcaaaagtattttgatgacatggttcagaagtgcaaggatgttggtgccaccttggttatctgtcaatgggggtttgatgatgaggcaaatcatttattaatgcaccggaacttgcctgctgtcagatgggttggtggtgtggagttggagctcatagcaatagctacaggtggaaggattgtaccaaggttccaggagttgaccccagaaaagttgggaagggctggtttggtgagaaagaaatcttttggcaccacaaaagataaaatgttgtacattgaacattgtgcaaattccatggctgtaaccatatttattcgtggaggaaacaagatgatgattgaagagacaaagcg

SEQ ID NO: 23622 - DNA, 149 bp, Gossypium hirsutum
  unsure (1)..(149): unsure at all n locations; Clone ID: LIB3147-007-Q1-K1-A2
gcgtaaaaacaacgcgtccggttttggtagatcattttcgcctctttttcatgccttgaagggggttctctttgtgttctttgctgtactcgaactgcatttgcagctactttttcatctataagctccatcaaaatctgtttatcana

SEQ ID NO: 23623 - DNA, 365 bp, Gossypium hirsutum
  Clone ID: LIB3147-007-Q1-K1-A3
ggaagttgatatccaactatcactctttaggtttattgcattaaataaatcatgaaatctttccttcctttctttgcattcctctcacttctcctgtttgtagacaccattgcagcagctaggaaagatgctggagagtactggggagctgtaatgaaagatcagcctatgcctgaggcactccaagagcttgttcggattgaggctgccgttgccaaccccgatgagaaaaccaagtgccatacatcaggtaacattgagcttaaggaagagaagattattgttaatgaggagttcgaaccaaggccaaacatttcagcttacggtgatgacgctaatctaaaaagagataaatcatcatcttt

SEQ ID NO: 23624 - DNA, 439 bp, Gossypium hirsutum
  Clone ID: LIB3147-007-Q1-K1-A5
aaaagaaaagaaaaattacagtgaaaatggcaacccttaaagttccagctcatgtacctgccccttctgaggatgctgagcaacttcgtaaagcttttgaaggatggggtacaaatgagcaattgattatcgacattttggctcacaggaatgcagctcagcgcaatttgattcgtaaaacttatcgtgaagcttatggggaagatctccttaagtctttggatgaggaactttcaagtgactttgagcgagctgtggtgctgtttactttggaccctgcagagcgtgatgcatttctggctcatgaagctacaaagaggttcacatcaagccattgggttctcatggaaattgcttgcactaagtcttcacatgaactgttcaatgtgaggaaggcgtatcacgatctttacaagaaatcccttgaagaagatgttgc

SEQ ID NO: 23625 - DNA, 445 bp, Gossypium hirsutum
  Clone ID: LIB3147-007-Q1-K1-A6
cagggcaaccgtatttaatacagacaaacgtgtataaaaatggtgttggaggccgtgaaatgaggcacatgctttggttcgaccccactgaagagtttcattcatattccattctatggaacaaccaccaaattgtgttttttgtggatgaagttcccataagagtattcaaaaacaatggtgatgagaaaaacgacttctttcccagtgagaagccaatgtatttgttctccagcatatggaacgcagatgaatgggcgacgagaggtgggttggagaaaacagactgggaaagagccccatttgtgtcgtcttacaaggatttcagcgtcgagggttgccaatgggaagacccttaccctgcctgtgtttccagcaccaccaagaactggtgggatcagtacaaggcttggcgtttatctgattcccagaaaatggattatgc

SEQ ID NO: 23626 - DNA, 60 bp, Gossypium hirsutum
  unsure (1)..(60): unsure at all n locations; Clone ID: LIB3147-007-Q1-K1-A7
aantaaaaaaaaaaaaaaaaaaaattaaaaattaaaaaaaaaaaaaaaaaaaaaagggag

SEQ ID NO: 23627 - DNA, 404 bp, Gossypium hirsutum
  Clone ID: LIB3147-007-Q1-K1-A8
ctccctaagccctgttgtttctttcttggattacaagtcacttggaggatagccaatttagagcgtcacttctctaccagaaacccaactgaatggaacactgggtgattccttggccctcaattgagctctctcctctaactttctaattctcggtgcaagtccacacacaaattcctgagcttcacggccctcaggtgaaagtccaatgagttccttcaacttccatcggtcaaccagatattcaactatatcagcatagtcccgggcagtgtaaaccccaattctttgtgcaacagacgagtagtggtcgaaaaagttttcgtcacggccatcatacatcaagtgggctggcatggagattttcttcctcatcatgtcagcaaatgcccagaaagaaacca

SEQ ID NO: 23628 - DNA, 309 bp, Gossypium hirsutum
  Clone ID: LIB3147-007-Q1-K1-A9
cggacgcgtgggtcttcacggcctggtcaatgtggccgtgcagatggttacatcttggagggcaaagagctggagttctacatgaagaagatccagagaaagaaggggaagggagctgcttaaaaaattattgcatagttttcagcattcatatcagaatgccgcccttagggtttgcctttcacatttccagaacatttaaagttgtgttagcattgaacttttaatctggatccctgagagttattatttttgtattggaatttagattatctttgaactttataaatgcagcttattttggttggt

SEQ ID NO: 23629 - DNA, 385 bp, Gossypium hirsutum
  unsure (1)..(385): unsure at all n locations; Clone ID: LIB3147-007-Q1-K1-B1
ccgttttgttcaagatagagaatgccattaaaaacttattcttcataagctctatgaatatttgttgttgtactagagaagggtcattgttcttaataagcagacataaacttcttcacgggatcatattcaaaatgcccaaannaaaaaaaaaaaaaaaaaaaaaaaaaaaaaaaaaaaaaaaaaaaaaaaaaattaaaaaaaaaaaaaaaaataaataaaaatntttaaaaaaattaaaaaaaaaaaaaaaaataaaaaaaataaaataaaaaaaaaaaaaatttaaaaaaaaataaaaaaaggggggggcccttttaaagaaacaaaattaaaatccgggggtttggaaaaaaaatctttttttttggggccccaaaataaa

SEQ ID NO: 23630 - DNA, 385 bp, Gossypium hirsutum
  unsure (1)..(385): unsure at all n locations; Clone ID: LIB3147-007-Q1-K1-B10
caaattaactggacctatccctagggaacttgtcggtatttcaagcctcaaagttgttgatgtctcaaacaatgacttgtgtggaacgattcctaccagtggaccgtttgagcacattcctttgaacaactttgagaaaaatccccgactggaaggtcctgagctgctggggcttgcaagctatgacacaaactgctcgtaaagggcatgttgacgctataaagctttgaattagatatgaatccgcatgaagtaatatgtaaatctgtataccagctcgactgtattagcatctgtaactcaattaccctactcctaaaatgttgaagacgactagtattggtgaatgtaacggtagcgacaagtttcctttctgtgtgcnnna

SEQ ID NO: 23631 - DNA, 342 bp, Gossypium hirsutum
  Clone ID: LIB3147-007-Q1-K1-B11
cccacgcgtccgcgtacgcctcctttgccaccgcttgtcagccttgcaccaaaatggccaaggttatccctccaatgctcgttgactttgccgaaacttgcaaacaggacaacaaggagacagacacagaagcaagatagtagaaaatagtattgaaatcggctataagagccgaatgaaatgtaatgaaaaagggggccaaatcactgtaatcggggggttttctttctttttttttcttttggcttttcctgtaaagaagaactgcttcttctttttatccacattagaaatcaaaaaccgaatttaaatttgaaaaggttgaatccttgtgatttccaa

SEQ ID NO: 23632 - DNA, 245 bp, Gossypium hirsutum
  Clone ID: LIB3147-007-Q1-K1-B12
gggtcttcccatcggacagcatataagttgcaggggcaaggatagccaaggtgaggaggttattaaaccatatacgcctactacattggattctgatgttggtcattttgaattagttattaagatgtatcctcaaggaaggatgtcacaccatttcaaaaagttgcgtgttggtgattatcttgctgtgaagggtcccaaggggcggttcaagtatcaacctggtcaagttagagcatttggga

SEQ ID NO: 23633 - DNA, 371 bp, Gossypium hirsutum
  unsure (1)..(371): unsure at all n locations; Clone ID: LIB3147-007-Q1-K1-B2
ctccttgcttgtcttggncgtaacgatgaattttgcagcagcgacattgaagtctgtctccttggaagcttggtcccttgtgtgctatatggaaccaatgtcgaaagacttggatctgatcccgggacatttgcaaatcactgcttgccatactcagttctttacctaatcggtaattcattttttggctggaattgccttgcaccatggttttcgtaccctactcgtactgccattcggcgaaagtttaatctcgagggaagctgcgaggcactccataagtcatgtggatgttgtggaagctgcgtagaagatgagttgcaacgtgaacaatgtgaattaacctgtgacttagcaacccatgtcttgtg

SEQ ID NO: 23634 - DNA, 244 bp, Gossypium hirsutum
  unsure (1)..(244): unsure at all n locations; Clone ID: LIB3147-007-Q1-K1-B3
tgagactctgctgcaattcgntcaagatgtctctaaagacattgacggccacctcacccaaagcaagttaagcagtatcacatgatgctattgttgccgctacttgaagcactattcatctatttaatgaataaagtgacaacttcctttctcatgtattttgatctgaatatgtacgtttagatcaatatgcagtcacggggaggagctttgtattttcttgcatgtttgtctttttaattct

SEQ ID NO: 23635 - DNA, 153 bp, Gossypium hirsutum
  Clone ID: LIB3147-007-Q1-K1-B4
aattttcaaaatccaaaattagtctccactttagtgtagtgaggctttgtttattttgttttatgttgtggtccctgcatgttggctctaattttatatcctctatgtattggctattttaatgttttaatgaattaaagtttatgctttgtc

SEQ ID NO: 23636 - DNA, 440 bp, Gossypium hirsutum
  Clone ID: LIB3147-007-Q1-K1-B5
cggacgcgtgggcggacgcgtgggcgagctttacgctgagaaggtcaacaacagaggcctttgcgctattgcccaggccgagtctcttcgctacaagctactcggaggtcttgccgttcgcagggcctgctatggtgtactgagattcatcatggagagtggtgccaagggatgcgaggttattgttagtggaaagctaagagcacagcgtgccaaatctatgaaattcaaggatggatatatgatctcttctggtcatcctgtcaatgagtatattgactctgctgtcagacatgttcttttgagacagggggtgcttggtatcaaggtcaagatcatgcttgactgggatcctaagggtaagcaaggccctactactcccctacccgatctagtcacaatccaccctcccaaggaggatgaagaaatcaggagagtag

SEQ ID NO: 23637 - DNA, 326 bp, Gossypium hirsutum
  Clone ID: LIB3147-007-Q1-K1-B7
cgctgtcggtggtcaatctccggcagcctcacctactaaagctccgccggccgcggctactcctgctactgctcccgctactgcccctgttagcaaacctaaatcaccggctccaactgctgcccctaccacttccccaccaacttcttcaccaccggctgcggctccggagaagtctgcggcggttccagccccatctaaatctgctacggcttcttctcctccggctgctgctccggtgagttctccacctgctccagtacctgtgagctctcctccagccaaatcgccttccgttgctgcaccgacgactccaccagagagct

SEQ ID NO: 23638 - DNA, 432 bp, Gossypium hirsutum
  Clone ID: LIB3147-007-Q1-K1-B8
cgctgatttacgccttcgtggcgcgaggcaccatggttttagccgactacaccgaattcaccggcaacttcactggcatagcttctcaatgcctccagaaacttcctgcttccaacaacaagttcacttacaactgcgatggccatacctttaactatctcgtcgataacggctacacttactgcgtggttgctgttgaatccgttggccgacaagtcccaattgcctttcttgagagaattaaggaggattttaccaagcgatatggtggaggaaaagctgcaacagcttctgcaaacagccttagcaaggagtttgggcctaagctaaaggagcatatggaatattgcattgatcatccagaggagattagtaagattgccaaagtgaaagctcaagtttcagaagtcaaaggagtaatgatggaaaata

SEQ ID NO: 23639 - DNA, 437 bp, Gossypium hirsutum
  Clone ID: LIB3147-007-Q1-K1-B9
cgatcaaaaacctcagctctcttaccgccaaaggaggatcatcttttcaggttttgcgatggcatcgaagcggatcttgaaggaattgaaggatttacagaaggatcctcctacatcttgcagcgctggtcctgttgctgaagacatgttccattggcaggcaacaatcatgggtccaccagacagtccttatgctgggggtgttttcctggtgaccatccattttcctccagattatcccttcaagcctcccaaggtggcatttagaacgaaagtattccatcctaatattaacagcaatgggagcatttgcctagacatcttaaaagaacagtggagtcctgcgctaacgatatccaaggtactgttatcaatctgttctttactgacggacccaaaccctgatgatccattggtgccggagattgctcacatgt

SEQ ID NO: 23640 - DNA, 426 bp, Gossypium hirsutum
  Clone ID: LIB3147-007-Q1-K1-C1
gaagcctaaagtcggcagttgattttaattctgtccaagtcccccctagccaccctctcaatttcgatgagactatactagaggacaatgcgcggcctttgccatcaactgaagttgatgaaagccaagaagttatatccgatgagccaatggcttcagaagaacatgatgctgaaaaagccaagtcaaaatctactacaagcaagcaaaacgagaagttatatgcagtagaaggtatgtttaacccaaaaatgaagagggcagagaaaaagagaaagaaaaaagccaaaaacaaatcaacattaaggggtgatgccatggatgatgaaggcgactatgactttggtgtggattatgtgaaggggaagggtcaaaatacttgtggggtgccaatgtcaggtattgaagttgatgagtagtaagaaa

SEQ ID NO: 23641 - DNA, 427 bp, Gossypium hirsutum
  unsure (1)..(427): unsure at all n locations; Clone ID: LIB3147-007-Q1-K1-C10
cccacgcgtccgcccacgcgtccgaagaaagaaagcgtgaagatcgggtctaatctgggttctcttgaaagtttaaccaattctttgaatcttttgtagtctccctcgtgtatatataaatcaccctcaagagaagagaaaagagctccgcaattcatttcatcttttttcctttttgtaacaactttttttttctaaaggtatatatatttaaagtcttgttgtagttttagttgtcggtttagggtttttttctttctaaaatttcaatctctttttatcgtttcatgtgtgtaattacaacgaaaaataccccaagggttaaggtggaatgaggtgtgattttggaatctgttactttnttctttcattttctagggaaacccaaacagtgtgcttgtttacttcaatttttctgcttttttct

SEQ ID NO: 23642 - DNA, 438 bp, Gossypium hirsutum
  unsure (1)..(438): unsure at all n locations; Clone ID: LIB3147-007-Q1-K1-C11
cccacgcgtccggaaaacagaggcaggcagccatggcaaggatcaaggtgcacgagttaaggagcaaatcaaagacagagctgttgactcagctcaaggatttaaaagccgaactttctctccttcgtgttgccaaggtcactggtggtgcccccaataagctctccaagattaaggtggtgaggctatccattgctcaagtattgacggtgatatcccaaaaacagaaggctgctttgagggaagcttatacgaagaagaagtttttgcctcttgatctccgtcccaagaagaccagagctattcgccgccgccttaccaagcaccagcaatctttgaaaaccgagcgggagaaaaagaaagagatgtactttccgatgaagaagtatgccattaagggtataagcttgaaatttgacttangatggatacctttat

SEQ ID NO: 23643 - DNA, 439 bp, Gossypium hirsutum
  Clone ID: LIB3147-007-Q1-K1-C12
gtcaaggaggcgactttaccgccggaaacggtaccggaggtgaatccatctatggagccaagttcgcggacgagaacttcatcaagaagcacacgggacctggcatcctttccatggcgaacgctggacccggaacaaacggatctcaattcttcatctgcacgaccaagacggagtggctggacggaaagcacgtggtgttcggacaggtagttgaaggcatggatgtggttaaagcgattgagaaggtggggtctagcggtgggaggacttccaagcctgttgttattgctgactgtggacagctttgaaaaagggcttattgaattgtgtttccttcataatatctggtctttttaagctccttttttttatgctatgctgcttctatggctactgggtttttgtgttttttaagaaagtgcttgatgtagctttt

SEQ ID NO: 23644 - DNA, 429 bp, Gossypium hirsutum
  Clone ID: LIB3147-007-Q1-K1-C2
agcaactggagatggatgctgagtatgaggtaaatgttgaggcaactggggaggacttcactgttgaaccagcagagaccaggaggcctttccgtgcgctccttgatgttggtcttatcagaactactactggtaaccgtgtttttggtgttctcaagggtgctctggatgggggaattgatattcctcacggtgacaagaggtttgctggatttaacaaggacagtaagcaacttgatcctgaagttcaccgcaaatacatttacggtggccatgttgctgcatacatgaggactttaatggaagatgagccagagaagtaccagtctcacttcagtgagtacattaagagaagcattgagcctgacaccatagagggaatgtacaagaaggttcataccgccattcgtgcaagtccagaagcaaaga

SEQ ID NO: 23645 - DNA, 439 bp, Gossypium hirsutum
  Clone ID: LIB3147-007-Q1-K1-C3
cccacgcgtccgtgctgcacttaacctcggcaggctcggagctaagctcactaagctcactaaagatcaagctgattacattagtgtgcctgttgaaggtccttacaagcctcctcattacaggtactgagagaagagttgatgagtttttatcaagaaagaaaaaacatccggatggtttgattgtttcttgttttactgaaatttcatgatggttaggtttttgttttatttttagagttttttttgtgtttgggtgatgggaaagtgcctgggggtgggaaaatgatgtgggatttggtatcttcttgtatgaagatgaccaaatgggtttgaaataaaaatgttagggatgtgtggaagattatatagtatttgccattaatgcagtcttgttttgctgcattgcttttttttaaagcaattttattttatatac

SEQ ID NO: 23646 - DNA, 136 bp, Gossypium hirsutum
  Clone ID: LIB3147-007-Q1-K1-C4
agctagtaaacaggactataatagcagcgcagtaaatttctgtaatcttttgttagaagccactgcggctgtaaactgctgattgcttttgaacttgtgtagctgattaaatgaatgtctgcacctgttttctttt

SEQ ID NO: 23647 - DNA, 437 bp, Gossypium hirsutum
  Clone ID: LIB3147-007-Q1-K1-C5
ataaaatttcaacagccactatacgctgtgagactaaattagtgcatttatattataatattgtgttaatgtcaattttgtaggtaggtttgtgtaaaacagtcatgtcaaacaaaattaagttctgcctaaagcctgaaactggtaaaactgtttttaagttgtattattagttgcaaagagatcaatagcagtgatagacccagtgctagaagtggcaaaatctggaaggagaaatatatcggcattcaataaaaggtcttgattacaaagaagcatccaagtaataatcggcttgggtttaatctatagatcaagtcgagtgtggccaatctgcccttaaagtacctttggatttcatgtcacagtttccagaactgggctggacagggaacctgcttgggtattgtcttgaatatgtggttggattatttgat

SEQ ID NO: 23648 - DNA, 246 bp, Gossypium hirsutum
  Clone ID: LIB3147-007-Q1-K1-C6
cccacgcgtccgattttgtaagatgttcatctatgttttccggattccagatgattaatcagtgtataaatactcaatccaatcaaattatacgttgaacttcattcaactttggttttgtaaatttctattcaatcatttatatgtttactcgatataaaaaaatattattaattgcaaagagatcaataaaaaaagatagacccaatgctaaaagtaggtaaaatctggaaagagaaatatatt

SEQ ID NO: 23649 - DNA, 402 bp, Gossypium hirsutum
  Clone ID: LIB3147-007-Q1-K1-C8
gctttttcaagaagtataactcctttggtgcttttgttcatatttttaagctttgcacaaggtaaagaaatcatggttggtggcaaaacaggcgcttggaagataccttcttctgaatcagattctctcaacaaatgggctgaaaaagctcgtttccaaatcggcgactctctcgtgtggaaatatgatggtggtaaagactcggtgctccaagtgagtaaagaggattatacaagttgcaatacgtcgaacccgattgccgagtacaaagatgggaacaccaaggtgaagcttgaaaagtcaggaccatatttcttcatgagtggagcaaagggccactgcgagcaaggccagaagatgattgtggttgtgatgtctcaaaagcataagtacattggaatc

SEQ ID NO: 23650 - DNA, 331 bp, Gossypium hirsutum
  unsure (1)..(331): unsure at all n locations; Clone ID: LIB3147-007-Q1-K1-C9
gttctagatcgcgagctttgtgggcggaattgatttaggaacgtaatagaaaaccgaatattctgatgtattgatggagatagtatttaaaatagttttttaattatgtttatgttattatatttatctgtaaatgatttttatatttatggtaaaaatatattgaggcattgtcatttgtgagccaaaaaaaaaaaaaaaaaaaaaaaaaaaaaaaaaaaaaaaaaaaaaaaaaaaaaaaaaaaaaaaaaaaaaaaaaaaaaaaaaaaaaaaaaanaaaaannaaaaaaaaaaaaaaaaaaaaaaaataaaaataaaataaattaaatta

SEQ ID NO: 23651 - DNA, 250 bp, Gossypium hirsutum
  Clone ID: LIB3147-007-Q1-K1-D1
ggtaaatggcttattagggttttcttttgccctttttttgaagggaaaaattatgtgtaaaaggaggaatgattttctgttctattgtagttgttaatcttcatatattacccccttttttcttttttctttttttctcataaataagaatgttctttttatgtatcagatttacattttcttctttcagaaaccttttcttcttctctgtcatcaactttaactgatggacatatatacttgtatcttt

SEQ ID NO: 23652 - DNA, 380 bp, Gossypium hirsutum
  Clone ID: LIB3147-007-Q1-K1-D10
atctgggaagagcttgggttgaaatttgcagatcttctcggaatggggagatcaggagttattgcttcccttattgctgcttgtcaaaggcttcaaactcatgaatataagtgttgcgaggcacttgctaccgctgttggttcaaaaaatgagacttccaagttcattgttcctcggatactgtttcttgacggttacttcagctatgacgataagtctagttggagctggcctggcggtgctaagatgcatgttatgggttctttgattctgcaggctatttttaaattccaaagtgaatggatacagccttatattctgagtgttacatccatggacgctgaacatgttcttgaagcaactcaagatgctcgaggagc

SEQ ID NO: 23653 - DNA, 425 bp, Gossypium hirsutum
  Clone ID: LIB3147-007-Q1-K1-D11
cccacgcgtccgcccacgcgtccgcacgcttcatactggaatcagtccatctagagtcgctgaagcagtttttgactccccaccggtcgtgatattcaccgtcgacaatattttgttaccctctgagttgttcggaaagtcaccgtcgccagcacctgctcctgaaccagtttcttcaccttcaccgacaccttctccattatccgaagcaccatcgccattagccgcttcacccccagctccaccaaccgacactcccgccggatctccagctgattcgccggctggttcgtcggagaacagcacctccgataatgctgccggtcacgtgagtcccactgttatcttcactgtgttggccattgtccgctattcactatgttaatttgatcttttctgggtttgctattttgcttattttcttt

SEQ ID NO: 23654 - DNA, 299 bp, Gossypium hirsutum
  Clone ID: LIB3147-007-Q1-K1-D12
actgcaagatgcccttcgaatttatgaaaagcccatgccagggtttcccccggaggaaattgccactggcctcactgatgtttctgccatctatgaatcaatgaatgaccttgatcaggcaatcaagttgctgcagaaggccttaaaaatatacaatgatgtccctggtcagcaaagcacagtagctggaattgaagctcagatgggagttatgcactacatgttggggaattattcagaatcttacaactccttcagcagtgccatttcgaagctacgcatatgtagagacaagaaat

SEQ ID NO: 23655 - DNA, 382 bp, Gossypium hirsutum
  unsure (1)..(382): unsure at all n locations; Clone ID: LIB3147-007-Q1-K1-D2
gttaaaacagaacctttaaagctgggtattacgtttgtaattctgttttcgattttgttaagttttagagttctccaatacttgaaggaaaagcttaaatatttttggaaattagtcannnnaaaaaaaaannnnnaaaaaaaaaaaaaaaaaaaaaaaaaaaaaaaaaaaaaaaaaaaaaaaaaaaaaaaaaaaaaaaaaaaaaaaaaaaaaaaaaaaaaaaaaaaataaaaaaaaaaaaaaataaaaaaaataaattttggggggggcctttttaaaaaaaaaaattttatttccggttgtttgaaaggtaaaaatttttttttagggcaacaaaaaaaaaattaacgggccgttttttaaaaaagtgtgaattgaaaaa

SEQ ID NO: 23656 - DNA, 356 bp, Gossypium hirsutum
  unsure (1)..(356): unsure at all n locations; Clone ID: LIB3147-007-Q1-K1-D3
tttccgttggtttgccaaaccctgctgctcaggctgttccgactaaaactgaaaagaagggggacgaggatgatttgtcaaggcggcttgcatagcttaaagctcgaggttagaatgaaaatggttgaattttatttgaagagcttgtaatattatgataacattatgatgtttgggattataattgctgcttatatagatcataatctgtttgtaaatttgactgaatttgttgctttataatgtcataaatgctgatggggctttagtgtgaaaaaaaaaaaaataaaaaaaaaaaaaatatattaaaattttattaaatataaaatatattttttttttttttttnttttttt

SEQ ID NO: 23657 - DNA, 442 bp, Gossypium hirsutum
  unsure (1)..(442): unsure at all n locations; Clone ID: LIB3147-007-Q1-K1-D4
cccacgcgttcgcccacgcgtncgcgaattataggttctagaaatcattcatcactatgttgagatacttgatcgatactttggcagtgtctgtgaattggatttaatcttcaacttccataaggcctattatatattggatgaactcttacttgctggtgaacttcaagagtcgagcaagaaaactgttgcacgtttaatagctgcacaggattcactggtggagaccgcgaaagagcaagccagttccattagcaatataattgcacaagccacaaagtaggttatgaccaaaagtggttgcggattgccatttgtattgggggtggttttggtatctcatctgttgtgaaaactctttctggattttaagttgagaacttaattgtatgtttatgaatgtagattcgggagccctttgtagaaatgatcacatattatc

SEQ ID NO: 23658 - DNA, 447 bp, Gossypium hirsutum
  Clone ID: LIB3147-007-Q1-K1-D5
gaaaaacaagtggctagactttaaagcaaggttgaacaagattttgagcatgacagaaccttggactttaattctggatgatgcattagctaactcttttattgcaccagcaactgatgatattaaagatgaccatcaattaatttttgaggaatatgagagatcatgggaacaaaatgaagaactgggcctgaatgacatcgacacctcttcagctgatgctgcttacaactcaaccggggtgacatccaatgagaacccccaagaataaatgaactgcaaatgatgtgtgatcgaaagcaagcattggatcaaactgtgctgtgcaaaactattcatactggctgctggactgaaacaatgtattcctaaaagatttaaagccagactgcaattttgaggcttcatatatacttattacttgaaaattatactgtaaggaatttt

SEQ ID NO: 23659 - DNA, 435 bp, Gossypium hirsutum
  Clone ID: LIB3147-007-Q1-K1-D6
agctcttggcaagctatgaacatagagttactgttgaaggttttgtttggggcatcaattggtttgaccagtggggagttgagttgggtaagtcactagctactcaagtccgaaaacagcttaatgcatcacgtacgaaaagtgaacctgtcgaaggctttaattttagtactactacgttgttaactagatatctacaggcaagttctgatattccagctgagccacccactcttctacctcggatataactgtcttggtgctgttggccttattgcggaatgccttgcactacagcttcatctgtagtttgtccccatgttaaaaaagttttctggtccttttttggtatgtttggtgtatgcggagatccactgaatcttgtgggttatacggtggattttaataaatttacaacgactgacttggaataca

SEQ ID NO: 23660 - DNA, 415 bp, Gossypium hirsutum
  Clone ID: LIB3147-007-Q1-K1-D7
gcgacggaccgggcccaagtcccctggaaaggggcgccggagagggtgagagccccgtcgtgcccggaccctgtcgcaccaagaggcgctgtctacgagtcgggttgtttgggaatgcagccctaatcgggcggtaaattccgtccaaggctaaatacgggcgagagaccgatagcgaacaagtaccgcgagggaaagatgaaaaggacttgaaaagagaagaggcataaatagtgcattgtacgttaaatacgagaattgctattgactaagcggatgactgatctcccgtttttccttagctttacatttaaaaaagacctagctatgaataatgcaggatgtatttttatttttagaaggtttagacgatgttataatagttctgtaacagttaaatttgctataggaaaca

SEQ ID NO: 23661 - DNA, 388 bp, Gossypium hirsutum
  Clone ID: LIB3147-007-Q1-K1-D8
ggcttctaacttgttgcatacgtcctagcagtatttttggccctggagatgggttgttggttccatctttggttgcggcagccagagcagggaaatccaagttcataattggtgatggcaacaatgtatatgatttcacttatgttgagaatgtggctcatgctcatatttgtgctgaacgagctctagcatctggaggagaagttgcagaaaaagctgcagggaaggcatattttataaccaatttggagcctatcaagttttgggagtttgtttctctaatacttgaaggtcttggctatcagaggccaaaaataaagattcctgccattgttgtaatgccaattgcacatattgtggagtggacatatcggctattaggcccata

SEQ ID NO: 23662 - DNA, 438 bp, Gossypium hirsutum
  Clone ID: LIB3147-007-Q1-K1-D9
cccacgcgtccgcccacgcgtccgctgagaactaaaggaaacaaaggccttcttcttagcactccgccgcccgttatctcatcgcaatcatgatcatcccagaaaagaaccgcagggagatatcaaagtatctctttcaagagggtgtttgctacgccaaaaaagattacaacttggcaaaacacccagaaatcgatgttccaaatcttcaagtaataaagctgatgcaaagcttcaaatccaaggaatacgttcgtgaaacttttgcttggatgcattattactggtaccttaccaacgatggcattgaatttttaaggacataccttaatctcccctctgagattgttcctgctactttgaagaagcaaactaggccccgtggtggtcgtcccatgggtccttctgatagccgcccacgtggtccgccacgctttg

SEQ ID NO: 23663 - DNA, 342 bp, Gossypium hirsutum
  Clone ID: LIB3147-007-Q1-K1-E1
tgccaaaaaatggagtgacctgccacctttggtgatggctaactgtgtgaaggtaaacccggattcacctcaaaagcaagtcaggtttctcactctttctgatggcaagaagttgcttactccgcaacctcgcttgagaaccggtttcttttcaatactcgagtcctctatgttgactcctagtaccatcaacgaggcatgcacttctgtaggggttgcaaagtatggaaggccaattggattggatgaaaagatcaaggttgatgtaattgtcattggttcagttgctgtagatccgaagactggggctcgactcggcaagggagagggatttgctgaact

SEQ ID NO: 23664 - DNA, 433 bp, Gossypium hirsutum
  Clone ID: LIB3147-007-Q1-K1-E11
gtcattctcaccggttatctccctttcgatgatagaaaccttgcagttctttatcaaaagattttcaaaggggatcctcagatcccgaaatggttgtcacctggggctcggaacatgataagaaggattcttgacccaaaccctgaaaccaggataacaatgacgggtatcaaggaagatgactggttcaagcaagactatactcctgctgtacctgatgatgaggaagaagatatatatattgatgatgaagctttctcaatgtgtgaagtgggttgtgatggaggtaggagtcaagaatcacctactctcattaatgcttttcagttgataggaatgtcatcgtgcctagacctttctggtttctttgagaaggaggatgtatctgaaaagaagatcagatttacctcaaatcgttcgggtaaagatttgc

SEQ ID NO: 23665 - DNA, 438 bp, Gossypium hirsutum
  unsure (1)..(438): unsure at all n locations; Clone ID: LIB3147-007-Q1-K1-E12
cccacgcgtccgcccacgcgtccgtccactcgttcggcggaaccagttgccgaagagccaaaggaagcggagcctgcggcggtggtagtcgaggaacctgaagcctcagttgaagttgaaaccaaggaggtggtagaagaaccaaaggctgttactgaggagccagtagtagaggaggctcctaaggaaacaatgccagaaccagttgccgaggagatcaaggaaaccactgaacaaaccgttgaaaccaaagaaactacagagtctagtgaggcagcagcagaagcacccaaagaggaagttaagaaggaagaagaagcaaaaccagctgaagtggaggagaaagttgaaacagaagctgatccagcagagaagactgagtaaataataaagcttttgtgatgaaaatgcnggtgtcaatggaagtgtgtttcaaat

SEQ ID NO: 23666 - DNA, 317 bp, Gossypium hirsutum
  Clone ID: LIB3147-007-Q1-K1-E2
gccacgcgtccgccaacgcgtacgggttgacattagtcttgatgatctcactcgttctttagaagcgattgctatttaatgaccgactaaacttgcgctgaattccacggctactgcagatgttgagtcacctgagactgctctccgtgatgagaaacctgaagaactggtgctagatggataaactgcaacctatgaagctccctgtgttgcatactgcagcaaaacgctgtgctgaagaaccaaaggaagcagtgcactgtgcagccatcggagaaacacatgctccagacactgaaaccacaggtggaactgaa

SEQ ID NO: 23667 - DNA, 73 bp, Gossypium hirsutum
  unsure (1)..(73): unsure at all n locations; Clone ID: LIB3147-007-Q1-K1-E3
naaaaaaaaaaaaaaaaaaaaaaaaaaaaatttttaatttaaaaaaaaaaaaaaaaaaaaaaaagaaaaggaa

SEQ ID NO: 23668 - DNA, 444 bp, Gossypium hirsutum
  Clone ID: LIB3147-007-Q1-K1-E4
cggacgcgtgggcggacgcgtgggcggacgcgtgggctaaacgtgagagagccatggcatatgctctggctcatcagtggcaagcaggatcaagacagcagtcagtgcctgctggatttgaaccagataaaagcagctggggttggaactggttggagagatggatggctgtacgtccatgggagaatcgtttccttgacattaatcttcgagatggagtaaagatacgcgaggatagtcctgctgagggaaagaatgatgccagttctcagataaaacctgctatcgggaaaccagctgcatcaagtcttcatgctaacctttcaaataaaaaaacaggtccatcccactttgatgggagcgattccccacctggtaagtctgcatgtgtgcttgaagcagtgaatgcgccatcttccaagccaaaatccaaaccaaatcgtg

SEQ ID NO: 23669 - DNA, 437 bp, Gossypium hirsutum
  Clone ID: LIB3147-007-Q1-K1-E5
ggagaagctcccacccacggattctaggcttagaccagaccaacgtcatctggagaatggagaatatgatagagcaaatgctgagaaacaacggttggaaaggaggcagagaatgtcaagaaaactacaagaaaatgggtggaagcctagatggttccatcaagatagtgaaaatggatccttccgctacacgggcgggtattgggaagcaagagaacaaggaaaatgggatggatgtccaaatatatttggtgtattcgatgaagaatttgttgattcctctgaatgatcctgatttcaattttagatcaatattgagatggtctttccaggagacattcaaggtggatcatttggtgggggtagataatggaaaggtcaaagtgtaaaagtttaatgtaacaattataatatatatatatgtagggggggaattg

SEQ ID NO: 23670 - DNA, 446 bp, Gossypium hirsutum
  Clone ID: LIB3147-007-Q1-K1-E6
tagaaggctagctgatgccatggttaagctggtatgctccgacaggaagaccggcggagttgttttcgagaaggagggatataccgacaaaaccggaaaataccagattcgtgtatccgaggatcacttggatcagatctgtgatgcagttcttgtgaagagcccccagcttggatgtgccacaatgtcccccggtcgtgaacgtgcccgtgttatcttgaccaactccaatggcatttcatccaccacccgttatgccaatagcatgggcttcatggttgacaaggctgaagttggctgtgctgagatgatgaagatgtatcgggaggatgaggaggatgtctagtgtgtgggtttggatttatttgcatatgaaatgtgatgttgtctgctatttgttatgtgaattgcttcgttatttctacgttagaggacttctataactt

SEQ ID NO: 23671 - DNA, 386 bp, Gossypium hirsutum
  Clone ID: LIB3147-007-Q1-K1-E7
ggaagtaccagaagagcaccgagcttttgatcaggaaacttccattccaaaggttggtgagagaaatcgctcaagatttcaagactgatttgaggttccagagtagcgctgttgccgctcttcaagaagctgccgaggcttaccttgttggactgttcgaggataccaatctctgtgccattcacgctaagagggttacgatcatgcccaaggatattcaacttgctaggaagattagaggggagagagcttagagtttgattttcggctgggtaacgtctaaagctggagatctaagcttttcatcatttgtacgttttgctttctcagcaaatgttcatttaaattgatggaaaacagttggaagctttatgatttcgtttgtt

SEQ ID NO: 23672 - DNA, 267 bp, Gossypium hirsutum
  Clone ID: LIB3147-007-Q1-K1-E8
cccacgcgtccgggaagatgacaaaagatcttgcgcttttgattcacggtcctaaggttagtaggtctcagtatctaaataccgaagagtttatcgaagcagtagccaaagagttgagtaacagaatgtatgtgaaaccaaagttgtaaagcatgcgtgtattgtgtgccctctcgtctatcttttaggcttatttataattgcgaataaataaggtctagtacatgtcctgcaatgcatgcccagtctataaattaataaacaaat

SEQ ID NO: 23673 - DNA, 437 bp, Gossypium hirsutum
  unsure (1)..(437): unsure at all n locations; Clone ID: LIB3147-007-Q1-K1-E9
cttcgtcaaaagctgtcacgtcatcgttggggatggtgaagttggtacccttcgtgaagtgagcgtcatctcgggcctccccgctgccaggagcacagagcgcctcgagatccttgacgacgagcgtcatgttatcagcttcagcgtcgttggcggagaccataggctagctaactacaggtcggtgacgaccctccacccttccacttctgggaacggaacggtggtggtggaatcctacgtggtggacgtgccgctgggtaacaccaaagatgacacctgtgtgttcgtcgacacaattgttcggtgcaacctccagtcactggctcagatcgcagagaatctctccaggcgcaaatagcaaacaacgaaaccaagtcattttcgtgagtagattcagaaccctncatcaaaatagattaatttctctccgtctc

SEQ ID NO: 23674 - DNA, 443 bp, Gossypium hirsutum
  Clone ID: LIB3147-007-Q1-K1-F1
gcttccgccgcgaaaggagatgccacattttcatgaagaattaactttgctgccacgattttaccctgctccttgacaacaaggcctgacgccgatctgttatgttgtgagtcgaaagccgcatcgaagaagatagccatattttctctttgttgtctctgactagactttgtattcgttactgaggaatttatttctgcttgtccagagtatccatagcccatagctgaatcctcgacactgttcagttgttcccttgctgaaaacccaggacactgttgaaagacgtggttactatcttctgtttcctgaccacacctcaagcatcgatcctcagttattactcttctcagttttaagctggaaaaagttggaatgtagttccacgcgattttccatactgtaatcttaatttttgtaggcatatctagattccataattt

SEQ ID NO: 23675 - DNA, 424 bp, Gossypium hirsutum
  unsure (1)..(424): unsure at all n locations; Clone ID: LIB3147-007-Q1-K1-F10
acaagctagggtgcaacaattaaagaaagaactagccgagacagattctgtttacgacacagaaaaattggcagaaaggattgctaaactatctggtggtgttgcagtcattaaggttggggctgcaactgagactgaacttgaggatcgcaagctacgtattgaagatgccaagaatgctacctttgctgccatagaggaaggtattgtacctggtggtggtgctgcattagttcatctctcgacttgcgtccctgcaattaaggataagcttgaagaccctgaagagcgcataggagccgacattgtgcaaaaggctttggtagcaccggcctcgttgatagctcaaaatgcangaatggaangtgaagtaatggtggagaaaggtaagaacagcgagtgggagatcggttacaatgcaatg

SEQ ID NO: 23676 - DNA, 270 bp, Gossypium hirsutum
  Clone ID: LIB3147-007-Q1-K1-F11
cccacgcgtccggccacccaccatctgaacgccatgctggtgccaataaattcttcttcaaacattaaagagctatattactgtgattcgaacatgaatgtcaaatacgaatatgttcttaatctacatggaaagacaagaaaaaggtggaagaaagtccatctcaagcacattgcatattgcagaatttgaaactgaattgcttatgtgattgaattcagatgtctttataaattctgggttcttggtccatacaaaagtttactttcc

SEQ ID NO: 23677 - DNA, 290 bp, Gossypium hirsutum
  Clone ID: LIB3147-007-Q1-K1-F12
cccacgcgtccggaaagataggaaagcaaagaaaaagaaggataagttagagaaaggtaagaaaggtgctgttactaattcgtgggggaaatatggaattatcagagaaactgatatgtggaataagcgacctgaattcacagcatggttagctgaagtgaaacagataaacttggaaagtctgcccaactgggaagagaagcagttgtttaaagattttatggaagatcacaacacagccacctttccttccaaaaaatattataaccttgatgcttattataagcgcc

SEQ ID NO: 23678 - DNA, 437 bp, Gossypium hirsutum
  Clone ID: LIB3147-007-Q1-K1-F2
agaaaaagaatgagagttttgtcatatgagttcttttccttaaccatggtttataggctgagaagatttctacactagttaaagctgcaaatgtctctgttgaatcctactggccaagcttgttcgctaagctttttgagaagtgcaacattgaggatctcataaccaatgttggagctggtggtggtggtgccccagtagctgcagctgcacctgttgctgctggcggaggagccggtgctgctgctccacctcctgctgaggaaaagaaggaagaaccggaggaagagagtgatgacgatatgggattcagtttgtttgattaggtgtgttttggtcaattactagttatatcacatgaaggtagtaacgcttttagagttgtattgctattggtatttgcatgttgattagaaatattacgtttttgttgaatg

SEQ ID NO: 23679 - DNA, 398 bp, Gossypium hirsutum
  unsure (1)..(398): unsure at all n locations; Clone ID: LIB3147-007-Q1-K1-F3
cgcccggattccggtcgaccacgcgtcgccacgcgncgcccacgcgtncgtttgtggggaaaatatgggttcgggcatagtgttcggtagcttgttggcgtggattgaagtgatcgagaaattgagtgagatgaagctgatttccgaagccaaaacgcccgggttggtgcagtgggcggattgcttctccgcccatgaggcggtgaaggatgtttcacccgacgtcgacaagcttgtggaatatgcgttgaagcttggggccagggtcttgaaagctacggcagccaccaattgaaatcgaagtttggagtatgtgttactttcttcttttgtcattgagtgaaacttgggtgagaattgttattatcatttagaaaataaaatatttttatttttat

SEQ ID NO: 23680 - DNA, 434 bp, Gossypium hirsutum
  Clone ID: LIB3147-007-Q1-K1-F4
accaaagcaattgctggaaaagtaacaaattgggacaatgttgttttggcttatgaacctgtttgggccattggaacagggaaagttgcaacccctgctcaggctcaggaagttcattgcgagttgaggaaatggcttcatgagaatgttggcggtgacattgctgcatcaactagaattatatatggaggttccgtaaatggagcaaactgcaaggaattggccgcacaacccgatgttgatggctttttggttggtggagcttccctaaagcccgagtttgttgatatcatcaaggccgcgatggtgaaaaagaattagaagttgaaaagcaggaattaaaggtgaaacagaaacaaccttctgggaaactttaatttttgtagttgagatctttccttggaacctaatgtctgttgaaaatttcccgatgt

SEQ ID NO: 23681 - DNA, 444 bp, Gossypium hirsutum
  Clone ID: LIB3147-007-Q1-K1-F5
tcttgagcgtcgtttgcaaacactagtattctagactgggatggccaagtcgattcaccatgcttgtgtgttgattaggcaaaggcacattagggttggtaggcaagtggtcaacatcccatctttcatggtgagggttgactctcaaaaacatattgacttctctctcacaagccccttcggaggtggccgccctggaagagtgaagagaaagaaccagagagcagctgccaagaaggctgctgggggagatggtgatgacgaggaagacgagtagatgttaaggccattaccctgcaactaggaacccttgaaagcatatgtttggaactttgccatcacctccattgttagacatggtttgagttttgtttccagatctctactgtagcggatattggtatatgtcttgcttagtaatctgtgtttttttaaccctgattt

SEQ ID NO: 23682 - DNA, 445 bp, Gossypium hirsutum
  Clone ID: LIB3147-007-Q1-K1-F6
cccacgcgtccgctcagggaaagcttcaagttgtccttgttagtgccaaaggtctcgagaacacagattttctctgtaacatggatccttacgtgcttcttacttgccgaacccaggagcagaaaagcagtgttgcatcaggaaaaggatcagaaccagaatggaacgaggatttcatattcaacatctccgaaggtgcttcggaactcgcactgaaaataatggacagtgatgctggttctcaggatgatttcgtgggagaagtagcgtgagtgtcgtatatggatagatatatactggactcgggtttctctgttttttaatattttttatgtatttgaagggtcatatgctatactcatccaaaattactttggatatacaagtgttttacacgaatacaataagaaaaatggaaaataaaataaatattattaatttaaaa

SEQ ID NO: 23683 - DNA, 218 bp, Gossypium hirsutum
  unsure (1)..(218): unsure at all n locations; Clone ID: LIB3147-007-Q1-K1-F7
agccttcggccacgccttcggtttggtagtgaaggtatattttaaagagcagngtgttaaaatgttgcgagaatgttagttgcaatattgaatgagttgagttaaatgagggaatcaccaacaaactgaccgacaagactcttgaaactgcaacgtacaaagaatgttgtcttccatgttgctgcttgtagaaatataaccctatgatgttcactttt

SEQ ID NO: 23684 - DNA, 325 bp, Gossypium hirsutum
  unsure (1)..(325): unsure at all n locations; Clone ID: LIB3147-007-Q1-K1-F8
ggcggttgtctctaaatgctaatcaacatggcaacagatctgcaggaaaagacgggaagagagacagtatgaagttggcagctccagccaacatcgttacggtttcaaaagaagacgctgcctcccacgtttcgagaacggattcggttccggcatcaccatgagagatttaacaaccccttttgtcttgttattaccagattgtttatttagtgtattggtttgaatccaagagctgttgtttgtaagggatatagttagtgactggattgtatactatatactgttatatttgcttaataatgtgatataaatatttagcnna

SEQ ID NO: 23685 - DNA, 304 bp, Gossypium hirsutum
  Clone ID: LIB3147-007-Q1-K1-F9
ccgtggagagcgtggagaaaacctcggctgcaattaaggttttgaaacaggtcggagcatatccggatgtggaaaaggctaaggacagacaaggaatccgacccggaaaagggaaaatgaggaaccggaggtacatttctcgtaaaggtcctttgattgtttatggaaccgaggggtcaaagctcgttaaggccttcaagaacattcctggagttgaggttgccaatgtggagaggcttaatcttttgaaactcgcccctggtggacaccttgggcgattcattatttggaccaaatcaactta

SEQ ID NO: 23686 - DNA, 246 bp, Gossypium hirsutum
  Clone ID: LIB3147-007-Q1-K1-G1
cgatgacaaagtgccgaggaacaatttttggttgcccgcagctaaaaatttaggtcccccacttttttttcttcttttaaagtagtctgctggtttttttgtgaaaagttaactccttattttgtcgaggcattgcaaatcttccttattggagatgagaaatgaatgtttctttctaatggtaccttggttttgtaagccataatcttgtctgtgttaaaagttaatgatctgtttcatggctta

SEQ ID NO: 23687 - DNA, 429 bp, Gossypium hirsutum
  Clone ID: LIB3147-007-Q1-K1-G11
agagaacaatggaagcaaagccggaagagaaggcggaatttgaagaagcggagatagaatatgttagctatggaggggagcaccatctgcctctcatcatgaacctggtcgatcaagaactcagtgagccttactccatcttcacctaccgatatttcgtctatctttggccccaactctccttccttgcttttcacaagggtaagtgcatcggaactgtggtgtgcaagatgggagaacacagaaatactttcaggggttacattgccatgttagttgtaatcaagccttatcgtggaagaggcattgccactgagctcgtcaccagatccattagaatgatgatggaatctggatgtgaagaagtcacactggaagcggaagtgacgaataaaagagcactggcactttatgggcgtcttgggttta

SEQ ID NO: 23688 - DNA, 425 bp, Gossypium hirsutum
  Clone ID: LIB3147-007-Q1-K1-G12
gttttctactcgtctcctctacaaatctcgccagctttatggtaatcaagctgttctgcggcaggaggttgccattcctgtccggttttactctaaagaggcttctccccctggtttaaaaggagatgagatattgaaaaatatctttgtggaggttaagaacaaattcgagacagcattgggaatatttaggaaggagaaaatcaccattgacccatatgacccagctgctgtctctcagtatgcaaatgttatgaagactgctagagaaaaggctggcttgttttcagagtctcaacggattaaatacaccatcgaaacacgaactcagggcattccagatgtccgaacatatttattgacacttgaagaaataagatccaagagaggactcactgatgaaactggtgctgaggctatgatga

SEQ ID NO: 23689 - DNA, 426 bp, Gossypium hirsutum
  Clone ID: LIB3147-007-Q1-K1-G2
aaaatgtaaagcgtagaagggagcgttttcagaagcagtcatcacttctttcaaaattaacgcgccaacttagcatacatgacaatcgagctgcttctgcttctgattggtctgacagtggcgctggggcagaaagtagcccgagaacaagtggtggctcagttggtgacgactggaggactgcatttgatgcagctgctgctaacggccctgtggattacaggaggtctggctctaacggtccaacacaaaacggtgacgtgaattctcgatcagggtccaacagtcgtcgtacccctaaccgtatgccacctgcaccaccacaatctggctccggttacaaatattaatggtcataattcttaattatgaaaagcctacttcatgatttaagcattttatcttttttcaaaattctctacaaat

SEQ ID NO: 23690 - DNA, 399 bp, Gossypium hirsutum
  Clone ID: LIB3147-007-Q1-K1-G4
catcagtcaagaattaaaccatggcaacgaatgaagtcaaagttttgggttcctggccgagtccatttgcgatgaggcctaggattgcccttaacctcaaatccctcacctatgaatacattgaagagaagttatgggaaggcaaaagcgagcttcttctccaatcaaaccctgtttacaagaaaatcccagtcctcattcacggcgataacaagccaatctgcgaatctctcatcatcgtacaatacatcgacgaggcttggtcttccggtccttctattcttccttctgacccctgtgaacgtgctgtcgctcggttttgggctgcatatcttgacgacaagtggttcccagcggtgaaaagtataggagtcgcctaaggagaggaaagcaagaaag

SEQ ID NO: 23691 - DNA, 391 bp, Gossypium hirsutum
  Clone ID: LIB3147-007-Q1-K1-G5
ctttttttttttttttttttttttgaattcatattacaaatgattcaaaatacaaaggtatacaatcaacaaaaaagaatatgttttaacccttccaacatgatatatcaaacaaagataaattacattacgaatctctctctttttttcaccaattttatttataagttcatgaatccttgaatggcagcaacatcaaaggccttattggtacgttccacccgaaaaaattgaaaacccgaagcataagcaatatggaaagacaagcatacactaagcagtagcagtttttgccttttcttccatccaaattttatttcttggtttatgtgaattatcttgtagtcctaggaaagtataataataatatggatgtcaagcctttctggcc

SEQ ID NO: 23692 - DNA, 420 bp, Gossypium hirsutum
  Clone ID: LIB3147-007-Q1-K1-G6
agcacacataaattggaagcagttgaaggctgggagcagatagcctccgctgcttttgagcatttcgaacaggagggcaatcgagtaatttcaattgaggaattggcacgggagctgagtgtaggcccttcagcttactcattcctcaaagactggatcagaatctctgatggaaagcttaattttcttggatataaaaaaattttacatggcgtgacgtttcgtagctcgaatacaagacttcattagtttttttagccatttagccattgattattatacagtgtcttaccattcatgacgttttgatttgactttttttcaaacaatttttagccgttcatattatttagtcctttaaaatttataacattttgaatgacttgtgggggtttctttggtttttggttttttttttaa

SEQ ID NO: 23693 - DNA, 405 bp, Gossypium hirsutum
  unsure (1)..(405): unsure at all n locations; Clone ID: LIB3147-007-Q1-K1-G7
gcaaattgaagaatacgctgaaatcttcaatccaaaatgcctaagcagattcatgagatcaaggacttccttctgactgccagaaggaaagatgcacgctctgtaaagatcaagaagagcaaagatgtcgtcaagttcaaggtccgctgctccaagtacttgtacacactttgcgtgtcggatgctgagaaggctgacaagttgaagcagtcccttcctccaggtttgagtgttcaagacctgtgaaaatatggcagccccgggtttgtcacctgatttataggtgatgaaagctaggtttttagttntgggtttattgtatttctggtcattctgcaacagtgagctcaattttctgtaatttgatctatgtttttttggtgattaaggattttagtgatatat

SEQ ID NO: 23694 - DNA, 395 bp, Gossypium hirsutum
  Clone ID: LIB3147-007-Q1-K1-G8
gaccaaaaggcattccaagttctgcgccacacagggcaagcggtggtgggaccaaaaggcattccaggacctcgacgcctatcagtggcgcagattgcgttgggtccgcaaaaagttcaccatttacaactattgcagcgatagggtgaggtaccccacgatgtcgcccgagtgcaagagagacagagacgcttgattcatttgcatcaccgagtccaagttccccccttatattcttcactaccatatgagatccgtcattgtcctttagatttcaattgcttgttggccttcacttatctccacatcaatttcattatatgtaattttactcttaaaacattggttttcgtgataatattatttaaatatagatcacaataacattatcttgt

SEQ ID NO: 23695 - DNA, 435 bp, Gossypium hirsutum
  Clone ID: LIB3147-007-Q1-K1-G9
cttgaactttttgatgactcttgctggtctggcaatggttggatacgggatctatttgtttgttgagtacaaaaatgctgccgatactgcaatgcttttgtcacctgttggtagtgatcgagatttgatacagtttggtcgccccatgctcatggctgtgtctctttcgtctagtatttttgataatctgccaaaagcatggtttatatatttatttattggagtaggggcgggtctctttgttatctcttgttttggttgtattggagctgcaacacggaatatatgctgcttgacttgttattcagttttggtgatcttgctgatcttggtggaacttggatgtgcagctttcatattctttgacaaaaactggaaagatgaactttctacggataaaactggagattttgatatgatatacgactttctgga

SEQ ID NO: 23696 - DNA, 430 bp, Gossypium hirsutum
  Clone ID: LIB3147-007-Q1-K1-H1
ggctgaatatcgagctgcctttttggggatgaaatatgctcttagaaaggggttcaaacatgttcgtgtacaaggggactctaaccttgtctgtatgcaggttcagggtcggtggaaaattaaaagtcagaatttggttgagttaaataaagtggcaaaggatctcaaggataagttcatatcattccagatcaatcatgttgacagggaatttaactccgaagctgatgctcttgcaaaccaagctgttaatctcatgaatggtcaggttcaagaggactggctcttgaagtaaacccaagtttaggccaacactatggaagatgcctacgaagtactcgaggttttaactggttcataacatttgtcaatgccctagcttgcacagacatgtttttcgttcattaacctttaatgtaagttttatgat

SEQ ID NO: 23697 - DNA, 401 bp, Gossypium hirsutum
  unsure (1)..(401): unsure at all n locations; Clone ID: LIB3147-007-Q1-K1-H10
gtccaacctggtgttcgttgtcccaccggagaagcaaggattaccccaggatttaaactgcctgcatctcatgtgattcacactgttggaccgatttatgattccgacaaggaccctaaaggctcactgagaaatgcatacaaaaattgcttaaccgtggctaaagagaacaacattaaatacatcgcatttccttccatatcttgcggtgtatacgggtacccttatgaggaagcagctacagttgctttatctactatcaaagaatttgccaatgacattaaagaggtgcactttgttctatttgctgatgatatatacgatatttggacgaaaaaagcaaaggaattgctctaggtttagtgcatgctangaactagaattgagaacttcttcatgct

SEQ ID NO: 23698 - DNA, 267 bp, Gossypium hirsutum
  Clone ID: LIB3147-007-Q1-K1-H11
ggaaatggatatgctccagtccttgactgccacacatcacacattgctgttaagtttgctgagcttttgaccaagattgacaggcgatctggtaaggagcttgagaaggaacccaagttcttgaagaatggtgatgctggtatgattaagatgattcctaccaagcccatggttgtggagaccttctctgagtacccacccctgggtcgttttgctgtgaaggacatgcgtcagaccgtggctgtgggtgttatcaagagtgtcgag

SEQ ID NO: 23699 - DNA, 326 bp, Gossypium hirsutum
  unsure (1)..(326): unsure at all n locations; Clone ID: LIB3147-007-Q1-K1-H2
aggatttgtgtatcttgaaaattatgtgtatgaaatgtatggttaatatacacgttggatgatattgcaaaagttttcttaatgtgttataagctttgttttcttttnaaaaaaaaaaaaaaaaaaaaaaaaaaaaaaaaaaaaaaaaaaaaaaaaaaaaaaaaaaaaaaaaaaaaaaaaannnnnaaaaaaaaaaaaaaaaaaaaaaaaaaaaaaaaaaaaaggggggcccttttaaaaaaaacaaaattaactaacccgggaatggaaaaaaaaaactttttattaggtcaacaaaaataaaaaaaattggccgggttttaaaa

SEQ ID NO: 23700 - DNA, 368 bp, Gossypium hirsutum
  unsure (1)..(368): unsure at all n locations; Clone ID: LIB3147-007-Q1-K1-H3
ctttatcgccctggttcaattcccgcatttcacatggctaggtaacattagtgttaattggcttttctaaaactgcaaccactgtctaaattgtgtttataccagctttttcttaactttgattttaggcaatttttacattagagaatttcttctccgtctagaattctttttgttccccaaattcataaaaaccaatttccatgtactgagaaatctaaaaatattagttccttnnnaaaaaaaaaaaaaaaaaaaaaaaaaaaaaaaaaaaaaaaaaaaaaaaaaaaaaaaaaaaaaaaaaaaaaaaaaaaannnnnnaaaaaaaaaaaaaaaaaaaaaaaaaaaaagggggggggcccttttaa

SEQ ID NO: 23701 - DNA, 389 bp, Gossypium hirsutum
  Clone ID: LIB3147-007-Q1-K1-H5
cgagactatagtaaaccaagtgaaatgtcgaaggaagagatgaagatcggtagaagatttgagggcaaagtcgcaattgtgacggcttctactcaaggcatcggcttcagcatcgccgagcgtctcgggttggaaggcgccgccgtcgtcgtttcttctcgcaaacagaaaaatgtggatgaagcagttgaaaagcttaaaaataaaggaattcaagtgttgggagttgtttgccaggtctcaaatgcgcaacaaaggaaagatcttattaacaagactgttgagaaatatggaaaaatagatgtggttgtatcaaatgctgctgcaaatcctactgtcagtctattgttagaaacaccagaatctgtccttgacaaagtatgggaaat

SEQ ID NO: 23702 - DNA, 267 bp, Gossypium hirsutum
  Clone ID: LIB3147-007-Q1-K1-H6
cccattcatgtgcggcgtggcagcttgtgcatcatacccaattgttgcttgatccaatcgatgaaccgtgttggatcatgtcatttctgtgttatagaaggcttctagttatggtctacaaatgttgttgtagttgttcggggttatggtctagttgaaaccgatgggttcatgtacaataaggatccaaagacatgtaagatgcaaatctgctgtacacaacaaagacaggtgtaaatttttatgttttaatgcttgtaacaatac

SEQ ID NO: 23703 - DNA, 359 bp, Gossypium hirsutum
  Clone ID: LIB3147-007-Q1-K1-H7
agctaagagttttaagttaacgaagcatttgggtcgtttcgaagtaatggaaacttcaggaaaagtaaagaagggagccggaggaaggaaaggtggtggcccgaagaagaagcccgtttcaaggtctgtcaaagctggtctccagttccccgttggtaggatcggccgttacttgaagaaaggaaggtattcacagcgtgttggaaccggagccccggtttacttggctgctgttcttgagtacttggctgctgaagtcctggaattggctgggaacgctgcacgtgacaacaagaaaaacaggatcattccaaggcacgttctacttgccgtgaggaacgacgaagaattagggaagc

SEQ ID NO: 23704 - DNA, 435 bp, Gossypium hirsutum
  Clone ID: LIB3147-007-Q1-K1-H8
cccacgcgtccgaccaagtttcaaggataatggaggcactgttacagctggcaatgcctccagtataagtgatggtgctgctgctttaatcctagtcagtggagaaaaggcacttgagctgggattgcaagtgattgcaaagattgcaggatatgcagatgctgcacaggcaccagagtttttcacaacagcgccagcccttgcaatacccaaagccatttcaaatgctggcttggatgcttctcaagttgattactacgaaatcaatgaagcctttgctgttgtggctcttgcaaatcagaaactgcttggccttaatccagagaaggttaatgtgaatgggggagctgtatccttgggacatcctttggggtgcagtggagctcgtatcttggtcacgcttttggggggtttgaagcagaaaaatgggaaata

SEQ ID NO: 23705 - DNA, 432 bp, Gossypium hirsutum
  unsure (1)..(432): unsure at all n locations; Clone ID: LIB3147-007-Q1-K1-H9
gtatccacgcattcaaagtttgtaaagtaaagcactcaactttgtaccagtaggcatcactcaatgcaattagggtgcgtttgtttgcaggaaaacatttttcagaaaatattttcttaattttacagtgtttggaagcctgaaaacattttacaagtgtaaattgttttccaagacacgggtaaaatggcctcagtttagggaaaatgtcttaccaatttcatttccgtaagacattcttcggaaaatccctccctccttccgtccttctctttcttcaatctgtcttcccctcacgaatttgcaggatctaaacgtcccaaagttggcccgtcgtcgatattggagcttgtgntcaatacttgggttacacacctggcctctttattgtaggactgttcaacattttggtattttggataataagaacac

SEQ ID NO: 23706 - DNA, 346 bp, Gossypium hirsutum
  Clone ID: LIB3147-008-Q1-K1-A1
tgcaattgttaaaaatctaacctatattgaggaggaggatttggttaacaatggatctcaatccttcgcagtatttggaggtaaccaaagctggctgcaaagagaagagaattttaatttgaagccaagtatgaaggtgcactgtggatttctgaaaaatggaggtgctgacatgaatcccgtggatatcgaatatgtcaagagatgtaggtttttggttgcatctgggatttttgatggatatgatgtacctcatcagccatcgaatataaatattcgttctaagaagctcttctggtttctgatgggtggtgaggaagtatctctcacatttattaaagaaaat

SEQ ID NO: 23707 - DNA, 396 bp, Gossypium hirsutum
  Clone ID: LIB3147-008-Q1-K1-A10
gaaggcttgctgcgaccggatcctgaccttgaacatcatggctcgaaccacccctgaccggcaaaccgtgtgtgggtgcttgcaagctgacgctaacgctgcccaaatttaaggcagcttggctgcgaccctaccagccacatgttgtgcctacatccctcacaagatcagcacttacactaactgcaaaaatgtgtaacgagataggataatagaggggttcgcgtcagctcgcatgagataaaatatatgatctacaagaaggagaaagaacaatgactcccgatgttgggatggaatattcaaaatccaaaattagtctccaccatagtgtagtgaggcattgattatcatagaaaatgttttggtccctgcatgttggctctaattttatat

SEQ ID NO: 23708 - DNA, 370 bp, Gossypium hirsutum
  Clone ID: LIB3147-008-Q1-K1-A11
gacatactgcagaattcatcagcgcattgatatgggggtgctttttgagaaactgaatttaaattacgaagagggtgaaaaatggattgtgaatctcatcccgaactctaaacttggtgcaaagattgattcaaagactggaaccgttattatggagcctaatcaaccgaatgtttacgagcagctgatcgaccacactaaagcccttcaagggcggacctacaagctagtcggccagcttctcgagcacgcacaagcacagcctgcacgttaagttggacggacaaggaagatcttttgaatttatatgcaattttgagctatttgctgattggttatttctttcagacaaatttaacagtgatttaag

SEQ ID NO: 23709 - DNA, 389 bp, Gossypium hirsutum
  Clone ID: LIB3147-008-Q1-K1-A12
gacatgactgcagaaatcatcagacgcattttatatggttggtgcgtttttgagcaaactcgaatgttaattgacgaggagggtgacagatggattcgtgaatctccatccgaaacttctaaacgttgatgcaaagaattgattcaaaagactggaagccgttattatgagagcctaatcacaccgaatgtttacgagcagctgatcgaccacactaaggcccttcaagggcggacctacaagctagtcggccagcttctcgagcacgcacaagcacagtctgcacgttaagttggacggacaaggaagatcttttgaatttatatggcaatttgagctatttgctgattgtgtatttctttcagacatatttaacagtgatttaagtt

SEQ ID NO: 23710 - DNA, 313 bp, Gossypium hirsutum
  Clone ID: LIB3147-008-Q1-K1-A2
ggtgaatcgatcgccaaagagcgagctgccgttaggtttaacgatttgttgggatcgagatcactggacgtggtcgccggcgagccgactcttcttaatccacggaggttcaggcaaaccctagtttggcaagaattgaataagcattggcgaaacaattcgaaggtcaagggcttttttattgataaagtgagaggtggttattcagtagccatagcaggctacgttgcttttcttccgtacagtcgttttgggagaaaaatggtcagggatgcagataaaagatcgattcatcattgaacgcgattgcccc

SEQ ID NO: 23711 - DNA, 331 bp, Gossypium hirsutum
  Clone ID: LIB3147-008-Q1-K1-A3
cccacgcgtccgcccacgcgtccgcccacgcgtccgctctctctctcttcaacaagccggcgagggaaggaaaaccagagagggtgaaaaatgccagctggtcacggtctccgatctcggaccagggatctgttttccagacccttcagaaagaagggttacatcccattgtccacttatctcaggacctacaagattggtgactatgtggacgtcaaggtaaatggcgccgttcacaagggcatgccccacaaattctaccatggccgcactggtcgtgtctggaacgtcaccaagcgcgccatcggcgttgaggtcaacaagcaggtgg

SEQ ID NO: 23712 - DNA, 284 bp, Gossypium hirsutum
  Clone ID: LIB3147-008-Q1-K1-A4
cccacgcgtccgcccacgcgtccgggggctatatatgcttccaacaaagctgccatgaaccagcttgcgaaatacttgtcatgcgattgggcaagagataatattagggttaatgctattgtaccttcggtcgtcaaaacagccctccttgaaaagtatttcgaagttaataaagaaggattagaggttaccctaaaccgaacaccattaggacggcttggacagccgaaggaagtgtcagctatggtggctttcctgtgcctaccggcggcttcatatataac

SEQ ID NO: 23713 - DNA, 356 bp, Gossypium hirsutum
  Clone ID: LIB3147-008-Q1-K1-A5
tggacgcgtgggcggaaagattcccaggaaagggcgaataaaagctggttggaacggagtgccgagtctttagaattagtagttgagaattacgatagtgaggaggaacgagtgaagaatttcaagcaaaagaaagccagctctaatcacttaaagaagttacaacaggagctcaatggattgctttcacgaccactgcgcccgaaaacattttcacatcgctatccaactgcagccggtgttacacatcttatacagcatcaatttgaagaattggctaagcaaaatggagatgacaacttggttttgggtgaaaacaagagacggaagatggtggttatcggtcaagattgcgt

SEQ ID NO: 23714 - DNA, 343 bp, Gossypium hirsutum
  Clone ID: LIB3147-008-Q1-K1-A6
ccactccagtctacaaatataagtctcctccccctcctcctccagcttactattacaggtctcctcctccaccaccaccccattatgtctactcatcaccacctcctcctcaccactactaagcaacggctttgaccgcaccaaggggaacaaaagagtgtgatccaataaagcgacagagaaagagagcagtgagaggtcgcctagtctccgcgtctcaagagaagaaaaagaaaacaagaatgatgtagacaagtagtagggtcaataaaaaacaaagggttcatgggtttcacattggtattattcagaagatctcgtatttcttgcagctttaagatac

SEQ ID NO: 23715 - DNA, 379 bp, Gossypium hirsutum
  Clone ID: LIB3147-008-Q1-K1-A7
aatggatcggagcttgggaagtcgagattttagcaggtaagtaacaaagctttgatcatgctgtattagcagcagacattatacgttttgatgttgcattgaacttaaaaatgagttgaatatatttaatatatttatgatatgtagatggttgacgatggctcggctcatatcgtcgagtttcggagaaaccagtttgtcaaaggaacattgggaaatggccaaagaaatggagaggctaaggagggagagactgaaatagaatccgaaagtccacaagattttgaagctctggtatttggtaaatgattgttgtcccaaagggtgatgaaaaaagcaaaaaccagaatagcatacatggggattgtgatgtatgaat

SEQ ID NO: 23716 - DNA, 274 bp, Gossypium hirsutum
  Clone ID: LIB3147-008-Q1-K1-A8
agcatgactgcactgagagacttggcttttgagagtgggttattcctgaaaaagctggacctaaaattgcaaagaactctcttgcattcatatcgcaaggattcgacttctcaagtatctgctgaaactgacccagatgctctgctgacgaaagacgattcgcctactttatatacaggtacacagtagaactcttcaagctcctggaccgacaatttctgttgctgtaactcgatagaagaatgaactagatgattcagcatacatcatcttg

SEQ ID NO: 23717 - DNA, 372 bp, Gossypium hirsutum
  Clone ID: LIB3147-008-Q1-K1-A9
gtggagtttggaagaactgtgactaatgtcggagatggaagctttacatacaaagcaaatgtgacacctatcaatggacttaaggtaacagtggaaccagacacattggttttcaagacaaaatacgagaagaaaagctacaagctgagcattgaaggtccaaaacaattgcataaagctgtgttgtttggttatctcacatgggaagatagtggaaaggaacatgttgttacaagtccaatagttgccacaagctacaaaattgaaaaatgacaaaactcccattgtttttttctttaaattatcttaatgtttttttgctgaacatttataattgctttattcattaccataaaaacattaagataattt

SEQ ID NO: 23718 - DNA, 358 bp, Gossypium hirsutum
  Clone ID: LIB3147-008-Q1-K1-B1
gcaatatgcaaaggagtacgaggctcatgaaaaagagttgattcaattgaagcgggaggcaaagttgaaaggaggattctatgttgatccagaagctaagcttttgttcattgttagaatccgcggtatcaatgccatgcacccaaggaccagaaagatcttgcagctcctacgtttgagacagattttcaatggtgtttttcttaaagtgaacaaggcaacaatgaacatgcttcaccttgttgaaccttatgtgacttatggatacccgaatctcaagagtgttagggaactcgtttacaaaataggttttggaatgttgaacaagcagcgagttgccttgaccgacaacgcaatt

SEQ ID NO: 23719 - DNA, 417 bp, Gossypium hirsutum
  unsure (1)..(417): unsure at all n locations; Clone ID: LIB3147-008-Q1-K1-B10
cccacgcgtccgcccacgcgtccgggaagcggagcctgcggcggtggtagtcgaggaacctgaagcctcagttgaagttgaaaccaaggaggtggtagaagaaccaaaggctgttactgaggagccagtattagaggaggctcctaaggaaacaatgccagaaccagttgccgaggagatcaaggaaaccactgaacaaaccgctgaaaccaaagaaactacagagtctagtgaggcagcagcagaagcacccaaagaggaagttaagaaggaagaagaagcaaaaccagctgaagtggaggagaaagttgaaacagaagctgatccagcagagaagactgagtaaataataaagcttttgtgatgaaaatgcgggtgtcaatggaagtgtgnttcaaatggctacagtttgataag

SEQ ID NO: 23720 - DNA, 242 bp, Gossypium hirsutum
  Clone ID: LIB3147-008-Q1-K1-B11
cccacgcgtccggtttgctttactttatatggagtattttgaacttacaagactgtaatggaattttgttaaatttgcttagtttcttctgatgatgttttgcagttttctaactgttgaaaaaaaaacattaatatatgataaaaacgaaacaatgccaaaaacatttttggaaaaaatcatatgaaaatactgaaaaaaacactgaaaacacataaaacgacaaacgctaatgaacatag

SEQ ID NO: 23721 - DNA, 307 bp, Gossypium hirsutum
  Clone ID: LIB3147-008-Q1-K1-B12
gggatacacaatggggatggcatttcataaagggagcgggaatgaaccactgatgatcctccctcctaagttttctctttccaccaatatccagttagcaaaatcattgtcccaaagcactgatgattgaaccaaaactgatttcttaactttatatgcatgcttgcactgcaccattcataatgtgtatctctgacataaagttttcatgcaaaagctcttatgcttgcatctttgtatccttgacctgccaaagcttgcagcctctactgtagtctctcaaatgtaatgaaatggtttcatttct

SEQ ID NO: 23722 - DNA, 358 bp, Gossypium hirsutum
  Clone ID: LIB3147-008-Q1-K1-B2
atctttggcttctctttcagatttcaaagatgtatacatcaaggaagaagatccacaaagataaggatgctgaaccaacagaatttgaggagtctattgcgcaggcattcttcgatttggagaataccaatcaagatctgaaaagtgaccttaaagatctctatattaattcagcagtccaaattgatgtttctgggagccggaaagctgttgttatccatgtcccgtatagattgaggaaagctttccgcaaggttcatgttaagcttgtgagggaacttgaaaagaagttcattggcaaggatgtgattcttattgccaccaggaggatattaaggccttcaaaagaaagttctgc

SEQ ID NO: 23723 - DNA, 385 bp, Gossypium hirsutum
  Clone ID: LIB3147-008-Q1-K1-B3
accagagtctcagttgtggttcttggtgtagcaccccagaaagcacactttgagggagctgagatggaattcggggctgagaacggctgcaagtgtggagacaactgcacctgcaacccttgcaattgtaaatgattagagaccaaagccaaagctccctggaagcagagacgcctttgtctttaagaaataatatgttttgttgtttatgtgtttttagaataaagtagccatggcttgtcgtaagttttgcctgttgccgccacggttacttggtgcttgccaataaatagagtgaagtactaatatttacttgtttttctgtccagtgtgagcatctctgctatctcaggatatattgtgactattacataattaatgtaag

SEQ ID NO: 23724 - DNA, 181 bp, Gossypium hirsutum
  Clone ID: LIB3147-008-Q1-K1-B5
agaaaacgtacaatagagatgagtatacaggcaaggaagcactgattttagcgatttaccttacacaacactagaatcaatgagtattaactatgaacaattctttttggtaaaaaaaaaataaaaaaaaaaaaaaaaaaaaaaaaaaaaaaaaaaaagaaaaagcgcatatagatataag

SEQ ID NO: 23725 - DNA, 383 bp, Gossypium hirsutum
  Clone ID: LIB3147-008-Q1-K1-B6
gcttagcaaggggagctagagcagtgctccaagtatatcctgaaaatctagcccaacatgagctaattttgagttatgcaatgcgctctggatttgctggtggcgtggttgtcgattacccgcacagtaccaagaagagaaaagaataccttgtcctcacttgtggcccgccgtccctcagctctgtcgttcccagtggaaaaggtgaagacggagagagttgttctgatgatgagagcagtggagatgaagaaaatcagacggtttgcatttcggacaggcatagacctcagaaaaagcagaaagtaaacaagaaagggaagggcagagaatgggtgttgaggaagaatgaccagatgagaagggaagggatgtcgtccccc

SEQ ID NO: 23726 - DNA, 398 bp, Gossypium hirsutum
  Clone ID: LIB3147-008-Q1-K1-B7
cttgctttcaagcaatctaaacactgattttctcatcaaatcgctttgacatatggctcgtaccaagcaaactgctagaaaatcaaccggtgggaaggctccacgtaagcagctagccactaaagctgctcggaagtcagcaccggcgaccggaggagtgaagaagcctcaccgtttcagaccaggaactgtggctcttagggaaatcaggaagtaccagaagagcaccgagctcttgatccgaaagcttccattccagaggcttgtgagagaaatcgctcaagattttaagactgatttgagattccaaagcagtgccgttgccgctcttcaagaagctgctgaagcttaccttgtcggactgttcgaggatactaatctgtgtgctatgcatgcta

SEQ ID NO: 23727 - DNA, 323 bp, Gossypium hirsutum
  Clone ID: LIB3147-008-Q1-K1-B8
tgttactgcatctctcgtattatttctcgtatattaatggcgggtcggggtcagactctcggatccggagcctcgaagaaggcaacatcaaagcagttcacggctgggcttcagtttccggagggtccgtattgctcgagtacttaaagctgggaaatatgctgagcgggtccgagctggagctccggattacctcgccgccgatctagaatatctcgccgctgacgttctcgagctagccgggaatgcgaccaaggacaacaagaaaacctcaatcgtgccacgtgacatccaacttgccgtaaggaacgactaaaagctga

SEQ ID NO: 23728 - DNA, 386 bp, Gossypium hirsutum
  Clone ID: LIB3147-008-Q1-K1-B9
tcgcagagggaaagggcttgggaaagggggagcccagatgccttgtaaggggcttaagggttacattccaggggttacttagccggccatccgtcgtttggctcgtcgtggaggagttaagagaatcagtggcttgatctatgaagaaaccagaggagtgttgaagattttcttggagaacgtcattcgcgatgcagtgacttacactgagcacgctagaaggaagaccgtgacggccatggatgttgtttatgctttgaaaaggcaaggccgtactctctatggatttggtggttaagttttcggtttcttgttcgtgttatattgtactatgtaatctttgattatcatcaatggatttcgttaagaaaaatctattctcgctt

SEQ ID NO: 23729 - DNA, 337 bp, Gossypium hirsutum
  Clone ID: LIB3147-008-Q1-K1-C1
ctttttctttccttttcctctctaaaaccctaatttgatctccaaataccttcgagatctccaagcttcgtcaccccaaaatggccacgacacgcagatcccttcctcttctgagaaccctcatagccggaaaaacccaaacccgaaacgtgacgtacatgccccgaccaggagatggagccccaagacccgtaacgttaatccccggagacgggatcggacctttggtgacgaacgcggtggaacaagtgatggaagcgatgcacgctccggtttacttcgagaagtacgatgttcacggtgacatgaaacgggtaccacaagaagtgttggattc

SEQ ID NO: 23730 - DNA, 351 bp, Gossypium hirsutum
  Clone ID: LIB3147-008-Q1-K1-C10
cggacgcgtgggtgcaattgaaaatgtttaggagcctgataccaaagctcaatctattgaaaaagagaatggcatcaccgaaacttcccaccatgctatggtggctgggacacaacaatgccttgttctgcagtagcatttcattaatagaaccctgtaccttgcaggtactgtttccacaatatcagtttagttggaatttctatggattatggctggcactggtagcctaaataagcaaactcagtttgcactgttgctatcgactttgttgaaactgctatatgcttattggcttcatgatgtactacttgtttggatcatgaaaaatacaatgtaatgtttgctatt

SEQ ID NO: 23731 - DNA, 289 bp, Gossypium hirsutum
  Clone ID: LIB3147-008-Q1-K1-C11
cggacgcgtgggtgcttttgaaaatgtttttgagtttgataccaaagctcaatctattgagaaagggaatggcatcaccgaaacttcccaccatgctatcgtggctgggacacaacaatgccttcctctgcagtagcatttcattaatagaaccctgtaccttgcaggtactgtttacacaatatcaatttagttggaatttctatggattatggctggcactggtagcctaaataaacaaactcactttgcactgttgctatcgactttgatagaaactgctatatgc

SEQ ID NO: 23732 - DNA, 235 bp, Gossypium hirsutum
  Clone ID: LIB3147-008-Q1-K1-C12
cccacgcgtccggtttttcttttggggttttttgtatctccaaaagacatgaaaaagagttgtattattcccttgcttttgtttctctatccatttactaatggattttgcatgtgaaccaatctagtttgaacgaataataaatctttattcgtatttttattcttaaactgtaacacaatatcagtttaagttggaatttctatggattatggctggcactggtaaaactaag

SEQ ID NO: 23733 - DNA, 306 bp, Gossypium hirsutum
  Clone ID: LIB3147-008-Q1-K1-C2
cccacgcgtccgcccacgcgtccggagagctttttgcagagttttatttattgattctcttagttctcgttttcatcggagaagaaaagtcaaaaaacaaaaatttcatggctcggaaattctttgtcggtggcaactggaaatgcaatgggacaactgaggaggttaaaaagatcattacaacattgaatgaagctgaagttccttctgaggatgttgtggaggttgttgtgagccctccatttgttttccttacctttgtgaaaagtctgttgcggtctgatttccatgttgctgctcagaact

SEQ ID NO: 23734 - DNA, 291 bp, Gossypium hirsutum
  Clone ID: LIB3147-008-Q1-K1-C3
cccacgcgtccgaaaaaacaaaaaaaattcataatatctaagaaaaaaaaaaaaaaaaatattaaatggcgttttacatagaaaaaaaaaagtcaaaaaacaaaaaatttcatggctcgaaaattctttgccggaggcaactgaaaatacaagtgggaccgcttttgaggttacaaagatcattaccccattgactgaagctgaagttctttctgaggatgccgaacatctttttgtgagccctccattttcaaaccttacctttgggaaaactctgtgtctccctgattt

SEQ ID NO: 23735 - DNA, 125 bp, Gossypium hirsutum
  Clone ID: LIB3147-008-Q1-K1-C4
cccacgcggccgaaaaaaaaaaaaaaaaaaaaaaaagagaaaaacaaaaggaaaaaagggggacggggaagaaaaagacaaacaaacaggagccgagaaccaagcaaaagaaacggagaccgaaa

SEQ ID NO: 23736 - DNA, 402 bp, Gossypium hirsutum
  unsure (1)..(402): unsure at all n locations; Clone ID: LIB3147-008-Q1-K1-C5
gatggtgctgaggcaggtcgtaaaatggagcaatggctgatcaaaaaccatagttttgagccacagtatgcagcgtcggagctgaacgagaaggatttctggaggatgttcgatgctgacctgtatgagcatgtgcgtaagaagtacggagctgtgggaacattcatgagtgtgtactacaaatccaacaaaggaaggaagaccggaaaagaggtccaagaagcggagcaagcccaccttgaaactgcctatgcagaggctgattagtgagcatgggggagtttggtagattttatgtgagaggaatctttgcatgctctttggtgtctctttaattgagtatttgctttcagcgatggtattatggagggtcggaactgangttatgggatatgtttaagc

SEQ ID NO: 23737 - DNA, 357 bp, Gossypium hirsutum
  unsure (1)..(357): unsure at all n locations; Clone ID: LIB3147-008-Q1-K1-C6
ggcacacctgatggagatccaagtcaatggtggaacaattgctgacaaggttgattttgcttacaagttctttgagaagcaagtccccattgatgctgttttccagaaggatgaaatgatcgatattattggtgtcacaaagggtaaaggttatgaaggtgttgtcactcgttggggtgtcacacgtctgccccgtaagacccatagaggtctgcgtaaggttgcttgtattggtgcctggcatcctgccagagtctcctttacagttgccagggcaggtcnaaatggataccaccaccggactgagatgatcaagaaggtctacaggtgtggcaaggttggtgatgagacccactc

SEQ ID NO: 23738 - DNA, 380 bp, Gossypium hirsutum
  Clone ID: LIB3147-008-Q1-K1-C7
cccacgcgtgcggagaaacccaaaaagggctcgaaccccattactcagttgtggcacatgaatggtaaatgtcctgatggaaccattcccatcagaagaactaaagaagaagatgttttgagggcaagctcagttaaaagatatggtaggaagaagcatagggccatccctcagcccaagtctgcagatcccgatctcatcaatgaaagtggtcatcagcatgcaatagcatatgtggaaggggataagtattatggagctaaagcaaccataaacgtttgggaacccaaaatacaacagcctaatgagttcagcttatcccagttgtggattctgggaggttcttttggtgaagatcttaatagtattgaaactggttg

SEQ ID NO: 23739 - DNA, 372 bp, Gossypium hirsutum
  Clone ID: LIB3147-008-Q1-K1-C8
ccttaatgttgcagccattaaagctccgagtttcggcgaaagaagaaaagctggccttcaagatattgccattcttactggtgccgagttccaagcaaatgatctgggtttgttaatcgagaacacctctgttgagcagcttggtatagccaggaaagttatcatcaccaaggattcaacccaaataattgctgatgccgcttcgaaggatgaaatacaagctagggtgcaacaattaaagaaagaactagccgagacagattctgtttacgacacagaaaaactggcagaaaggattgccaaactatctggtggtgttgcagtcattaaggttggggctgcaactgagactgaactcgaggatcgcaagct

SEQ ID NO: 23740 - DNA, 361 bp, Gossypium hirsutum
  Clone ID: LIB3147-008-Q1-K1-C9
cggacgcgtgggaaagttgaaaaaaatctcagaaaaggatccagttcccataaaaaacttcgtatgtgatgtgaatcaacataaggggaaacggtttaccatttgtgcctggaaataaagattaccatgttgctcgactggctaggttagaataaattcagaggcgagttgttcttatcttggaatgatcttttgcaacttctttttgtgctatgcttctcaatgttttaatttctcaatacaacccaattttaagggaaaacagagagaaacattacataacaacgaaatgctttgatcataaaggctacactacccaatatcttttccttcaatgaacatgtgaaagtatattattatg

SEQ ID NO: 23741 - DNA, 406 bp, Gossypium hirsutum
  unsure (1)..(406): unsure at all n locations; Clone ID: LIB3147-008-Q1-K1-D1
cccacgcgtccgcccacgcgtccggctttctccacttgaaaagagtttggctctgttcttcatgccattggcttttggcgaatatggtgagattagtcagctgatcaacctcctcacccatgtctaggatatttctacgggtgaaactagatgggtagtctatgggttggaatggtcgaggtcgtttgtgtccttaggtttgggtgtttgtcaagggttggtctaccccgagtcatgtcagttatgtttgcatggttagagttgcgtttgggatttgagtagtgtcagacatgggtcatttgattgcgtttttcctggcagtaaccactgtgttgaaattatcttgctgctcagcccatgcattgaaagagttcttgttttanacaatcttcttttttttttttta

SEQ ID NO: 23742 - DNA, 395 bp, Gossypium hirsutum
  Clone ID: LIB3147-008-Q1-K1-D10
cccacgcgtccggggatgcttcaacatttcacagtttcaatgtcttgtggtgggttttcatcatcatcttcatcagatgaggaatattcatcatcttcaatggcggttcaagtttcaccatttccaaggcctggaaggataagtagatcaatgagttattcagccaggatggtgaggagatcagaggcaattgtttgtcatacaaagagttcactagttgcagtgatgattcaagctattgctcatagggtgaactatgtttgggttatagaagaagattgtagcttgcgtgggattgatactttttctgatatgttaaaagttgtccgggaaagttttgaaaccatggcctcgaaaggaaaatgagatgagaaagcttttttgcctttttaata

SEQ ID NO: 23743 - DNA, 318 bp, Gossypium hirsutum
  Clone ID: LIB3147-008-Q1-K1-D12
aaaaagattcgaaagccaaaaccatggttacatcctcagccgataacaaagtctgaacgcgagcagatgcgtgatgagttttgggacactgcgcctcattacggtggccaaaaaggtggatttctctgtaacttattgccatttaggttaacatgcctaagattatgaacaccttcgcatgtagataaacatgcctaagattatgaacatcttcgcatgtagatattctcgatttccgcaagtgtgaaggaatgctgttgatcttgagttgaccaaatatagaaaatcttcttttctgtatgagctgaaaaacttagt

SEQ ID NO: 23744 - DNA, 123 bp, Gossypium hirsutum
  unsure (1)..(123): unsure at all n locations; Clone ID: LIB3147-008-Q1-K1-D2
cagcggccaaaacaagcagannnncncggggnnnnggagnnnacaaggcggagaaacaagcncagcgcaaaggagcccacnaaggccccncagnnccaccagcncccgcgaannaccgcagcc

SEQ ID NO: 23745 - DNA, 357 bp, Gossypium hirsutum
  Clone ID: LIB3147-008-Q1-K1-D3
cccacgcgtccgcccacgcgtccgcgagtaaaaagctccgccgtcgacggctccgatcggcggcaacctagtcgacttcaacggtgtgctccggcttctatacggattagtccggtttcgaactggaacgttgcgatccctctcttatcaccggtccctccttcgcctccctcgattgatctggggatgactgagaaaagagaagagctaccgcgaaaagagcagcagcggcaaaagcagacaacggagcgtcagaagcgtgtttttgcgatgtggcaacatccagcggccccgttttgttacgaaccggcgccgtttgtgccggtttagatgtaaacaaaaaaatgttgttagatg

SEQ ID NO: 23746 - DNA, 333 bp, Gossypium hirsutum
  unsure (1)..(333): unsure at all n locations; Clone ID: LIB3147-008-Q1-K1-D4
ccataanccactccaagactctnccactgcagcagctgccactccctatgatcatggagctggtcatatcaaccctttgaaagctctagacccaggtttgatctatgacatttcagcccaggattactttgaattcctctgcacacagaaattgactgcaatgcagctaaaagcttttagcaagcattccaacatgtcttgccatcacaatacccttgccactccaggagatttgaactacccagcaatctcagttgtcttcccagaagatacagccatttcaactttgactctccatagaacagccgcaaatgttgggcctcctgcttcaca

SEQ ID NO: 23747 - DNA, 306 bp, Gossypium hirsutum
  Clone ID: LIB3147-008-Q1-K1-D5
atcttggatgagcctcagagaaattgttgagagcaacgaggacaaccgcttctaattctacaataccattcttggtttaatgatacataccggaccgaatcgatcaccgattgtggtacgatcgaccggtttgattttattattattaatatttagtagtagaatcacggacaactgattatgcaaacggctgatgccccttgtgcataattaaagcaatcttatttgatacgaaggtactccattgtcatttaaaaaaaaaaaaaaaaaaaaaaaaaaaaaaaaataaataaaaaaggatagaaa

SEQ ID NO: 23748 - DNA, 353 bp, Gossypium hirsutum
  Clone ID: LIB3147-008-Q1-K1-D6
aaacactcggcttctcccagatcttcaccaacctcccaaaatgacaacccgcttcaagaagaaccgcaagaagcgcggccatgtgagcgccggtcacggtcgtatcgggaagcacaggaagcaccccgggggtcgcggtaacgctggaggcatgcaccaccacaggatcctcttcgacaagtaccatcctggttatttcggtaaggttggtatgaggtacttccacaggctccgtaacaagttccattgccccatcgtcaacatcgacaagctctggtctcttatcccggaggacgtgaaagccaaggccatgaaagatgccgctccgatgatcgacgtgacacagttcgggt

SEQ ID NO: 23749 - DNA, 378 bp, Gossypium hirsutum
  unsure (1)..(378): unsure at all n locations; Clone ID: LIB3147-008-Q1-K1-D7
cccacgcgtgcggttttcaaggacttaatggctgcaagttgggatgagcttccctattcggttgtacaagatgcaaagaaagccttatcgaaaaatactgatgacaaagccggtcaggaagctttaagaaatgttttccgtgccgctgaagctgttgaagagtttggcggtattctaatcaccatgaaaatggaactcgatgacagcatcggagtgagcggagagaatgtaaaacctttatcaagcgagtttgctgctgcacttaagacagtgttccaacgatacgcgacttacttggatgcattcggtcctaacgaaacctacttgcgaaagaaggtagagaatgagttgggatcaaagatgatctacctanagatg

SEQ ID NO: 23750 - DNA, 326 bp, Gossypium hirsutum
  Clone ID: LIB3147-008-Q1-K1-D8
cccacgcgtccgcccacgcgtgcgcccacgcgtccgcccacgcgtccgcaggattataaccaggagaaagtaatttctagaggatcaaagaagtatgccgaggatcttgaaagtggtttcacctcagatgttgaatccaagtacaagaagatatatgaggatgatattaatccctttgcagcattctcaaaaaaggagagggatcaaagatacaaggagctgggcttcagagacagaatcacactcagcagcggacgttttcttctgggaaacaagtgtgctcgaacatttgcatttttctacacaattgggtagcatatcctagt

SEQ ID NO: 23751 - DNA, 71 bp, Gossypium hirsutum
  Clone ID: LIB3147-008-Q1-K1-D9
cccacgcgtccggccgggatcaacctcttcgaggcaaagcgaacaaacccccggcgcgaatcgcgccaagg

SEQ ID NO: 23752 - DNA, 346 bp, Gossypium hirsutum
  Clone ID: LIB3147-008-Q1-K1-E1
cccacgcgtccgtcttgatgctctgggcagggacgatttccggcgttcggaccaccgtccgtccgtcatcggcgaccgctgtatacggcggctggaagcgcaaaatcgacccctttttaacccttttgttccccttaccctagatccatagttgaagcgcccaaaaacctcacgaaaaccgacgaaaatcaagagaaacttctcggttctactctccgatcgccccaaacaaggtggtggttgaacggtggagcagaggctggttgggggttgacagagatgatgggacagaagcggcggctaggggtcttttttctggtaatgttttgggctgatgttagtggct

SEQ ID NO: 23753 - DNA, 375 bp, Gossypium hirsutum
  Clone ID: LIB3147-008-Q1-K1-E10
gttgtctataattcaagaggctagagaacctggtgagagtccaaaaattgggagtcaattacttggtggtagtatggagcttgatgacttatatactgatgcagatatagatgatatagagacgagtggtgattttgtctgtgcattgcaagtgtgaataataattaaaaacaaaatagcatcaacttttcaaaccaatatggctggaaattcaataaatagaaaaagggaaagcaaatttgaaggtaaagaaatgtggaagaagttgctttgcatagtatatgggatatggaattaaaagaaaaatgttgcatctcaggcttaaaaacttcacgactttccatatttgctcacgtttagataagaaatgacagc

SEQ ID NO: 23754 - DNA, 366 bp, Gossypium hirsutum
  Clone ID: LIB3147-008-Q1-K1-E11
ctactgttcacgaggaagcaatgcttgctataggtgctcttgcctatgccactggatcgcagtttgagaagtacatgcctgagttctataagtatcttgagatgggactgcagaattttgaggaataccaggtttgtggaatcacagttggggttgttggtgatatctgccgtgccttggatgacaaggtcttaccttattgtgatggcatcatgggtcttcttttaaaggatcttgctagttcagaacttcaccggtctgtaaagcctcctatattctcttgctttggggacattgctcttgcaataggagagcactttgagaagtatgttccgtatgctctgcccatgatgcacggagcaactg

SEQ ID NO: 23755 - DNA, 67 bp, Gossypium hirsutum
  Clone ID: LIB3147-008-Q1-K1-E12
tttctgaatgaagtaatcatactgtttttaaaagtactatagcctatgccactgaaacgtggatagg

SEQ ID NO: 23756 - DNA, 378 bp, Gossypium hirsutum
  unsure (1)..(378): unsure at all n locations; Clone ID: LIB3147-008-Q1-K1-E2
tgaagactacagtgaaactatgcaaagtattgccactggatgtgcagcacaattttcacttattcctcctgtttccagcactttctcatcccctaatatgactgatgaattgcaaactggagagatagaagcagatggaattttgatagatgaaaatccggcattgatcgtctacacgagtggtacaacaggtaaacctaaaggagtagttcatacccataagagcatctctgcacaggtgaaaatgctagctgatgcctgggagtatacgtctactgatcagattctggatttgctaccactacataatgttcacgagactttttaatgctntacttgcccctttgtatgctggctcaactgttgaatttataccca

SEQ ID NO: 23757 - DNA, 244 bp, Gossypium hirsutum
  Clone ID: LIB3147-008-Q1-K1-E3
atttcatccttggttaacacttagtggtataaatcattaaatgaccaggcatttggtctttagcgttgtttaccaaaaaaaaaaaaaaaaaaaaaaaaaaaaaaaaaaaaaaaaaaaaaaaaaaaaaaaaggcagataaaataaaaaaaaaaaaaaaaacgtacattaataagaaaaaaaaaaggggtcgtctagtaaaacctaaagagaatttcatgcccgtgggaacacaaatgcttatttg

SEQ ID NO: 23758 - DNA, 314 bp, Gossypium hirsutum
  unsure (1)..(314): unsure at all n locations; Clone ID: LIB3147-008-Q1-K1-E4
aggggctatcatccctnccaagcgnctccgcaacaagaacgccggcttttccacccatctcatgaagcggatccagaagggtcccgttcgtggcatctctttgaagctccaagaagaagagcgtgagcgtcgcatggatttcgttcccgacgaatccgccatcaaggttgatcaaatcgaagtcgataaggaaactctcgatatgctttcggttctcgggatggctgatattcccggccttgttaaggtcgatccggttgctgttgcggttccccaaatcgggttcggtcgcgggggtggacccggaaggagat

SEQ ID NO: 23759 - DNA, 428 bp, Gossypium hirsutum
  Clone ID: LIB3147-008-Q1-K1-E5
gaggaaatcaggaatacctgcaattccttcggtgcaaacaggaggcatcgtcgccaaagttactgaaaaggccgaagctgatggagaaaaggaggagcttgttcttcaggacaccttcgcccaagaaaccgccgtcctagttgaggatccaaacatgataaaatatgtagagcaagaattggcgaagaaaaggggaaggaacatggatctgaaaaatgaagttgagaatgatttaacacgagctgaagatgaattgtataaaattcctgagcatcttaaagtgaaaaaacggaattccgaagaaagttctactcaatggactaccgggattgccgaagttcagctccctattgaatacaagttaagaaatatagaggaaacaaaggcttgctaaaagctactacaggaaaaacggctcatgggacggg

SEQ ID NO: 23760 - DNA, 350 bp, Gossypium hirsutum
  unsure (1)..(350): unsure at all n locations; Clone ID: LIB3147-008-Q1-K1-E6
gaaaaaaaacgatgggtgttttcacatttgtttgcaggagcaaaggcggtgagtggtctgccaagcagttggagggagagattgagagctctgctgcttccacttacgagctccagcggaaacttgtccaggccgccaccgcctgcgactcctctggtggtgtcacctcctctttctctgtcgttacccctaattctgccgttttccaggtggttattggaggtgctgtaggcggagccttcatcgggggtggaggagctgctgccgctccggctggaggcgctgccgctgccgctgaaactactgcaagtgangagaaaaaggaagagagagaggggagtgatgacgat

SEQ ID NO: 23761 - DNA, 138 bp, Gossypium hirsutum
  Clone ID: LIB3147-008-Q1-K1-E7
gagcatatatgtatgggttctctagaatggaattgcatattacctagaagaaaggacaagcaaaagaagggaaagatagaaaacataaataaaaacaaatacaagataaaaaaaaaaaaaagaacaaaacaacaacgg

SEQ ID NO: 23762 - DNA, 349 bp, Gossypium hirsutum
  Clone ID: LIB3147-008-Q1-K1-E8
cccacgcgtccgctgaaattcacaagcagcagccgctaccgtgtcgctggcctcgtacttagccaaatttaaggatggattcacaaattaagtttgccgtggtggtgaaaattatgggaaggacgggatcgagaggtcaagtgactcaagtgagagtcaagtttttggatgatcagaaccgttttattatgaggaacgtgaagggaccggtcagggagggagatattctcaccttgctcgagtctgagagggaagctaggaggcttcgttgatcacttgctcttatctgcggtttgcagctttattaatggttatgttgcgcaagtagctggctgtatgatatttctga

SEQ ID NO: 23763 - DNA, 381 bp, Gossypium hirsutum
  unsure (1)..(381): unsure at all n locations; Clone ID: LIB3147-008-Q1-K1-E9
cggacgcgtgggctaagtctcttttatttgcttctttcaccatgaccaagcagcaggctaactggtctccttacgacaacaatggaggatcttgcgttgcgatcgctggagctgattactgtgttatcgccgccgatactcgaatgtcaaccggttacaatatactgacccgagagtactccaaaatctgtaaacttgcagataaatgtgtcatggcatcctcaggatttcaagctgacgtgagggctttacaaaagcaactggcagctaggcacttgatttatcagcatcagcacaacaagcaaatgagctgccctgcaatggctcaattgctttccaacacactntattacaagcgtntctttccttattattctttta

SEQ ID NO: 23764 - DNA, 395 bp, Gossypium hirsutum
  unsure (1)..(395): unsure at all n locations; Clone ID: LIB3147-008-Q1-K1-F1
cccacgcgtccgccggctccagccccagtagctgagccccatcacgaagaggagtcaaaggaaaagaagggaattttggagaaaatcaaggagaagcttcctggttaccactccaaatcagatgaagaaaaagaaaaggcttgagattcaagttcacataaaaatactgatgggattgtgtgtttcttaaattgttcaaaaattatctgcttttgtttttgaggttgtatttgttgtatatttcatatttaagtttcttcttttcccagcatttttagtacaaatcataaggaaaaaaaaagtttgctttcggtatgtgagaaatgacatgtttccattctgtctttttgtgattcgaacagtattttatgaatcaattnnctggcttctttgtt

SEQ ID NO: 23765 - DNA, 319 bp, Gossypium hirsutum
  Clone ID: LIB3147-008-Q1-K1-F10
catagatagtactttttgaagtgttgtgatactttatttctggcttaaatgttgacgtggttaagagttggtgagcaaagtcatatggatttaattgcggatatatactaaagaggaaatctcattatgatactttatcatttggtatgatctcatagaggagaaaaagatgggatggccagctcttcctgctgtaatccttaaaacttatattcaaaaactggcttaagttcctgctgtatgacacatactgtgcatatgtacaataaaacataaatctgggattttcaatgtatatatgagcttcaactgcttcctg

SEQ ID NO: 23766 - DNA, 403 bp, Gossypium hirsutum
  Clone ID: LIB3147-008-Q1-K1-F11
gcggcgactactactcgagcttcataacacacgaagcttttaactatggcgggtgtagagacagaggttgcggcggccggtgtgcccaagaagagaacattcaagaagtttagcttccgaggtgtcgatttggatgctctccttgatatgtccactgatgagcttgtcaagctcttccctgctcgagctcgcagaaggttccagaggggtttgaagagaaagcccatggctctaattaagaagcttcgcaaggcgaaaagggaggctccacctggtgagaagccggaaccagttagaacccacctgcgttacatgatcattgtacccgaaatgattggaagcattatcggtgtgtacaatgggcagacattcaaccaaagttgaatcaagccttgaatgatta

SEQ ID NO: 23767 - DNA, 353 bp, Gossypium hirsutum
  Clone ID: LIB3147-008-Q1-K1-F12
cccacgcgtccggccaaaacagaagtggcagcatgaaaagtgatttgtgtccagtatggagaaaccgcaagtgtgggtgtagatcactttcattagaataatagtgtctttctcacagcttagcaaagtttctttatagctcaaacatagcatttactgttctgctttttgaggtactaatagttaggtgcagcacaagacgtggcttttgcctgcatttgttggctgcagccctctggttaccgaaagtctgaactcctttaaacataaattaaactatttctttgtttagtactattcgcctagcctataatttgaagaccatattaaaacttcagtttctatttgatttg

SEQ ID NO: 23768 - DNA, 303 bp, Gossypium hirsutum
  unsure (1)..(303): unsure at all n locations; Clone ID: LIB3147-008-Q1-K1-F2
aacgggagctccagntnaccttgctgctgnncttgaatacctagctgctgaggttcttgagttagctggcaatgctgcaagagacaacaagaagaataggatcattccaaggcatgttctattggcagtgaggaacgatgaagaacttgggaagcttttagctggtgtgaccattgctcatggtggtgttttgcccaatattaacccagttcttttaccaaagaaaaacgaaaaggtggcgaccaaggagcctaaatcgccatccaaggctaccaagaagtctcctaagaaggcgtagtttca

SEQ ID NO: 23769 - DNA, 403 bp, Gossypium hirsutum
  unsure (1)..(403): unsure at all n locations; Clone ID: LIB3147-008-Q1-K1-F3
cccacgcgtccggccgcttccgtacaagttgctttctcttcttcatcagctacccatactgaggcttctcctttgacgaacttaaagttcgttctcggagtagcccttgtgtcagcgatcattggtgttattcttggaaagcgttattagtttagggttttttccccttcctttttgtgtttgattttactacattgctgatttttgttttctttgcattttccttctttaagttatgaagcagaatagaaaagctttattgctcgggttttgaggttcggttggggaacttgttttcattcttttccttgccctctttgtcagaaacagtcagttttatgcatatcgatatttaaatttgttttctgtaaaattgaatcngatngatcatgtttctggtttt

SEQ ID NO: 23770 - DNA, 320 bp, Gossypium hirsutum
  unsure (1)..(320): unsure at all n locations; Clone ID: LIB3147-008-Q1-K1-F5
gcctaatcaaatccacataccttaatttctgccgagtaatttcgaaaataatctaggtggtgttggcaatgccagcaacagacctgttcatttattttgggggttttgtttatgtttaatgatgttattcaagagtgtaaaagagcacttcggccccgcttttttctttgtttaaataagggaaatagaaggcggatgtgtacatttttttttttgttcgaaaacgctggctgctaaagccttatcctttctgactgccgtttattcgaaactacttctgttttgaaatgcattctagactaatgtttcctgtnnaaaaa

SEQ ID NO: 23771 - DNA, 395 bp, Gossypium hirsutum
  unsure (1)..(395): unsure at all n locations; Clone ID: LIB3147-008-Q1-K1-F6
ctctttctctattctctttggcttatctatcgctttgatttcgcgtccttactgtgcactcgatggcaaatcgatggttgaggcctgaggtgtatccgctgttcgcggccgtaggtgttgctgtcggaatctgcgggtttcagttggtgcgaaatatctgcatcaaccctgaagtcagggtaaccaaggagaacagggctgctggggttttggacaactttgctgagggagaaaaatattctgaacatttcttgagaaaatatgtccgcaacaagacgccataaatcatgcccagtatcaacagcttcttcactgacccaaagtgaggcttcactcttgctttatgctgaaactaaaataagagaatagaagaactaagnctnattcaatcaata

SEQ ID NO: 23772 - DNA, 369 bp, Gossypium hirsutum
  unsure (1)..(369): unsure at all n locations; Clone ID: LIB3147-008-Q1-K1-F7
cccacgcgttcgggcttgataaggatttgtagcttttgtagccaggaaacttgagttggctggcttgatttgtggctatccagctgtcttttgtttgttttggttttttgtcacactgattccttttatgttcgtggagtgaagtgagatgatatgctctccatgttcaacacctctcattattgtaattaatcataaataatacactaatatcattccattagtatacgaaatcctcagttaacaaaggactattctagtcatttcgcaacaagacgccagaaatcatgcccagtgtaagcagctatttgactgacccaaacngaggcttcactcttgctttatgctgaaactaatattaaaaaaata

SEQ ID NO: 23773 - DNA, 347 bp, Gossypium hirsutum
  Clone ID: LIB3147-008-Q1-K1-F8
acctgctcctttatatcctacatcacttggagtcttttagaccactgagatcgaggagctttttcaacttccaattgattgcattacctccatatcagggcaatatattgatacgcatttactttaaagtgtcattgaaacctctgttcattcatttcagtttggttgcaaataagtgtggttagtatcactctaatctgtcatgaaaaagtttcattgtagatctaacagtttggctatccatatcatattatgaatttgatcatgtttatgttaatttatttatatgtagaatatgatttgctaataaggcatatttgtgtatattattatcagatctaaatgtc

SEQ ID NO: 23774 - DNA, 319 bp, Gossypium hirsutum
  Clone ID: LIB3147-008-Q1-K1-F9
gggagtgcttcatttggtacgtgtggcaatggaagccattagccattaaggagaagggaaaaaaagaaaaaagaaaaagaaaatccggttggtaaggatggttttatactaggaggaaatctcattatgatactttatcatttggtatgatctcatagaggagaaaaagatgggatggccagctcttcctgctgtaatccttaaaacttatattcaaaaactggcttaagttcctgctgtatgacacatactgtgcatatgtacaataaaacataaatctgggattttcaatgtatatatgagcttcaactgcttcctg

SEQ ID NO: 23775 - DNA, 350 bp, Gossypium hirsutum
  Clone ID: LIB3147-008-Q1-K1-G1
cgttcgtctcttaattttggttggatatcgaagatgtcaggaagaggaaagggaggcaacggtcttggcaagggaggagctaagcgccaccgtaaggtcctccgcgacaacatccagggcatcacaaagccggcaattcggcgccttgcccgtaggggaggagtgaagcgtatcagcggcttaatctacgaggaaacccgtggagttctcaagatcttcttggagaacgtcattcgcgatgcggtcacatacaccgaacacgccatgagaaagacggtgactgccatggatggggtttatgcgctgaagaggcagggtaggactctgtatggatttggcgggtagttgat

SEQ ID NO: 23776 - DNA, 392 bp, Gossypium hirsutum
  Clone ID: LIB3147-008-Q1-K1-G10
ccagaaacagaaaaaaaaaacacaatcaaatcggttgttggaaacaaatcgattcgtcgtcttttaatcatcacttaagttcaagtttaggaagttagatcattagaacttaaaaagggatttaattgattatcacaagcaattgttgggagaaaaaaaattaaagtagaaaattttgcttgcttcaatagaaatttgctccaaatctcgattctactacaacatcgataaacccaattcattatcggagcaaagaagctttgtttttgaatcttgaagacgtttatcatcttttcagttgatatgattgcatgagcatattgacggcgaatttggacggaaaatggtgaattttgatggaaaatacgaattttgacggaaaatacttcaaa

SEQ ID NO: 23777 - DNA, 323 bp, Gossypium hirsutum
  Clone ID: LIB3147-008-Q1-K1-G11
cccgcgcgtgcggatgtttaggttaagcccagagtttatggaagcgtctgggtattcgtgtggaagatgctttgcaacatgatttcaagagatattatgtaatccccttcattttgctgtatctatcttgtaatgaaagggtagaatttgagatcagaaatttgctttttgtcattgcttatgtcattatttattcatgcatgacttggcgatggtaaatgcaattatatctgcaaattaaaatggaatctgtataataatatcatttcaatcacatgtgtgatatgtagtctatagcatctttcacaaagcatgccccttat

SEQ ID NO: 23778 - DNA, 408 bp, Gossypium hirsutum
  unsure (1)..(408): unsure at all n locations; Clone ID: LIB3147-008-Q1-K1-G12
atgctggtgtctacgaggctattcgtggttttgattggactcaacaaacacaagttcttgttgctgctttctcagagctttacactaagaggatgtttgaactgctgcaatctgcttattcgacaataagcatcgaagatgcagctcaatttcttggaatgagtgaggaagatgcctcgaattatgtactcggacaaggttggacagtcgatcctacttctcgaatgataaccgtgatgaagcaggctatcgtgaaggagcagaagttagacccgggcaaattgcagcgactaactgaatacgtcttccacctcgaacattaaatcatgtctgtaatttctgtgattntttgactgtcttgctgaaaatttcttttaagcaaagctaatggttctaatcattatgagt

SEQ ID NO: 23779 - DNA, 383 bp, Gossypium hirsutum
  Clone ID: LIB3147-008-Q1-K1-G2
cccacgcgtccggaatgataaaccaggactattgtttacaaattggtggaaggtgaaatcatgaaagctttcaaaagctggaactccatcctcaacgtgatgccgataggggagggaagtttggtgaaatggactatggaatttgaaaagcaaaatgatgatgtccctgatcctgtcaagtacggcgagtttttaactacctgggctaagaatgtcgatacttaccttcttaatgtctaattaaataattaaggaaactacatatatgaataatttgatcatatgtctcgttcttaaataaattatacaaataatctttataaacatgcatttaaatattttataatagctgattaagcattagcttaattggcaacgtttgc

SEQ ID NO: 23780 - DNA, 370 bp, Gossypium hirsutum
  Clone ID: LIB3147-008-Q1-K1-G3
aattccgggtcgaccagcgccggaagaggacacaagcctgaaattcttgaggtcacaagtgtacgattttatgaccctgatatcttgtaaggcttgaaagttggagcggaagagggtcttcgacaagcggaggagaagggatgacttgagatggatggccaagaattatccctggaagagcagaacactagctgagattaggaaaaagaagacttgcttattcaacagcataggatgaagaaaagcactgcagaaagtcgacctgttgtaccaagaaagttcaacacagatagaaagttcacaacagggaggatgggtcgggagctatcttctttggggctggatccctctcttgcaattaatcgtgctc

SEQ ID NO: 23781 - DNA, 332 bp, Gossypium hirsutum
  Clone ID: LIB3147-008-Q1-K1-G4
cccacgcgtgcgggaaaactggaatccaaagtgtattgttacatggccttaaccaaggaaagaaggatttgacgtggcagaaatggtcataccaggttggcttaagaggagaagcaatgaatttggtctctccccatggagcctcttctgttgaatggattcgaggtgaacggattcaaggttcactagcagcacggagccggcagtctatgacatggtataagacgtatttcaatgccccaggaggtaatgaaccactggctttggatatgcggagtatgggaaagggtcaagttttggttaacgggcagagcttataaggatattggatg

SEQ ID NO: 23782 - DNA, 395 bp, Gossypium hirsutum
  unsure (1)..(395): unsure at all n locations; Clone ID: LIB3147-008-Q1-K1-G5
cccacgcgtccgtaccaattcaaatggttcaaatgttttcggtgcggtgccttacaacccatctccgccgtcagccgccgctatcagattaagaccacccgggcagccctttttcaccactttgacatgcctgggcatatactatcaacgtagcagatgaagacctttttttctttttcttaaaatctcttggttgccacaaggttttaaaatttttaatggaaactaaggagaaccatataaattgcttagtgaatgatgagcagataaaatgtactagaaaaatgaaagaatgagagagaaccacattttattttcctttttctttttcttttaactttaggttgaaaatgcgttgtagtagagggatggctnatccatgtaatttttttttt

SEQ ID NO: 23783 - DNA, 433 bp, Gossypium hirsutum
  unsure (1)..(433): unsure at all n locations; Clone ID: LIB3147-008-Q1-K1-G6
cccacgcgtccgcccacgcgtccgggcgggattacccgctgagtttaagcatatcaataagcggaggaaaagaaacttaccaggattcccctagtaacggcgagcgaaccgggaaaagcccagcttgagaatcggtcgccatcggcgtccgaattgtagtctggagaagcgtcctcagcgacggaccgggcccaagtcccctggaaaggggcgccggagagggtgagagccccgtcgtgcccggaccctgtcgcaccaagaggcgctgtctacgagtcgggttgagtgggaatgcagccgtaagcgggcggggagttccgtccaaggctaaagacgggcgagagaccgatagcgaacaagtcccgcgagggaaagatgaaannnctttgaatcttttcctcttggattacagtaatggttcacatgtcattga

SEQ ID NO: 23784 - DNA, 367 bp, Gossypium hirsutum
  Clone ID: LIB3147-008-Q1-K1-G7
cggacgggaagcttcgagttcttttaggtgattttctgttagggctgtttggtaggtgatggctccaagtcaacctaaaactggcctttctgtgggcttaaacaaaggacatgttgttaccaagaaggaattggctccccacccttctaatagaaaggggaaaactagcaagagagtccactttgtgaggagcctaattcgggaagttgctggtttcgctccgtatgagaagaggataactgaacttctcaaagttgggaaagataagcgtgctttgaaggtggcgaagagaaagctaggcactcacaagcggaccaagaagaagcgtgaggagatgtctagcgttctccgcaagattaggtcagct

SEQ ID NO: 23785 - DNA, 407 bp, Gossypium hirsutum
  unsure (1)..(407): unsure at all n locations; Clone ID: LIB3147-008-Q1-K1-G8
caggaaaccggtccagaggaagcgagtcgggtcggagcagcgggtttcgaagagatctggctccgtcgatgacttgaaggcggtggcgaacaatttcaagatggagaaggttacgattttgaggcgtggagagtcgttggattcgaagatcaagagcaacagcggtggtggaaaggaagacgggttggttgtcacgggtacggatcggttaggtccagatccagaaatggtttcgaaacagatcagatttgtggatatcaagtctccggtgacaggaaaatccgacgtgtacgctggatcgtctttcgctgcctgtccggaaccgagttctattcctttgccttctttctcgaagaagaagcatgttccgatcgatgattcnnncnttagagatctcatgcgtatac

SEQ ID NO: 23786 - DNA, 406 bp, Gossypium hirsutum
  unsure (1)..(406): unsure at all n locations; Clone ID: LIB3147-008-Q1-K1-G9
ctcttcttccaagccaacaagcgtaaaggttgaatcttttcccccatttctccactcctaaagtcagggtttcgagcaacaatagaacaaaaatggggttctcaatgcagccttatggcatacaatccatgctgaaggaaggtcacaagcatctctcaggtctcgacgaagctgttctcaaaaacattgatgcttgcaagcaactatccaccatcacccgcactttcctcggccccgaaggcatgaataagatggtaattaatcatttagacaagctctttgttaccaatgatgctgctactattgtcaatgagctcgaggttcaacatcctgcggccaagattntagttctagctggtaaggctcagcaagaggagatcggagatggcgctnacttgacgatttc

SEQ ID NO: 23787 - DNA, 279 bp, Gossypium hirsutum
  Clone ID: LIB3147-008-Q1-K1-H1
ataatcccctgtttgtttgttttttttgaacggtgcatcctggttttgctttatttttgacaatccgaccaaactttttagtcatttatggggaattctttgcttctgttctttcatggaggaccagtgttttgcttttgttctttcatggaggaccagtgttctttcatggaggaccaaacttttaagggatccttcagatcggctatttggtacctttgggagcaggggtgctaagcagaattcaaagaagaaatctttggatgcattgataaaaag

SEQ ID NO: 23788 - DNA, 222 bp, Gossypium hirsutum
  Clone ID: LIB3147-008-Q1-K1-H10
ggaaatgaacactaagaaggtgagtgtgcaaacaatgcatagtgactatttaaatggagtgagcatagctacatctactgagtcacttatcatcctaaactgatgcttttaattaggacgatgcgactgtatcaacttaacatgtggaacatcgagggggggattggcttcttgcacagtgttattctacatctctgctgcctacagattggctatccgaac

SEQ ID NO: 23789 - DNA, 426 bp, Gossypium hirsutum
  unsure (1)..(426): unsure at all n locations; Clone ID: LIB3147-008-Q1-K1-H11
cagaaccccactgaggcagaactgcaagatatgattaatgaagtcgatgctgatggaaatgggaccattgattttcctgaattccttaacctgatggcaagaaaaatgaaggatacagactctgaggaggagcttaaagaggcattcaaggtgtttgacaaggatcagaatgggttcatatctgcaagccgagctgcgccatgtcatgacaaaccttggtgaaaagcttacagatgaggaagtcgacgagatgatccgcgaagctgatgttgatggtgatgggcagatcaactacgnaggagtcgtcaaagtcatgatggccaagtaaaggacctctccaactataaccaggatttaaaattggnngttaaaaaaaaaggaagaaagggacagggcagantagtttgctagatatctattaatgat

SEQ ID NO: 23790 - DNA, 321 bp, Gossypium hirsutum
  Clone ID: LIB3147-008-Q1-K1-H12
cggacgcgtgggtggggaagattttttgatatggccccagacagggtacccaaaggaacgtgttcaaagtgacttcacgacacagcttgtttgctattgtcaatggaaggtgtgtggaggaccctagatcaatggcatcagattttactggtacttcactgttagggcttgagatagctacaaaccgggatattattgggattgcattagccaatttgattaagcttcactggaaacgtgcttcaagacaaatcatggattgatgctgacttctcccttaggcatgttaatgatgccagtgagaaacccaacatgatggat

SEQ ID NO: 23791 - DNA, 354 bp, Gossypium hirsutum
  Clone ID: LIB3147-008-Q1-K1-H3
cccacgcgtccgcccacgcgtccggtttctatctctcttcctaacaattgagcaattttctgttattttctctctcgacaaacaatggaagcgttctttgaatctcgatcgagaagcaactggagttacgatacactcaagaatttccgtcagatttctcccgtcgttcaatctcatctcaaaagggtttatttgaccttatgttgtgccctggttgcctctgcttttggggcttatcttcatatcttatggaacattgggggttacctcacatcattcgcatgcttcggaaccatgatttggctgctctctatccctccttatcaggaacaaaggagagtttcccttctgatg

SEQ ID NO: 23792 - DNA, 285 bp, Gossypium hirsutum
  Clone ID: LIB3147-008-Q1-K1-H4
gacctgtctcggctactctgtacttggggtattctctcttcatgggtctcacaatcatgttcgcaactggcacggttggattcctttcttctttctggtttgtgcattatttattctcttcggtaaagctggattgaagatggtttctccaggtatgcacacaaaaaatggcacactgaagaggtaggtggacaatgaagaggatcttgagaaaagaattcaacccttatattagtcagtcttctctttacaagtattttgttatcttgagctttactttagtgg

SEQ ID NO: 23793 - DNA, 179 bp, Gossypium hirsutum
  Clone ID: LIB3147-008-Q1-K1-H5
cccacgcgtccgcattgttcttttgatgttaaaaaaaaaaaaaaaaaaaaaataatgagaaaaaaaaaaaaaaaaaaaatagaaagaaaatttggggggtcgtttttgaggttccatgttttcgtacgcgttcttgcgactttatacctattttttagggtctcctatattcatttcat

SEQ ID NO: 23794 - DNA, 112 bp, Gossypium hirsutum
  Clone ID: LIB3147-008-Q1-K1-H6
gatttttgttttcgatgaagagttgtgttgtaccttggttttcccccagccacaacataattggaattttaccatcataatgaagatttaaaaggctctgcgttgtgccttt

SEQ ID NO: 23795 - DNA, 368 bp, Gossypium hirsutum
  Clone ID: LIB3147-008-Q1-K1-H7
caggtacgggtggtggacacaagttttaccattaagacaacaatgtggtagatcccgaagatattaatagcttttatcttggagaaaaaagaaaaagaggggcattacttctacggaaactgcattaatcaacgggtcccggctttccatgttttaacaaaatttgacacacaaagctctttcccaacttgttgtcaaggcgtgttttggacagcacaatgatttggaaccatacacgtgactcacaacgtggggtgttaaatctctaagctccttgctgtcttatatattaaagggatactgctttattgtgtactccaattttattaaaaatatattctaatcttcttatttaaaattttatgtgt

SEQ ID NO: 23796 - DNA, 268 bp, Gossypium hirsutum
  Clone ID: LIB3147-008-Q1-K1-H8
ccgagatccttggcggtgaaatctccgggaccgaagcggctattgacgacgcttatcaacaaggcgatcaagtttgtgaaccggaaaaaggccggtgagaaaaccgggaacgaagaggaggagatcggagacggcggcgtatggcaaagagcgatcctgatgggagataaatgtcagccgctagatctttcaggtgtgatctattacgatcgcaaacgaaatcaagtggaggagttgccgtttcgttccccacgtgctagtacgatgc

SEQ ID NO: 23797 - DNA, 357 bp, Gossypium hirsutum
  unsure (1)..(357): unsure at all n locations; Clone ID: LIB3147-008-Q1-K1-H9
cccacgcgtccgcccacgcgtccggtaagaaacagcacacggtgactcgagaaaaacaagagatagaactactagcccgtggtcgtcatgatccttgtgttgtccctcgagcggtgccgatggttgaagcgatggtagcgttggtgcttgtggaccaattaatggcacaatatgcacaatgtaaccttttccctatcaattcagagttacaagaaccgttgaacttggaaccggcaaatatatagacttgaatggttgcagaaccggcaacatcggcccttgctttcatcaacttgaattttcttaaatactccatttttcatgagaatgttgtggttntaatgtttttgtcaacac

SEQ ID NO: 23798 - DNA, 393 bp, Gossypium hirsutum
  Clone ID: LIB3147-009-Q1-K1-A1
cccacgcgtccggcagtgctaaagcatttagcaatgaaccgtaaagcccttaaaacttgtgccagctaattaatttatgtgtttctttctggggagtgatgcaaaaagcttcttttcatacagctgggatccctttccatgaagggtagcataaactttaatagttaagtttgattgattttagatgtctcgttgcaaaggcaaggcaaatatcaagaagccattaaataccactcaatggttttagcaatatctgatcgagaaggagaagactctagaaatacagaagcctatggagcaattgctgactgctacaccgagctaggagaccttgagaaagcagggattttatatgataaatatatttctaggttggaaacagactaatgaagc

SEQ ID NO: 23799 - DNA, 300 bp, Gossypium hirsutum
  Clone ID: LIB3147-009-Q1-K1-A10
ccgaaccaccccctacggacaaagcgtattttgataacttgccagctccctctaaagatgtcaaaattaaaagcaacctggctgagaccctacaatccaaatgcagtgtcaacatcccttacaagatcagcacttacactaactgcctaaatctccatcgagatcgatgaagagagtgttacgcatcagcttgcacgagataaattatatgcttaaaaagaagaagaataagattgaataaccattttcggatggaatttttcaaatccaaaattagtctccactctaatgtacagaggc

SEQ ID NO: 23800 - DNA, 272 bp, Gossypium hirsutum
  Clone ID: LIB3147-009-Q1-K1-A11
ccacgcgacccacgcgtgcgatgggcccctttatggtcttcttaagtttttgcttaaggacaaactgaatggcaattgcggggtgggtgagagatgcattcgtaatctgattcgaaactgtagacttgatgcaaagattggctcgaagactgaaaaccccatggggggggcctaataaagcgtctgagtacgagccgctgatcgaccacactaacgctcttcaaggtcggacctacaacctactcggccggcttcttgagcacgcacaagca

SEQ ID NO: 23801 - DNA, 370 bp, Gossypium hirsutum
  Clone ID: LIB3147-009-Q1-K1-A12
gcggcggaagtcgaggaaggtgaaggctcagttgaagttgaaaccaaggaggtggtagaagaaccaaaggctgttactgaggagccagtagtagaggaggctcctaaggaaacaatgccataaccagttgccgaggagatcaaggaaaccactgaacaaaccgttgaaaccaaagaaactacagagtctagtgaggcagcagctgaagcacccaaagaggaagttaagaaggaagaagaagcaaaaccagctgaagtggatgagaaagttgaaacagaagctgatccagcagagaagactgagtaaataataagcttttgtgatgaaaatgcgggtgtcaatggaagtgtgtttcaaatggctacagttt

SEQ ID NO: 23802 - DNA, 265 bp, Gossypium hirsutum
  Clone ID: LIB3147-009-Q1-K1-A2
aaaaaaaataaaaaaataataaaacatattaagattgaacctttaaaacattaaaacttgggcaagctaacttgcctatgtgtaactttcttatgaatgatccaaaattcttttttttgtccgtctgttatcactttccatgatgggaaacatatgccctaatcgataagattggttgattagaaaattctcgttgcaaacgctagggaaatatcaagaaggcattcactacctctcaatggttttagcagtatatgatcgataa

SEQ ID NO: 23803 - DNA, 410 bp, Gossypium hirsutum
  Clone ID: LIB3147-009-Q1-K1-A4
gccgctcttggagggagctctggacactttcagttagtattcagttaatgaagaagacgtcgatgttgtttgggtcccgggtagttttgaaataggtattgttgcagaaagactgggcaagtctcgaaattatcatgcaattttatgcattggagctgtgataagaggagatactactcactatgacgccgtggctagttctgtagcatctggggtgctttcagctggcctaaactcaggtgttccttgcatatttggggttttgacttgcgagaacatggaccaggcgttaaatcgagctggtggtaaatctgggaacaaaggtgcagagtgtgctttaacggcgattgagatggcttcctttgttgatcaccatcttaagtagtggccgcattattcattacatgatg

SEQ ID NO: 23804 - DNA, 317 bp, Gossypium hirsutum
  Clone ID: LIB3147-009-Q1-K1-A5
ggaacacccggcccgacccacgcgtccgaaatttttcagggcttatctttatgtctgtgttcgagttatgtgagattggggtctttgattttagtatttttgttgatgatgtttgtaactgatagttcaaggatgtattgtgatcagtgaagagacaattgttatgttggtttaaacaaaaaaaattaagtttaaatgaatttaaaatagaatagaaacaaaatgcaaagcaaatataaagaagccatttaataccactcaatggttttagcaatctctgatctagaaggagaagactttataaatacagaagccta

SEQ ID NO: 23805 - DNA, 437 bp, Gossypium hirsutum
  unsure (1)..(437): unsure at all n locations; Clone ID: LIB3147-009-Q1-K1-A6
gtcgtcgcctttttcaccggttaaattttatctccttatctatcttttctacgtcagagatagtttgactgaaattgcaatgaacaagaatttgctctgaatttcatttttcgggctttgaagattggtgagcttttgtgctttagaagaatagcagaatgggatgtgttggatcgacgccggccaaaggagacgggaatgcgaaaaagattcgaaagccaaaaccatggaaacatcctcagccgataacaaagtctgaactcgagcagatgcgtgatgagttttgggacactgcacctcattacggtggccaaaaagaaatctgggatgcacttcgggctgctgctgctgaacctgatttaagccaggctcaagttattgtggactgtgcggnggtcatagtccaaaatactgatctaactatctgctatgatgaa

SEQ ID NO: 23806 - DNA, 263 bp, Gossypium hirsutum
  Clone ID: LIB3147-009-Q1-K1-A7
cccacgcgttcgaaaaagcagtctctgtttcttccctacctctctaccattcgcttcagtaagctaatctattagttgctcgctcactaaacatggcaaaagaagccgagaacagcatccctacatgccagagcttatgtacacccaaccaagcgccattgatagaacttgaatgctcactggacgtcgaggaccgagaaacatggataagaatttggtcagaactaatcaaacaatgtccaacgcgaacgtatacaggactc

SEQ ID NO: 23807 - DNA, 425 bp, Gossypium hirsutum
  unsure (1)..(425): unsure at all n locations; Clone ID: LIB3147-009-Q1-K1-A8
gctaatctcatctgcattactcaataccaatggcgtcttctgctacctttaggacttgggttctctcttcttctttcgccactcaatgcaacgtttcaaatcgtcaccaccaaagttgttttctttcttctcctcccaaaattcccattttctctatccctaaacccgtttctttgaagctcacttctctcctctccaaaacacccacattttttacaatccccaaatcttctgaatccgacgctgccgttgtcgatgttgaacctgataacgtcgagcccgaaccagaacccgaagcagcaccagaaccggaaccggtaccggaaccagcttcggttgttgaggcttccaaggaagaacccaaaagggaagagatttttgctggtgttatgaatggnggtcgccaatacattgttttccctgga

SEQ ID NO: 23808 - DNA, 277 bp, Gossypium hirsutum
  Clone ID: LIB3147-009-Q1-K1-A9
gacatactgcagaattcatcagcgcatttatatggttgtgctttttgagaaactgaatggaaattgcgaggagggtgagagatcgattgagaatctcattcgaaactctaaactagatgcggagattgagtcaaagactggaaccgctattatcgagcctaatcaaccgaaagtttacgagcagctgatcgaccacactaatgcccttcaagggcagacctacaagctagccggccagattctcgagcactcacaatcacaatctgaacgttaagtt

SEQ ID NO: 23809 - DNA, 361 bp, Gossypium hirsutum
  Clone ID: LIB3147-009-Q1-K1-B1
cgatgggttagtgaaggtttacctgtttattgtggtaggttcaagcatggggagcctgagagcattgaagatcgtcttatgttttcccatttgataagttgggaaaaaggaccatatagagatacctataagatatatccaagaaaaggagaggtttgggccctttttaagaactggaatgtcaactggaagtcgaggaccgagaaacatggatatgaatttgttgagatcttatcagagaatggtgaaggtgtaggtatacatgttgcttacttgactaaggtcaaaggctttgtgagtgtcttctgtccaatgagtaaggatggagttaatacaattctaattccgcccaatgaactac

SEQ ID NO: 23810 - DNA, 434 bp, Gossypium hirsutum
  Clone ID: LIB3147-009-Q1-K1-B10
ctcttcctcgctttcgcgctccgctatagaccaacctgccgtttttgtgagcagatcacgccagcctccagatgtgcaaaaagtacatggacacgaaactccagatcaagctggatgcaaatcggatggctgttggtactcttcgagggtgagatcagattatgaatctagtggttgacatcacagtagaggagaatggccatgagaaaactgtcataagcatggaggtgataagaggaaatagcgttgttactgatgcagcccttgaacctgttggcaaaaggcagtgatcatggtttgtttatggattcattactgtgatgtatctcttcgcttcgatgatccaatggcatccctgctagtttgagattgagattgagctattttatgtagttgagaatttgtcggaggttagatgggactacatggaatct

SEQ ID NO: 23811 - DNA, 351 bp, Gossypium hirsutum
  unsure (1)..(351): unsure at all n locations; Clone ID: LIB3147-009-Q1-K1-B2
agcaaaactaataaacatcaacaataaatcggaattccccagcagcaatggctactccaagtgtagagtatttgcctcctccattggatgctactgcacagcaacccgctatctttgatggaacaatcaggttgtatctggcttatccttgcccttacgcacagcgcgtgtggatcgccaggaattgtaagggtttgcaagacaagattaagttggttcctttgaaccttcaaaatagacctgcttggtacaaggaaaaagtttaccctgaaaacaaggtgccgtccttggaacataatggcaaagtcattggggagagtctngatttgattaaatattttgatagcaact

SEQ ID NO: 23812 - DNA, 317 bp, Gossypium hirsutum
  Clone ID: LIB3147-009-Q1-K1-B3
agctaaactaatgaatatcaactatatttttgttttccccagcagcaatggctacttcgagtgtagagaattagccttcggcattggctgctactgcacagcatcccgctatctatgctggaacaatcaggtcgtatctggcttatcctagcccttacgcacagctgcgtgtggatcgccaggaattgtaagggtctgcaagacaagactaagttggttccttagaaccttcaaaatagacctgcttggtacaaggaaaaagtttaccctgaaaacaaagtgccgtccttggaacataattgcaaactcattgaaga

SEQ ID NO: 23813 - DNA, 356 bp, Gossypium hirsutum
  unsure (1)..(356): unsure at all n locations; Clone ID: LIB3147-009-Q1-K1-B4
caactctctttcttttaaagtccacgctttctttcttcctcacattaagatttcaaatcccctttttttgcggcggttaacgtttgctgatcgttgcttggtttccgaggatcaatcatgactcgtggtaaccagagagatcgagatcgagaaagggctcaatcccgagcgggcggcaaaggcagcaagaccaaggacgatggcttaaccccagaacaacgtcgtgaaagagatgcaaaggccttgcaagaaaaggcggcaaagaaggctgcgcaggcggcagctggagggaacaaatgctgaggcggtagtaaaaccaagaaataattatccgatgatgtcaaaatngtaatgat

SEQ ID NO: 23814 - DNA, 330 bp, Gossypium hirsutum
  Clone ID: LIB3147-009-Q1-K1-B5
atcctcttgatgtcctcgtttttgaatttaaatcctcttcattttgttccggggatgggtcaacatcagaagggaggccatctttgtttactccaccagctatgccatctgttccacctatttgaagagatgagtccagcaatgctgccgctgtcgctgctcgtgcatggatgtctataggagctggcgcctttaaggaagcaaatgaaaactttggcacttcgaaaggaaaaatatccgcagattcgttatacaacccggctagggaactttatacacaagctccacaagttcgagggcaattccctctttctgcggtgatgcattttc

SEQ ID NO: 23815 - DNA, 309 bp, Gossypium hirsutum
  Clone ID: LIB3147-009-Q1-K1-B6
gtcaatggtcacattttcaatgtgggtttcccaaacaatgaagttacagttaggcaacgtgctgaaatgatgactaaggtctataccaaggttagtggagaatctgcactggagactccaacaattgacgtcagctccaaggaattttatggcgagggatacgatgatagtgacaagagaattccagacatgaccataataaataaacaacttggttggaaccccaagacatagctttgggacttgcttgaatctacactgacctaccaacacaggacttatgctgacactattaagaagtcgatggca

SEQ ID NO: 23816 - DNA, 383 bp, Gossypium hirsutum
  Clone ID: LIB3147-009-Q1-K1-B7
gaagctgctgttctctctctctctcttttccatagtttcacccatcttttaaggcatcgctcacaaaattatgggtttgaaggaggaattcgaggagcatgccgagaaagttaagaccctcccggccgccccttcgaatgatgacatgctcattctctatggactgtacaagcaagctactgttggaccagtgaataccagccgtcctggaatgttcaacatgagggaaaagtacaagtgggatgcatggaaggctgttgaagggaaatcaaaggaggaagcaatgggggattatatcaccaaagtaaaacaactgtttgaggctgctggaagttcttgatgtgtgtgtgtatgaccaatgaaactggtgtaatttcaagccc

SEQ ID NO: 23817 - DNA, 339 bp, Gossypium hirsutum
  Clone ID: LIB3147-009-Q1-K1-B8
caaaccgaaaatgaagatcaataaagaggcgttcagataattcaggatgctcttaaggcacctactttaactatagcttctaatgctggttatgatggctctctggttcttgggaaactactggaacaagatgatgataatttgggttttgatgcttcaaaaggtgcatatattgatatggtgaaagctggaatcatagaccctctcaaagtcattagaacagccttagtcgatgccgccagtgtctcattgctattaacgacaaccgaggcatctgtcctcgaaaatccagatgagaagaaaccaccaagtcgtatgccagacattgataacgactac

SEQ ID NO: 23818 - DNA, 255 bp, Gossypium hirsutum
  Clone ID: LIB3147-009-Q1-K1-B9
gcgcacacgcgtccggactatatttcagaatttgtgtcacaggtacatcaataaagagttgagagatgcatacgtatcgaatagtctgactgacattagtcaaaggttcaatggatcaatcattaacaacagaattctaaaagctgatgttgaaacattgaaagcaaaggtaaaaatggctgaagaggcagtcaaaagaactactggtttgaaccctgtgttccatgcattacctagaataccaagcctgtcatc

SEQ ID NO: 23819 - DNA, 340 bp, Gossypium hirsutum
  Clone ID: LIB3147-009-Q1-K1-C1
cccacgcgtccgcgctcggatttttcttatacgttaaaaaaatggggctgtctttcacgaagctattcagccggctatttgccaaaaaggagatgcgtatactgatggttgggcttgatgctgctggtaaaaccaccattctttacaagctgaagttgggagagattgtcactaccattcccaccatcggtttcaatgttgagaccgttgaatacaagaacatcagcttcactgtttgggatgttggtggccaggacaagatccgaccattgtggagacactatttccaaaacatgcaaggacttattttcgtggttgatagcaatgatcgtgaccgtgt

SEQ ID NO: 23820 - DNA, 142 bp, Gossypium hirsutum
  Clone ID: LIB3147-009-Q1-K1-C10
cccacgcgtccgcggacgcgtgggtttttatttcttttcattttattaacaggggtgaagttttgcaaaatatttgtatgaaatatttttatccagagagttggtcatcatttgggagaaataaaaaaacatttcaataata

SEQ ID NO: 23821 - DNA, 357 bp, Gossypium hirsutum
  Clone ID: LIB3147-009-Q1-K1-C11
acgctgctcatactattactttcgtacttcttgagtggtcgctttggactcgtgatgttgaggaagaactaattcccctttgcagggaactcggaattgggattgttgcatatagtcccttcgatcatggattctttgcctgtaaagcaaaagaggatacctctaatagttctctggaagtgtacccaaggtttcaaggagaaaacttggagcaaaatatgatcctatattcgaaagtagagaagttggctgaaaagcatggatgtacaccggcacaacttgcacttgcctaggttcttcaccaatgggatgatgattctactattccctgtacaaccaaaattaaaaatctagaca

SEQ ID NO: 23822 - DNA, 419 bp, Gossypium hirsutum
  Clone ID: LIB3147-009-Q1-K1-C12
tccacgcgtccgaaagaacgatatcagactatgagaagcgtgagcttgtcttgaaggaagacgggcaagagtatgcccaagtgcttcgtatgctcggcaacggcaggtgtgaagcaatgtgcatcgatggtactaaacgcctttgccacatccgcgggaagatgcataagaaggtatggattgctgctggtgatataattcttgtcggccttcgcgactatcaagatgacaaggccgatgtgatccttaagtacatgcctgacgaagcaaggctattgaaagcctatggtgagcttccggagaacacccgtctcaatgaaggcattgttgatgaggaagacgaacgcggtgtagatgattatgtcgagttcgaagatgaagatatagataaaatctaaggtaactattatggggtcatg

SEQ ID NO: 23823 - DNA, 343 bp, Gossypium hirsutum
  Clone ID: LIB3147-009-Q1-K1-C2
cccacgcgtccgcttacttttagtcgtgttaaacttggggacgaagataaacatgggaagaagaagagaaaactttcaaagttaaaggagcttgaaaatgcaatgaaattagaagcagctaagaaagatcccgagaaaggtgaggttatcgcgaagaagcattcatggaaggcagcaatggatagagctgccgggattaaggttcacgatgatccaaaattgttgaaacaaagtatacagaatgagaaaaagaggcataagatgaatgctgagaagtggaacgagagagttgaaacaacccagaagttgaaagtggagaaacaacagaagagatcggagaata

SEQ ID NO: 23824 - DNA, 265 bp, Gossypium hirsutum
  Clone ID: LIB3147-009-Q1-K1-C3
cccacgcgtccgatttctagaagcccatttaaacttgtgcacaaatatggacatatgcagaagaggagaaaacattcattgatcaaggagctcgaagatgcactgaaagtagaagcaattaagatagatatcgagatatgagacgttatcgagaagatgcatgaatggaaagcagcgcactatagagctgccgatattaatgtgcacgatgaatcaaaaatgtctgaacaaacattaccgcatgaggaaaagacgcataagaaca

SEQ ID NO: 23825 - DNA, 305 bp, Gossypium hirsutum
  Clone ID: LIB3147-009-Q1-K1-C4
gataaacgcgggtttggcggcgaggattctatttaacacggcggcctcggtcagtgaatgcgtcggagaagggattccggtcggatctccatggtggtttatctacgccgggattccttgttttttagtacttttcgcggggatgatgtcgggtctcaccctcggactgatgtcgcttggtctcagcgaactcgaaattcttcaacggagcggcactttcaccgagaaaaaacaagcagctgctattttgccggttgttcaaaaacagcatcagcttttggtgactttgctatcttgcaatgctg

SEQ ID NO: 23826 - DNA, 249 bp, Gossypium hirsutum
  Clone ID: LIB3147-009-Q1-K1-C6
ggctgatcaagatggaagtggttttattgatgataaagagttgcaaagggcgctttcgtgcgtataaccaaagcttcagtttgagaactgttcgtttgctcatgtatctcttcactaatactaacaccagaaagatcggtcagttcccttttccttctacttttattgtaactctttcgatgcttttcggccccaattgcaattgaattattaggtcaattgattttgaaaaaaaaagcgaacatttgt

SEQ ID NO: 23827 - DNA, 354 bp, Gossypium hirsutum
  Clone ID: LIB3147-009-Q1-K1-C7
cccacacctacagcttatgaatttggtttttgcagaccgcacccgtgggaagggtagcgtgagaagaaagaagaaggctgtccacactacaactaccaccgtctacaaacggttacaaagtaccctcaagagaataggagtcaatgctattcctgcaatcgaggaaggcaacatcttcaaggacgatgttgctatccagcttattaatcccaaagttcaagcatctattgctgccaacacctgggttgtaagcggttctcctcaaacaaagaaattgcgagatattcttcctggaatcattaaccagttgggacccgataacttgtacaacttgaggaaattggcagaacaatt

SEQ ID NO: 23828 - DNA, 366 bp, Gossypium hirsutum
  Clone ID: LIB3147-009-Q1-K1-C8
gcctcccaccactcttgcaccgtcgttttaggccccaactccagcacccgcaaccaagggcactccaccatataaaccaccagctcctgcgccaccaaccaaggctgctactccaccatataagcccccagctgctgcgccaccaaccaatgctcctactgcaccatataagcccccagcaccagaaccaccaaccaaggctcctactcccccatataaacccactactcccgcaccggcaccttcagtcaaggtccctacacccccatataagcccccgacatctgctccatgacccccaaccaaagtaccaactccagcaccagcaccaccaactaaagcaccaacttccccatataaaccccc

SEQ ID NO: 23829 - DNA, 425 bp, Gossypium hirsutum
  Clone ID: LIB3147-009-Q1-K1-D1
ccagagtcaacgtaggaattacggttgtgtctagatatggcggtggcagcgcgcttcagatccggtctccctatctatcacaggctctcgagatccgattccctgccttctcacactcccagagctactcttcaccgaactctactttgccccgagctgtcgaggaaatattctacttctctgaagaacgacgagaatgataaggtgcctttggctatgtttggtggatctggaaactatgcatctgcactgtaccttgcagccgtaaaaggaaatgctctggacaaggttgagtctgaacttcttgaccttgttcaggcatcaaaaaacagtcaattgttttctcaattcactaaggacttgtcagtacctgcagagacactggtcaaagccattaatgagatatgtgggcaagctaaattttc

SEQ ID NO: 23830 - DNA, 337 bp, Gossypium hirsutum
  Clone ID: LIB3147-009-Q1-K1-D10
gccgctcttcttctatagaactctctctatataaatatgtaatgagactgcggtcgggtccttatcacaaaacggatggtgcttgcatgtaatgcaaaggaaaagttataatctgcacagtctactggacggtgcatgtctaatatatatatatatctgtattgtcaagccagaagaaagaatgttttgtagaaatcgtatcttgataagatgccgaggatagtgtatgaaagaagattccgtcttttcttcgaagtgcaatgaaaaaaaactgtacgttggttatcattgaaactgctggtgaatctacaaaaagaagtacaggaaagaaatgaaa

SEQ ID NO: 23831 - DNA, 427 bp, Gossypium hirsutum
  Clone ID: LIB3147-009-Q1-K1-D12
aaaaaacaccttgagaatgctcaatttttaacgctattttttgtattttgatgtcttcgtgtgctctgtaatacaaccctgtttttcgaaaaatcccacttacaaaaatcaaaagaatggctttatagccgaacaataataaaaaaaattcctttcttgccatcctttgtttttatttctatttgctgctgttttcttgtctgtttgcaggtacgtggcagcgtggaggtgtacggcgtacggaggcgctgaaggccagtacagcgttggaggctagagctgctgcactccctgctgttagggtttgctgtttggctaatcctatgtttaggttttgcgccattgggccacatgggtatttgggtttgtcattgggcttgtttgggtctttggttatgtaagtgggttttggtttaaattttaatta

SEQ ID NO: 23832 - DNA, 360 bp, Gossypium hirsutum
  Clone ID: LIB3147-009-Q1-K1-D3
cccacgcgtccgttcactttcagatcatcaaaaccttcaacaatggcctttgttaaggctcaaggaaccaaagcttactttaagcgttttcaggttccattcaagagaaggagagagggaaagactgattacagggctaggattcgcttaaccaatcaagacaagaacaaatacaacacgcctaaataccgattcgttgttcgatttagcaacaaagatatcactgcacaaataatttctgctaatattactggtgatatgattcttgcctcggcttactcgcatgagcttcctcgttatggacttgaagtcggtcttacaaactatgccgctgcttattgcactggattacttttgggg

SEQ ID NO: 23833 - DNA, 312 bp, Gossypium hirsutum
  unsure (1)..(312): unsure at all n locations; Clone ID: LIB3147-009-Q1-K1-D4
cccacgcgtccgcccacgcgtccgccttttctggatgaactttcagacttactcatcgagaaagagactatttcctaatgcatgctatgctgccattagtgccgcaatgttcttcttctattcatatgttgcgatctctggagggaacccacccccaaagaagatgaagctttctgctgctcattaatcatggccatcttaattatatgaatgttgggtccctttgtgtaatgatgtagtttgacttgacctgagattacaggctaatgggcattgtgttatntatcaaacaaactggtggctagctacaag

SEQ ID NO: 23834 - DNA, 421 bp, Gossypium hirsutum
  unsure (1)..(421): unsure at all n locations; Clone ID: LIB3147-009-Q1-K1-D5
cccacgcgtccgtatatctaccaaagtttaaactccaaacagcaaagaatcagagtagaaaaaaaaagccaaaggaagatgaagaggtggttcgatccatggcccgtgttcttcaagagagagttcaatcgcacttgtcctttcctcgttggtttcgccgtcaccgggaccatcatcacaaagttctcccttggtctaaccgaggaagatgctaagaactctccctttgctcacaagcacaagaggtgatccaactgatttcaaaagcctatatggttgcaatcccttggtatgagaagctcagntgttttcctttttccttttcccaatgaacaatgaaaataaccgaagacatcagttctgagttcactttattttgggaattatgaatttgtcatcaaattatggatttgctttgaat

SEQ ID NO: 23835 - DNA, 312 bp, Gossypium hirsutum
  Clone ID: LIB3147-009-Q1-K1-D6
cgcaaaccatacatcctctttatctgtttcatctcagaacctccgtaattcagtgagaagtggatgacgaagggaaggctgaggttcctgagtcactcttgaagaaacagtatatgactgaggaatgggatcttgccaaaaagcacgagcttgaagttgcaaacaagaagatagtcaaaaaccgcaagcttatttacactatggctgatcagtatgcataggagtacgaggctcaggacaaagagctgattcaactgaagcgggaggctaagttgataggaggattctatgtagatccagaaactaaactct

SEQ ID NO: 23836 - DNA, 286 bp, Gossypium hirsutum
  Clone ID: LIB3147-009-Q1-K1-D7
gaatcccggccgaccagcgtccggttaaagttgtttggcattatttatattgattggagtcccctataatgggccgagtgcattccatgagatccctatcttgggcttctaaacatgcatacgcttctgctgcaaagacgaggaaacattgctgtgtaaggtcgactacaagatcagaagctcccccattagatccaaaccaccagtatactcggtgatatgaaatgctactgccatcgctcatttaactgaatttattatctgtatatcctcctgaatttctata

SEQ ID NO: 23837 - DNA, 342 bp, Gossypium hirsutum
  Clone ID: LIB3147-009-Q1-K1-D8
caggaagaagaatctgcaatactatgatttatcggccaagagtaactacaaggtcgaggaacctttcttgtaccttgctaggaagcttgcaggtgatcctaatctccacttcgtggagtctcctgcacttgctcctccggaagtacacattgacttggctgcacagcaacagcatgaggctgagcttgcagcggcagccagtcagccccttccagatgatgacgatgatgcatttgaatagaggggtttcccttgccacagagctatcaacaatatctgttgctttttcattcactcccatttggatctgtgctatctttaaaaaaattttcgtatttaaat

SEQ ID NO: 23838 - DNA, 321 bp, Gossypium hirsutum
  Clone ID: LIB3147-009-Q1-K1-D9
gcgtccacgcgttcgaacactcttttgacttttctgggtgaaccctcagacttaggtatcgggggagaaactatatcctaatgccggccatcctgccatgagcgccgcagagtgaatcttctataccatatcatagcgatctctggatggcaccaacccgcagagaagacaaagcttcatgctgctcatataatcatgggcatcttaattatatgaatgtcgggatcattcgagtaatgatgtattttgacatgacctgagatttcatgttaatgggcattgagttatttatcatacatactgatggctatctacaagttg

SEQ ID NO: 23839 - DNA, 406 bp, Gossypium hirsutum
  unsure (1)..(406): unsure at all n locations; Clone ID: LIB3147-009-Q1-K1-E1
cgatcttctttcttaatatgtttcaacttattttttgcttgcaagagtttttcttttttaaaatggcaatgcaccttcatatttttagttctttaataaataaataaaaaaaactaaattctctgccaaatgtattgttaacaagatatcaggaattggaaactgcgctagctgaagcaagtcctcaaatagttgcaaaagccaagtgctctcttgagctgccatcatcgttgcatggtactttgcttttgtggttgacatagacactacaagtttttgctacacgaagaaattgttccagaccaaagcataaatacgtatccagtggggtatcacgtgcacctacaatagttagtatcacaataaccaactaacttgcactcttcactggnttttgtacataata

SEQ ID NO: 23840 - DNA, 419 bp, Gossypium hirsutum
  Clone ID: LIB3147-009-Q1-K1-E10
ctttagaaaagcaatttcctactgtccatacgtaaataaggaaaacatgttaaactgctacaattcgataatcgatatgggttggaggtctaacaaggccgaagatatggtttctcagcaattttcaagttcagaaagagacatgttgaagagaagaaaaaccaatgattatgggaagaagcacacggtccacctctctcaggtccaacactgttgatgatagtgggtgagaggtttgaatcaatgggctgttttgagagtgagcctagctacctctttaccttcaaataagaaatgagatgaaaaccaaagagaattttgtttgctttgattattttcctttcctttctatttggtaccaaataaaaacgaggacaaaattgacacttcgaattatatggttggatttttgtcatctt

SEQ ID NO: 23841 - DNA, 127 bp, Gossypium hirsutum
  Clone ID: LIB3147-009-Q1-K1-E11
gcgcacacagcaaaccatgctgcgcattgagtttttcttgcctatgcaacattatttgactgcgagaaatgcatgcccgatatgtctcagtgtcttgagatggcacagcataatgatgaagaatact

SEQ ID NO: 23842 - DNA, 408 bp, Gossypium hirsutum
  Clone ID: LIB3147-009-Q1-K1-E12
attcacaaaccaggtcacatatgaattgtttctcgatctggcactttaacataggaaggaggttttcaaacaactgcagttggtttggggcaatcaacctgcgtaggaattggtggagatccttttaatgggaccaactttgttgattgtgtgaccaaattccttgctgatcctcagacagaaggtattattctaattggtgagataggaggcacagcagaagaagatgctgctgcactaataaaggaaagtgggactgaaaagcccattgttgccttcattgctggacttactgctcctccaggacggcgtatgggtcatgcaagagctatagtatcagggggcaagggtactgcacaggacaaaatcaagactctaagggaagctggagtgacagttgctgaatct

SEQ ID NO: 23843 - DNA, 199 bp, Gossypium hirsutum
  Clone ID: LIB3147-009-Q1-K1-E2
cccacgcgtccgttaaaaagtttgatcttataatttgcgatacagaagttttatttgtgggaaatggtaaagcaccatcatatcgtcccttcttaaagaaaccaggaaagataacgtctactctctaccaaatgtgtcgagacaaacataccatgaattggaaactttgctagctgtgactagtacacaaatagtagca

SEQ ID NO: 23844 - DNA, 337 bp, Gossypium hirsutum
  Clone ID: LIB3147-009-Q1-K1-E4
cccacgcgtccgcccacgcgtccgtcattagattcaactggcaacatcccttgatcaagaaggtgtcaaaaaggctttacagcgagtactggaacgtgttccttgattctaattttcactgcgactgctgtttatcatttcaggttatttatccagtttttataaattttttttaaaacttgtaatcttgttttccactttaatgtttattttgtacaaaaagttataggagtggagcacatactctaatctatatgtgctaatagtttatatcataaacattgatccacattcttggtgtttattttggttaaaaattaaaagattagtttaccca

SEQ ID NO: 23845 - DNA, 299 bp, Gossypium hirsutum
  Clone ID: LIB3147-009-Q1-K1-E5
ttttctcgcacgagcactcctacataagaacgacaattttcaaccatatctttacctctctaataaacaacctaaaaaaacttaattctatacccaatgaattgtacacactatatcaataataggaaactaccctatcttaatcctgacacacaatcgtttcaactaccatatgctctcttaagctcacaacatcaatacactgctcttctcttttgtgattgacatacacactacaccatttttcctctcaatgaaattcttacagaccaatgcatacatacttatccacatgcgta

SEQ ID NO: 23846 - DNA, 177 bp, Gossypium hirsutum
  Clone ID: LIB3147-009-Q1-K1-E6
cccacgcgtccgcttagctcaatcaaatactgatattgatgttttatttgtatgcaatgatttggtctaatgaattcgtccatttagattgtatccatgtgagataatgctaaataaaaaataaaaggaagagacgaatttacattacaaaaaacgatataaaaaaaaatgattagg

SEQ ID NO: 23847 - DNA, 341 bp, Gossypium hirsutum
  Clone ID: LIB3147-009-Q1-K1-E7
cccacgcgtccgcttttgcagatttgcttatctcttcaggagctgatgcaacagttaaggaaaacatcgatgggggtttaacagtgttttgccccaccgaccctgttattaaggatttcatgcccaaatacaagaacttgacagcatccaagaaagcgttcctgctgttgtaccacggcgttcccgtgtatcagtccatgcatatgctggaatccaacaaccggattatgaacacattggccactgatggagcaaacaagtatgatttcaccattcataacgacggcgatgtggtgacattggagactaaagttatgactgcccagattacatggactttg

SEQ ID NO: 23848 - DNA, 365 bp, Gossypium hirsutum
  Clone ID: LIB3147-009-Q1-K1-E8
gaagaggttgcttctcctctcatagttttccagatcgaaggcctggtgatattgaaaataatcaagcactgcaaggaattttcacctgctctggttaccggccaacttcttggattagatgttggcattgttcttgaagttactaactgtttccctttcccgatccgcgaggaagatgaggagattgaagctgatggagctaattatcagctcgagatgatgagatgtctactggaggttaatgttgataacaacactgttggatggtaccaatcaacgattttgggttcatatgaaacagctgagctcattgagacttttatgaattctcaggagaatataaggaggtgtgtatgcattatcta

SEQ ID NO: 23849 - DNA, 316 bp, Gossypium hirsutum
  Clone ID: LIB3147-009-Q1-K1-E9
ggacggacccactcgtgcgcacacacaaccaacgattcctttaggtttatattcactatggccacatgatctgagcaagagaagttcatacctgatttctataaatatcttgaacatggacctggataataatgaggaataccacggctgtggaataacagatggggttgatgcagatatcatacatgccttgtaaaacaagtgatcaccttattgagattacagcatatttcttacaaaaagggatcttagtggagcacatactctaatgtatatgaactcttcgataatctcttacacatgggacaacactctt

SEQ ID NO: 23850 - DNA, 352 bp, Gossypium hirsutum
  Clone ID: LIB3147-009-Q1-K1-F1
cccacgcgtccggccaaaacagaagtggtagcattaaaagtgatttgtgtccagtatgggagaaccgcaagtgtgggtgtagatcactttcattagaataatagtgtctttctcacagtttagcaaagtttctttatagctcaaacatagcatttactgttctgctttttgaggtactaatagttaggtgcagcacaagacgtggcttttgcctgcatttgttggctgcagccctctggttcccgaaagtctgaactcctttaaacataaattaaactatttctttgtttagtactattcgcctagcctataatttgaagacaatatcacacttcagtttctatttgatttg

SEQ ID NO: 23851 - DNA, 348 bp, Gossypium hirsutum
  Clone ID: LIB3147-009-Q1-K1-F10
ctcgctctagtcttgcgagctaaaggttttaagaaactcggagccatttttgaaggagcgaaatctgcttatagtagagaaaacattctgcgccgtgtaaatgtcgaaacggaaactgccggttcttagccatctcagcactctgatggatgttcacgttgggttagtcaatgtattcttgtgtgtgtcagacttttgaacatatgttcatcacaagtggtgtcagctccgtagcctaattgaaggaaaggcgatgagcttgaacaatgcgaataacgtgtggcggtggatacgcactttcgtatattttattgctcagcgtcaaagtgtgtataagtttttcattta

SEQ ID NO: 23852 - DNA, 337 bp, Gossypium hirsutum
  Clone ID: LIB3147-009-Q1-K1-F11
cccacgcgtccgtccacacgttcggaattaaacacccaaagtctcatatcacgccgtgggttaaatcaagatgcagtcaaccaacggatctcatctgagctcatagcaccaaaaacaggagcccccaccgccgtcgcagacacagcaccctaaaaggatgccgaaccagtggatggtagctatgcaatacccgcctgctgctatggcaatgatacaacaccagcctatgatgatgatgtatcctccgcatcattacatggcttataataaccatcattctcattatgaacgacactatcatcaacacctgttgcatgaacaacaacaaggatctaat

SEQ ID NO: 23853 - DNA, 213 bp, Gossypium hirsutum
  Clone ID: LIB3147-009-Q1-K1-F12
cacgcgtccgataaaaaaaaaacacaaacattatcagtttaaagaaactaataaacaaaaaggggaaaagaggcaaaactaaaaaggcaagaacaggcaagccgatcattaggaacctaacaaaggataccatggatgctaacaagcaactgtcgtaagagaaacgaaaaacgattaaacgggcgcttgcttcaaaacaaatcaactccaaaa

SEQ ID NO: 23854 - DNA, 277 bp, Gossypium hirsutum
  Clone ID: LIB3147-009-Q1-K1-F2
tcgactaggacgctctacgaggcccattttcaattcctaggggaatgagtcatcaaaaggataaaaatttcaaggacagaaagtgagtaaacccagaatatcagaaggtttctgaaccactagcacttgtgatatggataacagcgctgtgcagtcacagggaagcatctgctcaatcagcacaagccaccagacacttgatccaaatggcaatgctgcaagtgctaatggcccctccgaatttgtaaatcatggccttattctctggaaccagact

SEQ ID NO: 23855 - DNA, 273 bp, Gossypium hirsutum
  Clone ID: LIB3147-009-Q1-K1-F3
cccacgcgtccgaatataactagcttttttttgttctatggattactggtccgctttgggtttgcaataattttgactgtctcttctttattcttgagttggaaagttttaattgcaacattcaaattctagcttttaatcgcatattacacttgccttagttgccccttctcaatcaacacaaaccaccagacacttaatccaaatggcactgcttcaagtgcttatggccccttcgaatccgtaaatcatggccttcttctccgtaaccag

SEQ ID NO: 23856 - DNA, 353 bp, Gossypium hirsutum
  unsure (1)..(353): unsure at all n locations; Clone ID: LIB3147-009-Q1-K1-F4
cccacgcgtccgtcaatatccgccatttttgctttagaggactgctgctatctagctggcttgaacatggatttcctttcgagctcctttaaaaccgtcaatggcactagtgaaactctaccccccgtggaagctgaggatgtacaaactcttcttagtgctattttaactaaccagcaaacctgtttggacggcatacaatccactgcttcaactcgaggcataagggaaaacatcacagttcctatgtctaatgacacanagctttacagtgtttctctcgctctttntacanagggatgggttcctaaggagaaaaaatcagcctcacggcatccgagtagtaagcagat

SEQ ID NO: 23857 - DNA, 374 bp, Gossypium hirsutum
  unsure (1)..(374): unsure at all n locations; Clone ID: LIB3147-009-Q1-K1-F5
cttaattttcagattaagaaagtaaaagatcatatttcttttgtcttttatttggatagggaaagaagacgataataagttgttcatttacacttgtgataggccggccgttcttgtatgtagaacattaggcccaccttcctaatttttttttccttgcagcaacgagaggctgttgtttattagtatcatgtaatttacaacgtgaattattattattatttttttgtgatcgattaatgtggtgaatacaaaatggtgtgtttaacgcatatcgatacaatggtttaaaaaaaaaattttaataattaaattaaaaaattacacttccatatatatttttttttaaaaaataattaaaaaatnttaataat

SEQ ID NO: 23858 - DNA, 426 bp, Gossypium hirsutum
  Clone ID: LIB3147-009-Q1-K1-F6
cccacgcgtccgcccacgcgttcgattttccccatgacaatgttcattcccgaggccgagcttccggcatgggtagtctgttatatccctgctacaatgtcgctcctaaacatccttccaaccccgaaatcattcccattcattgttccttaccttcttttcgagaataccatgtcggtgaccaagttcaatgccatgatctccggtcttttccaacttggtagcgcatatgaatgggttgttacgaagaaatcaggtcgatcatccgagggtgatcttgtatccttggtcaagaaagaaacaaagcgacagcgcggtgaatccgaacgcaatctcgacgaaacataaaccaatattcttcgagaacaaaagagtagcccaaagaagcataatatgatgtatacaaaggaactagctttagcattc

SEQ ID NO: 23859 - DNA, 396 bp, Gossypium hirsutum
  Clone ID: LIB3147-009-Q1-K1-F7
cccacgcgtccggctattattggtggtttcgtaagtaatacactacgaccagcggttgcagaaggctgtgacccagaatggagatcattaatggagagatgctggtcatccgagctaccaaagagaccgagtttcaccgagatagcaaatgagttacggtcaatggcagcaaaaattcaaccaaaggggcaaatcccataaaataaagaaagcagacaactcaaccctcaattttcaaaatgattttggacaatctggttattgatggcatctcttgtttcctttgcattttgcatggcagatggaggaagaataatatggtgttcgtcaatgtgctgctccttggcatgaatgttgacagcacaaagaaaggaagggaaccatgatttctttttc

SEQ ID NO: 23860 - DNA, 370 bp, Gossypium hirsutum
  Clone ID: LIB3147-009-Q1-K1-F9
cccacgcgtccgaaaaaagctcaccttgtgtttggttacagcattgacgttctcccctgattcaagggctttggtttctgcatcattggactcaagtgctaggttgaccctaatcaaggacaagacgagtagtggcgggatgacatggatgatcatattaatggtactacttgctattgctgtgtattttatgaaggagaaaggaattataccctaatgcaggcctgctaaaattgcgatcgaagatttgaccattgtgttaaaacttttgaaattgcttgtggcaaactttacaaagattcttatcactgttcagtcaacttaaaactgtgatatggatttctgatttaaatagtctaatcagctgact

SEQ ID NO: 23861 - DNA, 251 bp, Gossypium hirsutum
  Clone ID: LIB3147-009-Q1-K1-G1
cccacgcgtccgaaaaaaaatagaagaactaagtcttattcaatcaataccaagttatgccctttctttctgctgactgtgatgcaaatttgtgttggttttgcacttggatgaggtgtgttctttaagagaataaaaggtggtgtggatttttcgaagttgtgttgttttagcttaaatgaatgacttttatttgcaataacatgattttggtaagtgggcagatgataaccgagatgaaacaaagctat

SEQ ID NO: 23862 - DNA, 247 bp, Gossypium hirsutum
  Clone ID: LIB3147-009-Q1-K1-G10
gcgtgcgatcaacatactcttcgctttttggattgtaatcaacaaacacaagttccggttgctgctcatctcataacttcacactaagaaaatgttatcactgctacatactacttattcgacaataatcttccaagatacagctcgatttcttggaatgagtgacgaagattcctcttactatgttctaagacaacgtcgaacatccaatcctactcctcaactgataacccgaatgaatctcgct

SEQ ID NO: 23863 - DNA, 364 bp, Gossypium hirsutum
  Clone ID: LIB3147-009-Q1-K1-G12
acccacgcacccacgcgtgcgcccacccatgcgtttcctattttttattttccatcaccagacacaagtccatgggcgcggagaaatcaaaagtttacactgataaaattgacaaaccagcttcttatacttattcggacaattatcacaatatatgcacgtcaatttttcagaaccagagaggaaaatgcctcaaataatctactaatacatgtttcgacatggaatcctacatatcgaatgctaaccgtgatgattcatgctataccgacggaccgatatttatacccagccaaactgcagtgactaactgtatacttcttcccactacaacattgaatgatgcttttgcattctgtgattt

SEQ ID NO: 23864 - DNA, 344 bp, Gossypium hirsutum
  Clone ID: LIB3147-009-Q1-K1-G2
gtccatttgctggttggaacccccggcttaatactagaccttgccaaaaagggtgtttgcattttgaaagattgttcaatgcttatcatggatgaggcagataaacttttgtctcctgaatttcagccttctatagagcagctgatacgtttcctttcagcaaatcgccaaattttgatgctttcagccacatttcctgttaatgtgaagtactttaaagacagatatctacaaaaaccttatattattaatctgatggatgaacttactataaagggtattacgcaatattatgcttttgtggaaaaaagacagaaagtccactgcttaaatactcttttctc

SEQ ID NO: 23865 - DNA, 387 bp, Gossypium hirsutum
  Clone ID: LIB3147-009-Q1-K1-G3
cccacgcgtccgcccacgcgtccgcccactcgttcgaccatttttcggcagggacgtggaattgatcttcttgttggtaccgatgttagggatgggaatggcacagcacgagtgattaattggtgtgggtgtattgatcaggatcctcaccctgctgtgcgtgctcttgggtatcttcctgaggaagggcatggtgtttatgtggcacggtggtgtcacggcagtcctgttcatagatatgggttatatgccctacagtggattgttgaaattaatggaaaaccaactcctgatctagatgcttttgataatgtgacgaaggagttatgacatggggagttttgtcgtgtgaggacagctcatctgaatgggaagcctcgagtttta

SEQ ID NO: 23866 - DNA, 265 bp, Gossypium hirsutum
  Clone ID: LIB3147-009-Q1-K1-G4
aattaaaagctgaaataatatttactttactgatccttcgaaccaaaacccacaccagaaattgatttgcaggtcaacaccatgttaatctctgtagcaaactcagttactgagcgagtcccttgctaatgtatgtgaatacaatagttgatgctatttatttatccacacattcaatacattacaagtgcataaccccgaggtagtgtcaaggcagttctgtacataaatctggtgtgtatgccctacagcggatagttaaaag

SEQ ID NO: 23867 - DNA, 359 bp, Gossypium hirsutum
  Clone ID: LIB3147-009-Q1-K1-G5
cggacgcgtgggcggacgcgttcgcggtcgcgtgggcggacgcgtgggcgggggagaagatcttcctagcacaaaagatgatgatatacaagtgtaatcttgcaggcaagcctgttgttaccgccactcaaatgcttgaatccatgataaagtctccgaggccaacccgagctgaagcaaccgatgttgctaatgctgtcctggacggtaccgattgtgtcatgctcagtggtgagagtgctgctggagcctatccagagcttgccgtgaagatcatggctcggatttgtattgaggcagaatcttcccttgactatggagcaatcttcaaagaaatgatccgatcgacttcactttca

SEQ ID NO: 23868 - DNA, 325 bp, Gossypium hirsutum
  Clone ID: LIB3147-009-Q1-K1-G6
cccacgcgtccgcaaatactactcctttaacgatctccaatttgttagcaaccccgttagaacccaagctggtgaggatttcggcctcaacgtaactggcctgaacaaccaggttaacgtctcaagcggggttgtcgagactcagattaacaacgcattatatcaaaagaaacctctggcaatttatcaagcggacaaggtgttgttgcctgaggagttttttgaagctaaatccccagcggctgcaccttcaccggcgacaaagaaatcatcaacagggtctaaatcgaactcaagagcatcagcaaccgcagatgagccagct

SEQ ID NO: 23869 - DNA, 268 bp, Gossypium hirsutum
  Clone ID: LIB3147-009-Q1-K1-G7
cggaagtcgaggcacgagccacgcgtaccggtaaaactttggcatatgaatctatttttacgaactctatacatggacgaggcagggatctctactaggaagaggagtttgagatgcaaatggcacagtgggaggaaagggatgacgaacgtggctggaacatgaacatgaccgtgatgtgcgatgtatgaaataatctaccaacagaagaatatcaaggatatgcagcgccgaggtataaagaaattcctgatcatagatatcgagt

SEQ ID NO: 23870 - DNA, 236 bp, Gossypium hirsutum
  Clone ID: LIB3147-009-Q1-K1-G8
acacttctgaatttacttttactgtactgatccccaaaaccaaaacccgcaccagggatctatttgccgggcaacaccttgtctaataacaggagcaaactcagttactgagcgagtcccttgctaatgtttgagaatacaatatcagacgctctttatttattcacacattgcattcattacatgtgcatggccctcgtcaagggcacacatcatagaataatgaacaattcgaa

SEQ ID NO: 23871 - DNA, 190 bp, Gossypium hirsutum
  Clone ID: LIB3147-009-Q1-K1-H1
cttaaaatccgaaaatggctacacgtttaagccgcccaaagcagtacatcgccgactcgggatcgtgcgactcggggatcgttcggtcgtttggcagtactgggtgcgttaatgacattcggtagctcgaccagatgggatcgtcgatctttacggaaggcttatgcaaggaaaatatggaagacgttga

SEQ ID NO: 23872 - DNA, 205 bp, Gossypium hirsutum
  unsure (1)..(205): unsure at all n locations; Clone ID: LIB3147-009-Q1-K1-H12
cggacgcgtggacgcgtgaatanatatgatggatttttatggactttttctgcataaagcgcaacgattaagaatcatcccgatttcaaattaacaatatagtgttggttattttatctataactattgacgtgtaataagtgaaacttagctaacgacaagttattgtgtcgaaaatttcatgttttctatcattctgccaatc

SEQ ID NO: 23873 - DNA, 333 bp, Gossypium hirsutum
  Clone ID: LIB3147-009-Q1-K1-H2
cagaagtgtctcgatacaaatccaagatcgactgttggcttgtcatcgatggccgagttctgaacgtaacaaagttcctggaagaacatccattaggagaagaggtgttgttggaatcaacatggaaggatgcgacgaaagaattcaacgatatcggacatagcaagtcgggtcagaatttgctcctcatgtatcagattggtgttctccacggtcacactttaaagaataatgaacaggttggttcaaccgaggagcccaaaaagaaagagatgagtgcattcgatatcaaggatgacctgacgcctaaatatgctgcagtcgtctagttcg

SEQ ID NO: 23874 - DNA, 240 bp, Gossypium hirsutum
  Clone ID: LIB3147-009-Q1-K1-H3
cggacgcgtgggcagaggggaaggggttctctgctagggttgcgaccctagcaccctcatgccgccgacgtcgtgcccaccgtgaagccatcgcgagtggcgcccgaaaccaggtaaatcgcttttttgcttcttattatgattttttaaaaaagtgtgatacaaagagaggacaaacaaaggacgacaactctgagaaaaaaggacaacaaagaccttcaaatcgctctttgattctct

SEQ ID NO: 23875 - DNA, 170 bp, Gossypium hirsutum
  Clone ID: LIB3147-009-Q1-K1-H4
ccgggattcgacgccacgcagtccggccacgcgtagcgcccacgcgtcacgccctctgcttgctggggaggattagtctcaccgtagctcttgtgttgcgcgtagctatatgcactaaaagccgttcgctcgtcaatagatgaacatatgtcaagtctaattcgccgatg

SEQ ID NO: 23876 - DNA, 355 bp, Gossypium hirsutum
  Clone ID: LIB3147-009-Q1-K1-H5
aagatatcgaaaacgggctacctagctctccagtagttcatcctgccatgcaaagacagccatcacagacggagcttgataaaactttgaggccaatcacggtcgggaccattgttcggtacgaggaggaaaaaattgaattgcagtacagcgagtgtgttatatgcttggaagagtttaaaggcggagattgctgtagggttcttcctaactgcaaacatcaataccatcaacattgcatagatgaatggctggttaaggacaggcattgccctctttgtcgtggttcagtccatggtttagaaccgacaccaatcactgtgtagcattgaaactaaattggctggtaatggtt

SEQ ID NO: 23877 - DNA, 344 bp, Gossypium hirsutum
  Clone ID: LIB3147-009-Q1-K1-H6
aaaggggtgtccactggtcccagatttctcctttggtcagtcatatgcgttcaagtgggggaaaccacgtagcaagtttctcctgcaactttcaagagctatcaaattcgtccctatgttattttggggatcttttggaactcctataccgtatcaacatccgattaatgtggtggtggggaaacctatttacgtaaagagaaatccccaacctactactgaagaggtacttgaagtacatggccaatttgtgaaagctcttcaagatctctttgagagacataaaggtcgggtgggatatgctgatcagtcattaacgattctttgatttgactcttattcga

SEQ ID NO: 23878 - DNA, 234 bp, Gossypium hirsutum
  Clone ID: LIB3147-009-Q1-K1-H7
aaagagcatatccactaggcctttctttatctgagcccaatcttacacgctcgagccggggaaaccacgccgaacgtgaatcctgcaacaatgaagacctataccaggccaacctatgttatcatggggatcattatgaactactataccgtgacaccatccgattaatgtcacagtaggaaaacctatatacttgatgagaaatccacattctactaccgaatacgttcttta

SEQ ID NO: 23879 - DNA, 399 bp, Gossypium hirsutum
  Clone ID: LIB3147-009-Q1-K1-H8
aaaagaggaagggcctcaggttccgactatcgatttgacagaaatcgagtcggaggacaaagaggtccaggagagatgtcggcaggagctgaaaaaagctgccatggaatggggtgtgatgcaccttgttaaccatggcatctccgaggagctcatggatcgtgttaggaaagttgggcagaaattctttgaactccctgtggaggagaaagagaagtatgccaacgaccagagctctgggaatgttcagggctatggtagcaagcttgctaataatgctagtgggcagcttgagtgggaggactacttcttccatctaatttttcctgacgataagagagacttgtcaatttggcctaaaatccccagcgagtacactgaaggtacaagtgagtatgc

SEQ ID NO: 23880 - DNA, 266 bp, Gossypium hirsutum
  Clone ID: LIB3147-009-Q1-K1-H9
ggcggtggtgccaaagtccatgttatgtttcatgcgagcaagtcaggctcgggtgaagctgaatctgcaccaattccattcaactgcgaagcgtggagatataatcggtgtcactgggtttccaggcataactaaaagaggagagttgcccatttccaacgtcatttttagcattatcccattgtctccatatgatgccattgcaaaaagcaggccctgatgccagcgtgaagaaaactgatgtatggatcccaagaagcactaag

SEQ ID NO: 23881 - DNA, 367 bp, Gossypium hirsutum
  Clone ID: LIB3147-010-Q1-K1-A1
cccacgcgtccgtgacaaagaagcttctactagttatcttgaaggtgtgatcgaaaagcttgaggctactaaagagcagcgcatagaagagccaattatttatattaagatgcaaattgccaaatttaagcttgagcagggtgaccaaaaggagtgcaagaaacttcttgatgatggaaagagtactcttgacagtatgactgacatagatccttctgtatatgctagctattattgggtttcatctcaataccataaatttcgtcaagaatttgctgacttctacagaagtgctctcctttatcttgcatacacatctgtggcgtccctgtcagaatcctttaagctgggattggcaatttgatct

SEQ ID NO: 23882 - DNA, 274 bp, Gossypium hirsutum
  Clone ID: LIB3147-010-Q1-K1-A2
cccacgcgtccgcccacgcgtccgaccatgtgtctgtccactcgtacacatttattactttagagaacatgggagcaatcactatcacggggcttattagaggtgtgaccatccacgttctcaatggtgctattgcctcacccaaggaagacgataagacacgctgcacttgcttcttatcctacaagagatggaacttcaattgaccaacgcatagcttacgttctaacgcttgtggcactggcgcttacatacctgatctagactctagaca

SEQ ID NO: 23883 - DNA, 400 bp, Gossypium hirsutum
  Clone ID: LIB3147-010-Q1-K1-A3
cccacgcgtccgatagagctgctgttgttatacaaaagtggattaaaggcaggaatgtgaagaaaacattcaagaaaattaacgatgcatcaattgtgatacaatcagttattcgtggctggttggtcagaagatgctctcaagatataggactagtcaaacctgggggctctaaggaaaatgaatcagatgaggtgctggtcaagtcatcatttctctctgaagtacagcgccgagttctcaaagccgaggctgctctgagggagaaggaagaggaaaatgatatcctccatcaacagctccaacaatacgaaagccgttggtctgagtgtgaggtaaaaatgaagtccatggaagaagtatggcagaaacaaatgaggtcccctacatccagtctctc

SEQ ID NO: 23884 - DNA, 317 bp, Gossypium hirsutum
  Clone ID: LIB3147-010-Q1-K1-A4
acgaggccaacgatgaagctgctggggaggtactgaaggtcattaaaggcgagaaccagacgagctcaggcaagaaagttcccgacgcaggcattggactacattcagatatgcgctgttggacgcacacaatatgctatgacaatgtaagagtagccgaacctgatggctctaaagcaaaggaagcagattacgagactgacaagaaataactaatatctgaactacagggccaagctcttataatcgatgctgcgctgatgcaaactgacaaacctgatgactgtcaccgtaacctactgcatcaatacgcactg

SEQ ID NO: 23885 - DNA, 398 bp, Gossypium hirsutum
  Clone ID: LIB3147-010-Q1-K1-A5
cacaggtgaaccttaccttctccagaccaatgtgtacgtgaatggtgtagggaagagagagcaaagaatgaacctttggtttgaccccaccaaggacttccactcttacactctcctttggaaccagcgccaagttgtatttctagtggatgagacaccaataagagtgcacaccaacatggaacacaaaggaattccttttcccaaagaccaagccatgggtgtatatagctcaatctggaatgctgatgattgggccacacagggtggcctagtcaagactgattggagccatgcaccatttgttgcctcctacaaaggcttcgaaatcgacgcatgcgagtgcccggtttccgtgacagcagatgagatcgccaagaaatgcaccagcagtgctg

SEQ ID NO: 23886 - DNA, 353 bp, Gossypium hirsutum
  Clone ID: LIB3147-010-Q1-K1-A6
ctctgatgtagccatcgcctgcgtctatctattcatcactctgcaccaaaaagtgtgtaggtgtgggcttcgagagagaccatgtcggtttaccaggatctcatctacgctgacgagcttgtttctgactcattcccctacaaggaaatctagaacgggatgctgttgtacgttgacggaaagtggctcgtgcatggagctgtccatattgtcattgctgccgatccttaagccgaaggtgcagaggacgatgaaggagtcggtgaccaatcatgagactgttgtgacattgctgacactatcatgcttcaggagctacctcctttagacaagaagcacgttgtcgtgttcat

SEQ ID NO: 23887 - DNA, 251 bp, Gossypium hirsutum
  Clone ID: LIB3147-010-Q1-K1-A7
gataattccacgatattttccaagttgtaatttttatcttagatggtagattgagtagccagaagttttttgtagaattttctgtagtcattttgtagtcagtttataggcactgcgtaccgtaaattctcccgatggcttccccctccaggctagaatgtctcgtggggttctcttattatcggaatacgcaaaatcttcatagttatatcttccgggaaaggtgaaaaaaacaaaaaaaaaagataaaa

SEQ ID NO: 23888 - DNA, 423 bp, Gossypium hirsutum
  Clone ID: LIB3147-010-Q1-K1-A8
ctgatgaggaaatgttcgagatcatcagcaatgccatatgcctgacctatggtgaagggtatagatttcggtttctgctcggtctcgaagttcactattgaaaaggacattcatgaagggttgaggagaacatttttttacatgaactttgaaaaggggagggattcatggggacaaacatgggatcgaatgctatatgttactaaggttcgtgcagtcattgacaagggtttaacatagattgtgtgtattgaaatgcagtacagtcagagaagtatatcaattaatatcacaaaatgatgacagtttcacttctgctggtggtggtaacatgaaaaggtttctcagctgggttgaaaaatcatccttgtgaaatgaacaatttccaatggtcatttattatttttttttggaggtgttttt

SEQ ID NO: 23889 - DNA, 418 bp, Gossypium hirsutum
  unsure (1)..(418): unsure at all n locations; Clone ID: LIB3147-010-Q1-K1-B1
ctggatttcagtgccacctgaccaaacctcattcttcatcaatgttggtgactccttacaggtaatgaccaatggaaggtttaaaagtgtaaaacatagggtagtgaccaacagtgtgaaatcaaggctatcaatgatttattttggtggaccaccattgagtgagaaaatagcacctttgccatctttgatgagaggtgatcaacaaagcttatataaagaatttacttggttcgagtacaagaaatctgcttataattccagattggcagataataggctcattcactttgaaaaaattgctgcttcttaatctctttttttatttttcacttttgagtagattttttttatacttcanataaaaaaataggattagggaaaaagtttgtagtatcaaaaaaggcttgtgtgatct

SEQ ID NO: 23890 - DNA, 348 bp, Gossypium hirsutum
  Clone ID: LIB3147-010-Q1-K1-B2
agcaaagcagcctcatttcatttctccaatatggctagagggttgaagaaacatttgaagaggctcaatgcccccaggcattggatgcttgacaagcttggtggtgcttttgcacccaagccatcgtctggtccccacaagtccagggaatgcttgccattgatccttattttgcgaaaccgattgaagtatgctctcacctatagagaagtcattgctattcttatgcagaggcatgttatggttgatgggaaggttaggacggataagacctatccagctggtttcatggatgttgtgtccattcctaaaacaattgaggacttccgtctactttacgacaccaaa

SEQ ID NO: 23891 - DNA, 72 bp, Gossypium hirsutum
  Clone ID: LIB3147-010-Q1-K1-B3
aaaaaaaaaaaaaaaaaaaaaaaaaaaaatttaaaaaataaaaaaaaaaaaaaaaaaaaaaggagaaaagtg

SEQ ID NO: 23892 - DNA, 139 bp, Gossypium hirsutum
  Clone ID: LIB3147-010-Q1-K1-B4
cccacgcgtccgaaaaaaaaaaaaaaaaaaaataaaaattaaaaaaaaaaaaaaaaaaaagggggaaatggagagatataaaataacatacaaaaaaatccaaaataacatacaaaaagcattgtgacaccaaaattaa

SEQ ID NO: 23893 - DNA, 111 bp, Gossypium hirsutum
  Clone ID: LIB3147-010-Q1-K1-B5
actccttacggtaattgcgaattttgtgctgcccctgtaaaacataaggtattgaccagcggtgcggtatcaaggctctcaatgatttatttcggtggaccaccattgagt

SEQ ID NO: 23894 - DNA, 413 bp, Gossypium hirsutum
  Clone ID: LIB3147-010-Q1-K1-B6
atcggatgaagcatcaatgaagaattcactgttaccaaaaggatattgttatgtggctgtcgattgtcttcccaaggagaagcacttcacacgagataccacttctgatggacagttggagcacaatggttaggctttgtcaatacaccggttgtggattgccttatggaagggtgacggcccatctgtgcctaatgtaactgttttctgtgcggaactggaggtgtatgttgatgaaggcagttgagtggcagaagcagtggagagatgttgattagggccagtgtggcctcaatgccatatgaaccgcgtgatgtgactcgggatggggaagctttggcatatcatttgtggtatatctcacaagagtaactgtacagagggtgagaatttcattccatcaaagtttgcct

SEQ ID NO: 23895 - DNA, 446 bp, Gossypium hirsutum
  Clone ID: LIB3147-010-Q1-K1-B7
cccacgcgtccgctcctcgagagattgaatctccaaagaaggtggcatgtcatcgaatgccgtatctttatgcagttcatttttgccactttgatgccactgagaccaaagctttcagactccaactagttggtgacattagtggagataaagtcgatgctcttgttgtttgccatatggatacttctggttggagcaccgatcatgctgcttttcgcatgcttggtattaagcaaggaaacgctgtttgccatgtcttttctcagggtaatcttgtttggattcagccaccggtcgtcactgtgagtgccatgtaaatgtttggctgttcgaaggagctctcatttgcttcaagtagtttcgttcatggtatgctagttccttctttctatctgtactaactatcaagtaattaagcaataaaattatgtatcttgggtctcagg

SEQ ID NO: 23896 - DNA, 406 bp, Gossypium hirsutum
  Clone ID: LIB3147-010-Q1-K1-B8
agacccttctctttggtgaaaagcctgtcacagttttcggtatcagaaaccctgaggaaatcccatgggctgaggctggagctgagtatgttgttgagtctactggtgtttttactgacaaggacaaggctgctgctcacttgaagggtggcgcgaagaaggttatcatttctgctcccagtaaggatgctcccatgtttgttgtgggtgtcaatgagaaggaatataagcctgaccttaacattgtctccaatgctagttgcaccaccaactgtcttgccccattggctaaggtgatcaacgataaatttggcattgttgagggtcttatgaccaccgtccattctattactgctacacaaaagactgttgatggtccttccatgaaagactggagaggtggtag

SEQ ID NO: 23897 - DNA, 461 bp, Gossypium hirsutum
  unsure (1)..(461): unsure at all n locations; Clone ID: LIB3147-010-Q1-K1-C1
gttttccaaggaaaaaacaaaacaccctcttccccttttgtctttccaacgatcgggctccctcaccgtccaccgtaccaccaccgttttcggtggccggtgacgcgcaataataggtatttcaaccccgtttttgggaccctttgaaggccgagttttcagccaaacaatgcggaaatgaaagggtctctccctctctaaatgacgcgaccctgacgacggaggagggatctccggtgatgaagccccgaccgattccggtgaggccctctactccctccttttatttattttcgtgcccactttatttaatagatttgcaagtaaagataaaaagaaactaaaatagattagcaatgaaatgaaaacaaagagaatagatcgganatcacccttttttatcntgtttgctcttgattttaatggctaaatgtcgtgtccaaaaaaactacaatggatgt

SEQ ID NO: 23898 - DNA, 345 bp, Gossypium hirsutum
  Clone ID: LIB3147-010-Q1-K1-C2
ggcttgcacagtttcccatcatccagtgccattttcaataatgaccagagcaggattgaagaagaacgtttctccttggaggattttgattaccaacagtctgatgacttggttgaaggtcaattcgtatacaccattgatgatgaaatgaaattctatgatgctctgtttcataatccagatgaacgtaccaatgcagaagctgagtacagggacaatgcatggcatgatcaaattgttcatatgtctgatgggacttgccatggccattcggaaggactcaatcagaggcgaatggaaacagggattcaataatgatgaggtcctgataatgaatcttggggt

SEQ ID NO: 23899 - DNA, 466 bp, Gossypium hirsutum
  unsure (1)..(466): unsure at all n locations; Clone ID: LIB3147-010-Q1-K1-C3
gaataccacagagtgaggaatgtgctgctgctgaaccgaccaaatttgcatcagctcgtgttgagtcgtcatcgaggcaagattcatactctgcttcaagtcttcatgcttcatccggtggaatcgacgatactgctcaaaagttgtatggtagccattttgatgagaatggcagagaaatgctcagagaagaagaatttcctgaagtgagtgttgagtttcaggagacatttttgggccacacaagtccaattactcggtgccggttttctgcatctgggaacaatatagctagtgcatctgtggatggcactgtcaggatatggacatatgactcatcgattccagcatctagaaacgcgaccatctattgtggagccgagataatgtcacttgactgggaatgcanatctgaccgtttgcttctcataggcactgctgatggangcataaaagcatggaatgt

SEQ ID NO: 23900 - DNA, 334 bp, Gossypium hirsutum
  Clone ID: LIB3147-010-Q1-K1-C4
aagaagtacccgagcaaggtcatccgcaaggattccgccaagaaaacagcaaagaaatcgcgcgtcaagtgcttcgtcaagctcgtcaactaccagcacctgatgcccacctgctacaccctcgacgtagacttgaaagacgtggttaccgtcgatgcacttcagaccaaggacaagaaagtggcggcttgcaaggcgaccaaggagaggttcgaagagaggttcaagacttggaaagaacaggtggttctttactaagcttaggttttgagggtatttacctttattatagtatcttttattgagagaaaaaagtttgaatttggatctagtg

SEQ ID NO: 23901 - DNA, 433 bp, Gossypium hirsutum
  Clone ID: LIB3147-010-Q1-K1-C5
cccacgcgtccgcaattttagaaggtcgatttataaccgtggagaggtcgcgtgggaaacggcctaggactccaacaccaggccattaccttggactaaaaaataccagagactatggtcgtggtgagcgtggcaggtaccgtggtggtggtcgtgatgactacgggtatcgtcgatctcccaggcgctcaccatatcgaggtcgtgattactctccaaggtattctcctcatggtggaagatcaaggagggagcgctcttattcaccaccatattctcgcggatctaggtgaagaagtgttttgggtcgaaggggaaagatgagagatttgctttagtctcgtcagtgttgaatgttgatgtattctctagtttggacggagcttcaaagttaatgtttgcagtgttcttatatctctttaagcatgtaggg

SEQ ID NO: 23902 - DNA, 395 bp, Gossypium hirsutum
  Clone ID: LIB3147-010-Q1-K1-C6
gggaaaggcctttctgatctccaaatcgagttcaataaaagacatgctgcaaccggaatggtcgcgcagatgactctggcgaggctcaaggagatgtggagaataatacacggggtaatgtggatgcctgataagaacagattgccaagaattgttcttgtatgctgcttgttgcacaatattgttattgatatggaggacgaggttttcagatgatatgtgattatcccatcaccacgatactggctatcgtcaacaaaattgggaatatattgaccagtccgccatgatcatgagagataaactctctctctacataaatggaaagttgctatcttgaaacaatactttggcttgtccttcgcattggattcttgatttctacactcagaaaa

SEQ ID NO: 23903 - DNA, 435 bp, Gossypium hirsutum
  Clone ID: LIB3147-010-Q1-K1-C7
accggtgtcactaaaggataccgttacaagttgaggttcgtctacgctcacttgccgattggcgcctccatcactaatggcaacaagtcgatcgagatccgtaacttccttggcgagaagaaggtccgtaaggtggatatgttggaaggtgtttccattgttcgatccgagaaggttaaggatgagattgttttggatggtaatgacatcgaacttgtatcccgatctgcagctttgataaaccagaaatgccatgtgaagaacaaggatattagaaagttccttgatggcatctatgttagtgagaagggacgggtcgctgaataagaatgattaccatcttcttgaatcatagatatagtgctgctttatttttttgtcgtggtaatatcttgggactccgttttttgtctcgtctttcctgtttccctggat

SEQ ID NO: 23904 - DNA, 367 bp, Gossypium hirsutum
  Clone ID: LIB3147-010-Q1-K1-C8
aatagacggaccgacccacgcgtgcggttgggacttctctcgaactggtttaagatctcatctcaatgaacaatggctgggctttacgagaggggcatcaaggaaagacaagcagaagggaatacaccatggattaagccaacacaagaagcaagagaataaggaagcatttgaactgtttgacactgatggctcatgtaccatcgatgccaaagagctgaatgttgacatgagggctcttggtttcgaaatgacagaacagcaaattaatcaaatgattgcggatgttgacaacgatggcaatggtgccattgactttgatgaatttgttcacatgatgactgccaccatcggggagagggacact

SEQ ID NO: 23905 - DNA, 213 bp, Gossypium hirsutum
  unsure (1)..(213): unsure at all n locations; Clone ID: LIB3147-010-Q1-K1-C9
gcgngggcggacgcgngggcggacgcgngggncnnaancnncanancngcaacagagggcngnnnncannncagcacaaagaaacccggnnncaccccagaannncnaggacgngnaaaacnngncacttcggnngcancannggncggagnngganggganaanggannnnnaaaaagagnnccanngcggaagaaaanncnggccacaaca

SEQ ID NO: 23906 - DNA, 394 bp, Gossypium hirsutum
  Clone ID: LIB3147-010-Q1-K1-D1
ctctgttacatgttgaaaatggcatctccgtaccccgcaaaacctgctgtgtgaaggaacactccctaaaaagatggtccacggactcttcctcagatctgcataccgggcataaaggattgacagccaattgacgagcttttagattatgcaaagtgggtaaatagttgttagcaattctccacataaaaatacgaattttgcatggcacttggagctcccataattttgtaaaaaaattagtaggaagttcattatgtattctagtacccccctctgtaattagccatctgtatccgctcttagctgtatatgtcccagtattatcccctcgccataccaatgcatcttgtggtctactatttgccaatggaattgtgagaatgcgcttcaa

SEQ ID NO: 23907 - DNA, 270 bp, Gossypium hirsutum
  unsure (1)..(270): unsure at all n locations; Clone ID: LIB3147-010-Q1-K1-D10
cgggccgncccacgcgnccgccatggnccacgggccaccgcagcnccgnttttcggcgnncagacgcngccggcgacgcgcgaagaagaggccgcgaagaaggccgacncgccaacgancgangccgncnnncacaacgcggncancgncaccanggaggangcgnnccgcgnccnccaggacggcgcggncgccgncgccggcgaccgcancgccgcggggggccccnccgcggangnccccgccgccccccccggcgccgagcagacc

SEQ ID NO: 23908 - DNA, 289 bp, Gossypium hirsutum
  Clone ID: LIB3147-010-Q1-K1-D2
cccacgcgtccgaacggctacagctctagaattcaagcctttcgaccatggcggatgttgagacggaggtagcggcggctggagtgcccaagaagagaacattcaagaagtttagcttcagaggtgttgatttggatgctctccttgatatgtccactgatgagcttgtcaagctctttcctgcccgtgctcgcagaaggttccagaggggtctcaagagaaagcccatggctttaatcaagaaacttcgcaaggcgaaaaggggaggctccaccaggtgagaagccag

SEQ ID NO: 23909 - DNA, 465 bp, Gossypium hirsutum
  unsure (1)..(465): unsure at all n locations; Clone ID: LIB3147-010-Q1-K1-D3
cttgtattcaactgggtatggaaccaggactgctgctttaagcacagccttgttcaatgatggagcttcatgtggacaatgctacaagatcatgtgtgattaccaagctgaccctaaatggtgcataaaaggaacatccgtcaccatcacagccacaaacttttgccctcctaactttgctcttcccaacaatgccggaggttggtgcaaccctcctctccagcactttgatatggctcagcctgcctgggaaaagattggtatctacagaggtggcattgtgcctgttttgttccaaagggttccatgaggaacataacaacagcaacaacaacggtcagaatctgaccaatcacttcaaaactgatagtgttgctcatgttggaactaatggctgctcttcttcttnctcttgatgctgcctgtggtgatgatgatgatcaacttcaatggtctttttaattt

SEQ ID NO: 23910 - DNA, 275 bp, Gossypium hirsutum
  Clone ID: LIB3147-010-Q1-K1-D4
tcatctccaaaacaacaagaaagacccaagtagctggcctccccaactttaatttcttggaaatttattaatttattcttcttcacaaatccaaggtcagagctcaaacagctcccagggtgatttagaaatggacgctgattcatggagtacccgcctttcttcagtttctaagagataccaatttactcttcaatcacggtcagatatgtttatggggtttgaagaaatagatggagaagatgatataagagaggaatttccatctccttttt

SEQ ID NO: 23911 - DNA, 124 bp, Gossypium hirsutum
  Clone ID: LIB3147-010-Q1-K1-D5
tttatgttggtacgttctattttttgaataaattattaaattgtaactctgctgcaatgcagctttcttgtttcagtggtaacaatttttttaaatgaaatcaatgtatgtttcgggttcatag

SEQ ID NO: 23912 - DNA, 322 bp, Gossypium hirsutum
  Clone ID: LIB3147-010-Q1-K1-D6
aacacaaaaatgggtccagaggttgtaatttatacaacaccatctcagtgcacaaggaggtggggccagacacagtaccataaaccatgcatgttcttctgtcagatatgttgcaggacatgcctttgtgtttcttcaaggtattatgggaacaaacaagtttgctcttgcttcaacaactggtaaaccatcgaaggaggatctatatgccgttgaatgactaaaaagatgaccatgatgattttacataagaattcctatatattttctatttggaacataagtcatttcagaattagggctgactcgaatactaactata

SEQ ID NO: 23913 - DNA, 443 bp, Gossypium hirsutum
  Clone ID: LIB3147-010-Q1-K1-D7
cccacgcgtccgccaaaaacgaatcaacctttctctcttgtacaaaataaccaggaaaaagtgatttaaaagagaaagaaaaaaggggaaaaaattctctctttttcatcaatcgtgaaaagcttctaaaagctttttcgatcagaacccaatcgaggaatatggggaagaaaaggaagtccatagcgacgagccttgatgaggtggatcggactatgtatgcttcgttttgcagcgccgctaactctttgtctcaactttatactcaggctatgaaccagcagaaactctcctttcaagccggaaaaggccatagccttaatgagatagactactgtggtgaggagccatcaatgtcacctagagcaccaagccaacagcaccaatcccagccaacaatgcagttcatgaataccagtttcatggtctcttcaggctcatct

SEQ ID NO: 23914 - DNA, 411 bp, Gossypium hirsutum
  Clone ID: LIB3147-010-Q1-K1-D8
gacattgacagaagatgaacagggaaatatctattccgaggatcgagtcaaaattgtgaaatttttattcaatatagttataactaatcccaacaatcaaacaattagaaaaaaatctattggaataaaagaaataagtgaaaaagttcctcgatggtcatacaaattaatcgacgatttagaacaacaggagggagaaaacgaggaaaatgtaacagcagagcatgaaattcgttcaagaaaatccaagcgcgtcgtgatttttactaataaccaggcaaacgccgatacttatactaataccaaggatgctaatgatcctgatcaaacagacgaaagtgctgtgatacgctaattcgcaacagtccgattattcggcgcgacataataaaggggttccatgcgtgccca

SEQ ID NO: 23915 - DNA, 468 bp, Gossypium hirsutum
  unsure (1)..(468): unsure at all n locations; Clone ID: LIB3147-010-Q1-K1-D9
gtccgcccacgcgtncggctaacatacgaaacagtgtaaacagcagtgaaaaagagagtagatatgagaacgaaaacatatggtcaagagctaaactttcaactgaatggtgttgcagcagttccagatcctgtgtacaaaatcgagccaagtttagtagctgatctctacggagattggatcatgcccttaacaaaggaagttcaagttgaatacttgttgcgacggttggactaatgtaaagtttccctcacaactgaccaagggaaggggaaaccaaagggtgtatgaacatcactaccttttacatgttaaactacagaatttcagttttctaatttatagcacaactttccaaatacccagtaatgttcttcatcaagaaggcaaagggttcgaatacggaaaaagaactcgtccctcctatgtgatcatctaacagcaatgtgagcttcaagcttgtgttag

SEQ ID NO: 23916 - DNA, 306 bp, Gossypium hirsutum
  Clone ID: LIB3147-010-Q1-K1-E1
aattcccgtcgaccacgcgtccgaaaaaaaaaaaaaaaaaaaaaaaaaaaaatttaaaaatttaaaaaaaaaaaaaaaaaaaaaagaaaaaggggaaaaaaaaataacaaaagaagacaaaatctagaggttccccacaaaaaaacccgggcaatctatgtttaaaccgctgcttttttgcaacttaattggcattcttgcccttcttttttccctgtaatcctttgattgccccgccttttcctatctatatgccctgctgacccccgccttttttggcaaatgctgcgcttccttaattttttt

SEQ ID NO: 23917 - DNA, 358 bp, Gossypium hirsutum
  unsure (1)..(358): unsure at all n locations; Clone ID: LIB3147-010-Q1-K1-E11
ccgnccacgcgtccggattttnctggggataatcttcgggatttcattgatggctggctggcgtgatatgatgaggtaccgaagcaccaagagaatcgccaaggccgctgatataaaagttcttggagctctcaacagggatgatcttaagaaaatttgcggcgataattttcctgaatggatatcttttcctgtctatgaacaggtgaagtggctgaacaagcaattgagcaaattatggccttctgtagcagaggcagcatcagcagtcatcaaagaatctgttgaaccactcttggaagaatatcgacctccaggaattacttcactgaagtttagcaaattgtctcttggcact

SEQ ID NO: 23918 - DNA, 359 bp, Gossypium hirsutum
  Clone ID: LIB3147-010-Q1-K1-E2
cccacgcgtccggaaggaaaaaagccaaaaataaattaaccccaggggatgatgctatggatgatgatggtgataatgattatgactttggtgtggattatgttagggaaaagagcaaaaactagtggaggagttccaatgtcaggtgttgaaagttgatgagttatgagaactaaacatagaaaatttatgcagacactgaaggtgttggatccatgcaggatgagaaattttgtttaatcgatgtaattcctttcaatgctgtcacttgttaaagcgttatttaatgaatgcttacatactttttaagaacctgaacgtataaacctgaaagttcattcttttttgttgaatataaa

SEQ ID NO: 23919 - DNA, 425 bp, Gossypium hirsutum
  Clone ID: LIB3147-010-Q1-K1-E3
cccacgcgtccgagcagcctctcctttaggctgcgtccggatcgcttgcggatttcatgtgctgccaaaccagagacagtggataaggtatgtgaaatagtaaggaaacaactagccctaccaagtgacaaagcagtcacaggtgaatcaaaatttgctgaacttggagccgattctcttgatacggtcgagattgtgatggggcttgaggaagagtttggaatcactgtggaagaggacaatgcccaaagcatatcaactgttcatgacgcagctgagcttatcgataagctctgcggcgagaaaagtgcctagaaacaaaccaaggacctaagtttgggattcatttgccaatttatttgtgaactcatcatgcctatttatttgttgaaatctagtaaaactcataaggtggttggtatttt

SEQ ID NO: 23920 - DNA, 312 bp, Gossypium hirsutum
  unsure (1)..(312): unsure at all n locations; Clone ID: LIB3147-010-Q1-K1-E5
gaggggtgtcagaaaaaaagttaccanncagggattaacnntggcttnngtggcagcnncaagcgttcatttagcgacgttgctttttttgaaatccttcgnnatgtcggcttctttcctttatcattnngtgaagcnnagaattcaaccacagtgtgtggatttgttcaccnnncaccaatagggaaacgtgaagctgggtcttagaaaccgtcgtgagacaaggttagtttttaaccctaactgatggcnncgcgtcgcaatagtaaattcaaacctagtaccgagagggaaaccgttgattcgcacaat

SEQ ID NO: 23921 - DNA, 452 bp, Gossypium hirsutum
  Clone ID: LIB3147-010-Q1-K1-E6
cgtggctccagcctaagtcctttcaggaaatagagggctcgccctgacaatatgcaaggcgctagccgcagtccttataggaaagagaagcgtcctgctgaaaacgatcgtagccccagtcgcagcccatatagaagagagaggcccacttttgacaatggtcgcgcacccagccatagcccatatagaagagagagaattaccccacagaatggccagcgtatcagccctggttctatgccataaagaacggcctgcccttatggaggtgaagctgaaagcccagtcaatgcacgatatggaacccaatctcctgccacagaggtatgattaggatctatagaaagcatttataggaggaaccttcgtcttcatggcagaactcagttggaagtgattctattcgcttttctcttgtgacgaaaactggttttgcgattacatttacagct

SEQ ID NO: 23922 - DNA, 475 bp, Gossypium hirsutum
  unsure (1)..(475): unsure at all n locations; Clone ID: LIB3147-010-Q1-K1-E7
tgtaagcaaaaagtgaaagaaaatgagggttgttaataagagagatagaggtttaatctctctatcattgttatttgtaatggcaatattactcatcttcaacgccaaaaatttcagagttgctgtgttagcggagaagatcaatgacaccgctttcaggggtggccacggtggcggtgacagtgcagggctcgacgatgatgactacagcagcttcatcggtgacgatatggagttggagatgttgacggattcctacatccgccgagtgctcgccggtagcaacggaaaatcaaagactgcattcactaacaacgctaaaaaaactccaagttgtggcacgggtaaacaatatggtccgtgcatgggtgacaagaaggttgctaacaattgcagtacattcaatcgtacttgccagaaatagtnataatataaaaaggaaagaaaagtaagttggtcagtcttttttattatt

SEQ ID NO: 23923 - DNA, 301 bp, Gossypium hirsutum
  Clone ID: LIB3147-010-Q1-K1-E8
cccacgcgtccggttgttcaatattatgcattttacacatgtgcgtccagcttttaatgtgtatcttccaaacagctagtttagaaagtcttctccaggtgatccaagttttgttctatacataagtaggtgcagtccaccatccatagtataaattgaggcccttgaaagaaagcatggtgccatcccttttaagttttgtcatgtagaaaacgggcgtgtcagtttcttctgcttggctaatactgagcttcctgtcttacctcaagacctttttatatccgttggctccgatgatact

SEQ ID NO: 23924 - DNA, 240 bp, Gossypium hirsutum
  Clone ID: LIB3147-010-Q1-K1-F1
cccacgcgtccggtgctttgaatggctgctatctcaattttaaacactcgtactgtggtggcagtcggttttcgctctatttatgaatcaagtattattaatcgaggaattgtataatatcataatggcagagctctgtatcatttatttttattttattttattttttgcaactttggttaatcctttgtacacagttgatacctaataatacaattcgatgctttctttctagttggt

SEQ ID NO: 23925 - DNA, 432 bp, Gossypium hirsutum
  unsure (1)..(432): unsure at all n locations; Clone ID: LIB3147-010-Q1-K1-F10
cgggccgacccacgcgncctgtcggcgagaacgccctgttcgtgcggccgtaggtcttctacaacaacccgctgctatcgttcgtgcagctggtgatcgggccctacgcggacgagctcgggaacgtgctcccgaacgcggtggagggcgtgggcgtgcccgtggacccgctggcgttcgcggggctgctgggcatcgtggttacgtcgctgaacctgctcccgatcgggcggctggagggcgggcgcatcgcgcaggcgctgttcgggcgcggcacggcggcgctgctgtcgttcggcacgtccgtcctgctgggcgcgggcgccatcagcggcagcgtgctgtgcctggcgtggggcctcttcgccaccttcatccgcggcggggaggagatcccggcgcaggacgagatcacgccgctcggcaacgagc

SEQ ID NO: 23926 - DNA, 210 bp, Gossypium hirsutum
  Clone ID: LIB3147-010-Q1-K1-F2
acacgtgcgtccaacttgggatggtgagctgttctacaccaaaattataaaaacttctccatgttttccaagtgtcgttacttacataattatgtgcattcccacattcagagtataaattgatgcccctcaaagaaagcatggtgccatcccttttaagtctcttcttgtcaaaaaccggctcgtttgcttactcttctttgctaaata

SEQ ID NO: 23927 - DNA, 312 bp, Gossypium hirsutum
  Clone ID: LIB3147-010-Q1-K1-F3
cccacgcgtccgcccacgcgtccgtggagaaatggcaagaaatcttcccagatgtgggcacgtctttcacttaaagtgcatagatgaatggctaagcaggcaaggaacttgtcccatgtgtagagagcatgttcttgacgatgatggtgaagaagtgtaaatcaggaaattttgattcacaaaaaattgagttttccttttttgttctgaaatctggtgtatatatagagtcatagaccattgcacaagggttttgtagcaactttttgatatttcaaagcagtaaagtagcggtgatattatatattattc

SEQ ID NO: 23928 - DNA, 366 bp, Gossypium hirsutum
  Clone ID: LIB3147-010-Q1-K1-F4
cggacgcgtgggcttttcagatgtctaacctaaggttgtaaggtaaggtggctcttatcgggggtggagccagcggtatcggtgaggagacggcgaggttctttgtacaacatggggctttggttgttattgttgatgtccaggatgatctggggaatcaagtcgctgcatcgatcggccttgacaaggttagttaccggcactgcgatgtacgagaggagaagcaggttgaggaagcagtaagtttcacagtggagaaatatgggaagctggatatcttattcagcaatgcgggtaccctaggctcgttaaccggaatcttagaaattgacctggatgactttgacaacaccatagccacgaacg

SEQ ID NO: 23929 - DNA, 394 bp, Gossypium hirsutum
  unsure (1)..(394): unsure at all n locations; Clone ID: LIB3147-010-Q1-K1-F5
ggccgaccacgcgnccgcccacgcgttcgcccacgcgaacggcgggttttggcatgaaatacactcagacgggggcgcgtgtttctcttaaagtgcatagatgattggctaatcatgcaaggaacttgtcccatgtgtagagagcatgttcttgacgatgatggtgaagaagtgtaaatcaggaaatgttgatttacaaaatactgagttctccttttttgccctgaaatccggtgtatatatagagtcatagaccattgcacaagggttttgtagcaactttttgatatttcaaagcagttaagaagcggcgatcttatatattgttccaaacttacatactcgttctttcaatgttttatttttttttttcattgcctccttaaatttaatt

SEQ ID NO: 23930 - DNA, 292 bp, Gossypium hirsutum
  Clone ID: LIB3147-010-Q1-K1-F6
gcgtgcggcggtgttcgatgtctgatcctaccacatataactggtgatgcacttaggggtcacgaatgcgtgctagggaagctgacaaagcagctaaacgagcctattaagagaaggagcatgttatcaaacttttattcaaacaagcctgacaactctttgtctacaaacagtggttccaaatattgcagctcgaagctcttattgtccataccaaagataatgggcagacacactcccctctatatcctgtaaatcttgcacctacgttctacaacagaaggaaactgct

SEQ ID NO: 23931 - DNA, 433 bp, Gossypium hirsutum
  Clone ID: LIB3147-010-Q1-K1-F7
tcccttttaaaaaccgagtattctccagatgaaaaaagcaccatcaacatggtgaacatacgggaactggaagcacaactcgacaatctcctctagggagctagtgaagcttattcaagtatttttcctcaacccaaacacttttcagtaatttttggcgatatcgtggttcagtctgttcataaggttatattgatagataaaaaaaaaggttacgtaagatggtttaattttccgaacattcattttggtaagtccatatcttttttgcctgccccaagaccaagagcataaagttcagttcttattatcttggcagtgattgtcgatcatatttttcattcaagttaatattttcggttcatacatttctttctggttattcacccctggaagtaataagaaaacaggtagcgttatctttacaaatttg

SEQ ID NO: 23932 - DNA, 228 bp, Gossypium hirsutum
  Clone ID: LIB3147-010-Q1-K1-F8
ggacctttgcacgggggttaagttggcattgtgggaggtgtcgaaacccctttgtgaaaagcaaaaatttagtggtcggcttaaaaatgaaacaaaaattggagtcgccaccgatcctttattgaggtgtgatcggtacaccttaaaatgattttagatctacgaattttgagaaaaaaaaaaaaaaaaaaaaaaaatgaaaaaaaaaaaagaaaaaaaaaaatgaag

SEQ ID NO: 23933 - DNA, 259 bp, Gossypium hirsutum
  unsure (1)..(259): unsure at all n locations; Clone ID: LIB3147-010-Q1-K1-F9
tagcaaacgggcaaccagaagaggaagcaagnngagacaaacaactagannacaaagngnctcaacccaatcgacttcacaagaaaaggaattatggtggtcgactgaattgtcgatcagaatcagccacttccaagactttcaatggtgcgtcttcaacccagaacgaatcctcatcagttctcaaaccttcaacagccattgcatgcgctaccccatttccttctcgcgttacgaattaaaatcgacaataagaaaa

SEQ ID NO: 23934 - DNA, 445 bp, Gossypium hirsutum
  unsure (1)..(445): unsure at all n locations; Clone ID: LIB3147-010-Q1-K1-G1
gatgattttaactggttccatcgtcttgaattgcctaccagtttatggagccattggcttaaggaatgatgcagggaaaatgccaacccaaattactattatctcaacatttgtgtcggtggctctctattatgcctcttcactttgtttgtgaagtattaatgagtgttttaaatactaaaaataaggccttttctagtgaaatattggaaactaggatctttgtcttccttatttatttatttatggtttttttggtatgttgatatttgttttattgttgaatactgccttgcttcttttatcatgttcttttggggtttgtaagattagaaaatttgaagccattgngctcgttttagctgaggttcaatgagaagagaaagaaatggacaaggagtggcgcccaaagctgtccgtttggttggtcttgggcctattgcgc

SEQ ID NO: 23935 - DNA, 68 bp, Gossypium hirsutum
  unsure (1)..(68): unsure at all n locations; Clone ID: LIB3147-010-Q1-K1-G10
acagaaannggggaacacaanaggctttggccanggncngnncaacaggggcaaccaaccccncccaa

SEQ ID NO: 23936 - DNA, 301 bp, Gossypium hirsutum
  Clone ID: LIB3147-010-Q1-K1-G12
gatgagcaaggaaattaaagcattagccccaagcagcatgaagattaaagtggttgcaccaccagagaggaagtatagtgtttggataggaggctccattttggcatccctcagcaccttccaacagatgtggatttcaaaggcagagtacgacgagtctgggccatcaattgtgcacaggaaatgcttctagagaagagctatacatacagtacacgttttgtatcacagcaaagcttataaatcaagtggttgctttcttttcttttctgctccgttaatttatttccctttttttttc

SEQ ID NO: 23937 - DNA, 401 bp, Gossypium hirsutum
  Clone ID: LIB3147-010-Q1-K1-G2
cgcgtccgcccacgcgtccggaaaaatcccaaaattttcagcttttcttctcttctagaaatggcccaagttagcatgttgaaggcttttttattggcttttgtaatggcaatcctaaccgttgcctcggcgcaggttagtgaggcgccgtcaccgtcgccagacgctggagctggattctcagtcggagtttctaccgccgccattggcttctctttgatcgtttcccttcttgctttcttcaagcattaaattgaagggcttgtttggctctcctctctgtgtggctttcttttatatatatatatatgtatgtatgtatgtatttatgataccattctttcttcgttaaatttattgtaatgaacttgattttttgaataaaatgcttccgttatgat

SEQ ID NO: 23938 - DNA, 313 bp, Gossypium hirsutum
  Clone ID: LIB3147-010-Q1-K1-G4
cacccagatttgtatatgttttcttttggttaaaagcttgcttcagcataagtgcataacggtatttgtgaatactctattatgaaattttccagagtgtactacacccagatttgtatatgttttcttttggttaaaaaaaaaaaaaaaaaaaaaaaaaaaaaaaaaaaaaaaaaaaaaaaaaaaaaaaaaaaaaaaaaaaaaaaaaaaaaaaaaaaaaaacaaaaagaaacagaaaatcaacaagagtgaaataaaagaacccaccaataggcaacgtgagctgagattaaaacaattcaaaaacaggagg

SEQ ID NO: 23939 - DNA, 374 bp, Gossypium hirsutum
  Clone ID: LIB3147-010-Q1-K1-G5
cgaaaaccctaattttcggaggttaggaggaaaagaagaaatggcggtgccgcttctaagtgagaaaatcgtgaagaagagggtcaagaagttcaagagacctcagagcgaccgcaaaatctccgttaagacaaactggcgtagaccaaagggtattgattctcgtgtcagaagaaagttcaagggatgtactttgatgcccaatattggctatggttcagacaagaagacccgacactatcttccaaatggctttaagaagtttgtcgtgcacaatgttggagagcttgaactgttaatgatgcacaacaggacatattgtgccgagattgcccatgatgtttcaacatagaagagaaaggagattgtggaac

SEQ ID NO: 23940 - DNA, 283 bp, Gossypium hirsutum
  Clone ID: LIB3147-010-Q1-K1-G6
tttcttttgttttaaaactttcttcagcataagtgcataacagtatctttgaatactctattatgaaattatccatagtgtactacacccagatttgtatatgtttacttttggctcataaccctacattgaccacgactacgggaacccaatggtcaaagaaaaatgttgatcgattggtcgaagaaaaaatgccaaagagtatcaagaagccatctgactttctcaaggatttaccccctcttcccttctttaattttcaacatcacccaatgattggcaa

SEQ ID NO: 23941 - DNA, 418 bp, Gossypium hirsutum
  Clone ID: LIB3147-010-Q1-K1-G7
caaagctgatgcgctttatataaatccaaataaatttggctctcttacaaaaccttgcatgaaggaaatgatatcattcctaaattgcatggctcttaacaaggttaatgatgaaaaatgcatccggcagaaggatcttttgagtgcttgcatggatgctcagtctaccaagaataggaagccatggggcagcattaattaccacttgcagaggcttaataggggaaggaagtaatgtgggttttctttaaagatgaatgttgaatttatgcatcattcttctagttcatcacttctagtaagatgatgtgcattaggttgtagctacagagaacattcatttgtatttttttttcttgcggttggttgaaattttggagaaagatgctcaatgtagcttaaaccaattcctgtcact

SEQ ID NO: 23942 - DNA, 410 bp, Gossypium hirsutum
  Clone ID: LIB3147-010-Q1-K1-G8
ccgtcagtcaaatgttcatcttgcctttctgtgacagaaattggggaacacaataggcgccctccatggtctgttcaacaggggcaaccaacccctcccaactctgtgcattaaactgctccaatgactttctaatccattgatccttgactatcttcggcatcttgatgtttagatgcattaacgatgtacaggaattagttccggtagtgcccaaatggaacttgtaatcttttgttattcataaatggaagttggagttcttgccatgaaggttgaacttgaatctctttgtgtgtagttttaccaatgcaattcatcaccttatcatattattagattggtaatatttttttgtaattttttatgtatgcattgaaactcataataattagaggaatcatttttga

SEQ ID NO: 23943 - DNA, 307 bp, Gossypium hirsutum
  unsure (1)..(307): unsure at all n locations; Clone ID: LIB3147-010-Q1-K1-G9
ccgnccacgcgnncggccactctnnncnncaagcgggngagagagaagaagaaaanccnaagagggcaaagangccagcnggncacggnnnacgnnctcgaacaagggannngnncgccagacccnncagaaagaaggggcacatnccctcgnctacttacctcaggacctacaagatcggcgactacgtctaccgtaagggtaacagcgccgttcacaagggtatgccccacaagttctaccatgggcgtactggtcgagctttggaatggaccaaaaacgtgccatcggtgtcgaagtcaacaag

SEQ ID NO: 23944 - DNA, 369 bp, Gossypium hirsutum
  Clone ID: LIB3147-010-Q1-K1-H1
gtccttagcgaaatatcagatgcatgatgaaaatagccagatgagctctattgatgcagcaatagacagaaggatcctggaaagcagacttgctggtcgaatggcattttagttgggaggagaggaatgcgtcttgagaacttctcttgggataaatgtgcatgcttttgtgattgcactacttacatgaattggaaatggatttgggtcaatcaatttttaggtgggtatggcaaccaaggcagatgtatttgtgttgtattcttttgcgaagtgatgcagaagagagaagataagtcattgttttttaatcttaaattttagtttctccaaaaaaaaaaaaaaactggtagggatataaaattttga

SEQ ID NO: 23945 - DNA, 65 bp, Gossypium hirsutum
  unsure (1)..(65): unsure at all n locations; Clone ID: LIB3147-010-Q1-K1-H11
acgcgnncggagagagagagagagagagagagagagagagagagaanaaggggcctttggggaag

SEQ ID NO: 23946 - DNA, 274 bp, Gossypium hirsutum
  Clone ID: LIB3147-010-Q1-K1-H2
gcaaaatcttgtttggaaaaagggatcacataggttgcctttgacagaggtggatatcccgatcatggacgcgtacaagcccttgctgattctgctagggagcatgggcttcaattttaaaagttgtgcagttagcattcttttgaactttgtcacttttccttgtttcgttttgtaactttccttttactgtttttccaaatccttttactaaacagcatgaagaacgctctttcgtatcatctagcagtgtatttgatgacttttttgcttc

SEQ ID NO: 23947 - DNA, 390 bp, Gossypium hirsutum
  Clone ID: LIB3147-010-Q1-K1-H3
cttttatttttacttgctttttctatttctcctttgactggttcagattagccgttgatagtttagtgattaatatatagaactcttttaagctttggaaagatccttttttttcacttggtatcaagcatggaagatcgcaaggagaaaaatgcaccatggctatcagtaccacaatttggtgattgggatcaaaagggacaggtgccagattactctcttgacttctcaaagatcagggaaatgaggaagcaaaacaagagggaagtttcaagagccagtcttggtaatgaagaagagttcattaacccaactgcaaacactgttagcactactcctagtgatgatcatcaccacaattaccctcagaaccatcactcttcatctaca

SEQ ID NO: 23948 - DNA, 319 bp, Gossypium hirsutum
  Clone ID: LIB3147-010-Q1-K1-H4
cggacgcttgggctgactctttctatgactcctgggcctgcgccagatcagccgataagaggttactggcacatatgatgatgatatacaagtgtaatctaagcatgcttgcctgttagtaccgccactcaattgcttaactccatgataaagactccccggccatctcaagctgacacaaccgatattgctaatgctgtgctcaactgcaccaattgtgtcatgcttagtgatgaaagagctgctggagcctatccacagcttgccgtgaagatcatgcctcgtatttgtatagagagcagaatattaccttgactgt

SEQ ID NO: 23949 - DNA, 447 bp, Gossypium hirsutum
  Clone ID: LIB3147-010-Q1-K1-H5
gaatacccggggcagcaattaaatgtgcaaccataactccagatgaaggtcgtgttaaagagttcaacttaaaggaaatgtggaaaagggcaaatgggactattcgaaacattttaaatggaactgctttcagggaaccaattatctgcaaaaatgtccctcggcttgtcccaagttggaccaagccaatctgcatcggaagacatgcttttggcgatcaataccgagcaactgatttagttgtacaggaatctggaaaacttatgcttgtcttcgctcctgataagagtaatgagaagaaggagcttgaggttttcaacttcaaaggtgctggcggtgtaactttgtcgatgtacaacactgatgagtctattcgtgctttcgctgaggctttaatgactactgcttaccagaagaaatggtcactttatctaagcacaaaaaata

SEQ ID NO: 23950 - DNA, 394 bp, Gossypium hirsutum
  unsure (1)..(394): unsure at all n locations; Clone ID: LIB3147-010-Q1-K1-H6
aatcgacggacccacccacgcgtacgaggagggccaccggggccaggtggaccaggatggccaggagggcctccggggccgggaggggcaggatggggcggtcctccacccggaccaggagggccaccaggatggggcggtcctccacccggaccaggagggccaccgggatgggggggtccttctcccggaccagggggaccaccggggtggggcggccctccggtcggaccagggttttttggtggcttctgtgatgtaattggagcttgtgtcaacttactgtgctgctgctggctcgttcgagattgttttggaggtccaatgggtgcttcagggccactctggacctccaccaccataattacatgctnttttgctccttcataaatag

SEQ ID NO: 23951 - DNA, 264 bp, Gossypium hirsutum
  Clone ID: LIB3147-010-Q1-K1-H7
cgtacgtagagctgcatatattaaatctttaaacactgaagagcactctgcgcttgtagagcatggagggatatcaaacatctgtctttttgtttatcaatatcctcatgaggctctagcagtcgctgatggtccataacttgggaaataatgctccatcagtacaaactcataccgacccacgcaaagatatcaatgggtatcaagaagcctattaactctatcgcctgatgaagatgacgagttcttcacaagccctgatct

SEQ ID NO: 23952 - DNA, 224 bp, Gossypium hirsutum
  Clone ID: LIB3147-010-Q1-K1-H8
cggacacgtggacttactcttcctattacttctttactttattcacatcagccgataatagcttactagcgcatataatgaacatctacaagtctaatcatacatgcaatcctatcactaccgtcactcaaatgcttaaatccatgataaaatctcccaatccatcccaagctcaaacaaccgatattgctaatgctgtcctcaacggcaccaatactctcatg

SEQ ID NO: 23953 - DNA, 71 bp, Gossypium hirsutum
  Clone ID: LIB3147-010-Q1-K1-H9
aaaaaaaaaaaaaaaaaaaattaggaaaaaaaaaaaaaaaaaaaaaaaaagaaaaaaaaaaaaaaaagggg

SEQ ID NO: 23954 - DNA, 444 bp, Gossypium hirsutum
  Clone ID: LIB3147-011-Q1-K1-A1
cccacgcgtccgggaacagagagaatggagctgcagttttggttcacctttgttccggagatcaacaacatttagcagaggcccaggaactaggagtgatgggtcctttggtggacttggcacaaaatggtacagataggggcaagcgcaaggctgctcagttgttagagcgcatgaacaggtttgttgagcagcaaaaattggcacaggtgcaagctgaggccgaagtacagcagcccgagtctcagtctcagacacaacagcgacgaccaccctctgtggagaatgctattgagggctgaggtatattttgccatgatatttgttggtttcatcatcttgtttctttctatgtattgaagaaggcagctttgcttggaaagaggaggtcgaagatcacctgttgaacctgtaagatattcaatttgtttgagtggaattaat

SEQ ID NO: 23955 - DNA, 237 bp, Gossypium hirsutum
  Clone ID: LIB3147-011-Q1-K1-A10
cccacgcgtcctgataccgaatcctttagtttgcacccgaatgagccattccgaacattgggtgactgcttcaacgacttcttagcaaaaatgaacgatgaaaacatgaagcaaagcgacaaaaacactaatcaaactaacgacatcccccctccaaagtcaataaacaaagccttcgccctcacataaacatgctcttgacgttaacactatcgacaccaaactatccttctcttt

SEQ ID NO: 23956 - DNA, 332 bp, Gossypium hirsutum
  Clone ID: LIB3147-011-Q1-K1-A11
acccgagcctgaagctctagcttatataacacatgacatttactaatgtactaaaggaagagaactttttgttgatgattcgctacaaagctgtcaatgatcaccatgtcatgctggattgtactgtttagcaacctaacatggcgacccatgttttcgacttctccatagtcaccccagagattaatgctgagtacactgatggtgcattgcattgcacttccaatgttcaacgtgatcctatagaaataacctctgacgaccactgagaagatgaagctacctttaaccttaatgtcattatctatttgcagagcaataaaccatggtta

SEQ ID NO: 23957 - DNA, 406 bp, Gossypium hirsutum
  Clone ID: LIB3147-011-Q1-K1-A12
cccacgcgtccggttttcagcaagcttttgctgggagatttgcatataaagtcgtacgattgggtggattctatgccgccacccgaatcccagccgagattggcaaagttaaaagtcgatagcgtgctgaaagcgccatgcaagacctcagtgttgtatcctacaacaggaggtaacatccatgaattcagagccgtaacaccatgcgcggtgctcgatgttctcggccctccttactctaaagacgaccgtgattgttcttattacaaaaagttgcaacactcggctttgtcagatggagaaagtagtacagggaatgaaggaggaggtgattatttgagatggttgaaagaaattgaactgccccagaattcacacatggagagaattgactactgaggtccta

SEQ ID NO: 23958 - DNA, 294 bp, Gossypium hirsutum
  unsure (1)..(294): unsure at all n locations; Clone ID: LIB3147-011-Q1-K1-A2
cccacgcgtccgcaaaancgaagacaagctcgaggacaagcattaactcgaagattcccgcaaaccgggtcgtgcttctccctcaaccgccaacgccacctcttcttcctcccttcttcacctactagatcgctcccaccctaacccctcttccaaacttcaacgcatcggcctttccccctaatggaagtcgaaatcaaactccgccttcaggacgcctccgaccaccgtcaattaacctcttattcgacaccccagccaataccctttcctctcaactttccgttcttagcc

SEQ ID NO: 23959 - DNA, 458 bp, Gossypium hirsutum
  Clone ID: LIB3147-011-Q1-K1-A3
agcggctactgttgctgccgactccattagagcttcaagctttggcctcaagattgccaatgcgtggcgtggcttgggttggcctgatgaggccgtggttttcactcttgcaacgctttctattcttgagcttcggggagctattcctcttggttactggatgcaactcaagcctacactcctgacaatattatctattcttgggaatatggttccagtgccattcattgtactttacctgaaaagatttactacatttcttgctgggaaaaaccaagttgcatctcagttacttaacagtctctttgagaaaaccaaacaaaaggcttggccaatggaagaatttcaatggcttggcctaatgctttttggggctgttcctttccccggaactggagcatggactggagccattgtagcttccattcttgaaatacccttctggtcagctgtatcac

SEQ ID NO: 23960 - DNA, 241 bp, Gossypium hirsutum
  Clone ID: LIB3147-011-Q1-K1-A4
accacgcatacgaaatagaagaaagatgagaatagtgttttcaaaaaaataatggaaaaaacgatggtgtattcaactgtaatgaagacaataaatttgggatcgactagtggaaatattaaacctaatttcagccatgttagcagccaaatgggtaattggattcaggaatggatgcaggattctagtatggaatctattattgaactgctcaatgaaagggcttaaagcacggttgaag

SEQ ID NO: 23961 - DNA, 259 bp, Gossypium hirsutum
  Clone ID: LIB3147-011-Q1-K1-A5
tccagtcgtccacacacctattaaatctaattactatgaccaaaagaacgacaatgccctgcgttgatttaaaatgccatgagcaaccagttacctttactattgaaacacattactaatattgagctcaatcgagacattcctatctgttactagatgccactaaagcctacactgctgacaatactatatataattgcgaatatgcatgcagagccatacatacaactctacctgactaaatttaatacacttcttg

SEQ ID NO: 23962 - DNA, 335 bp, Gossypium hirsutum
  Clone ID: LIB3147-011-Q1-K1-A7
ggaagaagcggaaatgaacttctcatttgaagaacctgtggaattccttcatagattgtatttcaagttatattctatggttcgactatcaataaattcccttttgtatctctgaactttcccagtccctagtcctctgaactgaaaacactgaaataagtatctctgaactttgaagtagttaaactcatattatgcctgttaagaacatatgttagaaattctgagttttaccctgttgaggacatatgtttatgcaagggttaatataacatttggtatctgagtttgatttcaatgttcaatttggtttttgaaatttttttgtctcaaaa

SEQ ID NO: 23963 - DNA, 236 bp, Gossypium hirsutum
  Clone ID: LIB3147-011-Q1-K1-A8
ccacgcgtccgcccaggcgtacggccgttgatggcctaggcgacttcgtttccctcagcatcgacccttcgggcatccccggtcatgtaaccatctctgagatctctgggtcctctaaactctctcccaatgctctcttccactgcgccggcctcgctgccattggcactatgaaaatggtgcatgatcggtctttggggccttcacttcaactgctaaagggcttaccttcgggc

SEQ ID NO: 23964 - DNA, 348 bp, Gossypium hirsutum
  Clone ID: LIB3147-011-Q1-K1-A9
gcgtccggcaaacatgtaacaagcttagctggactcgttttcttggtctgcctgaaatctgatctggggtaaggacccacggaggtaactttgctaaattgattattggtgctagaaggtacatgggtcatcgtcaaaaatcaataaaacctgacaaaggacttatgtctaaatcttttggggatccttatatgggatgggctacattcgtagaagatgtagccgttacccaccaaacccgaaccagaagagacctttccttaatacgacctttgggagaaccccttaacttcttgcatgtgttaagcttgatagcccacttttttcttctcgatacttggttatgca

SEQ ID NO: 23965 - DNA, 361 bp, Gossypium hirsutum
  Clone ID: LIB3147-011-Q1-K1-B1
acggcgtgcggtcttattcaacgtctgacatgatgctctatatcgaatatcatccaaaagagaagcgccagagatcatttgaataactgcgtgctggaagtacctgttaggcgcattatacgcccccatttgctgccaactgtgtgccttttcttctttggttattctccctctacatattaggcctttaccggaatatatgcctgacctttacatacgttggaaaggccgaaattttcgaggtgctcttcaaatgagcctaacgaaaatgtcagtactggctgtggctgaggctgacgctggtgaccgactatattaacctatttctttttttacaccctgtttttatgtttttattacc

SEQ ID NO: 23966 - DNA, 253 bp, Gossypium hirsutum
  Clone ID: LIB3147-011-Q1-K1-B10
cccacgcgtccgcacaccttctcaacctaactacaatgactaagagaacgaagaaggccggaattgttgggaaatacggtacccgatatggtgccagtttgaggaagcaaattaagaagatggaggtcagtcaacacagcaagtacttctgcgagttctgtggaaagtatgcagtgaagagaaaggctgttggaatctggggctgcaaggattgcgggaaaatcaaagccgggggtgcttatactttgaacac

SEQ ID NO: 23967 - DNA, 262 bp, Gossypium hirsutum
  Clone ID: LIB3147-011-Q1-K1-B11
cccacgcgtacggcgatttcttccggcgttattaatcacagaatgctctgaagacgaagcgttaggaggtgcaaaacatgcggcccaataaaggtggcaaggtggctgtgcccgccaagaagaaacaagagaaggccgtcaatccagtgttcgagaagcgtccaaagcatctcggcattgaaggggctctaccttctaagaaggatctgcatcgattcgcgaagtggactaatgttgttcgtatacaaaggaagaagacgat

SEQ ID NO: 23968 - DNA, 418 bp, Gossypium hirsutum
  Clone ID: LIB3147-011-Q1-K1-B12
gggttgttcagagtcggtgggtcgggtgaagtccagggtttggcccaatgtgtgggggaccttagcttggcggaatgtcaggattgtttgtcttccgccatccaacggctgaaaagcgaatgcgcggcagccgcttatggtgacatgtatttaggcaagtgttatgctaggttctccactgctggagataatggtcactatcatcctaaatcccataacgaaaaatctggcaacgaaggtgagaagacgtttgcaattatcattggattactggctgggatcgctttgctcatcatttttcttggtttcctaagaaaaggggtgaaccgaaatggtaaataatatttcaactttttcaaaattcaaatcattaaagggagaattggatatcctccaatcctttcctttcttttttttg

SEQ ID NO: 23969 - DNA, 395 bp, Gossypium hirsutum
  Clone ID: LIB3147-011-Q1-K1-B2
attccctatagtactatcacgtcttgaaacattctgggtttcatatgctccgcacttgaacttagaaatattcggcgagacgaatcagttgtttgcacgagcccttcgcatggttgatgtgaggagagtttggaccaaactaagactatgcaaaacccggaattttcatcagggtgcagaaagggcccgtgtttgggcttcttcactggcttcggtctctttaggcaaatcttcttcaggtagatcctcatcctcaccttaggttgttggaattttatctaactgagcttaaatgtagagaagggattcagggatcggagagggtgttacaaaccgttgcaatcctttgggttgattagtcaaaccaaggaaaagcccaaggaaggattccccaa

SEQ ID NO: 23970 - DNA, 439 bp, Gossypium hirsutum
  Clone ID: LIB3147-011-Q1-K1-B3
ctctctcctatactcaacttcttccacttaaaagcaagttagctagctagggttttgtgagccagagagatgggttcaaaaagaacggcatcactagccctcttctttgcactcaacatcctcttcttttccctggtgagtgcttgtggttcctgcccttcccccaaccccaaacctaaacctaaaccaaagccaaaccccactccctccccatcttcttctggcaagtgccctagagatgctcttaaactcggtgtatgtgctgatttgctcggtggcttgctcaacgtcaccattggtacgcctcctgttcaaccctgctgctctctcatccaaggtcttgctgatcttgaagctgccgtttgcctttgcacggcaatcaaagctaatattttgggcatcaaccttaatgtcccactttccctcaacttgcttctta

SEQ ID NO: 23971 - DNA, 284 bp, Gossypium hirsutum
  Clone ID: LIB3147-011-Q1-K1-B5
cggggtcgagccacgcgccacgcgtccggtcatctccaacgtcttacattaatactctatatcgactatcttccataggaagagcgacagagatcatttgaataacagcgggttggatgtccctgttatgcgcactatacgcccttttttgatgcctgttgagtgcctttggtttttgggctattccccctctaaatacttaagcctataccggaacctatgccctatctctacttactttgaaatgcccagagccctagagatgctcttaaactagccgtatg

SEQ ID NO: 23972 - DNA, 407 bp, Gossypium hirsutum
  Clone ID: LIB3147-011-Q1-K1-B7
cgcacgacgccacgcgttctggtatcatgtagaacggccctagaatatggcttaccacttcctaagagactgagaggcagaggatttatttactaaagatctgcttacctagccaaatgttcgcgaactcgacttacacctctccttccttgtgctggctcttggctccaagccttatccccttccctaaacctaaacctaaaccaaagccaaaccctactctctctccatcttgatctgaccagtgccctacacttacacttactctcctcacacatgctaagttgcacgcagactagatcatctgtaccattgatactcctcccggtcaacactggactgcatttattctatgccgtgctgaaatgaacactaacgaaagcctttacccgatgttgaatgctcat

SEQ ID NO: 23973 - DNA, 409 bp, Gossypium hirsutum
  Clone ID: LIB3147-011-Q1-K1-B9
ctctcgcgtacgaagatttggtttttgttgttcaggaaaatgaagaatttcaggggtgaggggttctttcttagggacatgaaccaacccctaatgaaactcttattttgccccttggctatctcgctgtgcgccatctctttcttattgtgaatgcttgcacatctatgcgattcgtagatcaaaatgatcctctattatgaagggatattcacataaatctgccactgaatgagaaaattaccgatgatgttcttttacaaataactgaaagaggccaacgtagctcgcaatgctcagacctggttgattgccaaaagattactgatgaaagttttaagcgtgtcactgaaaataatccaaagctaatcaaagtaatttatttgcccatacccttatgcttaaatat

SEQ ID NO: 23974 - DNA, 371 bp, Gossypium hirsutum
  Clone ID: LIB3147-011-Q1-K1-C1
aggccttgtatgacatctgtttccgcacacttaagctaaccactcccagcttcggtgatttgaaccatttgatatctgcaacaatgtctggagttacatgctgcttgcggttccctggtcagctcaactccgatctcaggaaacttgccgtgaatctcatcccctttcctcgtcttcactttttcatggtgggttttgctccactcacttctaggggatctcaacagtaccgagctctaacagtacctgagctcacccagcaaatgtgggacgcaaagaacatgatgtgtgctgctgatcctcgtcacggtcgatacttgactgcatctgctatgttccgtggtaaaatgagcaccaaagaagtggatgag

SEQ ID NO: 23975 - DNA, 430 bp, Gossypium hirsutum
  Clone ID: LIB3147-011-Q1-K1-C10
cccacgcgtccgtatcactgcaaggaaaaaaaaaaaaaaaccagacatggcttccaacactgttgcatccgctgctcttcttcttaccttgaacttgttgttcttcactttggttagctctacctacgtgccttgcccaccaccaccaaagagccacaagcctacccacaagagcccaccctcggcacctaaacagccagccacttgccccaaagatacactgaaactaggtgtttgtgctgatttgttgggctcggtgcgcgttggtgttggacccgccaagaccaaatgctgctcactcatttcgggtttggctgatctcgatgctgcttgttgcctttgcactgctattaaagctaatgtgttgggggttaacctaaacgttcctggttcattgtctttgctcctcaattcctgcgaaaagcaaatg

SEQ ID NO: 23976 - DNA, 219 bp, Gossypium hirsutum
  Clone ID: LIB3147-011-Q1-K1-C11
caaatgcaacccatcccaccttctttaatatttaatggtactagttcccactgctgagtgtgggataactgtatatcaaagcatcgaaccaagaacctgcattcggttccacactccctaaaacaacaaattatagattgctcaataatgaggtctactttctatcagaacccacgaacaggaaaactatacatgcgtgcaacacaagtcatgcacatt

SEQ ID NO: 23977 - DNA, 222 bp, Gossypium hirsutum
  Clone ID: LIB3147-011-Q1-K1-C12
gcagacccaattcttagggtttcaactcaacttattatggggttttcccatcccgggattggaccattcgactgccgcattccaccattgaaattgatggacggtggctccccatggagtcaacctattctgatatcctaagcctaacctattaaggctaggttgcatgcccaagcacctacgtcaagcttattactcaacgctgaagatagggaatactat

SEQ ID NO: 23978 - DNA, 290 bp, Gossypium hirsutum
  Clone ID: LIB3147-011-Q1-K1-C2
gaaatgcttaaatttccaccttctttattagctgctgctgctattttcactgctcagtgtactattggtgggtttaagcattggagcaagacctgtgagtggtatacaaactacaaagaagagcagcttatggattgctcaagaatgatggttactttccatcagaaagcaggtacagggaaacttacaggcgtacaacgcaagtattgcacatctaagtatggttatgctgcaaaaactgaaccagcaacttttctccttgaggcaaaatcctagcacaacttgaaagc

SEQ ID NO: 23979 - DNA, 96 bp, Gossypium hirsutum
  unsure (1)..(96): unsure at all n locations; Clone ID: LIB3147-011-Q1-K1-C3
acggaaacgcgtaacaaactcacctttctgtatgtatctgcgtgataccagtatcaacctggtcaatgagcgtagaggtggntttagagcattgaa

SEQ ID NO: 23980 - DNA, 331 bp, Gossypium hirsutum
  Clone ID: LIB3147-011-Q1-K1-C4
caacaaggactcaacatcacccctcgaatccttattattactagacttcttcctgatgctggcggagcaacatgcggtcaacgacttgagaaagtatacggaacagagtactcggatattcttcgagtacccttcagaacagaaaagggaattgttcgtaaatggatctcaagatttgaagtctggccatacttggaaacctacacagaggatgttgctcatgaaatctccaaagagttgcaaggcaagccagatctgatcatcggaaactacagtgatggcaatatcgtcgcctccttgctcgcacataaattgggtgtaacacagtgca

SEQ ID NO: 23981 - DNA, 164 bp, Gossypium hirsutum
  Clone ID: LIB3147-011-Q1-K1-C5
acgacgcgtatgacatcactttctgcacactttgcctatacactcccaactgctctattgggaaccggtggatttgtgcatcaaagcctgaactcacatgctgcttccaacaacatggacagctcaactccgatctgaggaaacatgccgacaatctcatatcc

SEQ ID NO: 23982 - DNA, 233 bp, Gossypium hirsutum
  Clone ID: LIB3147-011-Q1-K1-C6
ggaagaagatgggtcttccatacactatggctctttggtttcagcttctactttggatgtgtggcagtgggatacatggtgtgaaggatttgaaggaaaaacaaggggatgctcaacttgttagaaaggtggaggataaatattctcttgtttctaatataggacatcctgcagctgaggagtcatcttctcaagttggtaagcagctggaggatatatattctagtgtttct

SEQ ID NO: 23983 - DNA, 266 bp, Gossypium hirsutum
  Clone ID: LIB3147-011-Q1-K1-C8
gcatttttaaattttaattttatggatcacatgtaaatatcaaatccaaacaaataaagcggatgcgcttggactgactctgcactgcaaggaacactcaattcactggtaataaaaacaaatgtgaatcaaagtacgcttggaaaaataagtaaaaaggaactaaagagttgaagtctggacgtacttggcaacctacccagagcatgcgacttatgaaatcttctatgagttgcaatgaaagccatatctgatcatcggaaact

SEQ ID NO: 23984 - DNA, 460 bp, Gossypium hirsutum
  Clone ID: LIB3147-011-Q1-K1-C9
ggatctgaaaagtgacctcaaggatctctacattaattcagcagtccaaattgatgtgtctgggagccggaaagctgttgttatccatgtcccgtaccgattgaggaaagcttttcgcaaggttcatgttaagcttgtgagggagcttgaaaagaagttcagtggaaaggatgtgattcttattgctacccggaggatattgaggcccccaaagaaaggttctgctgttcaaaggcctcgcagccgcacattgactgctgtacatgaagcaatgctggaagatattgtcttacccgctgagattgttgggaagcgcactagatatgcaattgatggatcaaagttaatgaaagtgtttttggaccccaaggaacgaaacaacaccgagtattagctcgagaccttttatgcagtttaccggaagcttgcttggaaggatgttgtgtttgagctccctgtt

SEQ ID NO: 23985 - DNA, 66 bp, Gossypium hirsutum
  Clone ID: LIB3147-011-Q1-K1-D1
tacgccatagctctactatactgggaccgagattcaattcactgcccgaccggtcacaactgacgc

SEQ ID NO: 23986 - DNA, 360 bp, Gossypium hirsutum
  Clone ID: LIB3147-011-Q1-K1-D10
aggaacgacccacgcgtacgcaaaaatggtggcacctaagagcaagatcgtttcaatatgggaatgggtcgacgatcacagggttagaactgttgggtgtctgtggctgaccggcattgcgggttctattgcctacaattggtctcaacctgctatgaaaaccaacgttaaaattattcacgctaggttgcatgctcaagcccttacgttggcagcattagccggtgctgcagctgtggaatactatgatcataggaacagagccaaagctgatccatatgcaaacgtccttccagtcgatggatactcgcacaaggattacaagactttggataggcgtttaaagtctgtacacatact

SEQ ID NO: 23987 - DNA, 365 bp, Gossypium hirsutum
  Clone ID: LIB3147-011-Q1-K1-D2
cggacgcgtgggcggacgcgtgggcggacgcgtgggcggacgcgtggggttggcaagcacaatattaccatttttgcccctcgcaatgaagccttggagcgtcaactcgaccccgagttcaagcgcttcttgcttgaacctgggaacctcaagtccctccaaagccttcttatgtttcacattatccccaaaagggttggatcccatcaatggcctgatccgaaaactggtcctgtcaagcacaacaccctttgtaacgatcatatacgcttaacttcccaatccaccggcaaaaaaacagttgactaagccgagtgggcccaacctgccaacgggatccaacccgttggagtattccccggaat

SEQ ID NO: 23988 - DNA, 361 bp, Gossypium hirsutum
  Clone ID: LIB3147-011-Q1-K1-D3
ctcttacgtctgccatctctggcttttatttcagatttcaaggatgtatacatcaaggaagaggatccacaacgatcacggtgctgtaccaacagaatgtgacgagtctattgcgcaggcattctccgattgggagaataccgaggacgatctgagaagcgaccttaacgatctctatattaatatagcagaccaaattgatgtttgtcgaagccggatagctgttgttatccatgtcccgtatagaccgatgaaagctctcctcagggttcatgttaagcttgtgacggaacttgaaaagaagttcaatggcaaggatgtgattcttattgccgccatgaggatattaaggccttcaaag

SEQ ID NO: 23989 - DNA, 263 bp, Gossypium hirsutum
  Clone ID: LIB3147-011-Q1-K1-D6
aactaaacccaacgaagggctcctaccaagctcgctgataagacggactatcgcctcataagccagggaaaccctaggcaatgacaagtcttccaccacaggcttcccacccagcatatacttaatcaaaatctaacactgcaaatcaacaaaaaagtgaaacggaatcgccttcccaagctaaacaaggccctcaatgcagcaagccaaacaaaatgtcaccggatatatctataaacatcaactccaaaccccttttcatg

SEQ ID NO: 23990 - DNA, 59 bp, Gossypium hirsutum
  Clone ID: LIB3147-011-Q1-K1-D7
gtcccccatcttatccttgatccagcctcccctaaatgaaatgcacggcccgtcgcaag

SEQ ID NO: 23991 - DNA, 399 bp, Gossypium hirsutum
  Clone ID: LIB3147-011-Q1-K1-D8
gttttgtaattgcttttgatggtgatctacattttgcatttagttggctttttttgtgtgcggtgtcaagtgaactccaaagtctggtttatgtggggggagttggggatcattgtctgatggtgtacttgatattgacgtattattattttagcttttcaccgtatcaccaccattaagatgatgggtcctatggagatggcgtggggcggacaattggtgcttaattccttccttacaatccatctttgaaccatgttgctgcttaaaaggatgtttggagctggagagtggattgtggtgctcttttattatatttaatgctatcattcaacatcaaaggggtttgagaacattaatgttaatagctattattgtacgagattttttttagaaaaa

SEQ ID NO: 23992 - DNA, 244 bp, Gossypium hirsutum
  Clone ID: LIB3147-011-Q1-K1-D9
ctcacgctatttcccacgcgtcctcttagactgatgctctacacggccccttctgactgcgagctttattaacataaacttgaatacctcctattcatttccaaatatgatgaaccaaaaccaatatatccatacgcaactgcatctaactacacaaacccctaaaaactgcaaacattactgtgatcatctgctactagaaatgacagaccaaaacagtcagcatggaccataccagtatttt

SEQ ID NO: 23993 - DNA, 69 bp, Gossypium hirsutum
  Clone ID: LIB3147-011-Q1-K1-E1
cggacgcgtgggaaaaaaaaaaaaaaaaaaaaaaaaaaaaaaaaaaaaaaaaaaaaaaaaagaaaaagg

SEQ ID NO: 23994 - DNA, 422 bp, Gossypium hirsutum
  unsure (1)..(422): unsure at all n locations; Clone ID: LIB3147-011-Q1-K1-E10
ggaagnccggggccgacccacgcgtacgcccacgcgtccgattgcagataagttttgttcttactaatttctcattccctctaggcgaggcagtatttcgaccatgtgctcttaggcagcagattttgttgtaccataacagttgttggcataccataatctgcatgcctttgcttacgagatcattctttttattgaaacatacccctaccagaaccacttgaataaaaaaaaagaagacataagtatagaaaaaactcactaaaaggaactaaaaaaataatgaactccattagaagaatagtgatatgggataaacaacatatttaacatgtttaggactgccactttataggaacaggaggggggcccccctttaaaaaaacggtataaactgcgatctttgcctaaccaagttttgt

SEQ ID NO: 23995 - DNA, 449 bp, Gossypium hirsutum
  Clone ID: LIB3147-011-Q1-K1-E11
cccacgcgtccggctacttccaccaaggttgacatctcaggggttaacgtagacaagtttgatgacaagtactttgccaaggaagtagagaagaggaagaagaagactgagggagagtttttcgaggctgaaaaagaggataagaaaaaactgcctgaagacaagaaagaagaccagaaagcagtcgacgcctctttgataaagtccattgagggagtcccagacttgaaggcctacctcgccgcaaggttttctctcaagtctggcatgaaaccgcatgagcttgtcttctagaggatattttgcattccttaatgttaaagggcttttacttttgaattctttgggttaagattatctatggttttattatggggtgctattgctatatgtccagaacctaaattggaatagtatcttgtgttatgcaagaacttaaagtttccttc

SEQ ID NO: 23996 - DNA, 284 bp, Gossypium hirsutum
  Clone ID: LIB3147-011-Q1-K1-E12
cccacgcgtccggctacttacaccatggttgtcatctcacgggttaacgtacacagggtgggtgacaagtactttgccaaggaagtacacaagacgaacaagaagactgatggagagtttttcgaggctgaaaaagaggataagaaaaaactgcctgtatacaagaaagaagaccacatagcagtcgacgcctctttgataaagtccattgagggagtcccagacttgaatgcctacctcgccgcaaggttatctgtcaagtctggcatgaaaccgcatgagca

SEQ ID NO: 23997 - DNA, 311 bp, Gossypium hirsutum
  Clone ID: LIB3147-011-Q1-K1-E2
aagagatgtttagaggaagacatacaagattcgtatacaacagtgatgatgagattgaaagggaggaggatatgatacgcttgaagggattgccaacacctaaagggaagcacctgcgctttcctatagaggaagaagaaggtgcatgactgaaatttttttaaaaaacatttctgggtttttttggtagatatccatcagttgtctttcttgacacccatctttgagctgctttttgtttcccaaaaagatacttggaaacttgaaattgattgaataataaagaattatcttttctctccttcatggtt

SEQ ID NO: 23998 - DNA, 298 bp, Gossypium hirsutum
  Clone ID: LIB3147-011-Q1-K1-E3
tccggaatccgccgcgacgcacccacgcgtccgcgagctctgtaaatcttctcatcatatgctccctggcctccagcacggacaggagaaaatgtccaaaagtgatccatcgtcatcaatcttcatggaagatgacgaggcagaagtgaatgtgaaaataaaaaaggcatactgcccccctaaaattgttaagggcaatccgtgtttggaatacatcaagtacatcatattcccatggtttaatgagttcagggtggagcgcaatgcagacaatggtggcgacaagacttacaaggat

SEQ ID NO: 23999 - DNA, 309 bp, Gossypium hirsutum
  Clone ID: LIB3147-011-Q1-K1-E4
ccctgccccagcaccggacatccgggttttgaggtgtggccctccacccatgaacaaggccgtgactggacaccttgatgcactcggatattcaccggatatgcagttccagttctgatccttgtagactaagcttaagctcgactccgaatgtcatttgttgggtgcccttctgttataatcggaaccgctgctcagaacttgttataataagttttctatcaccatgattgaaaataatgtagacttgtgaacatactcatgtcggattcataatcagtcggtaatttacacccgataattacagcc

SEQ ID NO: 24000 - DNA, 277 bp, Gossypium hirsutum
  Clone ID: LIB3147-011-Q1-K1-E5
aagcaaaaactttgcaacatggttttggatctctaattcctgttccttggcaattttgtcagttcaaacttgcaagttttcatcaggttgaggcccttgtgatcttgttctttcttgactaaaatggcaagtaagatccttaagcaatagttataggtagaattatggaaaataactctgtactttccatttctcttcacattgctatacacttattagacaaagtcgtgtaattttttctattaatatggcatggcaaatgaatcttaatttggtt

SEQ ID NO: 24001 - DNA, 378 bp, Gossypium hirsutum
  Clone ID: LIB3147-011-Q1-K1-E6
agcatccataaagacagtcctgctgcaaaattcctacttgaccgtggggtggagcgcaaggacttcaactcttatggaagtcgtcgcggtaacgatgaagtgatggcacgtggaacttttgctaacattcgccttgtgaacaagctgttgaatggggaagttggcccaaaaacggtacatgtccctacaggagagaaactctatgtatttgatgcagcaatgaggtacaaggatgcaggatatgacaccattgttttggctggagctgaatatggaagtggtagctcccgagattgggctgcgaaaggtccaatgctattgggagtaaaagcagtaattgccaaaagctttgagagaatccatcgaagtaatttggta

SEQ ID NO: 24002 - DNA, 320 bp, Gossypium hirsutum
  Clone ID: LIB3147-011-Q1-K1-E7
actcgggcggccactcgtgcatatatgcctttaaaacgttttcgcattcttccattcaaggggcgattgaaagggttgccaaaaaatatcccttgcacgggaatgaaaaaccagggagctaacagtgtggactacctacctgaaataaaccaggcttatctaacagaaaaagctatatatgagctagactgtgcagagaaaaaaaaaagaagtgttatagactaatttgtctaccataagaactgtaccttttcactgacctctctaatcctgtggaagctgtgcctgaaggagccccttattaatgcctgttaccggct

SEQ ID NO: 24003 - DNA, 301 bp, Gossypium hirsutum
  Clone ID: LIB3147-011-Q1-K1-E9
gtcacacttatcggttctgtaaaaatctggttgaatgatgagaacttggctactgaggggagggaccattttcatttgcgctgtggcttacctcatgacaaaggggcttaaggtagagtctacttccggtttgatgcaatataagggcatccttgcttgcgaaacttcagccgtcctactctatttctccacctgtatcataaacacaatcctgaaatcctctgccgtgggggctacatgaagttgctgagtgatatcatggaccacaagaaaccgggtgacctcaccctgtacaggatca

SEQ ID NO: 24004 - DNA, 284 bp, Gossypium hirsutum
  Clone ID: LIB3147-011-Q1-K1-F1
ctctggcggtgattcgggtatatatgccttcaaaacgttgtcaaattcttccattcaagtccgcattgaaaggcttacaaataaatctggttcccccagtatggaagacattgaagctttttctgtaagctacagagcaaaattggatgaagctgaacttgctcgatcagtagcagagaatataaccttggaggtttcatctcctggtgttgaaagagtagttcgaataccacaggatctagaccggttcaaggaccgctctctttatgtgaaatatgtgactg

SEQ ID NO: 24005 - DNA, 403 bp, Gossypium hirsutum
  Clone ID: LIB3147-011-Q1-K1-F10
caacaaccaaagctttttgttggaatgattcttattctcatttttgctgaggctttggctctctatggactcattgtcggtatcattctctcttcccgggctggtcaatcccgagcagaatagagtgcaaagttccgaaacttgggtcattgctagtaggcttcacttggttgtttctccaattcttgccgctagtgcagtatgaaacatttgtcaagttgttcttttgatctcattcatgaattttcttttcaatggttctctgctggttgtatgattagaagacggattccgttcgaatcattcttatttacataacattttttttttcaaatctagtgtggaaaatgcaagtccacataatgaaaacaccattaagttacaaaaaaaataaatttaaaaa

SEQ ID NO: 24006 - DNA, 260 bp, Gossypium hirsutum
  Clone ID: LIB3147-011-Q1-K1-F11
gctactcctccgcacacgctttcgtttacgctttcagttgagaactagccttctagcgtgggggtcacatatgtcgtccagtgatggaaattccttgaggtcttggctcgatgtaatagtgcatagactcatcccaatgatgataaggatgatgatgctaccttctacatgtgtagcactcagagatgcgttgactgtagacctaccggactaaaatggggtcatatctatcactcaccatatccttgacatgacatata

SEQ ID NO: 24007 - DNA, 353 bp, Gossypium hirsutum
  Clone ID: LIB3147-011-Q1-K1-F2
gctcattctctgcatcagcttttctttaacaatgcagacaagaactgtacaagtcaagaacctgtcagatctagctactgagagggagattcacgagttcttttctttctctggtgaaattgagcacattgatatcataagtgaagctagtcaatcaaagactgcatatgttacattcaaggatccgaaagctcttgaaatcgccttgttattatcgggggcaacaatcgttgacaagattgtgacgataatttctgttgaaaattatgtaccaaaacttgagattcatgaatcaagagcggcggacaacattgtgtctattgctcctgctgggcatagtgcatcaaatgatg

SEQ ID NO: 24008 - DNA, 328 bp, Gossypium hirsutum
  Clone ID: LIB3147-011-Q1-K1-F3
ttattatcttacttggcgtcgaattactggaaatctcaggggtggctatgtagttattatcgatagctgtgttatagaaatgtgaagcggctcattgatgaggtaatgatgactcatctatttcaggaccaaatttcatcatatgtagaaacggggccgcgcaacataactggaaaaacctgagtaccttctgtttgcttcgagtttgagacaataattttctgttgaaaatttttgtcccaaacttgaaaattattgattcaggacctgccgaccacattggggttattgcccctgcctggccttgggcctccaatgatgaacaagg

SEQ ID NO: 24009 - DNA, 313 bp, Gossypium hirsutum
  Clone ID: LIB3147-011-Q1-K1-F4
cccacgcgtccgcccacgcgtccgcccacgcgtgcggctgtgtttgagccttcaagcatgatggcaaaatgtgaccctaggcatgggaagtacatggcatgttgcttgatgtatcggggagatgttgtccccaaggatgttaatgctgctgttgctaccatcaaaacgaagaggactgtgcagttcgttgactggtgccctactggcttcaaatgtggtattaactatcagcctccaactgttgtacccggaggagatctcgcgaaggtgcagcgagctgtttgcatgataagcaacaacacagcagtggctg

SEQ ID NO: 24010 - DNA, 170 bp, Gossypium hirsutum
  unsure (1)..(170): unsure at all n locations; Clone ID: LIB3147-011-Q1-K1-F5
cggaangaccggnngcgacggtttagcttgacggcgaagagtgcgcaggttaagtgaatctgcttagtattgggcgtagggggttatgaggggcgtaatcaagaaccaaaaagaaaaaaaaaaccagtaaaaagaaaattttatttcttacaaaggaaagaggggaatcg

SEQ ID NO: 24011 - DNA, 325 bp, Gossypium hirsutum
  Clone ID: LIB3147-011-Q1-K1-F6
aaactttatatagcatcaatgttgcaggggctttagttaatatggttggaggagttgaggtgtgagtaaagctaattatataaatatagcttaaacatctgcatcagctatgaatagaggggttggtgttattgtagattatacagaacttgaaaatgtatcctactctttaatatcaagtttactggtttaacgtctggcttcaaatgtggtattaactatcagcctccaactgttgtacccggaggagatctcgcgaaggtgcagcgagctgtttgcatgataagcaacaacacagcagtggctgaggtgtttgcacgcattg

SEQ ID NO: 24012 - DNA, 366 bp, Gossypium hirsutum
  Clone ID: LIB3147-011-Q1-K1-F7
cgggacgacccacgcgaccgacgcactcctacgacaccttttgcagatgttattctaatctccaacttatctggaggcctcgggaatagggcggctagaaaacatgatgagttactaaaccaacactgccctgacgatcaagctgttggagaaatgcatttggagaggatgtgtaacacacaaagtgaaagcccacttctgaagatcgtgcccgccaactccatgaatctgtaagatagctttttttccgtggtaagagacggaaaagctatatatcattctaaggttacgtgacacgcccaaatattttttcaatacatcttttaaaaagaatcccggactgccaaataaaatcccttttttgcg

SEQ ID NO: 24013 - DNA, 247 bp, Gossypium hirsutum
  Clone ID: LIB3147-011-Q1-K1-F8
cccacgcgtccgatttctcccgaaaagttccaccatatgtggtgccacaggccggaccatgtccaccacactagctctgaaaaagtacaaggatgcgatttacatgaaggtgaatttggaactcccggcgtcgttatctgctggagatatgtgcatgatggaaaggctaaaactgcaaagcaggtagttgaagttatggaccatgagaaaaagtcaataactgtcaaaatgcattgaaggagatctg

SEQ ID NO: 24014 - DNA, 271 bp, Gossypium hirsutum
  Clone ID: LIB3147-011-Q1-K1-F9
gcgttgacgcgtaggcgcactgcgactgctatacttgcatctcagacaaaaccctactgaggcgggactccacgatatctgcagagaatgagagacctgtagaaatgaaaccgttgattcctctgtattccttaacctaatggcaaggagagatgattgtgactggttgcaaggaacaactcatggaggctttgacggtgattgacagggaccagagtggttgcatatcatggtgctgatcttcgccatacgatgacaaatctgcggtaga

SEQ ID NO: 24015 - DNA, 380 bp, Gossypium hirsutum
  Clone ID: LIB3147-011-Q1-K1-G1
cccacgcgtccggcaacttttgcagaggtaatacagatgaccgatatatttgagggtagcgttattaggagtgctagaaggcttgatgagtttctgaaccagctctgcgctgccgctcaagctgttggagaagtcaatttggagagtaagtttgccgcagcaagtgaaagcctacgtcgaggcatcatgttcgccaactccctttatctgtaagattgtatttttgccatggaaatagacgtaaaaactttgtgcggtctaatgatacattgacacccataaatttctcctcttcatcttttaaaaggtaaccctgccttccgaatataatccctttttttagttaataatccccaggaggggcgcctttaaatttggtt

SEQ ID NO: 24016 - DNA, 293 bp, Gossypium hirsutum
  Clone ID: LIB3147-011-Q1-K1-G11
ggaaaaagaatcgaaaatggaaattacggagaaaagggaaggagagagcaataacagcagcaaagatttgagcaacaatgataatattaacaacgatttgacagattctgatggcaataatacgagtaaagaagctgaagaacgccgagcccgtgacctcaaagccggtttgcatcctctcaagctcaagtttgtcttctggtatactcgtcggacacctggagttcgaacccaaacagcctacgaggacaatataaagaaaattgtggaattcaataattgttgaaggtttt

SEQ ID NO: 24017 - DNA, 213 bp, Gossypium hirsutum
  Clone ID: LIB3147-011-Q1-K1-G12
cccacgcatccgcgatttcttcgtataagtttctatggacagctatgtcggccggagaattggccactcttgcccattatgtgtatactgggtataaatacaagccagaggcgcattacccatatttagccatctatgatgcaccggaagaggctgctgcagagcagttgaagctctatgatgattacgtattgctaaacctatcatcgcgaa

SEQ ID NO: 24018 - DNA, 147 bp, Gossypium hirsutum
  Clone ID: LIB3147-011-Q1-K1-G2
gttttttttttctcttttttcacaaatcatggtttatcattgtgttgtcctttaatttattcaagtgaaaagatggtgttgagagagggagcaaattccctgtaaaaagggtatttttttcactaataatattttctatagtaattt

SEQ ID NO: 24019 - DNA, 321 bp, Gossypium hirsutum
  Clone ID: LIB3147-011-Q1-K1-G4
cccacgcgtccgcccacgcgtacgcatcctcagattctctttcctaccttaaaaccacaggctctctttgtctctctgtttctactttcactttgcatttttcttgattccttccttcacgacctcaatctctaggagtgtttgtaataaatggctttggtgacaactgctgaagtctgtgatgcaaatccacagctaattgtgagcggtgaacttcgggcccttcaaccaatattccaaatatatggtcgtcgcccagtattctccggacctatagtcacacttaaagtgtttgaggacaatgtattgatccgtgagttc

SEQ ID NO: 24020 - DNA, 228 bp, Gossypium hirsutum
  Clone ID: LIB3147-011-Q1-K1-G5
tcccacacgttcgggcaggctgatacagcaagagatcatatatgcacagagttacggaacaaatgagagacagaactcttgattaagctcaaggatataaaagccctactttttctccttcgtgttgccaaagtcactggtagtgcccccaataaactatgcaagattaaagttgtgaggctatccattgcacaagtatttactgtgatataccaaaaacagaacgct

SEQ ID NO: 24021 - DNA, 296 bp, Gossypium hirsutum
  unsure (1)..(296): unsure at all n locations; Clone ID: LIB3147-011-Q1-K1-G6
cctcactccacccttcactatccttttattttttttcctaccttaaaaccacagggcctctgtganatttctgtttctactttcacttaaccttctacttcattccttcctatcctacctctaactataggaatgtttgtaacaaaaagctctcgtcacaactgctgatttacatgatgccaatccccagctaattctttagcatgaacttaggacccttcaactctatattccaaatatatagtcctcgcccagtattatccggacctatattcacacttaaagacgttgatgac

SEQ ID NO: 24022 - DNA, 177 bp, Gossypium hirsutum
  Clone ID: LIB3147-011-Q1-K1-G8
taaccgagaaaggcattgttaaggaagagacactagaagaccatctaaaaagtttgatttcatcttcaccggtgatgctctttatgaagggtacccccgataatccaagatgtggcttcagctctaaagttgtcaacgccctaaaagaggaaggcattgattttgggtcattcgata

SEQ ID NO: 24023 - DNA, 410 bp, Gossypium hirsutum
  Clone ID: LIB3147-011-Q1-K1-G9
tactctcactagccgtggccgacaacctctccttaagtctcataggagccatggagcgtcggtggtttcaccaaattatccttttcccagaacccatttcactattttcccttaaacccctacaaccactgcagccctactcggaatctatcgctacgcctacaagcccgtctgcaacatctcttgcagaagacaatatctcaacgcctgtttgccctctctttgatcatcagccattagctccagcggacgattctaaaaatgaggaagaagaagaggaaatgaagaaacgagcaaggagagggagtgttactctaaaagtcgttaacattcttaatttcattcaaccgaaaagcgtttaaggaataccaggccctcaacttcacgttcactagggggtaaactgaaaa

SEQ ID NO: 24024 - DNA, 401 bp, Gossypium hirsutum
  unsure (1)..(401): unsure at all n locations; Clone ID: LIB3147-011-Q1-K1-H1
cacacggagggtttggagtgggattggagcgtgtggtgattctcttctgtgctctgggtaacattcgtaaaacttggagtttaccctcgtgaccctcaaagaattgctccatgatcatgatagagcagaatttctgccaatgcaactcttggattttctccgaagttcgatgtgctatttggatagagaatcaaaggaatcttatntctgcttttatctttaaaaaattggctagtttttttttcccagcacaactctccctttgttaactaatggtattgtttgacttttggaaccgtgttaagaataacccgagcctaaaccaattcttggattttaaaagaaaggacctttcgcaaatgaaaaattaaaaaactattaaaaatttaaaaagggcgggc

SEQ ID NO: 24025 - DNA, 271 bp, Gossypium hirsutum
  Clone ID: LIB3147-011-Q1-K1-H11
aataagcccactattaacctgctaactggagttcttataatgaatatactgcataagacgggggagctgctagacgccttacagccaactcaaaccctaatgagatgttaacacagctggaagctctataagatcacgatgagcgttaacatcactatctagagttacggaattcatatgctggcgatgattttcctaagcacgatggctctcgcgatttcagaacgcatggagcgagaaacgccattgctaatcatcactcacttactgt

SEQ ID NO: 24026 - DNA, 160 bp, Gossypium hirsutum
  Clone ID: LIB3147-011-Q1-K1-H12
cttaatttgaattcttatgcttgcttttaaagaggggtttgattttaatgttgtgcttttgatattttctttttcatcttaaaacctatattgtcttctggttgctcagtaagaatgatggtggtggtgatcgaactttgatcatctttgatatataatg

SEQ ID NO: 24027 - DNA, 312 bp, Gossypium hirsutum
  Clone ID: LIB3147-011-Q1-K1-H2
agaaaacaacggtaaaccctgtggaaacaagccgactgcaaaacgctgcagctgaaaccctaacttttccgctcacctctctgcaccagccgctcctctattcgcatcttccatggctacgataccagttaacccgaaacccttcttgaacaatttgactggaaagactgttatagtgaagctcaaatgggggatggaatacaaaggttttcttgcatctgttgattcatacatgaacttgcagcttggcaatgctgaagagtatgttgatgggcaattcactggaaaattaggggagattttgatcagatg

SEQ ID NO: 24028 - DNA, 100 bp, Gossypium hirsutum
  Clone ID: LIB3147-011-Q1-K1-H3
tgaaaacaaaacagtagccatttatgtcctgccttcccattatccaaacatccttgctttgtctgtctaaaatggtccagccagcttttaccattgtact

SEQ ID NO: 24029 - DNA, 365 bp, Gossypium hirsutum
  Clone ID: LIB3147-011-Q1-K1-H4
gttttgaccaattttgataggaatctgggaattcgttttagcactgctttgaattatattgtccgggtcggctacattcttcatttggttctggttttccctgttattcacttttccctacggcaaactgtggataacttggtgtttgagggatcagctcctctcacggagagtaaaaaaaggtctttgacattaacagtagtattgttagtgctgatatatattggatctactatgatcccaaatatatggacagctttcaaatttactggagcaacaacagcttgttccttaggttttacgttccctgctctaattgcattgaggataagtcagcaagaagagagcatgagcttgaacagagt

SEQ ID NO: 24030 - DNA, 256 bp, Gossypium hirsutum
  Clone ID: LIB3147-011-Q1-K1-H5
ccgggagtcgagggacgcgtcacgcgtaccgcgaaagcacacccgttggcacccatgtgcttgctaagcgacgccttgcactccttggtttgactaatgaacagaggggcccagcccttaccgtattgtggttgacgatgcctactatgccctataatatgacacggttgttgtacaagactgttctagagtctgtaataggagaattaacatgcaaaatgcaatactaggcgaatcacgatttatcatattcaat

SEQ ID NO: 24031 - DNA, 413 bp, Gossypium hirsutum
  Clone ID: LIB3147-011-Q1-K1-H6
ggaaaatgccgatgtttttggtggataggaacgatcccaacaaattgattttcttttaccaaggatcggggatgcagcttggggcggaaggattcgcggtgggttttctttatacaatagtgggattattgctagctttcgttacccatttgcttgtttatgttaagaacgcgaaagccaagcgtgtggccatggtttttgcgatttgcgtttctttttgggcggtgcagaaagtgattttcttggacaattggaagactggatatgggattcatggattctggccttccagttggaactgaaggcataatcttttttttttttaaggctgctataatccgaactatggtttcaattcagttgagaatttgatatcaattttagatgttttaatgtactttgggcaaaatact

SEQ ID NO: 24032 - DNA, 146 bp, Gossypium hirsutum
  unsure (1)..(146): unsure at all n locations; Clone ID: LIB3147-011-Q1-K1-H7
tttattctttttttaacaaaaaaaacggacttccctttttcttccacataagaaccngagggcaacggcttttaacaaaggcccacaaacaattattcaaagttccatttctgcactatacacaaaatgacacacataggagccag

SEQ ID NO: 24033 - DNA, 374 bp, Gossypium hirsutum
  Clone ID: LIB3147-011-Q1-K1-H8
cccacgcgtacgggtatctgggatgggctattcacaaagagtagtgcattcaaagagggagatatagcacatgtggtggtgatgcctaatgtgacaatcgaaaaactggatttcttcttgaatgaattatttgaaaaacggtcgacttggtatcaagggaatgttcaacctccttgtattgcagcagagatagggaaagcgaattgcgtttgtgctctgcacaagtgaaaaaaaatatcagtctatgattcaggaattcctctattttcatgcagcttgtcatttggttataatgaaatatcgatgagattcataattttttcgtttacattctcaatagtactggaaatagtcgggctattcaacttgttatt

SEQ ID NO: 24034 - DNA, 319 bp, Gossypium hirsutum
  Clone ID: LIB3147-011-Q1-K1-H9
ggaaaaaggaagaagaagcattgaatgttaaaaaacaagacgaagagatgatgacactacaggaacaagaagcacttgaattgcttaaaacgaaagagaaaactgatcatatcattaaaaaaaccaaagagaaacgtcaacaaaagaagcagccgaattcagatcctaataaacctaaaaagcctgcatcttctttccttttgttcagcaaagaagcaaggaaaactctggtacaagaacgacaaggaatcaacaactctacacttaatgccctgatttcagcgaaatggaaggagcttagtgaagaaaaaaagggatg

SEQ ID NO: 24035 - DNA, 352 bp, Gossypium hirsutum
  Clone ID: LIB3147-013-Q1-K1-A11
aattactctttcttattacattttctacaactttttcaacatcttccattgactgtttaactcatatactgcatttttcatatcaccaatatttattaaaatcacattttctgctttctgaacatataacataaaataatatccattgttatcaatgttattcgctttacttatcaatacaaacatgtttattactcactaacatttagatttattatcttcattcatcaatcctatcccctatatattaaattaaaaaaaaaaaaaatgccttccctttctaaatatccaaccttacttactccttcactcaactacataatttttttattaattaactctaaattaattc

SEQ ID NO: 24036 - DNA, 472 bp, Gossypium hirsutum
  Clone ID: LIB3147-013-Q1-K1-A12
ggccgacgcacgcgtccgtgggtcgtaccaagcaaactgctagaaaattataccgttggtaaggctccgcgtaagcagcgggccggtaaagctgctcggaagtcagcaccggcgaccggaggagtgaagaagcctcaccgtttcaggccaggaactgtagctcttagggaaatcaggaagtaccagaagagcaccgaactcttgatccgaaagcttccgttccagaggcttgtgagagaaatcgctcaagattttaagactgatttgaggttccaaagcagtgccgttgctgctcttcaagaggctgctgaagcttaccttgtcggactgttcgaggatactaatctatgtgctattcatgctaagagggttaccattatgcctaaagatatccaacttgctaggaggattagaggaaagagaagctaagtctgttagtttttagttgattgatcctagaattagaaatctg

SEQ ID NO: 24037 - DNA, 375 bp, Gossypium hirsutum
  unsure (1)..(375): unsure at all n locations; Clone ID: LIB3147-013-Q1-K1-A2
cccacgcgtccgcggaagttctcttactgtttggtcgaccgatcggcttcgtctaaaccatcctccctggttttcggtgatgccgccattcctcgaggtgctctgttcactcccttattaacaaacccaaagctcgacactttctactacgttgaactgctcgggatcagcgtcggtggtacacgtgtccccaagatctcaccttccttgttcaaaatggatcaagacggtaacggaggggtcattatcgactcangcacgtccgtaactcgcttgactcaacccgcttacacggcaacgaaggatgcattccgtctcggagctacaaatctgaagcgggcgcctgatttctctttatttgacacgtgctttgac

SEQ ID NO: 24038 - DNA, 349 bp, Gossypium hirsutum
  Clone ID: LIB3147-013-Q1-K1-A4
cccacgcgtccgtttttttctttaagttgtttccaccctgggagaatcacacccggcgccctgttctatcatctattatgcccctcttcgtcgccatcggctctgctgaagatttcttcgaagaacgcttctaagatggatgggaaagtcgttgggtaaaatctgactggaagaaagatgagaacatggctggggaatggaattacacttctggaaaatggaatggagatcctaatgacaaaggtattcaaactagtgaagactacaggttttatgctatttcagctgagttcccagaagttaacaacaagggcaagactctagtcttccaattttctgtgaagcacga

SEQ ID NO: 24039 - DNA, 408 bp, Gossypium hirsutum
  Clone ID: LIB3147-013-Q1-K1-A6
atgttatttagcattttaattttaattttattatttagttatattaataaaatattactggtattttatagcttatcatgtttgagcaacattgcaatattgaaaatcttggtcgagttaacaaagttaaggtcaaatggcaaatcacagtagagagtttgcaattagaaccactttgtaatcagagcatggagaagttcttcaagttctccactatgaagttggacagaaatatgaaccacaccatgattacttctgcttatcgtttctgctcttacagaggacacaaaagctcttaatcagcttaacacacttatccaggatgggaaggagatggcatcagtgctttatacttatcgcagctgtgtcaaattcacttctccgactgtatgttggaattcacagttt

SEQ ID NO: 24040 - DNA, 439 bp, Gossypium hirsutum
  Clone ID: LIB3147-013-Q1-K1-A7
cccacgcgtccggacaaatctcaagtgtactccaaatttgtgtttgaggactacatgaatgtctatgctgacctcaagttccaagccaaggagccaaggttcgaagccatgaagaccgtggagtctgcagttaacttgggtcctattgcaactgtttgagtccttcagtgattgaagagcgatgggttttaattagcagtgtgtttctgttaataagtttagtcggctgatggataaattctgttaattatagttctggaattagagagtgcctgcaggtgtggagcttactagtttaaaataagctgaaaaagcttgtactaagaattcctcagttatatatggtgcctggtcgccagtggctgtgctttaaatgagatgttttggctgtccgaagtgaccaaattatatttgatatgaaaaattggccttgagattc

SEQ ID NO: 24041 - DNA, 434 bp, Gossypium hirsutum
  Clone ID: LIB3147-013-Q1-K1-A8
ccagaatacacaagcattccacatgtttattactgctcttcttcagcttttcgatcgcacgggattattgtatggagagttagctagatttgtgttaagactgctgggaatcaaatcaaaaccccgaaagatcaatcaaccaggaccaggtggactcccaggaccccataaccctcatgggaatcaaaactacattgaagggccaaaggctgctcccagtggtgtatgggacaatgtatggggagaaaatggcagcgcctagtttgattatcgacggtggcctagccaaagcacacgctccaatttgagtaccctgcttgaataagaccaggaggacctcatttgaagaatgtgaccgaagtttttctacaattgtctgaatataccacccactctcaatagtgttaaaaaaggaaagattgaaacttaataat

SEQ ID NO: 24042 - DNA, 262 bp, Gossypium hirsutum
  Clone ID: LIB3147-013-Q1-K1-A9
acgcaagacgtctgatgctttgacacaaaaccttgcatttctactcacccatactccattggggattagaggatctgttatggctgtatttagagtcttgattatcacacttgaagttacatacaaaaatccattcgatgaggcatgcaacaactgctctagtactggtggcggtcaaagacattatataagagtgctaaactggaatatcactatcccacaaatgattgtataacttaataacggaccgattgatgatgca

SEQ ID NO: 24043 - DNA, 324 bp, Gossypium hirsutum
  Clone ID: LIB3147-013-Q1-K1-B1
gtttgatggccagaagccaggcacttttggtcttcgtaagaaggtgaaagtttttggtcagcctcattattcgcagaatttcgcacaagcaacattcaatgccctaacacccgaaaaagttaagggtgccacacttgtcgtttctggtgatggtcgttatttctcaaaggatgctgttcagattataatcaagatgtcagctgtaaattgagtaaggcaagtttggtttgacaaaaccggattttttattacgccatttgaaccggtttaaaattttctttagggtggtgccacatgaatcaaagccaccgggttctttaattt

SEQ ID NO: 24044 - DNA, 177 bp, Gossypium hirsutum
  Clone ID: LIB3147-013-Q1-K1-B10
cgcgtaacgaaagttatcaccacattccaatgttaagatcaacctatctgcctagtccctacttttgttgattatgtctattattgcaatgcaagaataatcaaacattgtaatgttaataaagtttgcacttttgttgactggatggatgttatcaatgaagtacctagtttatat

SEQ ID NO: 24045 - DNA, 454 bp, Gossypium hirsutum
  Clone ID: LIB3147-013-Q1-K1-B11
cccacgcgtccgaagttattgtcagtggatgagctgttggtgaaatggcgttacatttctgtgaacgttacaagttaatggtcttgaaaatcagctcaaaatttgaactgaggcgtttttgccgcactacaggaacttctgctcttttaaaactcagccaaccaaagccggatgatttgggatttattgattcaatttcagtcgaggaaattggtggttctcgggtcactgttgtgagaagcgaagaaggtggtaacaagattgccactgtggttctacgaggaagtactgatagtatattggatgatcttgaaagagctgttgatgatggagtgaacacatataaggcaatgtgcagggacagtcgaatggtacctggagctgcagctactgaaattgagttggctaggagattgaaagagttctcctttcaggaaacaggattggatcagta

SEQ ID NO: 24046 - DNA, 441 bp, Gossypium hirsutum
  unsure (1)..(441): unsure at all n locations; Clone ID: LIB3147-013-Q1-K1-B12
cccacgcgtccgcattcttgaaactgatgcaaatgtcattgccggaaaagttgatagtcagggtatggatgccggagctcctttgtccgagcagacaataactcaagcattggctaccgctcgtgaacatcttacgagatctctcctcaagtaaaatgtgtttacattgaaccaaacgagataagcttgacggtactatctttccgtaatgatactgtatttgatatgttttaggataatttttgtgccttgttttgaatgcgatagaactgaatatatacttgcggcggatgttgtttacattgatgttattgcaatgttgtgctttcttgatactatttgtcctgccatctcattgcatccaataaaaagcattcgattttgaatccgggaaaaaaaatttnnnttattaaattattaaatttttttatataaattata

SEQ ID NO: 24047 - DNA, 472 bp, Gossypium hirsutum
  Clone ID: LIB3147-013-Q1-K1-B3
ggaaaacccgggccgacccacgcgtacgcccacgcgtccggcttgccattcattcatttcaccaaagcccattccaccacctggtgcgtgccctccaccaccagcaaagcctgcttcttgccctaatgacacattgaagctaggagtttgtgctgacctgcttggactggtaaacatagtggtgggagcacctccttcgagcaaatgctgtgctttgctccaaggcttggctgatttagaggctgccctttgcctttgcaccgccattaaagccaatgtgcttggggccaacctcaacatccctattacccttagcttactccttagtgcatgtcagaaggaaatccctacaggcttcaaatgttgatattttttgttaagaagcacaatcagttggtgatgttggctaatggctaagtttgctctactttaaatttatattatggtgctgcaaatcaatgtgtccttgctt

SEQ ID NO: 24048 - DNA, 427 bp, Gossypium hirsutum
  unsure (1)..(427): unsure at all n locations; Clone ID: LIB3147-013-Q1-K1-B4
tagcaaggatctcctgaacgaggttgaaagatatttgcaggatgccttgtctgttgctagaaacataattaagaatccgaaacttgttcccggaggtggtgctacagaattaaccgtttctgccacattgaagcagaagagttcatctgttgaaggcatagaaaagtggccgtatgaagctgctgctcttgcttttgaagccataccacgtactttggcacaaaattgtggagttaatgtgattcggactatgactgctctgcaaggaaagcatgcaaatggtgaaaatgcatggattggcatagatggcaacactggtgccattgctgacatgaaggaaagaaagatttgggacgcatacaatgtgaaagcgcaaacatttaagacagcgatagaagcagcatgcatgcttctacgaatngatgac

SEQ ID NO: 24049 - DNA, 358 bp, Gossypium hirsutum
  unsure (1)..(358): unsure at all n locations; Clone ID: LIB3147-013-Q1-K1-B5
caataacgaaagccgacatgtgggctttcatcgatgatcaatggagtacgctcttgaatagggaaaactaatgaaccttgtgaaatgcattgcttggaatctcaacgaggcctgtttaaagttccccagctttatgcctatttaatataatttaactggttttcagtgcatgagaaatatgaagtcttaggtctgtgaccaagatcttacatggagagatgaaatttgttagtagagcacctgcacttaataataggcataataaactgtttgaaaattttctaagggaaaaaaatgaaaaaaaaccaaagggaaatgaaaataaaaataggggtaaagatatttatatnntgtatat

SEQ ID NO: 24050 - DNA, 441 bp, Gossypium hirsutum
  Clone ID: LIB3147-013-Q1-K1-B6
cggacgcgtgggattaaaccagcgatttttttgaattcgaacgtgtaataatggtggtatgtaatagcaaaactaacagtgggatattgatgaaatgttttggcagtttataacatttggttttgcttgtactccattgtacttcgtgtgggagaaagtgatagggatgcatgacacgagaagcatttgtttgagggcgctggctaggctgccagtggtgattccgatatggttcttggccatcatcttcccattcttcggacccataaactcagcagttggtgctcttttggttagtttcaccgtctacatcatcccagctttagcccatatgctcacctacagaacagcctctgcccgacagaatgctgcagaaaagcctccattcttcttgccaagctggactgcaatgtatgcaataaacgccgtggttgtgatgtg

SEQ ID NO: 24051 - DNA, 413 bp, Gossypium hirsutum
  unsure (1)..(413): unsure at all n locations; Clone ID: LIB3147-013-Q1-K1-B7
agatcgcgagcggccgcccgcgatcttgaactagtcatcgtccattgtgaaattctcttgctttggatctttaaagcccgggtctttgactcaaaggtcctttaagggtttggttgtaaaagcggctactgttgttgctcccaagtacacctcgattaagcccttgggtgatagagtgttggtgaagatcaaagaaacagaagagaagacagagggtggaattttgctaccaacaacagctcaatcaaagcctcaagggggtgaagtggttgccatcggcgaggggaagacaattgggaagaccaaattggaatgttctgttaagactggtgctcangttatatattccaagtatgccggaactgagctggagttcaatggttcaaatcatcttatcttgaaagaagatgaca

SEQ ID NO: 24052 - DNA, 248 bp, Gossypium hirsutum
  Clone ID: LIB3147-013-Q1-K1-B8
agcagtgctacttttgtctagtataccttgcaatatagaagtttgttctatggttggacgcacgcgcaatgacaacacttcttatatcttgtgtatctttagttgcttgaggagagcctttagaactttgccggagtgtgttaggttcaaatgttaaaactatatcaaccatcagtttaaacagcctggtattgattagttctgtgtttcgtctcatggctcgaagcaatagcattgtgaacttatat

SEQ ID NO: 24053 - DNA, 461 bp, Gossypium hirsutum
  unsure (1)..(461): unsure at all n locations; Clone ID: LIB3147-013-Q1-K1-B9
ggcaagtaactggcaagcacaggttcaacatcagcttcagcaacagcaccagcaccagcgggagcgccagattcagactagattaaggaacaatgttgttggtgggagaccactggggctaccacaatcttcatggcctccacttcaagctcagccccaacagcagaaacattcacaaaatgggatgagagctatgtttcttggtggatctagtggtgtcaagagggaatcaactggcactggtgtgtttatacctcgcagatatggcaacaccaccaacaccaccactcatgaacctagaaagaaatcaggctgttcaacagtgttactaccagcaaaggttgttcaagctctaaatctcaacttcgatgataccaaaaaccatgttcaacctcaattcaatcccacttttgcatcanactatgatgcttttgtagcaagaagaaatgcactgttgacac

SEQ ID NO: 24054 - DNA, 372 bp, Gossypium hirsutum
  Clone ID: LIB3147-013-Q1-K1-C1
cgatcctgaggtgaagatatcggtgttggttaacactcccgatgatccccgacaagggaggccggacataaccaaagcaaaagaggtgctcggatgggagccaaaggtgaagttgcatgacgggcttccgcttatggaggaggatttccgtcagaggctcggggtcccaaagaagaactgattgaaagttattttacagcaacagaagttacaaatataaagtactattgcttcttttcctttctataatcaaattccaatatgggtatcttcaatgcataataatggcagcaatggagttattttggattttgtttttaatgttgtttgaacgatatttgagttaaatggaacacaatttgtgcctttcat

SEQ ID NO: 24055 - DNA, 341 bp, Gossypium hirsutum
  Clone ID: LIB3147-013-Q1-K1-C10
ggccgacgcacgcgtgcgcccagcgcgtccgcccacgcgtccgcccacgtgtccgttgaacttccattgtgcgacagacaaatcggggtgcaatcctggttatcgaaatttttttacttcaacttaacgggaaccaaatcgttactgatgtagaattttgcattatattttcagtttaccattttcttcagggctttttatgcaatttcatgtttccatctgataaataaagatgatgtatgatgggaaaatgcaaatactgaaatttctaatgacatttctcatgtatacaattccttttcttggtggttttaattgagattctgcctactgaattgacc

SEQ ID NO: 24056 - DNA, 423 bp, Gossypium hirsutum
  Clone ID: LIB3147-013-Q1-K1-C11
gttacggtcgaggtgattatttcctcgtcgttcatgatttcccagattacatggatgctcgagcccgagtagatgaagcttacaaggatcgcaagaagtggctaaagatgtctatactaagcactgctggcagcggcaagttcagcagcgatcggactatagcccagtatgctaaggaaatttggaatatcgaggaatgccgcgtgccgtaattccgacccaatctattttggcaatcaggttctagttttatgataatgaaaagcatatatatatataagaatgagtaataggatttgcattccaaaaccatatggcttagtaaaaacaaaaaataagcgagaaaccatgcatctcgatttcacctttaaatgtaataaacaaagtaatgtgttttactgaattgcctttactagtttgtgg

SEQ ID NO: 24057 - DNA, 408 bp, Gossypium hirsutum
  Clone ID: LIB3147-013-Q1-K1-C12
gtgcgccctatctacgcaaggtggacttgttattattcaagagttaccaagaactatcgggggcctgtgaggcaaaatgtttagctccttcactattggtaactgtgggggttcacaaggaatgaaagatttcatgaatgaaagcaaattaatagatctcttgaacgggtctgaatatgttcctacttatgaagacaaagatggagattggatgcttgttggtgatgtcccatgggaaatgtttgtcgattcatgcaagcgtttacgaatcatgaaaggatcagaagccattggacttgctccaagagcagtggagaaatgcaagaacagaaactgatgctagcttcattacaaaacaacaatctgagttaaaaatcaagtgttagtaagataaaaagaaaagagagc

SEQ ID NO: 24058 - DNA, 436 bp, Gossypium hirsutum
  unsure (1)..(436): unsure at all n locations; Clone ID: LIB3147-013-Q1-K1-C2
gcagctcgcacgctctcatcattttcctccgggaccgtcagtcttcccaaacaccttctttccgagaaaaaaaaagctcaagagagaagaccatggccgatcaacttacggacgatcagatctctgagttcaaggaggctttcagcctctttgacaaggatggcgatggttgcattactaccaaggagctggggactgtgatgcggtcacttggtcagaaccctactgaggcagaactccaagatatgatcaatgaagttgatgctgatggaaatgggaccattgattttcctgaattccttaacctaatggcaaggaagatgaatgatactgattccgaggaagaacttanagaggctttcagggtgtttgacaaggaccagaatggtttcatatctgctgctgagcttcgccatgtcatgacanatctcggtga

SEQ ID NO: 24059 - DNA, 453 bp, Gossypium hirsutum
  Clone ID: LIB3147-013-Q1-K1-C3
cattccccagagcttcaacgcattctttcacgggataaactgaaattgagtcgaacggcgggattgaaggggaagaagaagggagttaccttcactatcgattgttcgaagccagtggaggataaaatcatggacattgcccctctggaaaagttccttcaagagagaatcaaggttggaggcaaggctggtgcacttggtgaaaccgtagccctcactcgcgagaagagcaaaattaccgtcacttccgatggcgacttctctaagaggtatctgaagtacttaacaaaaaaatacttgaagaaacacaatgtacgggattggctccgagtaattgcttccaacaaagatcaaactgtttacgagttaaggtacttcaacattgctgagaacgagggagaggaagaagattgatttcttgggtgaacaaccagttttaatgctagctgattt

SEQ ID NO: 24060 - DNA, 348 bp, Gossypium hirsutum
  Clone ID: LIB3147-013-Q1-K1-C4
cccacgcgtccgatttttctcattgatgagcatcaactggataaaaccctacgctctgccgaaccatgccatggtggggatgacatttccagcaattgtgggaaatagaccgggccaaaattttaaaaatggatcagctgcaaggagcatgggaagaagctggaaaggaagatgttacaggtttgagattaaccgatgatccaatgagtcttgacttaattctgcggagactaggatgtatatgatatattaattgtatcccgtatggtatgaataaaatatgtcttcttactgctaaaaaaaaaaaaaaaggaacggaaatggatacaaataattgcttacaacaaa

SEQ ID NO: 24061 - DNA, 438 bp, Gossypium hirsutum
  Clone ID: LIB3147-013-Q1-K1-C5
gtaccgtggtgatgttgttcccaaggacgttaatgctgcagtcgcctccattaagaccaagcgcaccattcagtttgtcgattggtgtcctactggattcaagtgcggtatcaactaccaaccacccactgttgtccctggtggtgatctcgccaaggtccagagagctgtttgcatgatttctaactccaccagtgttgctgaagtcttctctcgcattgaccataagtttgatcttatgtatgccaaacgtgccttcattcactggtatgttggtgagggtatggaagaaggagaattctcagaggctcgtgaggatcttgctgcattggagaaggattatgaagaagttggtgctgagtcggctgagggtgatgaaggtgaagatgatgagtactaagaagtacctgtgattgagtgtgcgtatgatgtctttat

SEQ ID NO: 24062 - DNA, 440 bp, Gossypium hirsutum
  Clone ID: LIB3147-013-Q1-K1-C6
ggcaactaggctacagtttgaaaattctatgtgaagttggagtgttttccaagctggcgcagggcttattgcttggatgcaattggagggtctgaaaacttctacagcgcttttgagtctgagttaacggatgtcattcctgtcattaagacctctcttggcggcactagaataataggacggctctgtgctggaaataagaatgggcttgttgtccctcacaccaccacagatcaagaacttcatcacttgcgaaatagtctaccggatcaagttgttgttcagcgcatagatgagaaactatctgctcttgggaactgtatagcttgcaatgaccatgttgctctgacgcatacagatctagatcgggaaactgatgagataattgctgatgttcttggagtaaaagtttttaggcaaacaattgctctaaatatttt

SEQ ID NO: 24063 - DNA, 353 bp, Gossypium hirsutum
  Clone ID: LIB3147-013-Q1-K1-C8
gagaaagttaagaccctcccggccgtcccttcgaacgatgacatgctcattctctatggagtgtacaagcaagccactgttggaccaatgaataccggccgggctggaatggtcaacatgagggaaaggtgcaagtgggattcatggaaagctgttgaaaggaaatcaaaggaggaagcaatggggggttttatttcccaaaggaaacaaatgtttttggcgtttcgagaaactttatgtgtgtgtgtattggccacaaaaatagtgttatattaaacccttgtgtgttgctagtggggttcattactatgaataaaaaatgtgctctttttctattgcggtatgtgatttat

SEQ ID NO: 24064 - DNA, 475 bp, Gossypium hirsutum
  Clone ID: LIB3147-013-Q1-K1-C9
gacccacgcgtacgcccacgccttcggtaaatctcactcattttttcgtttttcactcaaaacaaaacataagaggactgccatggcgcccaaagcctataacaagcctgctgagaagaagccggccgaggagaaaaagactaccgtcgctgagaaatcccctgccgagaagaagccgaaggccggtaagaagcttcccaaagaaggcggtgctgccggagacaagaacaagaagaaggccaagaagagcgtggagacctacaagatctacatcttcaaggtccttaagcaagtccatcctgatatctgcatctcaagcaaggctatggggatcatgaacagtttcatcaacgatatcttcgagaagcttgctcaggaagcttctagactcgcgaggtacaacatgaagccaacgattacttccatggaaatccagaccgcagtttggcttgtacttcccggcgagctcgacaaa

SEQ ID NO: 24065 - DNA, 388 bp, Gossypium hirsutum
  unsure (1)..(388): unsure at all n locations; Clone ID: LIB3147-013-Q1-K1-D1
cccacgcgtccggtcgtcttcctttactggttctacgttttctcatgaattagcatctctttgttcatcgatcttcttatcttgatctaacccgactattaaaaacttcaaatctctaattgccattcaatttgttaattccaatttaaatactcttcccggatataaaaaaacttttcttctatggctgctgtgcaaaggccagcgagttcttctgattccgacgagaggaaaaggaagagaatgctgtcgaaccgtgaatccgcgaggcggtcgcgtattangaagcagaagcagctcgaggatttggttaatgaagtgagcgcattgcagaaagataacagccagctctccgaaaagatcaacgtcacaactcagcgctacgccg

SEQ ID NO: 24066 - DNA, 369 bp, Gossypium hirsutum
  Clone ID: LIB3147-013-Q1-K1-D11
gggcgaccccgcgtccggaagatccctgttaaatgaagatgaatatttattcctgaaggcaaagcgaccaatttactgggatggaggtttagagaaaacgaggcagaccctgaatgcaaaaatccgccaactcaattctgcgattgacaatgtatcctcgcgtttgagaggtggaaacaattcaccaagtgtgccggttgagacagaccctgaagtagaagctactatgtaagacatatttcaatgtgattagtcatgaagttccaagtttacagtgattgatggatttacctgttctgctatgaattctgaattccaagtgtttgagaattttatacgggattaatgcagttttgttatgttcttagt

SEQ ID NO: 24067 - DNA, 301 bp, Gossypium hirsutum
  Clone ID: LIB3147-013-Q1-K1-D12
gtaagctaatatgattgtatgcatgagggtttcttttagagagatgatccagttattcaggcaatggtaaggtaattttcctcttaagtagaaatacaaccaagacaatcaaagtaaaacaggatttgtggaacacctgacttgatcgctataatctttacgaaatcatcgaaacgtttaacacattaaatttcagggaaaagtatcatttttcttgttaggttagtttataaatttgtttacttcacactatcttttgcatggtttaacaagcttaatatatttataacatgtttccctt

SEQ ID NO: 24068 - DNA, 349 bp, Gossypium hirsutum
  Clone ID: LIB3147-013-Q1-K1-D2
cggacgcgtgggtggcgcccaaagccgagattaagcctgctgagaagaagccggccgaggagaaaaagactaccgtcgctgagaaatcccctgccgagaagaagccgaaggccggtaagaagcttcccaaagaaggcggtgcggccggagacaagaagaagaagaaggccaagaagagcgtggagacctacaagatctacatcttcaaggtccttaagcaagtccatcctgatatcggtatctcaagcaaggctatggggatcatgaacaggttcatcaacgatatcttcgagaagcttgctcaagaagcttctagactcgcgaggtacaacaagaagccaacgattac

SEQ ID NO: 24069 - DNA, 298 bp, Gossypium hirsutum
  Clone ID: LIB3147-013-Q1-K1-D3
cccacgcgtccgaaaaaaaaaaaaaaaaattatatattctaataaaaaaaaaaaaaaaaaaggggaaggagactaccgtcaattaaaaaattccctgccgaataaaagccgcatgccggtatagaagcttcccaaagaaggcggtgccagcggagacactcacaagaagtatgccaagacgagcgtggggacctacaagagctacagattcaaggtccttaagcatgaccatcctgatatcgggatctgaagcatggctatggggatcatgaacagggtcatcaacgatatcttcgaa

SEQ ID NO: 24070 - DNA, 365 bp, Gossypium hirsutum
  unsure (1)..(365): unsure at all n locations; Clone ID: LIB3147-013-Q1-K1-D4
ctggattcaactttgattgactcctactactttatgatgttataatgatattagagtctataaatgatttgttcaccgtctcagtgaatctggtttatagaactaaataaaagaagtctttgtttgtngttaaaaaaaaaaaaannaaaaaaaaaaaaaaaaaaaaaaaaaaaaaaaaaaaaaaaaaaagcaagaactacaaaaaaaaaaaaaataaaaaaaaacaacaaaaagggggggccgttttaaagaaccaaagtttacatccccgggcttgcaacgtaatattttttttatggggcccccaaaatcaaattcgggggccgcggtttaacaaggcgggaatggggaaaaccgtggggttc

SEQ ID NO: 24071 - DNA, 396 bp, Gossypium hirsutum
  Clone ID: LIB3147-013-Q1-K1-D5
actttttctctcaaaatttctccaatttgttctatacttttttgtttgttttaggggttaggcgatggcttcaaagcggatcttgaaggagctcaaggatctacagaaagatcctcctacctcttgcagtgcaggccctgttgctgaagacatgtttcattggcaagcgactcttatgggtccacctgacagtccatatgccggtggagtgtttctagtcaccattcatttccctccggactatccatttaagccacccaaggttgcattcaggacaaaggtctttcaccctaatattaacagcaatggcagcatttgcctcgatattttgaaggagcagtggagccctgccctcaccatattcaaagtattgctctcaatctgctcacttttgac

SEQ ID NO: 24072 - DNA, 443 bp, Gossypium hirsutum
  Clone ID: LIB3147-013-Q1-K1-D6
cccaaaacaaaaaacctaaaccccattgcttttgcggccctttttttcctctaccaggtgggtttagctttgtgtgagttcctttaagcaattagccaagatgcagaacgaagagggtcaaaacatggatctttacatccccaggaagtggtatttttatttgcttcgccatgtttatgttcttacgatattgtttatgtaggaagctttatatgtagttcgttgttgttgcagttccgccactaacaggctcatcacctctaaggatcacgcttccgtccaaatcaacgtgggacacttggatgagcttggcagatacactggcacattctccacttttgctctttgtggatttgtccgtgcccaggttcgttcattgtttcaagctcgtgttaagtctatgcttgttgatgttcattattaatgcttgtgatgttttatga

SEQ ID NO: 24073 - DNA, 445 bp, Gossypium hirsutum
  Clone ID: LIB3147-013-Q1-K1-D7
cccacgcgtccgcttgcggcgtcaagatgcatatcttcgtcaaaaccctaacggggaaaaccataacccttgaggtcgagtcttccgacaccatcgacaatgtcaaagccaagatccaagacaaggaaggcatccctccagatcaacaacgccttatcttcgccgggaagcagcttgaagacggccgcaccttagccgactacaatatccagaaggaatccactcttcacctcgtcctccgcctccgcggcggtgccaagaagaggaagaagaagacctacacgaagcccaagaagatcaagcacaagaagaagaaggtcaagctcgccgttctccagttttacaaggtggacgagtcgggtaaggttcagaggctgagaaaagagtgtcccaatgccgagtgtggtgctggaaccttcatggctaaaccatttgataggcacta

SEQ ID NO: 24074 - DNA, 448 bp, Gossypium hirsutum
  Clone ID: LIB3147-013-Q1-K1-D8
tgttgggggatgacgacactggggaactatcattgctgatcgctgctcagcaaaaggctgtcgcagccactgctgctgctgctgccccaaagaagggcccagcaaagtctcaagctaagacgcagcctgcaactcaggctaagcttccctccaagcctctccctcctgctcaggctgtgagggaggcaaagaatgaaggtgctcgtggtggaggtcgcggtgggcgaggatatggacgtggtggtagtggtagtggtggttacagacgtgattttgcaaatgacgagaacttattcagcaataatgctgtacctgaagatggagagagtggaaaaccctctgaaaggcgtggttatggtggtcctcgaccttaccgaggtggacgacgtggtggtttcagtaatggggaagatgcatacggcgagcgacctcacagatagtatgaacg

SEQ ID NO: 24075 - DNA, 420 bp, Gossypium hirsutum
  unsure (1)..(420): unsure at all n locations; Clone ID: LIB3147-013-Q1-K1-D9
gccgaccacgcgtacgcccacgcatccgattataatctgccacctattttggttacaacataattttcatgngctcgggtgagggtatgtcattcagactcttcattattctctcaagtacatataattgacgcttatgttcaacatgtcatcgatcatacccttgtaagagtcacgccctagcactctagaccaagttacatgcaaacaaattttactgagatgaagagtgtcaaaactgaagttgccgatcgctgaaggtggtgggctatggcatcatacacagtaatcatatgcgtcatatgattgtttcgatatagttagggcgttttccttctgctgagctatgccctacacgttatatgtcgaattgatgattgttcatccatttagctcactttgatttattttcacataaat

SEQ ID NO: 24076 - DNA, 487 bp, Gossypium hirsutum
  unsure (1)..(487): unsure at all n locations; Clone ID: LIB3147-013-Q1-K1-E1
ccgtccggggtcggtgcttaataaacgcctttcgantttacttttcggtgttcctatttactatactttatattctgacgtattgcgcgaaattcttatgtaaggccgaagaactgaccagacagtgctattttacagttgcacaatcgcgtcatggcttggtattccaaagtcgcgataatgctctagcatggagagcatttacctgctcgtttgaacantaggaatcacagccgtggatgcgccacgatgccgcaagngacattgacatgtctggagtgaggtgatcgattgcttttaacacgctttttcagtgacaactggtgctcggaaagcaacgtccctcgtgctcgtctttgtggatcttcgagcctactgttattgatgaagagaggactggtacttaccgtcagcttttccacgctgagcaactcatcagcggcaaggaagacgctgccaacaacttcgtgcgtggccactacactat

SEQ ID NO: 24077 - DNA, 456 bp, Gossypium hirsutum
  Clone ID: LIB3147-013-Q1-K1-E10
gccgtctcacagctcaaagccctccgtgactacatcacttctggcaacgctaagttcggtggggttgcctctcgccactccgattgcagctccgctaaacgcggcggggaccttggtccttttggtcgaggccagatgcaaaagccatttgaggatgcaacatatagccttaatattggtgagataagtgacatcgtggatactgatagcggagttcacatcattatgagaacaggttgattattggtgataatacctggatatgttggcaattagttcggtgtgttggataactgtattcaagaatgttctgaaattaatgtcgatactgcctatggtcaatttgagtgataatttacacttggcaatgacattttaaatgcttggtataagttgtttggtgagggcatttaatttccgaaccatttgggtgtgatttgagattatttgcttgtt

SEQ ID NO: 24078 - DNA, 443 bp, Gossypium hirsutum
  Clone ID: LIB3147-013-Q1-K1-E11
aaagaaaaaaaaaaatataaaaaaaaaattttttttattaaaaaaaaaaaaaaaaaaaaaagaaaagggttgattggcctttatggtttccccatttttacgtcccacgctttccaacgcaatcatcttttatattgggccctctaaagaaattccacaagcccaattttttacaacgtcgtttttcaaaaaaacccttgtgaaacccatttaagtccccttttaaaacacccctctttacacatctccttttacagcaaaaagaccatctaatagcccctccccaaacacccttcccaacaaaatcgaaaatgaaacgccccctgtaaccctccttaaaccgccgcgtttaatggtggatacactcatggttaccttcacatttaccagacctattaccccccgccctattgaattttactttttttttttttccctacttt

SEQ ID NO: 24079 - DNA, 452 bp, Gossypium hirsutum
  Clone ID: LIB3147-013-Q1-K1-E12
agcattttccaaaagaaatatttcaagtactagtcctcatcttgatcattctagacacaagactgttgatgatggggctttgtcaaagcatgcgctccctgattcagataaaagatgcagttcttctcgatatggtagcacttcaagaagagctgtagtagcaagcaggcctagttcatccgttgaagccaacgacgcatcgcaaaaccgactaacatcaagtggtggccgcatgtctaccacacaaagaattcaacttgcctttgaatctaagacatctagccgagccacccctgttagaggaagccgtgatgatcatcctcttagaaagtttgagttcctctcgattaggaaataatggcattgaatgtcaatcctgactcaatgtttccaagaacttatattctcactctgtatatgggatatctcaccagaatcactggccctacagc

SEQ ID NO: 24080 - DNA, 397 bp, Gossypium hirsutum
  Clone ID: LIB3147-013-Q1-K1-E2
cccacgcgtacgaccaaactacgctctcccttgcgacaatggcggctggtgtaaccctcctcgtgctcactttgacctcgccatgcccatgttccttaagattgctgagtaccgtgccggtattgttcccgtttcctaccgccgggtgccatgccggaaaaggggagggataaggttcacaatcaatggattccgatacttcaacttatggttgatttccaacgtggcgggttcacggaatatcgtgaaggctagtgggaaaggatcaaggacagggtggatgagcatgggtcgaaattgcggtcagaattggcagtcaaacgctgtgctagttggtcagtcactctcatttagggtcacaagcagtgacagacgcacttgcacctctaggaacatc

SEQ ID NO: 24081 - DNA, 386 bp, Gossypium hirsutum
  unsure (1)..(386): unsure at all n locations; Clone ID: LIB3147-013-Q1-K1-E3
ctttaagagatgttgatgaaggtaatggctttgtatataaggctgcggaggacttcattaatagggtttacaaggatttgaagctccaaaataacaacactactgcctgagttatgacagaaccatatctttgcctctgttaataatttccatgtttggagggagttgttcatgcttaatttctttttgggggttctaattttgntgttgataaaacaaataagaaaagccctggatttttcacttattctttcgttataaacttttctatgctaatcatgcgatcaaatatggttttggagttgaatggatttaagcagctcctaatatctttagtcggttctaccaaacangaaaacaagcaatggggaaaggaaaaaccanct

SEQ ID NO: 24082 - DNA, 384 bp, Gossypium hirsutum
  Clone ID: LIB3147-013-Q1-K1-E4
gttagccgttcttcttaaaccattaaagctttgaacatgcttaaggaagtgcataaatggggccggagagaggtgtaaaggttgctgccccggccaagaagaaacacgagaaggttgcgaatccactgttcgagaagcgtccaaagcagtttggtattggcggggcactacctccaaagaaggatctacatcgatttgtaaagtggcctaaggttgtccgcattcaaaggaaaaagaggatccttaagcagaggttgaaggtaccaccagcattgaaccagtttaccaagactcttgataagaaccttgctacgagtctattcaagctgcttctcaagtacagaccggaggacaaggcagccaagaaggaacgtctactgaaaa

SEQ ID NO: 24083 - DNA, 311 bp, Gossypium hirsutum
  Clone ID: LIB3147-013-Q1-K1-E5
gtcatattatatacagacgcgcaatttcatttgactaccaggcttttcttgcatgggccgggctaatcaggaatctctggcaagactttcttctttgctagagcaaaagacacctcttcatgaaagcttggtttatgatgaacgaaaccaactttagcgcgtcttatctgtaatagagaaccctggaacccatcagccattgtgttgttttcaatattggatctagcatgagggctaaacctattttattggaaattttagagtgccacactggctaaatatacctgtgcacaagcatatctgaatgacag

SEQ ID NO: 24084 - DNA, 434 bp, Gossypium hirsutum
  Clone ID: LIB3147-013-Q1-K1-E6
atccgaaagtatcagaagagcacggtacttttgatcaggaaactcccatttcagaggctggggagagaaatcgcccaggatttcaaaaccgatctgaggttccaaagcagcgctgtcgctgctctccaggaggccgccgaagcttacttggttgggctttttgaagacaccaatttgtgtgctattcacgctaaaagggttactataatgcccaaggacatccaacttgctcgtcgcattaggggtgagagagcttagagttatttaagatttattatactaaatggatttccatggatttgttgtaggattgaatatccaaaacgtggagatgtaaagcctttccctggtaaaagtagtaatattatggcaatttcagtactatatgttgatgctatttttggttcttttattaaaataaatattaaattcat

SEQ ID NO: 24085 - DNA, 460 bp, Gossypium hirsutum
  Clone ID: LIB3147-013-Q1-K1-E8
aaaagatctcaggagatgctttgaatgatttatacaagtcattcgtagccgagtatccgattgtgtcaattgaagatccatttgaccaagatgattgggagcactactccaaactaaccaatgaaatcggagaaaaagttcagattgtaggagatgatcttttggtcaccaacccaaagagggttgcgaaggctattgctgaaaaaacttgcaatgcccttcttctcaaggtcaatcaaattggatctgttactgaaagtattgaagctgtgaaaatgtccaagcaagctggatggggtgtgatggccagccaccgcagtggtgaaacggaagatacttttattgctgatctttcagtcggtttggccacgggccaaattaagaccggagctccatgcaggtctgagcgtttagccaagtacaatcagcttctgcgaattgaggaggagcttggtgcgga

SEQ ID NO: 24086 - DNA, 431 bp, Gossypium hirsutum
  unsure (1)..(431): unsure at all n locations; Clone ID: LIB3147-013-Q1-K1-E9
gaaaaangggccgaccgcacgcgtacgaaagaaaccatggttcacaaagctgctcttttgtatgaaaacgatgaacattcaccaaggtcaggttgtggccaagttgaaatgtgctttttggagacaagtggtctaatagatggtaaaaaaaaagtatgttgctatgaccttttctataactgaagtttggttactatggggaaaaccaaaagatggtgcttgttttttatagcagttgggaggaaaacaattaggtttggtatttttattcttcatcactattcgacaatttcgcatctttcacgttatttcaccactatttcttcgagcacttcattgcacttgtattcttgcgtcactttcgtctttgatgatttccatgcgtcggagtaactcgttttaacaaagcttctttatcagtttactccaaa

SEQ ID NO: 24087 - DNA, 211 bp, Gossypium hirsutum
  Clone ID: LIB3147-013-Q1-K1-F1
ctagctccgtgaagggtccgaacatatcggttagagggggcggaataaacttcccttctaatacattagctccttgtactacaccgaccgagactactggataacaaaaccgagagcctgcaatttaactgcaaactatgtatatcttgtagtgaaacttgttcttttttaacacttctgcaattaggtatcgaaattgtaagtacaaaaa

SEQ ID NO: 24088 - DNA, 361 bp, Gossypium hirsutum
  Clone ID: LIB3147-013-Q1-K1-F10
gtttgtatctagtaaatttgtattgccttttgtaatccattttaatttcctgggaagcgggtctcaggttggctcattcctaaattcttgtaagaatagattgagaagattataaaatcagagttatttcaaaaaaaaaaaaaaaaaaaaaaaaaaaaaaacaaaaaaaaaaaaaaaaaaaaaaaaaaaaaaaaaaaaaaaaaaaaaaaaaaaataaaaataaggggtagggcgctggtttaccaaaaaaaaaaatcaaactaatcctggggggggggccttttaaggggacccaattttatccccggggggggggggggttattttttttaataagggcgaaaaaataaaaaattggggg

SEQ ID NO: 24089 - DNA, 464 bp, Gossypium hirsutum
  Clone ID: LIB3147-013-Q1-K1-F11
cccacgcgtccgggtttgggaagtttggtctcaggtgctcgctttataactgatggaatggtgcaagctgctgctgaatgccttgcatcttatatgagtgatgaagaaattcagaagggcatcttgtatccatctatcgacagtattcggcatattacagccgaggtcggagcatctgttctgcgagctgctgttgcggaagaactggcggaagggcatggagacgtgggtcctaaagaattggctcatatgtcgaaagaggagacggtgggatacgtatttcgaaatatgtggtaccccatttacagtccacttgttcaggaaaagtaggcttccattttattatctctcacaattgggaaatggaggccatttctatgtggaccgaggagataaataaaattgaattattaatcattaagagttcaataccgtctattgaaccagacagaagattatgttga

SEQ ID NO: 24090 - DNA, 444 bp, Gossypium hirsutum
  Clone ID: LIB3147-013-Q1-K1-F12
cccacgcgtccgcccacgcgtccgccgaggtgcaagcagaagcatccaatgttgctccaggaggtgagacaagtattactaatcaaggggtgtttttatctaatttgcttcatcagatcatgccatacatatctcagcatgcgggttcacaacgaagtactcccgaagaagcaactacttctgccccggctgacctctctagtaccgggaattcacgcagaccaaatgacactgaacaaaatccaccgaactcgaaacgtcagaagacggagtaacttatcaagaggacgatttaccgaagcttcccgtggttatgaaaattcgtaattgctgatttgagaactttattggtatatgaacagcggcatgacttatatgttaaaatgtggtaatatcatggtcccttttattgcaaaaatgagatgacattctattatttatatt

SEQ ID NO: 24091 - DNA, 386 bp, Gossypium hirsutum
  Clone ID: LIB3147-013-Q1-K1-F2
ccacgcgttcgatcaaagctcaaaaaaattttattagcacgaatgaatttttgcggatagtccgattagaagatttctccaaacctgcatctgcaaagggaattcgtatgccaaatgaaatgcccatgaatccttcaaggtacttggaagctaaagagatgagtgagctactgatggaagattggtcacctccgaagtgtaagttgtcaaaaaaactcaactcagcttcacctaatgctgaaccactggatcatatgccgtgggatgatcctgaattggtttccgggtttgtgttgattggatcaccatgatgctgaaaccattggattcaatttcttacctggtagcatattaaaaaatggtttggtagcaacttatgttgtatt

SEQ ID NO: 24092 - DNA, 430 bp, Gossypium hirsutum
  Clone ID: LIB3147-013-Q1-K1-F3
cccacgcgtccgtacccttttatttttacttgctttttctatttctcctttgactggttcagattagccgttgatagtttagtgattaatatatagaactctttaaagctttggaaagatccttttttttcacttggtatcaagcatggaagatcgcaaggagaaaaatgcaccatggctatcagtaccacaatttggtgattgggatcaaaagggacaggtgccagattactctcttgacttctcaaagatcagggaaatgaggaagcaaaacaagagggaagtttcaagagccagtcttggtaatgaagaagagttcattaacccaactgcaaacactgttagcactactcctagtgatgatcatcaccacaattaccctcagaaccatcactctccatctacaaggagggagttctttagctacttt

SEQ ID NO: 24093 - DNA, 438 bp, Gossypium hirsutum
  Clone ID: LIB3147-013-Q1-K1-F4
atgcaggatagtttcttcgctagctttgcttttggttggctcatcacaaatggtgctggcgcttgcatcttacccaattgacactgttcgtagaagaatgatgatgacttctggtgaagctgtcaaatacaagagctcgcttgatgccttctctcagatcttgaaaaacgaaggtggcaagtctctattcaagggtgctggagctaacatccttcgtgccattgccggtgctggtgtgctcgctggatacgacaagttgcagctcattgttttcggaaagaagtacggatccggtggtgcttaaatatagggtggtactatctcccttcttttgttatgttgtaggctctaaagatggcgatgaacagctcgacacattgagaaatttatttcggcaaaaaaaaaatcattaataattcagatttacgggggggaagt

SEQ ID NO: 24094 - DNA, 430 bp, Gossypium hirsutum
  Clone ID: LIB3147-013-Q1-K1-F5
gatatatactatagagatcaacaggggtttttcaacaatgattatctcacactaggggtggatcatgttcctctgttatctgggcggactgccctccagtgttatgaagatttcatgcttagttttgttaacaaatttgaatcctttattggaactgtaattgaagaaataagcatcggtcttggtccttctggagaacttagtgcaggtatcctgctcatccttttggtgatggtagatggaaattccctggcatcggtgaattccagtgttatgataagtacatgatggaggacttaaagatggctgcatgccgagaaagaaaacctcaatggggggacaaagggccacagaatgctggctgttacaacagtcttccatctggggtgcccttctttgaaaagggaaaagaaagctttctatctgatta

SEQ ID NO: 24095 - DNA, 405 bp, Gossypium hirsutum
  Clone ID: LIB3147-013-Q1-K1-F6
gcacattgtcgattcttcgactcgggtatcgttggaaacctgagggtttttacctactatgacaaggttgattcacaggcatgggaagagactttcactctcttctctagggactcagtatggggcaatgaatgtgaactaccggagaggtgtgggaactttggactctgtgaggagaaccaatgcgttgcttgcccgtcaccaaacggattactcggttggagccggaattgtcagcagaagaaggtgaactgtaggccgaacgatttcagctactacaagctagaaggagtgaaccatttcatgagccagtacaatgaaggagaagggataaaggagagtgattgtgggaggaaatgcacctccgattgcaattggttggggtacttttaccacagggaaaca

SEQ ID NO: 24096 - DNA, 448 bp, Gossypium hirsutum
  Clone ID: LIB3147-013-Q1-K1-F7
cccacgcgtccggtcccttcatcgttaacttcgagaaaaggtccctcaaattggaggtcagggccgaagagcaagcctaaaagggagaaaacagaggaggagaaaacttttaagaggagggcgaaatattttctagctgcacagctactcgcggttctgcttttcctctctgtgatgggcggttatgattctggcgacctggagctcgacgacgaagatgaaggcatctctttcaattgaaacaaatctctcagttacgggtactcattactgacatttttcccattattagttacaatgttagtggtctgttgaggttgagctattagtatttgcattaacattgtggtaaaaaataagaacatacatttaaagatatgatttatacaatatttaggcagcattttttggtttgaaccttttgtacttcatgtgttggatttttttt

SEQ ID NO: 24097 - DNA, 104 bp, Gossypium hirsutum
  Clone ID: LIB3147-013-Q1-K1-F8
agcggactgattgaaccggtgtttattcctttttcaatcatatttgggttttttaaaaactaattttgatcattatttctttattatctaagtttttattgtgc

SEQ ID NO: 24098 - DNA, 467 bp, Gossypium hirsutum
  Clone ID: LIB3147-013-Q1-K1-F9
cccacgcgtccgcaattcttagtagcttcattggcataactttctgcacttaccccagggggatacccccagatcatcaatgaaaatcttgagccagcaaatcaagcagctttacttcagctttgcggcatttacaattgccaaatagtttgagttgcagggtttttctgttatctttattttggtgcattaccttgagcattcatttgtcagcaattgatgcttttcgacacaaaagttggaaggattcatatgtgatgatggattttgcggttctactggttggcagcaaagtgagccccccacatagtttatggattttgtttggcatgcatatatatccacaagttacaggtcctgttgtgttatggtgaaagagagtttgtagtgtaaaacattgccttcaattttctttatttttgaaattacttgaatgctgaaacccaaagttggcaccaggggatgat

SEQ ID NO: 24099 - DNA, 166 bp, Gossypium hirsutum
  Clone ID: LIB3147-013-Q1-K1-G1
cccacgcgtccgtttgcatgtcatttttgttagaaatgcttgtcttttacttttgaaagatgcttcataagaacatgaatagcctaataagctatcctatttttcatgtttagaactgtcatatctatgggtgttgaaagattgtctaaaacctttttatgctgtc

SEQ ID NO: 24100 - DNA, 445 bp, Gossypium hirsutum
  Clone ID: LIB3147-013-Q1-K1-G12
ggccgaccacgcgtccgcccgttactgctttccttcaattatttcttacttccttttgccttcaaaatttccttgggattcctatggctaccgctgaggttgcatcagatcaaactgcacttcatgaggagaaaactgaagaatcagtgaaggatcaagaagctacaacagatgaagtagttgccgaagctccagcagcggaaccagttgccgaagagccaaaggaagcggagcctgcggcggtggtagtcgaggaacctgaagcctcagttgaagttgaaaccaaggaggtggtagaagaaccaaaggctgttactgaggagccagtagtagaggaggctcctaatgaaacaatgccagaaccagttgccgaggagatcaaggaaaccactgaacaaaccgttgaaaccaaagaaactacagagtctagtgaggcagcagcaga

SEQ ID NO: 24101 - DNA, 392 bp, Gossypium hirsutum
  Clone ID: LIB3147-013-Q1-K1-G2
gcagaagcaaatcctaaggaatagaagaaaaatggcaagatacgacagagcgattaccgtgttctcgccggacggccatttattccaggtggaatacgccctcgaagccgttcgtaaaggtaacgccgccgttggcgtacggggcaccgacatcgtcgttctaggcgtcgagaaaaaatccgccgccaaactccaggactcacgatcggttaagaagattgtgaatttggatgatcatattgcattggcatgtgctggactcaaagccgatgctcgtgtcctcatcaacagggctcggatcgaatgtcaaagccataggctgactgttgaagatccggttaccgttgagtatattactcgttacattgcgggtcttcagcagaagtatactc

SEQ ID NO: 24102 - DNA, 416 bp, Gossypium hirsutum
  Clone ID: LIB3147-013-Q1-K1-G3
cccacgcgtccgcttaatgctaagagatcatcattttggggaagaagtaacgctagaaagacaccatcaatggaatctgttgattcttcgggtgaagaagagcttgctatacagaggcttgagatcacaaagaatgatctacaacatcgtatcgcaaaagaggctagaggaaatgcaattttgcaagctagcttggaaaggagaaaacaagctctacttgaacgtcgtttggcacttgaacaagatgtctctagattacaagagcagctacaagctgaaagggatcttagagcggctctagaagttggattaagcatgtcatctggacaattttctagttcccatggaatggattccaagacaagggccgagcttgaagaaattgctcttgccgaaactgatgtggctagattgaa

SEQ ID NO: 24103 - DNA, 203 bp, Gossypium hirsutum
  Clone ID: LIB3147-013-Q1-K1-G5
aatgctaaaagaacttttttttgtggaagaagaaacgctataaaggggccggttatggaatctgttgattcttccggttaaaaaaaacttgctatacaaaggcttgagatcacaaagaatgatcttcaacatcttattgcaaaagaggctttatgaaatgccaatttgcaagcttgcttggaaaggagaaaacaagctctact

SEQ ID NO: 24104 - DNA, 402 bp, Gossypium hirsutum
  Clone ID: LIB3147-013-Q1-K1-G9
gattttgttcatatcttttcattatgtagcatataatttttcctttggatgagtacaatatttcattacacgccaaactaatgtttggcaagttgaataaataatacgccacttcttactcaaaatgtatatttgcttgccttaagttcatgcatgaaaattttgttggcctcttttgtgatgttttactctttaatttattataaacattcacatgcaatttgtatgtttaaaggtctaattgtgcaggttgctggaagagaaaaaattaactgctctcatgttaaaaatcagctgattctaatcattatttgcgattatatttttaatacacacttatcttttctttttttatagtaatttgaatttttttataaatttttaattttttttaaatgaatt

SEQ ID NO: 24105 - DNA, 286 bp, Gossypium hirsutum
  Clone ID: LIB3147-013-Q1-K1-H1
cccacgcgtccgaccacacgtaagaccacatttacgtccacgcgtacgaacacgcgtacggccgccctttttttattattttatttttttttttaaaaataattttttttatataaattttttttatttttttttttgaaagaaaaaaaaaaatttaaaaaaggttttaaaaaaaaaaaaaatttaaaaaaaatttaaaaaagaaaaaaaagtttattttaaaataggtttgaaattgaaaaaaatatattttaataaaaaaaaattttaaaattaaaaagaaatt

SEQ ID NO: 24106 - DNA, 424 bp, Gossypium hirsutum
  Clone ID: LIB3147-013-Q1-K1-H10
aaaaaatcaaacctttttcatcgtagagcatagctaaaccagaagaaaggggaaatggacgcaattgactcagttttcgatccactgagagagtttgctaaggacagtgttcgtctcgtcaagagatgccacaagcccgatcgcaaagaatttaccaaggttgcgttacgaacagcgatcggattcgttgttatggggttcgtaggatttttcgtcaagctcatctttatccctattaacaacattattgttggatccggttaggccttgtcaacgtttgctgaaaaccggtagaatgtttaagttgagaggtacgtcatgagtttatgaagtaattccaatttagacttgggtttgtctttaaattcagttttgttgaaaaagggttcaattttggtgtttgtaatagaatcttgttgaagct

SEQ ID NO: 24107 - DNA, 256 bp, Gossypium hirsutum
  Clone ID: LIB3147-013-Q1-K1-H2
tgtttttattgttctaaaaacatacattgattaaacaataggtacaactctattcgtccaggcaaacacgatacaaaatatgacgcaacaccatcatcaacactgaacccttcattaatgacaatccaaaacgatagtatgtttattgggaaatccattcataccaacacccatgacactttgcttgtaaacctaagcgctattctgtggaggggtaatgccatagatacaagagaagcgatttaaatcatcaagg

SEQ ID NO: 24108 - DNA, 361 bp, Gossypium hirsutum
  Clone ID: LIB3147-013-Q1-K1-H3
atatccatccgcgcgttaccctagcatccatcttatgggactctacctccttaacctcatacacataaccacaccctataactctccccacccttttcccttcaccggttcctcctcaccggcgacaaatctacttccctctcaccgcaccggagccgaatcatataaatagcaattcaacaagcggcggatggaactttcagtttcgtgaatcgggctccattcaacgtcatatccctcgagttcagacttcagaccgactcagtcttcttataaggcaaaaggggaagggaagagattgaggaattagagtgatagaaaacgatgaagggcggtttacctattaaccgtcgatcgggtt

SEQ ID NO: 24109 - DNA, 384 bp, Gossypium hirsutum
  Clone ID: LIB3147-013-Q1-K1-H4
cccacgcgtccggtcagattacgttctacggcaattccttcatagcaggaccaactggggaaattgttgcagctgctaatgacaaagatgaagcagttctcatagcacagtttgatctagacaaaatcaaatccaaaagaagttgctggggtgtgtttcgtgatcgacgccccgatttatacaaggtgcttctgacatcagatggaagcaaaacttcatcgagattcagagctccccttttgcttatcatcactatgttgtcgaggagataatcagtgagttcccttccatgccatgtatttggttgactgcaaagaacgaaatgacatatatgtaggcaaatttccatgaatacaaaattaagaatatcaataagaagaaccg

SEQ ID NO: 24110 - DNA, 447 bp, Gossypium hirsutum
  Clone ID: LIB3147-013-Q1-K1-H6
cccacgcgtccgggagagatccctattccttacaagccggatatcgatatggagaggatgcgctttgagagattctcttgggaggaaactatagcagttcttcatttgaaattggagaatatgaatgactttgacttgggactcaatgcccttgactatgaggtctggctatctgaggtcagcattggatctgcagaacttgaaaaatctgcaaagataggcaaaaacggaatcagttatattgagattcctatctctttcaggcctaaggatttcggatctgctctgtgggacatgattaggggaaaaggaacaggttactctatgaaaggtcacatcaacgttgacactccgtttggagctatgaaattacccatcagcaaggagggtggcacaacccgccttaagaagatagggaagacggtggtgatgatgatgatgatgatg

SEQ ID NO: 24111 - DNA, 204 bp, Gossypium hirsutum
  unsure (1)..(204): unsure at all n locations; Clone ID: LIB3147-013-Q1-K1-H7
taacttttcccacccctatcccttcacccnattcttcttacccaaaaaaaatatactttccttttaccccaccctaacccaattatataaatagcaattcaacaagccgccgatggaactttcaacttcgtgaatcgggctccattcaacgtcatatccctcgagttcagacttcagaccgactcagtcttcttataaagcaaa

SEQ ID NO: 24112 - DNA, 366 bp, Gossypium hirsutum
  unsure (1)..(366): unsure at all n locations; Clone ID: LIB3147-013-Q1-K1-H8
ctgctattggctcttatcactgaacatcctttttaangcaaaaccttaaacaaaaggggcgtatcatttataagagcctattgcaacacactccttataccacaatgtaatttaatacaaatcaaatcctacataccttctttatctatatttatacatctacgcccccattcatacaatatgcttataacatcataacaaatctaaactttatctaaatacatacctacccttttgcttatcatcactatctatacaaattaataataaatatatatcacttacataccatatatttattattactgcacacaaccaaattacatatatttatacaaattttcatctatacctaattatatatat

SEQ ID NO: 24113 - DNA, 376 bp, Gossypium hirsutum
  Clone ID: LIB3147-015-Q1-K1-A1
ggagctccataaggcgaaaacaatggtgtccggatctggagtgtgcgctaagaaagtggtggtggatgcccgccaccacatgttggggcggttggcttcgatcgtggccaaggagctgctcaacggccagaaagtggtggttgtgagatgcgaggagatctgcatgtcgggaggactcgttcgacagaagatgaagtacttgagattcctccgcaaacggatgaacaccaagccttctcatggtcccatccatttccgagctcccgccaagatcttttggcgcactgttcgcggaatgatacctcataagactaagcgtggagcagctgcccttgctcgtttgaaagcttatgaaggaattccttccccatatgat

SEQ ID NO: 24114 - DNA, 194 bp, Gossypium hirsutum
  Clone ID: LIB3147-015-Q1-K1-A10
cccacgcgtccgcccacgcgtccgcttgtatgaagatgaccaaatgggtttgaaatgaagatgttagggatgtgtggaagattatatagtatttgccattaatgcggtcttgttttgctgcattgcttttttttaaagcaattttattttatatacttcaataccaacatgggatattcactaaaatttgatac

SEQ ID NO: 24115 - DNA, 427 bp, Gossypium hirsutum
  unsure (1)..(427): unsure at all n locations; Clone ID: LIB3147-015-Q1-K1-A11
gggaggagctccggctgactatcagccttcattcaggggccctggaacaaggcctgcctttggtcgaggaggtggtggttatggtggtgctggacctgcaggtggtgcaggtcttccttgagacagatgctttttcatgacagatagttttgtcagtctaggtggttgttgaagttgatagaagtttgtgttatgcttttcaatttagttatttgatgcttataaaatattgctactcttcggttcatccgaaaggaatttaggaccaatgttttctttgctatttgatcatacacattttgtggtgtttgttgcactgtagtactgaaattttcattcaagcttgtaacattatggaatcctgctctcatcaaacatataattctacatgttttatgnnntataannntttttttatttttttttt

SEQ ID NO: 24116 - DNA, 361 bp, Gossypium hirsutum
  unsure (1)..(361): unsure at all n locations; Clone ID: LIB3147-015-Q1-K1-A2
ccgtgacatgcgccagaccgttgctgtcggtgtcatcaagagtgttgagaagaaggacccaactggtgctaaggtcaccaaatctgctgccaagaagaaatgagagattattgcagagataattatatcagttttcattacagctttggacaattatcttaaatttggactttaaatttactttttgtgagacttgttgatttgctttttaaacaaattctagttttatgttttaatgtttttcanaaaaaaaaaaaaaaaaaaaaaaaaaaaaaaaaaaaaaaaaaaaaaaaaaaaaaaaaaaatggttaggggttgtcgaggtacaaaattcaagttcacgtgcacgcgcatgcaaagc

SEQ ID NO: 24117 - DNA, 430 bp, Gossypium hirsutum
  unsure (1)..(430): unsure at all n locations; Clone ID: LIB3147-015-Q1-K1-A3
cagaaagctaaactggtttttcatattgggagaagatctgctagatgttagatcttttggtggtctatttaaattttctaaatcttgaaataatactctaaatagaaggatcaattgtttttggactttgccccgccattggaagttgtaataaggaacagtgtgatatagctagtttacaagcatgtgaaaaacatatttaaaaaacttcttgtaggttataatattttggattgtcagcatcattccactctttgtactgacataaataaataaatttgcacaataaaactggatttctgtcgcgatggtgaaagtggaactataatattcgatgaaagagttcgttctcttctgagacaagggcttattcttcagcttgngcgcctgaccctgttacggggtattaccggccggagaactgtggggc

SEQ ID NO: 24118 - DNA, 428 bp, Gossypium hirsutum
  Clone ID: LIB3147-015-Q1-K1-A4
tgcgaaatttcatttccgttttcgattttttcctccaatttgtatttgaagtgatggatgccggatcaaaggtgaagaaaggagctggaggaaggaaaggcggcggtccaaagaagaagccggtttctcgttcggtgaaagccggattacagtttcccgttggtcgaattggacgatacttgaagaaagggcgatactctcaacgtgtgggaaccggtgctccggtttaccttgctgctgttcttgaataccttgctgctgaggttcttgagttagctggtaatgctgcaagagacaacaagaagaataggatcattccaaggcatgttctattagcagtgagaaacgatgaagagcttgggaagcttttagctggtgtgactattgctcatggtggtgttttacccaatattaacccagttctttta

SEQ ID NO: 24119 - DNA, 227 bp, Gossypium hirsutum
  Clone ID: LIB3147-015-Q1-K1-A5
gctttataccataagcatttggacaaagaatacaatggagaaagtgtcttatacatatgggcgggtcttttacttaacagatatgtttaacattattccttgaattattattctcaaaagtaccttgggaccatttacacaataatctttatattgttaccattaaaacaattattacatatttcttaatacctttctaatttgcttattttctaaaacaaatttac

SEQ ID NO: 24120 - DNA, 422 bp, Gossypium hirsutum
  Clone ID: LIB3147-015-Q1-K1-A7
ggcgcctgatttctctttatttgacacgtgctttgacttgtcagggcagacttccggggggtaccgacgctggtgttgcattttagaggagctgacttgtcactgccggcgaccaactatttgatcccggtagatagcagcgggaccttttgctttgctttcgcgggtacaatgaacgggttgtccatcattggaaatatccagcaacaaggtttccgggttgcatatgatttagcgggttctcgtgtcgggttttctccccgtggatgcgcctaaaaatggcggtgcttttaatttttatattaagggacaaagctctatccctatctctatattaatttccttggatatttttgggggagggtaagaaaggaagaaacataataatgttttcatagataaaaatgtatgggaaagatgat

SEQ ID NO: 24121 - DNA, 427 bp, Gossypium hirsutum
  Clone ID: LIB3147-015-Q1-K1-A8
ggaaaacaagaaaagcagagccgcatcactttttgctagctaagctactgtgggagttattgttcttcagaacagcttctgcagtagctaataataacgttatatattatataaattttatacatcctttttaccctacgactccatatataagcaagtaaaaataaatatggctcgctctgtttcttcctttaagttccttggtgcttctgtttttgatgctctttatgtctccatatcaaggagaggttactcaggtgcaccgccggcggcagtgacggctagctttggtaggcctggagcgatggggaaagtggaacgaagatatgcgatgaaagagtcgtcgtcgtcggagacaagggcttattcttcagcttgggcgcctgaccctgttacggggtattaccggccggagaactgtggggct

SEQ ID NO: 24122 - DNA, 430 bp, Gossypium hirsutum
  Clone ID: LIB3147-015-Q1-K1-A9
gacgaaaacacgaagcaaagtaacgaaatccctcccccaaagccagtagtcgaagcctgggccatcacagcaacatgtgcttgacgttaaaaatatcgacaccaaactatccttttctttacttcattcatgtagagatatcaagtcgatttcatatgggtgtgatcacttctttattcccctttatttaccctgtggtagggaaattgtatttgaataagaggactgagtgtttagtctttaaggctctctaattagtaaaacaaaatctgttccagctataaaaggaaggtgtagcagaaggaggagaagaaacaaagaacaccaacctggctgttttattttataccttaatgatttgctttattattcttgtttgtatactatcccgcatttagtaatcaagatgaataattccccccgccaaaaa

SEQ ID NO: 24123 - DNA, 423 bp, Gossypium hirsutum
  unsure (1)..(423): unsure at all n locations; Clone ID: LIB3147-015-Q1-K1-B1
tgcggctatagcactaagaaagtgcatgctattctcacctacaatgggacaaaccacttgatcaaaaaggaagttccttgtgagactgaccaactcactcatgtttatacgttcattctccgtccggatgctacctacagtatccttgttgacaatgttgagaaacaaactggtnncttgtacactgattgggatcttctcccacctaagaaaataaaggatcctgaggccaagaagcctgaagattgggatgacaaggaatacatccctgatcccgaagacaagaagcctgagggttatgatgacattccaaaagaaattccagatcctgatgctaagaagcctgaagattgggatgatgaagaagatggtgaatggacaccttcaactattcccaatcctgaatacaagggcccatggaag

SEQ ID NO: 24124 - DNA, 394 bp, Gossypium hirsutum
  Clone ID: LIB3147-015-Q1-K1-B10
ggacgttggaattgctaggtcatccgagtatcccgaagtgcagagaattacggataagcttttgggtacacttgaaggatttttgaaggaaatggccaatggccggaagagtccggagagaatcaaggaagagaaaccaccggttaaggaggagcctgaaacaaacatgaatgaaataaaggctcttcctgcacctgagaattataacccacctcctccaccacctgaacctgaacagcctaagactgtcccaccgcaggttacggaggaccttgtgaatctaagggacgatgcggtttcagctgatgagcaagggaacaaattggcgttggctttattctctggatcacccaccttaaatgctaatgggtcgtgggaagcattttctttaaat

SEQ ID NO: 24125 - DNA, 415 bp, Gossypium hirsutum
  Clone ID: LIB3147-015-Q1-K1-B11
gcactcaacttcgatgatgttgatgtcggtttggttagtgattctatggttgcaaatagcctttacctgcaaaatgggagctgtgcatcctcatccggtgcacctttaaaatccgagcaaccagaatcttagcccagcacgcttgtattccttgtatattctgcctcactcccgtattcttgttagatcgtacgtatgaatgtaagttcatcacacggggtacgtatgagcggtgagttactgtagaatagccgccacctccccaatgtgtttactgatgttagctaacagtactttgaagcttggcctaacaaattgaataaatttttgcctttaccggattgtagccaaatagtaccactgatcatttatattggaatcacagtgctccttcaagggggtaattttctttggg

SEQ ID NO: 24126 - DNA, 435 bp, Gossypium hirsutum
  Clone ID: LIB3147-015-Q1-K1-B12
gcagaggagaagagggccataatcgttttaaagacacggttgcagctgcagaagcagcagaagaatctgcaaaaaaagcaattactgccgcacaagctgctgcatatttggccaaccgagagagtaatctatttagtgaagcatctggttgtgtaggcaacgctgctcgaggatctgttccaacttctcctcctggaactaggagaatgtatgaatctcggagttttgggacgttcaaccctccaagtactgaggatgtaagacccggcaacaatggaggtggaaagacctgtaggagacacagctacaatcatgcccctgctgcacattcagatataaagtttgatgaatcagattgtgatgaagaaatagaaattgaagattatcctgttggcagcactgatctgccaccaccagtaccttctcttgagaaac

SEQ ID NO: 24127 - DNA, 433 bp, Gossypium hirsutum
  Clone ID: LIB3147-015-Q1-K1-B2
gcacatgtaccatgacatgtacatgaaagtcaagggtaatgtgtttaagaacaagagagtcctcatggagagcatccacaaatccaaggctgagaaggccagagaaaagacattggctgaccagtttgaagctaagagggctaagaataaggcaagcagggaaaggaaacatgctaggagggaggagcgattggcccagggacctggaggagtagagaagccagttgcagcaccacctgccgccactgctcaaccagctggtggttccaagaagtccaagaaataaggaggccatctggcgaagaagtgtgagccatgaatttagaaacatgtccaagtggtttttttgtcgagccagtctgctgttttggtcattatgaacttgttttaagttggattaaggtttcatgattttgttctcagtttccatgct

SEQ ID NO: 24128 - DNA, 436 bp, Gossypium hirsutum
  Clone ID: LIB3147-015-Q1-K1-B5
cggacgcgtgggcaagctgctgtcagggatgtccaggaagcctgcgtctatgacacgtacactctgcccaagctgtatgtgaagatgcaatactgtgtttcatgtgcgatccattcccacgttgtgagggtccgatcccgcactgacaggaggaaacgtgacccgcctcagcgcttcattagacgcagggatgatatgccaaagcccggtcagcctggtcaggctcctcgtcctggtgttgcggctcctgctcgtgcataaggcttttgaagtttaagatgaatttgtatttcgtgttttgctttgagatatggttgcttgaattttgagaacttggatcatgtagggagtttttttttattgttttaaagttcgatactttgttaaatcttggaaggtattgagtggttgggaatacttgttggaacttggaact

SEQ ID NO: 24129 - DNA, 439 bp, Gossypium hirsutum
  Clone ID: LIB3147-015-Q1-K1-B6
cccacgcgtccgcgagagatagaaagaaaaccaaagcgtcgtggttcttttcttgttaagtacactgtaaaagatggccgatactgaggagattcaaccccttgtctgtgataatggaactggaatggtgaaggctggttttgctggtgatgatgctcccagggcagtttttcccagtattgttggccgaccccgacacactggtgttatggttgggatgggtcagaaggatgcatatgtaggagatgaggcacaatctaaaagaggtatccttactttgaaatatcccattgagcatggtattgtcagcaactgggatgatatggaaaagatctggcatcatacattctacaatgaactccgtgttgctcccgaggagcacccagtgcttctcacagaggcacctctcaaccccaaggccaacagagaaaagatgact

SEQ ID NO: 24130 - DNA, 426 bp, Gossypium hirsutum
  Clone ID: LIB3147-015-Q1-K1-B7
ggatttagaaatcccccctccctctcaggcctgaaaaaaatacaagaaatatgttgttcttttctttaagaattacttatttttgtttgttgttaactggttgtgcatttctgtactctctacagcaattctattggtaatttgcattacattattgctgctgctgctactactaatatcaccattgctatttctctctcactcttcaaaattggaaagctgtcatggctcatgatatttctttgttttaacagattacgaccttcaacatttctattgttgtgcatggaactgttgcagagagtaattctttgttgcctgtaagttttcagaccctctttggatttaattcatcgttatgaccccttgtgtctatggatttggaagaattgctgattttgctttgtacagggtgaaactgatcca

SEQ ID NO: 24131 - DNA, 428 bp, Gossypium hirsutum
  Clone ID: LIB3147-015-Q1-K1-B8
ccgaaacccataatagatatcgatatagctagagaacatctgagagaagctatatttaagatgtgggaaatggaagcagctgcaaaggctgcaacttcagatgggatgaatgaagaggttttcgacaattctgttggtattgaaacctccgcgatcccaaaagttatcctaaaggagaactcttcttgtccaacatattcatctaatgatcaaagggttccatcatttcaaaatggcaataatggttcattgcataggaagagagcaaaatgtgtggaagaagaaaggttgcctgctgataaaccgaataatcacaacaaagaagcagggacttcgagaggagaagaagacttatgctcgacagctgagtcttcagcatcgaagaggcaaactattagcagaatgtcattctctgttccccagtcttg

SEQ ID NO: 24132 - DNA, 358 bp, Gossypium hirsutum
  Clone ID: LIB3147-015-Q1-K1-B9
gccgtacggtgctgaaggctgggggctgcggcgctccttgctgctagggcttactagcggagtcaaacctaggtttagattttgggccattgggccctattgtaaatgggtatttgggtttgttattgggcttgtattggttgtaatcggacttggactgctggtttggttttattattatttggtttatgtttgtatgggcccgggctaaattggcccattacataaagaatatttaaaaaaattgaaaaacttctacttaaaaaaaaaaaaaaaaaaaaaaaaaaaaaaaaatataaaaaaaaaaataaaaaaaaaaaaaaaaaaaaaaaaaaaataaaaaaaaaaaaaataattg

SEQ ID NO: 24133 - DNA, 140 bp, Gossypium hirsutum
  Clone ID: LIB3147-015-Q1-K1-C1
atattttcatgtcaaaacaaagtttagcatatacttatgttactcacgtgttaagcttcatcagcattgtaagctatccagatgtcaaattttgcatcaaactgtacactctctgcaatgaaaagctcttttgggggccc

SEQ ID NO: 24134 - DNA, 429 bp, Gossypium hirsutum
  Clone ID: LIB3147-015-Q1-K1-C10
ggacgttggaattgctaggtcatccgagtatcccgaagtgcagagaattacggataagggtttgggtacacttgaaggatttttgaaggaaatggccaatggccggaagagtccggagagaatcaaggaagagaaaccaccggttaaggaggagcctgaaacaaacatgaatgaaataaaggctcttcctgcacctgagaattataacccacctcctccaccacctgaacctgaacagcctaagactgtcccaccgcaggttacggaggaccttgtgaatctaagggacgatgcggtttcagctgatgagcaagggaacaaattggcgttggctttattctctggatcacccacctcaaatgctaatggttcgtgggaagcatttccttcaaatggagagccagaggtgacttctgcatggcaaacacc

SEQ ID NO: 24135 - DNA, 430 bp, Gossypium hirsutum
  Clone ID: LIB3147-015-Q1-K1-C11
aaaagactgttgatggtccttccatgaaggactggagaggtggtagagctgcttccttcaatatcattcctagcagcactggagctgccaaggccgtcggcaaagttttgccagcactgaatggcaagctgactggaatggctttccgtgttcccactgttgatgtctctgtggttgacctcactgtgagacttgagaagaaggctacatatgatgaaattaaggctgctatcaaggcggaatctgaaggcaacttgaagggaattcttggttatgtggacgaagatttagtctcaactgacttcatcggagacaacaggtcaagcatttttgatgccaaggctggaattgctttgaatgacaactttgttaagcttgtgacttggtatgacaacgaatggggttacagttcccgtgttatcgacttgat

SEQ ID NO: 24136 - DNA, 397 bp, Gossypium hirsutum
  Clone ID: LIB3147-015-Q1-K1-C12
gtaactaattataatattttttggttgattaatgaaagagcatataactgacgtgggggagtatttaaaaaaaaaaaaaagaaaataaaaaaaaaaaataaaaaaaaaaaaaaaaaaataaaaaaaaaaaaaaaaaaaaaaatatataaaaaaaaaaaaaaaaaaaaaaaaaaaaaaatgggccgcccttttaaaataatcaaatatatttacctatgacaaaaaaaattattattttttatttgggcccttaaaataaatttaatggcctttttttttaaaatgtcgtatatgaaaaaaccatggtatacataaataaataaacttttaagaaatttcctttttttctctagtattaaatatcaaaaaaggcttataaaatttccctttttaaaaa

SEQ ID NO: 24137 - DNA, 435 bp, Gossypium hirsutum
  unsure (1)..(435): unsure at all n locations; Clone ID: LIB3147-015-Q1-K1-C2
gaaaaaaacaaaaaaaaaatcctttggagaggattcctggtcctctgagctccggcatttagccgatcagctctggtcatcggacctccacgctgagatccacgcgccgncaccgacttcgccacacattacgggcggaacttgaaaagtttcacttttcaaggtacttgcgaaaaattcggcaatggcaaaggcttgatgatggtccaccggtggcgttgatctcggcgtgacttggggcctggaatcatggccttgacggggtagctggaacagcaggagctgaagggtcatgaggcttggcttctggaaccttctgtttgcggcgtgaggagaaagagggcagaaaccctagggtttcctgcctgggtctgcagatgtttgggccaattggacctctggaaattttgggtttgtaatgggtagaggtgtttt

SEQ ID NO: 24138 - DNA, 431 bp, Gossypium hirsutum
  Clone ID: LIB3147-015-Q1-K1-C3
agagatggtcctcaattatacatggttgaaccatctggcatctcttatagatactttggtgctgcaattgggaagggaaaacaagctgccaaaacagaaattgaaaagttgaatctgtctgaaatgacatgcagagaaggggttattgaagtagccaaaatcatctacaaggtacatgatgaagcaaaggataaggcctttgaacttgagatgagttgggtctgcgatgaatcaaagcaacaacatcaaaaggttcctgatgacctgttagaggaagcgaaggttgctgctaggactgcactagaagagatggatgctgattaaattgttagtgaagccagaatagtctttgttattgatattttcatcttcatgaatccccattgttatggtttaaactttcctcgtatcattttcatataagatccctg

SEQ ID NO: 24139 - DNA, 434 bp, Gossypium hirsutum
  Clone ID: LIB3147-015-Q1-K1-C4
cccacgcgtccgcaaaactaaaagtccagaattagggtttcgataaccctaaccccagcatagcccctacaactccgacatcatttgggtccctttgtccttcaattagatcacagcttttcgttcaaaaatatattctcttgttattgttcttaatttcaagcaacaatggcggagcacttggcctcaatctttggtacggagaaggaccgcgtgaattgccccttctatttcaagattggagcatgccggcacggggacaggtgttcacggctccacaaccggccgacgatctctccgactctcctcctttccaacatgtaccagcgcccggacatgatcactcccggagtggatgcccagggccagcccatcgatccccgcaagatccaggagcacttcgaggacttctacgaggacatcttcgaggagct

SEQ ID NO: 24140 - DNA, 424 bp, Gossypium hirsutum
  Clone ID: LIB3147-015-Q1-K1-C5
gacacagagagagagacagagagagagatgtcgggaggaatagcgcgtggtcgactcgccgaggaacgtaaggcatggaggaagaaccatccccatggttttgttgcgaaaccagagacgttgcctgatggaacggtcaatttgatggtgtggcattgcacgatccctggtaaagcaggaactgattgggagggtggctacttcccgctcacgctccatttcagtgaagattatcccagcaagcctccaaagtgtaaatttccccagggctttttccacccaaatgtttatccatctggtactgtttgcctttcaatcctaaatgaggatagtggttggagaccagccataactgtgaagcagattcttattggaatccaagatcttctggatgctccaaaccctgctgatcctgctcaaactg

SEQ ID NO: 24141 - DNA, 396 bp, Gossypium hirsutum
  Clone ID: LIB3147-015-Q1-K1-C6
cccacgcgtccgcgtgctttcatcttcttcaaattaggagcttgttgaaggaaacgaaaagcttttgcttgaacttgatgctggtgattaggcttttttgaggggtaagttcttaaagaattgcagcatttaatttatgctataacttgtgtttggtaaataaaaatatctactatttgcatcaaaaaaaaaaaaaaaaaaaaaaaaaaaaaaaaaaaaaaaaaaaaaaaaaaaaaaaaaaaaaaaaaaaaaaaaaaaaaaaaaaaaaaaaaaaaaaaaaaaaaaaaaaaaaaaaaaataaaaaaaaaaaatatataatagggggggcccttttaaaaaattcaaatttttttccccggttttggcaaataaatatttttttttaggcccccaaaa

SEQ ID NO: 24142 - DNA, 431 bp, Gossypium hirsutum
  Clone ID: LIB3147-015-Q1-K1-C7
gtcaatgcttttctttaatctatccttcagactttagaaggcggctttcttgcctctccccaccaaattcggtaatcctaaatacctttctgggttatttgagctatgaacaccaagcaccctaacaattacccttttctcttcctcctgcgtattggtactgaaaaagattgtgggtttagagttagtttttcattgtttttgggaagtgtttttcaaaagtgttgttgagaagtgttttttagaagtgtttttgaaaaatttgagtgtttggcattgttgttaaaaaatatttttgaagaataaaatgtttattttagatatgagattataaagtaacaaatatgtatttaaataatgtttaaattagttaatattatgatattttatcaataatataaaaattaatttattataacttatagttaata

SEQ ID NO: 24143 - DNA, 164 bp, Gossypium hirsutum
  Clone ID: LIB3147-015-Q1-K1-C8
cccacgcgtccgtatcccttaaaatcagtcctttacataccacttcagatcaaagtgttatgcctatttcacacaccattcatttacaaatattaagggacaaatgccaagtggattgtagagaggcaaaatatgttcttataaatataattgtgtttcttgcc

SEQ ID NO: 24144 - DNA, 429 bp, Gossypium hirsutum
  Clone ID: LIB3147-015-Q1-K1-C9
cccacgcgtccgcccacgcgtccgcccacgcgtccgagggttcacatttccatccagacggtgatttatttgtcccaaatgaaaggaaagatataatcacctcaactgcttgttggacagcaatggttggcttgcttgcatatttgtcgtttacaatgggaccaatgccattgcttaaactctacggcatcccttatgcaatatttgtgatgtggttggatttggtgacatacctacatcaccatggtcatgacgagaagcttccatggtatcgaggaaaggagtggagttacctgagaggagggcttacgacgcttgatcgggattatggatggattaacaacatccaccacgatattggaactcatgttatacatcatctcttccctcaaatcccacattatcacttgattgaagctaccgaagcag

SEQ ID NO: 24145 - DNA, 434 bp, Gossypium hirsutum
  Clone ID: LIB3147-015-Q1-K1-D1
agctcttgcaaggtatggttagttggagatgacttgaccgaagaagagcaaagaaaggcaaataaaggaacactatttattcccttttcgcaacttccaccaaaaaaattgcgcaaggactgcttctatcacacaacaccagcgatgcagactccgacggcccttgagaatgtggattcttgcgagaactggttgccaaggagagtgatgagcgtatggcgcatagctgggatactgcatgctctggaaggatgggaagagcacgaatgtggttacaccatgtctaacattgacaaagtttgggaagcatgtctcaagcatggatttcagcctctgaaggtcccaactcaatcaaagtcctagaagatatttggcgatttatctaattaatctacttgatatctatgtttaatgtataagcatttacctaaata

SEQ ID NO: 24146 - DNA, 342 bp, Gossypium hirsutum
  Clone ID: LIB3147-015-Q1-K1-D10
acgcgatcaagaagaaagatgaaatcgagagggttgccaaggccaaccgttgaggcattagacgagattattacaccgtgggcggggagaatttcaattgttttaatcagtactttatgggctatcttttatttttggtgtcctggacatgcaatgagtgttgtgtttgctatctaagttgacaagttagcttatgtttaaattggagtttttcagtagatattattaaaatgatagaatttttgctgattgatttgatgaaatgcatttttcattgaattaaaacattcacttttaacttgcttgtgatttataatgcagtaacaattcatgtttccttct

SEQ ID NO: 24147 - DNA, 415 bp, Gossypium hirsutum
  Clone ID: LIB3147-015-Q1-K1-D11
gaaattcttcgtcggtggcaactggaaatgcaatgggacaactgaggaggttaaaaagatcgttacaacattgaatgaagctgaagttccttctgaggatgttgtggaggttgttgtgagccctccatttgtttttcttacctttgtgaaaagtctgttgcggtctgatttccatgttgctgctcagaactgttgggttcgcaaaggtggtgcttttaccggagaaattagtgctgagatgcttgttaatctgagcattccatgggttatcatcggtcactctgaaagaagggctctcttgaatgagtccaatgagtttgttggagacaaagtagcgtatgcactttctcaaggcttgaaggttattgcctgcattggggagactcttgaagagcgagaatctggctctaccatg

SEQ ID NO: 24148 - DNA, 432 bp, Gossypium hirsutum
  Clone ID: LIB3147-015-Q1-K1-D12
cagagccgcagctgccgccatcgccatggtgaagtttcttaaaccgaacaaggcagggagcgttctccagggtcgatacgccggccgcaaagccgtcattgtcagatctttcgacgatggcacacgtgaccgcgcctatggccattgtttggttgcagggataaagaagtatccgagcaaggttatccgcaaggactccgcgaagaaaaccgccaagaagtcacgcgtcaagtgcttcatcaagctcgtcaattaccagcacctgatgcccacgcgctacaccctcgacgtggacttgaaagacgtggttaccgtcgatgctctccagaccaaggacaagaaagtggccgcttgtaaagcaactaacgagaggtttgaagagaggttcaagactgggaaaaacaggtggttctttactaagctcaggtttta

SEQ ID NO: 24149 - DNA, 430 bp, Gossypium hirsutum
  Clone ID: LIB3147-015-Q1-K1-D2
cccacgcgtccgatccaatcttaatgatttcctcctttattgccccagtgctggatcagatgcactaagtccatgggagacaattggatcacaaggggcaaggaatttcatgctgtgcaagaagccaaggactgagaaagtgaaagacgacgggaaggcagctgaatcaattaataggaaggcaagtgggaattggaaggcatggtttaataaatccctcaatctcaagatttcctcccattaattaaacaattcccaaccctttatgatcctttatttcttgggttagctttacttataaataaagccttggaagttagtctattatcattgatggccatggtagagtattgcttatgtttttcaccttatttctcatttaggtgagaaaagacctgcaggaataaatttgaacttgtttttcagtatt

SEQ ID NO: 24150 - DNA, 280 bp, Gossypium hirsutum
  Clone ID: LIB3147-015-Q1-K1-D3
tgtttgtgggttctggatttgatgttccaatgtatttttggacaatcttatgtgttttgtcttggaattttgataaggaggtggaaattttaagtaatgctagttttagaaatattatttaaaaaaaaaaactgagcgactaaaaaagaagaaaaagaaagagttaataaatataaaaataatagagaagaacttcggctccaaaataaaaatgatctggctggcatgcatcaaagctaacatcgatccgtctttgaggtagataaaaaaatatacataa

SEQ ID NO: 24151 - DNA, 421 bp, Gossypium hirsutum
  Clone ID: LIB3147-015-Q1-K1-D4
gccaggctcgcagactttcagaggaaggtttttgatgtcttatacaaggttgctgacattcctttcttaagcaaatacaagcatcaaattctcgatcttattgagcatgctgagacacagccgaacctcaccattggtgtcttggtctctattgtggtgattattctcacgattttcttcaagctcatttttggtgggaagaaacaaccaatagtagagaagaaaccagaggttgctgaaacatcaaatggtgaaggaagcagtggagaaaaggctgaagaggcggagaaggaagaagctgctgccgctcctcgccgaaggcgccgtgacaattgagcaaatcttaaaacaaaggtggctggtggcgactagcagtttgagttttggctaatttttgcactgtaggtggttttcgtagctg

SEQ ID NO: 24152 - DNA, 372 bp, Gossypium hirsutum
  Clone ID: LIB3147-015-Q1-K1-D5
gttattttatatatatgtgagagacaagatttagaagttagctaaatgacttctcatacagagtgcaaggagtcttgttttttttatatgtacttcagagcagctgatttcctttgttttttatttttatttttattttttattatcctttttggagttataatgttgctagcttttgtagcattttgtatttccaatataaatatagtttgtacaacaatgttttgtttcacttctactgttcaagtttcaattgagttgtgacaagaattacatggctatgctaccatgaaagagagaaataaaaaacagttatcatttaagcaaacaatataattttactaaaaataaaacgtatttttaaataatatt

SEQ ID NO: 24153 - DNA, 401 bp, Gossypium hirsutum
  Clone ID: LIB3147-015-Q1-K1-D6
cttcccggacccctgggaatttgaacagcctgctaaaacaatatgggctggcaaagggcaccaatgaagccatgtttatcatcgaaacatatcggacccttcgcgaccggggtccgtacccggctgaccaagtccttaaagatcttgaaggccgctatggatttgtggggtatgataacaaaactggaagtgtatttgctgcactgggtgcaaatgaaaaggttaaactctattggggtgtagcaactgatggatcaataattggttcaaataacttgaagcttataaaaaaaagctgggctaaatcatttgcaccattttcaccttggtgtatgttccacaatgagcaaggaatgacgaagtttgagcatccgaagagcaaaatgaaaggcatgcccaaa

SEQ ID NO: 24154 - DNA, 433 bp, Gossypium hirsutum
  Clone ID: LIB3147-015-Q1-K1-D7
ctccatcagacaccttggtccttccatgatccaacagatgcagcacccttgcaatgattgtaagggtactggtgagaccatcaacgataaggaccgttgcccccaatgcaaaggcgagaaggttgttcaggagaagaaagtcttggaggttaatgttgaaaagggtatgcagaacggacagaagattactttccctggagaagcagatgaagcacccgacacagttactggggatattgtatttgtcctccaacagaaagatcatccaaaatttaaacggaagggtgatgacttatttgtagaacatacgttgacacttactgaggcactttgtggcttccagtttatactgacccacctagatggcaggcaacttctcattaagacccatcctggtgaagtggttaagcctgatcaattcaaggccataaat

SEQ ID NO: 24155 - DNA, 367 bp, Gossypium hirsutum
  Clone ID: LIB3147-015-Q1-K1-D9
cccacgcgtccgagtataactgttcaacaattgcttaaaacctttctttttcattttgctacaataatatgataaataataataatggaaaagtgaaaccggtgattgaaagtgcacaaccgtcagatctgaacaacttaaattgttgtttttgtttgtgtttattattctcaagtttttgggatgaacttcggctccttattgttatgatttggttggttgtatgaaagcaaacatcgatccgtctttgaggtagataaaccgcatccataataattagctttttatgatggaaaaattatgtggatattttttattagcttggacaaatttatcaataaaaagatttatatttttccttgccttt

SEQ ID NO: 24156 - DNA, 436 bp, Gossypium hirsutum
  Clone ID: LIB3147-015-Q1-K1-E10
cggacgcgtgggttcggaggcattgcagatagtaaacatatgctacgagcgagccgaagagatcttacagcagaaccgaaagctgatggatgcagtggttgatgaactggttgagaaaaagagtttaacaaaacaagaattctttggacttgtggaattgcatgggtcacttcagccaatgccacccagtatagttgacattagggttgccaagcgaactcagttccaagaaatgatgatgaaccccaatgtgaaggttacagggagtagttcttcataaaccaccacctatctacttcctattcacatgtataactttgcatcaatcacttccaggtcataccatcaggcattgcttggtataagattttgatttctttttcttgtacttagaaatttcacttattttatctttttaaattaaattacaactttt

SEQ ID NO: 24157 - DNA, 435 bp, Gossypium hirsutum
  Clone ID: LIB3147-015-Q1-K1-E11
gaaagattccatcaggattggatctcccaagtgatgttgtcgatgagaaggctgactaagggacctgatacaaattgtcctctgaacattatgtttcatgcttgtgatttagcgctgcctaaactcataattaggtatggcttatggtactatatattcatatggtgattttggcatgtggatgaggaaattcaacatggtaattgatatacaaatagattgtaagaactttgtaaagaaccggttgttggaattcctttggtttgcaaagactgaagaagttacaggtgcctcaaatctcaactatctatatgttttactgtaaaaaaaaaaaaaaaaaaaaaaaaaaaaaaaaaaaaaaaaaaaaaaaaaaaatagggaaataatattaaataattaaaaaaatttaattttttattttttatttattaatta

SEQ ID NO: 24158 - DNA, 436 bp, Gossypium hirsutum
  Clone ID: LIB3147-015-Q1-K1-E12
atagtataaatatataaatatgtgcatgtaagagtttggagatggattaaatataatggggggtggggtggctggctttgcagattcccaagggagtgggggtgttggtttgttacataaatatattggtgagagaaagttagggaaaagaaaagcatgtttaatatttagaggaagtcataaggtgtgaaaggctagaagaattgattgttgaacgaacatatgaaagggtggggaggagatggcgggtcccttaaccacagccgaaagcaaagcagaggaaattttctgagatgggtttggcggatttacaggttcaacgttgaagcttgagctgttttttgtggtcattgagatcatgagattgattaaagtcaagcttcccatctgatgatataaattaaatattaaaaccaaaggaacaatttatttgggg

SEQ ID NO: 24159 - DNA, 432 bp, Gossypium hirsutum
  unsure (1)..(432): unsure at all n locations; Clone ID: LIB3147-015-Q1-K1-E2
cccacgcgtccgaagagttgaaaggctttttaaaataacaagaatcggctaaaaagaaaaaagaacaattgcatacctttataaagaaatcgacttcctttgactccttcgggatttggcttgttgctattcggttagcaataaaaagaatgataggttcggcttttactataaatgaaagagaggaagaatgagaggtagagagtttgtggaagaaataatggaagagaaaagagagggattagcttaagaacaatcggcaagaggagaaagaaaagagaagaggggaagagatgagagaaggaaagaaaataataaaaaaaatgagagaattgtttagcttttgggaaaaaaatagaaaagaatatgagcaaaaggagattcgattnatcaaaaaaaatccaaaatttataaatttctattaaataataa

SEQ ID NO: 24160 - DNA, 279 bp, Gossypium hirsutum
  Clone ID: LIB3147-015-Q1-K1-E3
atggaagttaaaattcgagaaatatttttctttttctcttttcttattcgcaaatttgtttcatttttcccccatccaagtattgtcatctaagattgcctttatggagggagctattgctttgggtctttcacaattcgtagtatatatttttcgaatttgttacgtaatttgctaacatatggaattggattgcattttcctgtcaggccatatagacaaaatgaatatgaaagattcatacctgctgcttacccttattatggagctgcattttct

SEQ ID NO: 24161 - DNA, 439 bp, Gossypium hirsutum
  Clone ID: LIB3147-015-Q1-K1-E4
tgctgcaccgacgactccaccagagagctcggcctctcctccggctcctgttacggcaccaactactgctgaggttccggccccagctccaagcaagagcaagagcaaaagcaagaaatccaagaaacaccatgctccggctccttcacctgatatgcttggacctcccgctccaccaactggagctcctggaccgagcctcgatgcttcctctcccggtccatctgtcgctgccgacgagagtggagcagaggcaatgaagaacatgaagaagataattggagggttggcgttgggatgggcagccattgctttgagcttctagattggttttgatcacattccacattttgcgttgtaattctttggctggtgtactgagaggcggaaactctagttttttttttttcctctgtaatttccactattcttggttttt

SEQ ID NO: 24162 - DNA, 432 bp, Gossypium hirsutum
  unsure (1)..(432): unsure at all n locations; Clone ID: LIB3147-015-Q1-K1-E5
gtccgacggtatacatgggatattcctccatgatcctgttagtttcatggctctagctcgggccgatctcttcacatacaagaagggagtggtgagggtcgaaacgcagggcatatacaaggggcataccttgttggatcaaggattaaaaagatggaatggaagcaatccatggacaggctattccccagtatccgttgcatggacagtcaatgtggatgaagtccttaattatattaaacaacagttgatgaaaccatgaaacaaaaagctggaaatactcacttgacaattaaaaagatgtcctcaagattagatcacctttgaaattgatttctgcttaaaggtccctttgtagtttattcccttcttgctttacccatttctggggttaaaaagctaataattgttctcgtatcntgtctttaatgg

SEQ ID NO: 24163 - DNA, 436 bp, Gossypium hirsutum
  Clone ID: LIB3147-015-Q1-K1-E6
cccacgcgtccgcgacatcacggtggtgcttgaccagcccctggttggccaaggcatgtccgataaccccatgaacgccgtcttcatcccatctcctcttccagttgaggtttcgcttatccaagttgttggtatcactcattttggaagctatattgaagccgccagtggtgaaaacttcgcaggtggtgcttcttcctctccagctgttgaatacatgaacaatcttgacgagacaacttttcgaggtgggtttatcctagaaaaagttatgggtccgatttcgacaggccatttggagcttcggacccgaaatccaaacgataacccatcagttaccttcaattatttcaaggatccacaagacctgcaaagatgtgtccaaggaattcaaaccattgagaaaatcatcgaatcaaaggctttctttagattc

SEQ ID NO: 24164 - DNA, 421 bp, Gossypium hirsutum
  Clone ID: LIB3147-015-Q1-K1-E7
ggcgtcttccaagaacccaaaccataagagcttagttggcatagattccaaaccttcaactctgtcagtaggtctggtgaactcgaatggggatttcaaagagccaaaggcaggaactaatcaggagatgattcataattccgttgcctattttgcagatatttgcagaaaagaaaatcagatgatgaagcaagctcttctagctaacctggcatacgtagagttagaactggagaatccattgaaggctctttcagcggcacgatctctcttagaactacctggttgttcaagaatctacatctttctaggtcatgtctatgcagcagaggccctctgcttgcttaacaagcctaaggaagccgtggagcatttgtccatttatttgtccggccccaataaggttgaatctccattcagt

SEQ ID NO: 24165 - DNA, 432 bp, Gossypium hirsutum
  Clone ID: LIB3147-015-Q1-K1-E8
gaaaaaaatgagctattcacataataccatgggctcaggtagtagaactgctagaaggacatttgattttggaaggacacatgttgttcgacctaaagggaaacaccaggcaactatagtatggcttcatggccttggtgacaatggctcgagctggtcccagctcttggaaagtcttcctcttccaaatataaaatggatttgcccaactgctcctactcgtcctgtggctttacttgggggatttccttacacagcatggtttgatgttagtgagctgtcagaaaatggtccagatgattgggagggtttagatgcctcagcagctcatattgcaaacttgttgtcaacagagccatgtgatgttaaggtcggaattggaggcttcagtatgggtgctgcaatggcactttactctgcaactgcttgtgc

SEQ ID NO: 24166 - DNA, 373 bp, Gossypium hirsutum
  Clone ID: LIB3147-015-Q1-K1-E9
ctttgctcgtaattcatttcgttgtaaatttgtttccgtagtaatcatcaaatctgggggagatgtcatgcagaggcaagggtggcaaggggctcggcaaatgaggtgccaagaggcatatgaaggttttaagagacaacatccagggcattactaagcctgtcattcgccgtttggctcgtctaggaggtgtcaagaggatcagtggcttgatctatgaagaaactaggggagtattgaagatattcttggagaatgtgattcgtgatgctgtgacttataccgagcactccaagaggaagaccgttaccgccatggatgtagtttatgccttgaaaaggtatgtcatgactttctatggttatggtggtta

SEQ ID NO: 24167 - DNA, 433 bp, Gossypium hirsutum
  Clone ID: LIB3147-015-Q1-K1-F1
cccacgcgtccggcagaatgccaattcagctttacgacaggtcaaaacatgggcaaagctgttaaattcgttctgcagcagtggaaaacttgaactggagcttatgtataaggttcagatgcaatgctatgaggatgcaaaattgatgaagctattcccggagattgtgaagtctctctatgaccaggatgtccttgcggaagacacgattctttactggttccgcaaaggattaaacccaaagggcaggcaaaccttcgtgaaagccctggagcccttcgtgaattggctggaggaagccgaagaagaggaataagcgcgtggataataatagtgttatcaacaatcaagaagttatgataattaaccttgttatcttttccttgtctttattgagctatatgtttgccgaactcttttgacatttggtgtg

SEQ ID NO: 24168 - DNA, 395 bp, Gossypium hirsutum
  Clone ID: LIB3147-015-Q1-K1-F10
ctctccttttagtgacaatgctttgaaaggtacttgtgtatacaagtttcataaggggagatgtttgtttcttttgctacatcatacacagaaatgttaagtaaagacaatgttggttttttgttatttcttgtgaatttgtagtaagaaattgtcaaaacttagtgaagcgtcagttgttatattaaagacaaacaagtttctttggaccaaaaaaaaaaaaaaaaaaaaaaaaaccaaaaaaaaaaaaaaaaaaaaaaaaaaaaaaaaaaaataaaaaaaaaaataaaaaaaaaaaaataaaaaaattttaatatttaaaaaataaaaaaaaggggggggcccttttaaagaatcaaattttatttcccttggtatggaaattattatttttt

SEQ ID NO: 24169 - DNA, 393 bp, Gossypium hirsutum
  Clone ID: LIB3147-015-Q1-K1-F11
tgccactgttgataacgggtttcctgcccatttccagagtaataatcagctgtccccgctccaggacatgttcatgtacctgcagaagccattttagacggggaaaaaataaaataaaaaggggttatattgttggaagtcaaaacggtgatggtgaactgcgtttcaaggttacacgagactgaaagtctatgagtgtaactgagaaaggttgcgcatagattaaataacgaattgaaaaattgaaattgataatattgcactaaggtagggggagctgttggatttttgcagatgggaatggatggacggtggaagttggatcttatgcaatctagaaaagtagagattagaataggcatgtgtacagataatctgtgatcacgtgtttag

SEQ ID NO: 24170 - DNA, 420 bp, Gossypium hirsutum
  Clone ID: LIB3147-015-Q1-K1-F12
atcaaatttaagaacatcaatgaaaaataaagattatgggagaagacagagtgggggtggattggttggtgggaaactatccttccaaaagagttaaaaagaattgggtttacctctgcatcacaggatctgatgtaatcatttcatttgtattttaatgtaaaatacagtttgttgtattatacgagttttgagaggaaatctgagttaagttgccttgtaattgtataatttctagtggaaatggtttagatattagaattaatgtagacacgaagattgcatggatagcataacctttttgctaaccactcactattcaagtttcggacaattcattgtttccaaatccaaataaacgttttattttaaaaaataaaaaatctatttaatttcaatcatttttatataaaaagggcg

SEQ ID NO: 24171 - DNA, 422 bp, Gossypium hirsutum
  Clone ID: LIB3147-015-Q1-K1-F2
ccattttgcccattttcagcagcaactttttccttttggcagttaagtgaaacgatgccatactactcgaggggtggcgaagatgacgttgacgagttcgacgaattcgatccgacgccttacggtggtggatacaatctcgaactaacttatggtcgtcctttggaaccctccgatgagacttgctacccttccgctacaccctccgatggcgactttgattacgcacgtcccgatttctcttccggttacgcgcacttagcttatgccgacgaagccctcgaaactgaatacagtagctatcttaaacccaagccccgacctggacgattcgaacctgcacctgcttttggtgactatggaaggaaacctgaatatgagcaattcgaatctggtcatggacgcaaaccggagttcggacg

SEQ ID NO: 24172 - DNA, 309 bp, Gossypium hirsutum
  Clone ID: LIB3147-015-Q1-K1-F3
caacaatccggttctcgaggttgctggccaatggaatgggaaagagcaataagcatccattattgaaatccaagcctggttttaaatcttcaaccccctcaacaacaaaggttcaaccaggtgacactttgtggagcatctcgtctcgtattcacggtaccggggctaaatggaaagaattggcagcccttaatcctcatattcgaaaccctaacgttatattacccaatgaaactatcagatatcgataagtagtatatgcattggaatctgctttgagattattacagtgttgatgagttctgcttg

SEQ ID NO: 24173 - DNA, 437 bp, Gossypium hirsutum
  Clone ID: LIB3147-015-Q1-K1-F4
gaagtctttacaaggggtgctgttggagaaagccactgaaagcctctctgaggttgaaaatcctgggcacaaccggcggccaactcgtggaagtgaagatgctgctgcagatgagaagcagcaaggagcatctgtatctccggatgacctgattgctcttgcacagcaatatagctctgaattgctacaaggagagcttgagaggactcgcatcaatacagcatgttttgtggaatcactccccatggaatctgctccagactcggtaaaagctgcatatgcatcttttagaggtccaatggactctcccagcaaaaattacagaggcacacaagcaacgggatcccctagtttcactcagcgtaggcgcagataaattagagccaccccagcagcagccatattcttcgtaaaaagtaaaaatttcttcattttga

SEQ ID NO: 24174 - DNA, 428 bp, Gossypium hirsutum
  Clone ID: LIB3147-015-Q1-K1-F5
gttccctaggggaatgtttggtgaagatatattcggctcgtttaggggtggtgctggtgagggttctaccactatgcctcgaaaaggtgcccctattgatcggccattgccttgtagcttggaagatttgtataaagggactaccaagaagatgaagatttctagggatgttatcgatggtagcgggagacctactacagtggaagaaattcttaccattgatattaagccggggtggaaaaaaggcacaaaaataacttttccagagaagggaaatgagcaacgaggggttattccctccgaccttgtcttcatcattgatgagaagcctcacagtgtgttcaagagagacggcaatgatcttatcgtaactcagaagatatctctggtggaagctctaactggttatacagcacagctgacaacac

SEQ ID NO: 24175 - DNA, 429 bp, Gossypium hirsutum
  Clone ID: LIB3147-015-Q1-K1-F7
ggtctcgaaaatgtgaggcttatcacagtgggagcatttcataatttggctctccaggaggatgggactttatgggcatggggtaataacgaatacggacaacttggaactggggacactcagccaagatcacaacctatacccgtccaaggattatctggtctcactttggttgatattgctgctggtggatggcattccactgcattgactgatgatggagaggtgtatggttggggaagaggagaacatgggaggctcgggtttggagataacgataagagcagtaaaatggtgccgcaaagggttcaacttttagctggggaagatattgttcaggtatcttgtggtggaacacattcggttgcattgacacgtgatgggcgcatgttttcgtttggacgaggtgaccatggacgactaggttat

SEQ ID NO: 24176 - DNA, 407 bp, Gossypium hirsutum
  Clone ID: LIB3147-015-Q1-K1-F8
gtcattttacccattttgagcagcaacgttgttttcgatactttttcatccttgtttcgcggttgtagcttgttggtgtattttataactagattttgaaacaaaaaaaagtgagaatcatggtggtttcgagtttcgtttttcggactataatatcctaagcttgataattctgccctttaatttgctatctgactttgtcgagatcattaagctacgtttgttacttaccattcggattattttgcagatacgcgcacttagcttatgccgacgaagcccttgaaactgaatacaagagctatcttaaacccaagccccgacctggacgattcgaacctgcacctgctttttgtgactatggaaagaaacctgaatatgagcaattcgaatctggtcattgacgc

SEQ ID NO: 24177 - DNA, 421 bp, Gossypium hirsutum
  Clone ID: LIB3147-015-Q1-K1-F9
cgaatatgtctctgattccaagcttttttggcaaccgtcgcagcagcatctttgatcgcagtctttcttgacgtttgggatcctttcaaggacttccctttctcttctccttcttcatcactctccacgcgctcttctgaaacctcggcttttgtcaacacccgaatcgactggaaggaaaccccataagctcacgtgttcaaggctgatgttccagggcttaagaaagaagaagtgaaagtggaggttgaagatgacagggtgcttcagataatctgggagaggaatgcatagaatgaagacaagaacgactcatggcatcgggtggaacgcagtagtggcaagttcatgaggagattcagactgcccgagaatgctaagattgatcacattaaggctttcatggaaaacggagtgctta

SEQ ID NO: 24178 - DNA, 428 bp, Gossypium hirsutum
  Clone ID: LIB3147-015-Q1-K1-G1
ctatgctcgtgaaggtcggcgcccggttctaggatccgctatcagtggtttcttcctttattgccccagtgctggatcagatgcactgaatccatgggagacaattggatcacaaggggcaaggaatttcattttgtgcaggaagccaagcaatgagaaaatggaagatgatggaagatcagcaaactcagttactgggaaaggaagtgggaattggaaggcatggatcaacaaatcactcaatcttaagatttcttctcattattagataattctcataccctttatcatcgtgtgcttcttgggctagctttactttcaagctaaggacttgtacaatggatatgaccatgttagaatcttggttatcatccatgggatgtttattcaggaataaaatcaagctgttattcggtgtttttgctttg

SEQ ID NO: 24179 - DNA, 428 bp, Gossypium hirsutum
  Clone ID: LIB3147-015-Q1-K1-G10
gcggctgtggtttcttccggctttcgattcaaatcccttttggaactgtccttcaatggaaaacaagcagccaacatggggaagacacgaggtatgggagctggacgtaagctgaggacccaccgaaggaggcaaaggtgggccgataagtcatacaaaaaatccaaccttggtaatgaatggaagaagccatttgctggttcttcccatgccaaaggcattgtccttgaaaagataggtattgaagctaagcaacctaactctgctatccgaaagtgtgctcgagttcaattgatcaagaatggaaaaaagattgccgcgttcgttccaaacgacggttgtttaaactacatcgaagaaaatgatgaggtgttgattgctggatttggacgaaagggtcatgccgtcggtgatattccccgtgttag

SEQ ID NO: 24180 - DNA, 428 bp, Gossypium hirsutum
  Clone ID: LIB3147-015-Q1-K1-G12
cccacgcgtccgacagaattcaaacaataataatatattaaatcttcttcatttccggcggacccatggagacagttatcggaaatccattcatcaaggcattgattattcttttcttggtatctgcaactaccgccgctggcgacgctccgttcattatttcccacaagaaggcttcgctcaccagacttaattcctgcgctgaacgcgtctccgtctctatcgacatctacaatcaaggcttctcgacggtgtatgatgtgagtcttgtcgatgatagctggcccaaagatttatttgatatcatcagcggtaacacttcaaagtcatgggagagacttgatgccggtggcattttatctcattcatttgaattagatgccaaaagacaaggaatgttccatggtgcaccagcagttattacttac

SEQ ID NO: 24181 - DNA, 419 bp, Gossypium hirsutum
  Clone ID: LIB3147-015-Q1-K1-G2
tgaagctgctgctcttgcttttgaagccataccacgtactttggcacaaaattgtggagttaatgtgattcggactatgactgctctgcaaggaaagcatgcaaatggtgaaaatgcatggattggcatagatggcaacactggtgccattgctgacatgaaggaaagaaagatttgggacgcatacaatgtgaaggcgcaaacatttaagacagcgatagaagcagcatgcatgcttctacgaattgatgacattgtaagtgggattaagaagaagcaggctcctggagctggccaaggtccatcgaaacccaaggtcgagactgaagcagatgcggatggtgagcaaattcttcctgattgaagatactgaatcacttaaactcacccttcgctttcaaactgtttgatgaaatgat

SEQ ID NO: 24182 - DNA, 436 bp, Gossypium hirsutum
  Clone ID: LIB3147-015-Q1-K1-G3
gctttggctcgcaaatacaaccaagacaagatgatttgccgcaataccataaatgggactacaagttgaaccctcttttgagctaaagaatgaaaaggagggcatcttagttcccaaaattcaaatttccattctcaactttgtcaactggtctaaactttacttggcagttgattttctagtgtggtacatgatgatcaattctctgtttcgtacttatgtagcttgataaatcccaagatcgatttcttctgagtaatgagaatttttaagatcaaagtgaaggagctaattagtagtctgcccattgcatgttatcttaaaagacgcatgtgcatggaagttatttgataattgagaatgtgcgttgctaggtgttatgctcgtcttcatccaagagccgtgaactgccgcaagaagagtgtggtcacagcaa

SEQ ID NO: 24183 - DNA, 411 bp, Gossypium hirsutum
  Clone ID: LIB3147-015-Q1-K1-G4
ggagttcatggctttcctactcttttccttttaaattctaaaatgcgtgttcgttatcatggaaaccggtcttttgaatcgctcagcacattctataatgaagtcaccggctttcagataaaatctctggataaaacatcgcgggacaaaaccagacatgtaccaaagcatgagaatcataaaagctctgagcaggagagctggtcattctcatgggcaagatctccacagaatttgcttagacaagagacctatttggccttagccaccacatttgtgcttttcagattgctttatctattttatccaactttgctggtatttgctcgcttcacttggaaacggatcaatcgagatgtaaagttgggaactatgttggaacatcctttgctgatctgaaacgaacaattc

SEQ ID NO: 24184 - DNA, 420 bp, Gossypium hirsutum
  Clone ID: LIB3147-015-Q1-K1-G5
tgtgggtgcatttccttgttggtgcaccacctttgatagtattctcctctgcttgtgcaggggtggcatgtggtgctgttccagccctaactcaactagcttcatcgtcataccatgctgcattctcgtcttcttctttattgcctccatcttcacaggatgataagatgcacaagtctaggaccaactccactttataattatacaaatatatatagaatctctttccacatgttttgcatttcttctataagagcctactgccttgaaattttgtaatcttggaggacacttttttgtgtttgtaaattgtaatataggtttatgttgatgtttaattcttttcttttcctgttataagtattttttatgttatatgataaaaaggtttttatgcactttttcttttactattatgtt

SEQ ID NO: 24185 - DNA, 411 bp, Gossypium hirsutum
  unsure (1)..(411): unsure at all n locations; Clone ID: LIB3147-015-Q1-K1-G6
cccacgcgtncgaaggaattggaatgtaataatattgattcatataggaggaaaaggttctgtattgattcaaatgctgtacctatgggatagggatagagaaagaggaaaaaccgaagatttcacatagtgcttttgatcgaaaaatcaatctgatttatttcgtacccctcgctcaatgagaaaatgggtcagattctataggatcaaacctatgggacttagggaatgatggaagggaataaaataaaaaaaaaaaagaaatcaaaaaaagaggggaaaaaaataataaaaataataaataagtaaataaaaatgaagtagaagaacccagattccaaatgaacaaattcaaacttgaaaaggatctttctgattctcgaagaatgaggggcaaagggattgatcgag

SEQ ID NO: 24186 - DNA, 433 bp, Gossypium hirsutum
  Clone ID: LIB3147-015-Q1-K1-G7
gccggaatcccgggcgcccacgcgtcgccaccgtcgtcattttcaagtctgcaaaaccctagccagcccttccccgccgcgctccgaaccatgggccggtccgtaccaagacggtaaagaatcctctcgccatgtgatcgagaggtactactctcgcatgacgcttgatttccacaccaacaagaagatcatcgaagaagtggctatcatcccttccaagcgtctccgcaacaagatcgccggcttttccacccatctcatgaagcggatccagaagggtcccgttcgtggcatctctttgaagctccaagaagaagagcgtgaacgtcgcatggatttcgtccccgacgaatccgccatcaaggttgatcaaatcgaagtcgataaggaaactctcgatatgctttcggttctcgggatggctgatattccc

SEQ ID NO: 24187 - DNA, 413 bp, Gossypium hirsutum
  Clone ID: LIB3147-015-Q1-K1-G8
cattttcagttgaggaacctggtatgggctacatcaaaacatgatgtttatctcatgtcacaattttctgtcatgcattggtcttcattgacacacaagaagcgtgaaattcttaatgtttctgggcatgtggcaccatctgagaaacatcctggaagtctgatggaaggttttacgcaaaccttagtcagtactcttgcagtaaaggataagctgctagttgctggaggattccagggtgaactaatatgcaagcatttagatcgacctgaaataagcttctgctccaggacaacttatgatgacaatgccattacaaatgctgttgagatttatgtcactccaagtggtgcagttcactttacggcctcaaataatgactgtggagtcagagattttgatatggagaaata

SEQ ID NO: 24188 - DNA, 430 bp, Gossypium hirsutum
  Clone ID: LIB3147-015-Q1-K1-G9
gcgccacccgcatctcgtctctcttatcgggttctgcctttcagaaaaggagatgttcggtgtgttagagtacatgagcagagggtcactcgctcatgttctctacgggaaggatcatgttccactggcttggaaacataggctacacatatgtatcggtgcagcacgtggattacattaccttcacactggagcgaagcgtgctgtaatccaccataacatcaagagctcaaacatatttttagatgaagaatggtgttctaaactttcagattttggattgtccaaactgcctcttagcacgtcaaaagccttgacaagaatcgacacagatcatgcggtgggaactagtggatatatggccccagagcatcgcgtgcgtttactgaaagaaaaatccgatgtcttctcatttgggattgttttgtac

SEQ ID NO: 24189 - DNA, 389 bp, Gossypium hirsutum
  Clone ID: LIB3147-015-Q1-K1-H1
cagaatgtcgaagcgaggacgtggagggtcagctggaaacaagttcaggatgtcactgggtgtaccagtggcagccacagtgaactgtgctgataacactggtgctaagaacctttatatcatctcggtgaaaggaatcaagggccgtctcaaccggttgccctctgcttgtgttggagatatggtgatggctaccgtcaagaaagggaagcctgatctcaggaagaaggttttgcctgctgtcattgtgagacaacgcaagccatggcgcagaaaggatggtgtttacatgtactttgaagataatgcgggtgtcattgtgaatccaaaaggagaaatgaaaggttctgctataactggtccaattgggaaggagtgtgccgatcttt

SEQ ID NO: 24190 - DNA, 308 bp, Gossypium hirsutum
  Clone ID: LIB3147-015-Q1-K1-H10
gtgaggtacaagctggttgaatgtttctataaagaaccacgggattttgagtttgggggtgtcttacgagctttagacatgcccattctgtaacttcttaaaatgatatatttttgaattgtagtgcttcattttgaagaagtgaagcaataatgtctctaaaaattgtttttctagacactacttgtttcattttcaagaaattatttaaatcctctccgggagagaggacagtcttgagattaaaaaaaaaaaaaaaaaatataatcaaaaaaaaaaaaaaaaaaattaaataaaaaaatggggcg

SEQ ID NO: 24191 - DNA, 290 bp, Gossypium hirsutum
  Clone ID: LIB3147-015-Q1-K1-H12
acgcgtacgggctgatcgacaagaaagagttatctctccttcaagagctcattgaatccatcatagggccttgctaaatatataagggtttaattcaattccccttaaaaatctccgtttttcttatgattttacatttttatcacatattttttattgaagccctgacaggccggcagcccccttgtgtcatcccggcttgatgcttgcatctgttggacttaaatcttcaatattcttttatttaaattaatcaaggaaatccaatatggacatatcacataatatgc

SEQ ID NO: 24192 - DNA, 437 bp, Gossypium hirsutum
  Clone ID: LIB3147-015-Q1-K1-H2
cccacgcgtccgtgtcagtggaggagctgttggtgaaatggcattacatttctgtgaacgttacaagttaatggtcttgaaaatcagctcaaaatttgaactgaggcgtttttgccgcactacgggaacttctgctcttttaaaactcagccaaccaaagccggatgatttgggatttgttgattcaatttcagtccaggaaattggtggttctcgggtcactgttgtgagaagtgaacaaggtggtaacaagattgccactgtggttttacgaggaagtactgatagtatattggatgatcttgaaagagctgttgatgatggagtgaacacatataaggcaatgtgcagggacagtcgaatggtacctggagctgcagctactgaaattgagttggctagaagattgaaagagttctccttcaaagaaacaggat

SEQ ID NO: 24193 - DNA, 148 bp, Gossypium hirsutum
  unsure (1)..(148): unsure at all n locations; Clone ID: LIB3147-015-Q1-K1-H3
nncgccacgcgtncggtcctctgatcgagatcttnattatacttgtcacttgttcatggatattggggatattttaccggtaatcccggattttaagctccaattttaaatgggataatcgacactgttggtgacttttttttgtcaa

SEQ ID NO: 24194 - DNA, 384 bp, Gossypium hirsutum
  Clone ID: LIB3147-015-Q1-K1-H4
atttttgcagttaaattgtagtggaaatcaatattatgagacgagtaaggaaaattgagaaggtattttcaattgaaaatttccaatttttacttcaaaaaaaaaaaaaaaaaaaaaaaaaaaaaaaaaaaaaaaaaaaaaaaaaaaaaaaaaaaaaaaaaaaaaaattaaaaaaaaaaaaaaaacaaaaaaaaaaaaaaaaaaaaaaaaaaaaaaaaataaaaataaaaaaaaaatataataaaaaaaatttggggggggcacctctttgaagaaacaaaacttaattccccgtgcaacaaaaacttttttttttatattggggaacaaacaaaaaaatccactcccatcgctttcaaaaccagttgctcaaaaaaccttggg

SEQ ID NO: 24195 - DNA, 415 bp, Gossypium hirsutum
  Clone ID: LIB3147-015-Q1-K1-H5
ggctaactctatcctgtttgattatcgtatccctgctgttggcacctgtggagccggtgccgccatggacagtcctttgcagatgaacgggctgccaatcagtgtctacgctccggagacagtcgggtgcgtggtggttgacaagcaaggccgatgtgctgccgccacctccaccggtgggctcatgaacaagatgagtggaaggatcggtgactcgccactaataggatcgggaacctacgcatctgagttatgcggggtgtcgtgcaccggcgaaggggaagcaatcatccggaacacactggcgagggaagtgtctgctgtgatggaatacaaagggttgaatctgcatgaggcggtggattatgtgataaagaataagttagatgaaggcaaagcggggctgatcgcggtg

SEQ ID NO: 24196 - DNA, 427 bp, Gossypium hirsutum
  Clone ID: LIB3147-015-Q1-K1-H7
gtttcaaacaagaagattgctatcttagggttcgcctttaagaaggataccggtgacacgggggagacccctgccatcgatgtatgcaaaggactcttgggagacaaagctcggttgagcatatatgacccgcaggtgaccgaagaccaggtccaacgggatctttccatgaacaagtttgactgggaccatcctcttcacttgcaacccatgagtcccacgactgttaagcaagtcagctgggtgtgggatgcttatgaggcaaccaaagatgcccatggaatttgcattctgaccgagtgggacgaattcaagaaactcgacttcaagaggatatacgacaacatgcaaaagccggcttttgttttcgatggaaggaacatcgtgaacgcggatgagctgagggagatggtttcatagtgtactc

SEQ ID NO: 24197 - DNA, 430 bp, Gossypium hirsutum
  Clone ID: LIB3147-015-Q1-K1-H9
cgctttttctctccaatttatgctcaacttggcattgaaatatttggtcttggatttgtaacttctataacattcatcttcttggttggggtattcatgtcatcatggttgggagcatctgtcctaggccttggtgagtggtttatcaagcggatgccatttgttcgtcatatctacaatgcctccaagcagatcagttccgctatatcaccagatcagaacacacaggcattcaaggaagtagccatcataaggcatcctcgaattggtgaatatgcatttgggttcattacttcatctgtttctctacagagctacactggtgaagaagagctatgctgtgtctatgttcccacgaatcatctttacatcggtgatatattcctcatcaatacaaatgatgttatcagaccaaatctatcagtccgtg

SEQ ID NO: 24198 - DNA, 164 bp, Gossypium hirsutum
  Clone ID: LIB3147-017-Q1-K1-A1
cccacgcgtccgattgactctaactctgattcttgatagaaaacatgaaatcaatgcgaagatctcaaccaagaggaagaagactgcactaaaaagttatgctctattgacatcaaggtcaaggataagaaaaagaagaaaagtttagcagcttaatgtttttt

SEQ ID NO: 24199 - DNA, 393 bp, Gossypium hirsutum
  unsure (1)..(393): unsure at all n locations; Clone ID: LIB3147-017-Q1-K1-A12
agctttctcagctttttatatatttttacttattttctataaaaatcaaaatggcgtctttccttactcaaagtgggctcaaacttttccttgtcatctctttgtttcaaatctctttggccgttaggaagctgagtgaagtggtgcaagaccagcctcagctcttgacataccacaatggtccccttctttctggcaaaattactatcaatttgatttggtatggcaagttcaagccttccgagagggctattgtctctgattttgtcacctccctttcctccacggctccatcgcaaagcaaccggccttcggtgcccaatggtggaaaaccactgagaaatactaccacctcacctncaagaatctttcctttccctgtctttgggaagc

SEQ ID NO: 24200 - DNA, 275 bp, Gossypium hirsutum
  Clone ID: LIB3147-017-Q1-K1-A2
cccacgcgtccggcgagagtttcttctttttcttcttcttcttcttcgctcctgtagaaagtttatttgctcttcaacaataaaaaaaataaaaaaagctttcctacagcagcgctcaagtttttatcaatccagagtttgaatttgaattgaacaaatcaatattaagataagagaaatggctcgctctctctccaacgctaagcttttctctacttttgttgtcgatggaatctctaacgttatctccagacgaggatatgcggcggcatcac

SEQ ID NO: 24201 - DNA, 289 bp, Gossypium hirsutum
  unsure (1)..(289): unsure at all n locations; Clone ID: LIB3147-017-Q1-K1-A3
acgcgtacgctggctttctttgttttaggcatgtattgntatttaaggccaattctattacaacagcggggaaacaaagatcccgacgatgaaaatctttggtacaatgcataatggtaagggaaaactgaactacgcccagcacatgaagaggagcaagtactgcatttgtcctagaggttacgaggttaacagtccacgcgtggtggaggccatattttatgaatgtgtttccggtatcatatctgacaatttcgttccttcttttttcgagggttttgaattggga

SEQ ID NO: 24202 - DNA, 329 bp, Gossypium hirsutum
  Clone ID: LIB3147-017-Q1-K1-A4
ggaaattaagaaagttgttgacctttattatgagcttgacattgatgtcctggttcatggagagcctgagagaaatgatatggttgagtactttggtgagcaattatctggttttgctttcactgttaacggatgggttcaatcttatgggtctcgctgcgtcaagccaccaatcatctacggtgatgttagccgccccaaaccaatgaccgttttctggtcatctactgcccaaagtatgactaaacgcccaatgaagggaatgcttactggccctgtcaccattctcaactggtcctttgtcagaaatgatcaaccgagattcgaaa

SEQ ID NO: 24203 - DNA, 400 bp, Gossypium hirsutum
  unsure (1)..(400): unsure at all n locations; Clone ID: LIB3147-017-Q1-K1-A5
ttctctcgcggataatcaccgccggtctttatcgccggggggatcggcgctgccggggggaacccaaccgacgtggcgagggtgcgaatgcaagctgacggacgcctccccgtatctcaacgtcgtaactataccagcgttgtcgacgccatcactcgcatgaccaaacaagaaggcgtcacctccttgtggcgcggctcatcgctgacggtgaatcgtgcgatgttggtgacggcatcgcagcttgcctcctacgatcagatcaaagagatgattttggaaaacgggctgatgaaagatgggctggggacacacgntgcagcgagcttttcagccgggtttgttgcggcagtggcgtcgaatcccgtgatgtgataaaaacaagggtgatgaacatgaa

SEQ ID NO: 24204 - DNA, 435 bp, Gossypium hirsutum
  unsure (1)..(435): unsure at all n locations; Clone ID: LIB3147-017-Q1-K1-A6
ctttgctgtttcagaccctcccctttgtcgttcaagtcctttcccatttccgactggggtccgacgaatcggggacgccgtccgacgacccacaacggtaagtcctcccttccttcccctcctcgttttttgttttgttttgagaaacaaaaggaaaataaaataaaataaaaacagtaaaaaaagaacagaggaaaaaaaagaaccaaaatccgtcaccttcaaaaaaaactttgttctctcttgtattttcttttttaaattttcaatacaaaaaaatttgctaacccccctttttacagattcgatttcccttttatctagcccccctaaatcttttttacaacttgctaccccccctattttgcttgctgctcgtggntcttttattgcaggtacatgcgtgtatgggaattgctgcgacgtggggtatgc

SEQ ID NO: 24205 - DNA, 145 bp, Gossypium hirsutum
  Clone ID: LIB3147-017-Q1-K1-A7
ttatcacttcccgggatctctcgaggggtatgttcatagcagggggcggacacgaaaggctgcggcaaaaggaacagcctatactttcttcacagctgcaaatgcaagattcgccaaagaacttatcgccatactggaggaagct

SEQ ID NO: 24206 - DNA, 295 bp, Gossypium hirsutum
  unsure (1)..(295): unsure at all n locations; Clone ID: LIB3147-017-Q1-K1-B1
ttttaaaatctcaaagatgtatacatttaggaagaagatccacaaagataaggatgctgaaccaacagaatttgaggagtctgttgcgcaggcattctttgatttggagaataccaatcaagatctgaaaagtgaccttaaagatctctatattaattcagcagtccaaattgatgtttctgggagccggaaagctgttgttgtccatgtcccatatagattgaggaaagctttccgcacggttcatgttaagcttgtgagggaactngaaaagaagtcagtggcaggatgtgat

SEQ ID NO: 24207 - DNA, 307 bp, Gossypium hirsutum
  Clone ID: LIB3147-017-Q1-K1-B10
cgacccacacatccggtggtgttttttttagctacgggtcatacctctccaagccaaccacctttgagcggatttttaaaagcttggcggtagaataacagcacttcaccagttagtttccccatttggaaagactgacacagcatctgtgttgttagaagctattggttatatcagattccttcaaagtcaaattgacgctcttagctccccttacttgggtactgcatcaccaaacatgaaaaaccaacaatctggtcaacgagaaacgaattgtgcatttcctgaagatgaaggacacgaaaaa

SEQ ID NO: 24208 - DNA, 367 bp, Gossypium hirsutum
  Clone ID: LIB3147-017-Q1-K1-B12
gacccacgcgtgcgcggacgcattttttatctcgtgatcattttcaagctcaggccccagctcacgcggcggcatctagagatttgcgtggggcatactaaactgcgtttacacatgccaccatcaattgcttttgctactagaggacgcttacaaggactaagactccaacttgcacttcttgaccgtgaatttgacgatctggattatgaaaccctcagagcattggattctgataatatttccacaactccttcaatgagtgaggaagagataaatgctttacccgttcacaagtacaaggttcctggaacagagagtgctggatcattaccaaagcaggcatcatcttcgtctgctccagttg

SEQ ID NO: 24209 - DNA, 195 bp, Gossypium hirsutum
  Clone ID: LIB3147-017-Q1-K1-B2
ccaagccttccccaacccttccgtctatccttccgttttccttccgttaagttttcctttttttgggaaggcaccgatccatgagggggaactgattatcataattttcatttgtaatatttttgggtttttttaaaccctaactgtataaacaatgcaccggttccttttataatgcagaaattaaacgaccaa

SEQ ID NO: 24210 - DNA, 188 bp, Gossypium hirsutum
  Clone ID: LIB3147-017-Q1-K1-B3
tttcctcggattgtttttacaataatcatccataggtgttattattagatttatacatttaatttatttctttctacatatgctttttttttcttgctgcggagaataacaatcgaggataacattttttttattaatttccacaaaaatttgtttaaatataccaaccatatagatattcactgagt

SEQ ID NO: 24211 - DNA, 149 bp, Gossypium hirsutum
  unsure (1)..(149): unsure at all n locations; Clone ID: LIB3147-017-Q1-K1-B4
cggacgcgtgggtctttattgttttttgtgttgaaatggtgaaatgaaaatgaatgctgtcccatcaaaacaaactgctgctcttactattagagaatttatatgattcattggagagtttttattaaaccaaagtttgggtttggntt

SEQ ID NO: 24212 - DNA, 274 bp, Gossypium hirsutum
  Clone ID: LIB3147-017-Q1-K1-B5
cccttgctgacgactttttacactgttgggggacctaaatactatcttctgtttcctgaccacacctcaagcatcgatcctcagatattactcttctcagttttaagctggagaaagttggaatgtagttccacgcgattttccatactgtaatcttaatttttgtaggcatatctagattccataatttcctgaagaaattatttgtatgggtctgtaaataatcatttagatctgtagtagatccctgtaatagtttatacgcgcttctcac

SEQ ID NO: 24213 - DNA, 408 bp, Gossypium hirsutum
  Clone ID: LIB3147-017-Q1-K1-B6
aaaataatttccctcccacctgagattgttactgtgcaaaaaccggcgagttcctgcgaatccgacccaagatgcgcgaacatcgacgagaagaaaaggaagaggatgctgtcgaaccgtgaatcagcgaggcgatcgcgtatgaagaaacaaaagctactcgaagatttagttaacgaagtgagtgcattgcagaaaaataacacccagatctgtgaaaagatcaagttcacaacccaacgcttcgtcaaagtggaagcttccaacagtgtcttaagagctcaaataattgaattgaccgagagcttgcagtccttgaactcgatactgcacatggcggaagacggaagcgggtacgacgtcgatatcccggagatcttcgttcttctgatgaagccatggcaactc

SEQ ID NO: 24214 - DNA, 321 bp, Gossypium hirsutum
  Clone ID: LIB3147-017-Q1-K1-B8
gcccttttgttatatcgacaaatatcctagtcgcttgccttttcctcatctgctgtctcattgaaaaataatgacgtggagaaccagtgaaccccaaagcatacccactagcggatgctcagttaacaaccacgattttagatcttgttcaacaagctgccaactacaagcagctcaaaaagggagctaatgaagctactaagaccctgaatagaggtatctcggagttcattgtgatggctgctgataccgagccccttgagattctgcctcatcttcctttgcttgctgaagataagaatgttccctacgtatttgttc

SEQ ID NO: 24215 - DNA, 255 bp, Gossypium hirsutum
  Clone ID: LIB3147-017-Q1-K1-C1
ctagttctagatcgcgagcggccgcttttttttttttttttggaactctaatgaaaggaataagtaaccaatctgatggcacacacagtagagatagacaagcaatacagtacactaccaagaaacatagtgggatttaccaaacaaaaatgaagactttaaaagaacagattaattgctatctttaaacttggaaaggccaaggccagttcttcaaatcctcatctgcaactttcccattcccctgtttcaatg

SEQ ID NO: 24216 - DNA, 280 bp, Gossypium hirsutum
  unsure (1)..(280): unsure at all n locations; Clone ID: LIB3147-017-Q1-K1-C10
gacccacacgtccgtaaaaaaaatttttataaacaaaaataataaaaaccaaaaaaaaaacaaccgccgggcgctttttaaaaaaccttccgcgccctcacatacatccnacttaataactcttctatacacctaaataaatttaattcaccgcccctcaccaaacaactaactaactaaaacaaccctcaccatacccaaatcaatttccttcccatacatccccctttcaccagctgacctactattaaacatgcccctatcgatctaccttcccaac

SEQ ID NO: 24217 - DNA, 339 bp, Gossypium hirsutum
  Clone ID: LIB3147-017-Q1-K1-C11
ggaaacccgcggcgacccacgcgtccgcccacgcgtcctgtgaagggatttcttttgccaccggtgcggcttttacatccgggggtaatatggaggttttgaagagaaccaattgcgatcacgtcactttggcatttttcggggatgggacttgtaacaatggacagttctttgagtgtttgaatatggcagcgttgtggaaattgcccatcgtgtttgttgttgagaacaatttgtgggctattgggatgtctcatttgagggctacttctgatcctcagatttataagaaaggaccggcgttcgggatgccgggtgttcatgtgaatgggatggatg

SEQ ID NO: 24218 - DNA, 390 bp, Gossypium hirsutum
  unsure (1)..(390): unsure at all n locations; Clone ID: LIB3147-017-Q1-K1-C12
gtgactcgtatgaccaggatttttgttgtggcgtacaatgcatccaacaatgagcgggttcgcactcaaactctggtgaagagtgctattgttcaagttgatgctgctccattcaagcagtggtatctccagcactatggcattgacattggtcgcaagaagaaatcagctgcagccaagaaagaaggagaggaaggtgaaactgctactgaggaggtgaagaaaagcaaccatgtattgaggaagctggagaagcgtcaacaaaatcgcgctcttgacccacatattgaggaacaatttggcagtggtcgtctgttggcttgtatctcttcacggcctggtcaatgtggccgtgcagatggttacatcttggnagggcaagagctggag

SEQ ID NO: 24219 - DNA, 411 bp, Gossypium hirsutum
  unsure (1)..(411): unsure at all n locations; Clone ID: LIB3147-017-Q1-K1-C3
tgaagaaagaaatgatgtctccacatattaggaggatggctcagcctcctgaaggcaatgaagaagcaaggctcgatcaaaagggtttagtggtgaagtgttgcatcgtttgaagatcatcggagttgtatgaacataatgtatatacaatctatacgctagaaaaatccagcgaccagcttagcaccatcaatatatatatgcttcctctgtatgggaaagatgtccctggctccacctaatggtggttaaataaagcgaacttcttaatgaatngatgacatttnngaaattatgacttgtgctcactgcttgtatcgatgatatgttaagtggcgagcaattttgttttcttggttccctgggttttggttccatttgatgtaattataatgtaatggaggacaacat

SEQ ID NO: 24220 - DNA, 265 bp, Gossypium hirsutum
  Clone ID: LIB3147-017-Q1-K1-C4
tcggaaacccgggcgccacgcgtccgtcgatttcaagccttttcaccatgttagctaagtggaagaagaagcgtatgaggaggttgaagaggaagagaagagagatgaggcaaagatctaagtagtttaattttatcttaaagcaagcaatttgttctatgtttctttagattttctgttgtttgatggatactttactttaaaaggatttaagttatctttatcgaaaccttttgaatattctggaaacttgttattttctatt

SEQ ID NO: 24221 - DNA, 250 bp, Gossypium hirsutum
  unsure (1)..(250): unsure at all n locations; Clone ID: LIB3147-017-Q1-K1-C7
ctccattgattttaatgatggggacaagcangaaggggcgcggtgttctaatatggacgagaccatatttgaagttattgatttggagtgggatgaatggccattttctgcttcacagtccggcgatgaagcctgttctgcaatagaatccgatacgagcatcgaggattcatcggaaaccgttaggaatgacatgacagaggagggtgtgaccgacaataatgaatgtacaaacgacattgatacatgt

SEQ ID NO: 24222 - DNA, 357 bp, Gossypium hirsutum
  unsure (1)..(357): unsure at all n locations; Clone ID: LIB3147-017-Q1-K1-C8
tccacgcgtcctgtaagatcagttcttggggaatcgtatgatggacagtctgtgtgagctgatcgtgtttctcgacggcttctgaaggatcacgcagcaatgagcccatccctggatctaagtcccagctctcctttaccttaccggagtgttattatctaaactcagctttgaagattcaccgatcagaatgtcttttgggtcttacgggatcaatttgtattcatcacttttaacttcttctaaggcagcatatgggtcaaatatggaacctgaacagaaattcgaggaataaggttgagagcaaggaatgacgtgcangtagtcattgccaagatcgggttagcgtcataatca

SEQ ID NO: 24223 - DNA, 342 bp, Gossypium hirsutum
  Clone ID: LIB3147-017-Q1-K1-D11
gcaaagcgatggggataatgaacagtttcatcaacgatatctttgagaaattggctcaagaagcatcgagattggctaggtataataagaagccgacgattacatctagggagatccaaaccgccgttcgattggttttgcctggtgaattggctaagcatgccgtttctgaaggaacaaaggcggttactaagttcaccagttcttagatttctttttctttttgttttgagattggattctgattagggtttccgatttgggattttagggttttttaaatgatggtttaataatgttcttgagttgtaggctttcggattcaatgatggttgttttgat

SEQ ID NO: 24224 - DNA, 383 bp, Gossypium hirsutum
  Clone ID: LIB3147-017-Q1-K1-D12
cccacgcgttcgtaaagggctgttgttcatatgactggcaaatccactgccggggaggggccaaagtctaggactaccgtcgtctccgttgagcatgtcggggacaccgacggctgtagatccaacgctttcgagagggcattagcaaccgaccggcgagggcatcgtttaactcgatcgacatcaccatgtgcgagccgtcaaggccaaatagcgacggtgtgccgccgtgcgcagtgaccttgctggagtgttcaaaacaaaagccgagaaaactgaaactagtccagcggtagtaaaagaggaagaacccttggggggaagtaagccgccgcctttttccgaatacctttttcccctgtaataaaaaaattcaaattaca

SEQ ID NO: 24225 - DNA, 323 bp, Gossypium hirsutum
  Clone ID: LIB3147-017-Q1-K1-D4
gcccagcaggtcttttcgtgggagattttaccacaaaacctcggaaaccaaagaagcggttctttgcctgtatgatgggattatgtatgtccaacgatacatccctgtccatctgcaacgagctcatgctacggctattcatagagttttgtgagtgttctctctctattttcttttaccttcctgcatcatttgagtttcgacgaatggttgcttattcatgcaatttatccatatttctgggtttcttcgtttgcatttcttcccatggcccctttttttgggcgagaaggtgatcagtcaatgtttgttactttgatatg

SEQ ID NO: 24226 - DNA, 369 bp, Gossypium hirsutum
  unsure (1)..(369): unsure at all n locations; Clone ID: LIB3147-017-Q1-K1-D5
cccacgcgtncgctctcctatactatcttcttccacgttattagcacgttagctagctagggttttttgagccatatagatgggttcggggggaacagcatcactagccctcctctttgcactcaacatcctcttcttttccctggtgagtgcttgtggttcctgcccttcccccaaccccaaacctaaacctaaacctaaaccaaagccaaaccctactccctccccatcttcttctggcaagtgccctagagatgctcttaaactcggtgtatgtgctgatttgctccgtggcttgctcaacgtcaccattggtacccctcctgttcaaccctgctgctctctcatccaaagtcttgcctgatcttg

SEQ ID NO: 24227 - DNA, 351 bp, Gossypium hirsutum
  Clone ID: LIB3147-017-Q1-K1-D6
gtcaaaccctacaaaaaatgctgagtgcaccccagaggaagctttctcgattgtaggcgacaacattatatttgcaagtggaagtccatttagagatgttgatcttggaaatcgtcaaattgggcatagcaaccaaggaaacaacatgtatctctttccaggtattggccttggaactcttctgtctggttctaggatcatatcggatggcatgctacaggctgcagcagaacgtctggctgcctacatgacagaagatgaagttctcaagggcatgatattccctccaatatcaaagataagagatataacaaaggaggtagcagcagcttgtgtgaaggaagctataga

SEQ ID NO: 24228 - DNA, 284 bp, Gossypium hirsutum
  Clone ID: LIB3147-017-Q1-K1-D7
gtataaccgttttcttgacccagatagttacgatcaatacactagtggtacggcgctggtttgtatctgttcaccgcgctgaacaaccggccgagctgacaggtatatcttggaaggcaaagaactagagttctacatgaagaagatccagagaaggaagggaaagggagctgcctaaagttttgttacttgagatatcatatttcagaccaaatgtcccttttttaaccattctttcatcattttcagtacattttgagattgtgatagtggctacacatttt

SEQ ID NO: 24229 - DNA, 369 bp, Gossypium hirsutum
  unsure (1)..(369): unsure at all n locations; Clone ID: LIB3147-017-Q1-K1-D8
gaaacccgcggcgacccacgcgtccgtccacgcgtccggtgcaaatatgttttatccaggtgttccagatgcccttaaattggctagctcaagtatatatatagtcactacaaaacaggtgctgtgagtttctttcactctgattgtcccttcctcctctctcacacaacgcacacatgcacaagaacaagatgaaaagtttgctatcagttcgaagaggcaaacattgtggatatatcggtagtttgatccagtctccggaatttgaaatgaaaaccaaggcaaaaggaaagaataagggggtaaaaggaacttgaatgtaggaaagtatcatagttgagatcagtcatagnctttcctggttctcct

SEQ ID NO: 24230 - DNA, 316 bp, Gossypium hirsutum
  unsure (1)..(316): unsure at all n locations; Clone ID: LIB3147-017-Q1-K1-E1
gaatggatncggcccgcaagtgtgcatttttgaagatgttggcgatcggtgctaaccctccattcaaggtgaaaggactatggcttttccgtgggcaagagattcctcaatttgtgattgacgagtgctatgacatggaactctacgagtggaagaaggttgacctgtcagatgcagcccagaaggaacgggtgaatcagatgattgaagactgcgagccatttgaaggagagcctctcttggatgccaagtgctttaagtgatagaatatgttcttaattttacttnttttattatttcttggtaccttttttgc

SEQ ID NO: 24231 - DNA, 395 bp, Gossypium hirsutum
  Clone ID: LIB3147-017-Q1-K1-E10
ctaatggactattatgggggcattgttatcgggaaccgaccgagaacccgaaccgggggactggctgacccctggatgctcgattcattagggtcggggatggatggaaccaatcagaagtgcaaatcgcgcaagcgaagccgggaaacggaccgcagcgcaacgactaggactcgtgtcggaggagctttgagcgtgagctaccactcatgctgcggcaaggacccgcaactctcgaaggggccaccaaccgcccgaatcactgtagcaaaccctccctttactcaatggatagcgcttatcctctttcaatcaacaaaatgagaaataagaaaaaaagaaaagatagaggtctttattgaggaggctttgcacctgaaataggactaatgaaa

SEQ ID NO: 24232 - DNA, 407 bp, Gossypium hirsutum
  Clone ID: LIB3147-017-Q1-K1-E12
gtttgaagttagttccactccttatatggtgatgagacagtagctgcagaaggcggtggtgtcccgtacgtgtgcgtttgcaccgaaaccataaagaagaggagcttgccggagagttcagtgtactttagagaagaagaggtgctagacatgcaggatgttacggttctttggctacctggcggtgttacaagttatgtggatgtaagtaacgatggcactcttactatcggagtcggatggtactcagatgagggaatcaaccttgttatggagcgagattacggcatcgatgggaagttgaaggaagttagatggaaatcagaggtcaagagactgtggtctcatccagtttctttgtaaatttattactttttgaatgctaacttcacaacagcaaatgctta

SEQ ID NO: 24233 - DNA, 365 bp, Gossypium hirsutum
  unsure (1)..(365): unsure at all n locations; Clone ID: LIB3147-017-Q1-K1-E3
gcgtacgtccacgcgtccgttttgtgctcgtggctcatgctcttcacccacccctaaaccaaggcgcgaatccaaaacccaacagcgggcacccctactgcatccgcacgaggcangtgccctagagatgccctcaaattaggtgtatgtgccaatgtgcttaacttagtcaatgtcaccgttggttcacctccagtgatgccatgctgttcccttctcaatggccttgtcgacctcgaagctgctgcttgcctttgtactgctatcagagctaacatcttangcatcaaccttaacatcccagtttctcttagcttgctcctcaacgtttgttcaaggaatgttccaactggctttccaatgct

SEQ ID NO: 24234 - DNA, 294 bp, Gossypium hirsutum
  Clone ID: LIB3147-017-Q1-K1-E4
aataaatttcctgtaagaggcggcatttgtgatcaaaattactattctagctttcacaagacacgtaaccgaaagaaattgacgaaacaagaatggaaagatttcactcgcgagtctacccggcacgccattgcagatttggcggcaaccccagagttcactgattggatgattgaacatgctgacaggattaaactccttccttgtgatagttcagaagaatcagttggaagcaaatcaaattcatccgattatgatgaagaaggaagctccagccgattcagattatttaac

SEQ ID NO: 24235 - DNA, 393 bp, Gossypium hirsutum
  unsure (1)..(393): unsure at all n locations; Clone ID: LIB3147-017-Q1-K1-E6
gtccgggatgatcaatcttgttcagaagttttttttatgaaggaaatgctgaaaaacaaagcggcttcagttctgcgatcatgtggctggtacattgatgtttacaatttcatgtattcgaggaagcagtcatatgcactggagactggaagcactctgagtgacaatgatttggagaagaagctgattgcagatgcgaagccaacctttattccacaaattcctgagtcactgaaagaggaatttattaaacttctccagtctttcagccaaacgaaacaagaatctccggatccttgatcggcatcgctgtcctgttgcgcgaaanacctgtgtataatctgtcctagtaatcagtattgtaacgaaagaccattatcaggcgaatgtcag

SEQ ID NO: 24236 - DNA, 378 bp, Gossypium hirsutum
  unsure (1)..(378): unsure at all n locations; Clone ID: LIB3147-017-Q1-K1-E8
cgacccacacgtccggtttggacaattttcatgctatnatattgacaccgattctatcgaacctctctgcatgtctgtatcggtgggaggatcttttattaccttgttgctcttcccaacgagcgacgccacctcgagcacaagaagcatgctgagcaacacggtcatcattaatcccatctagctttaaagatggtttggatcgttgttgtgcccttctcggttttatccagtaacaattcgatttgcttaatgctttttggttgtaatttgtgaacaatgtangcagaagaagatgcttgcttgatcaaatgcaaaaataaaagagtacattttctttaaaaataagtgaaagactattagactaccatggaaaac

SEQ ID NO: 24237 - DNA, 409 bp, Gossypium hirsutum
  unsure (1)..(409): unsure at all n locations; Clone ID: LIB3147-017-Q1-K1-F10
cacgcgtccgcccacgcgttcgttcacgcgtttttttacgcgtccgctgaaggatctgacactggaggaaagtatatttagctgtaacagggaaaagcgaaaaggctgctttctaacattctattttgaaaagagagagggaggatggaaggagacgatgtagtcatggcagcgccggaatccactgaagctgacctggatgacatgaaaagaaggttaaaagagatggaggatgaagccgctgctcttcgtgagatgcaagctaaggtcgagaaggagatgggttccgtacaagatcctgcttctgctgctacatctcangctaatcgagaggaagtagattcccgatcaaatcttgttggcaatgtggattattcatgtacactcgangaagttcaacagcattttc

SEQ ID NO: 24238 - DNA, 393 bp, Gossypium hirsutum
  Clone ID: LIB3147-017-Q1-K1-F11
gcaattcctcaagagctgccacattttcgtcggggatggcaacgtgggcaccctgggtgaggtacacgtggtgtccggcctcccagcggcatccagcgtggagaagcttgagatccttgacgatgaacgtcatgtgcttagctttagcgtggttggaggtgatcatcggttgaccaattacaggtctgtcacaaccctacaccattctcccaagggtaacgggacacttgtcgttgaatcattcgtcgtagatataccagtcggaaacagtagagaagatacgtgcatttttgtggataccattgtacgttgcaaccttcaatctttggctcgaatggcagaaaatatggcaagaacagaataatcatcatcatcatccgcataatgtataaa

SEQ ID NO: 24239 - DNA, 387 bp, Gossypium hirsutum
  Clone ID: LIB3147-017-Q1-K1-F12
gctagtcgctacttcactttatgtttttaccactcaaactctcgacaaggagcggggtataactatcctgagtggagcaattgcagcttgcactgaagcaataaagcatcacatgggtaaacttgatgtcaaggagcagactatagccgtgagcgaacgggatgataaactgctggctgaccacatggctaaattgcggaatgataatgaagaggtgagtggagatgaagatagcgaataagacgaagacacaggcctgggtgaagacgatgttgagaatgcaggtcatgggataatggaatagcggcgcttcttcatacaaggagaaggataattatcaattttgttttgaccaacacttatttcaattggcctcatctcatggat

SEQ ID NO: 24240 - DNA, 149 bp, Gossypium hirsutum
  Clone ID: LIB3147-017-Q1-K1-F2
catgtctatccttggttcttataaggcgcctgtataaagaaagggctggtttttgttccgcaagaaaatggacaggtacaagttaattaaggaagttggagatggaacatttgggagggtgtggcgagctattcataagcagtctgggg

SEQ ID NO: 24241 - DNA, 245 bp, Gossypium hirsutum
  unsure (1)..(245): unsure at all n locations; Clone ID: LIB3147-017-Q1-K1-F3
cccacgcgtccgataatagtagttttcttctctccccttttgcgccgntctcgggggagaaccattcatggttcttgcggtggccgcaacaccacccagaacgacggctgggtcatcgaggcaggtactgtgtgcagaggttgcggatgtggcatgtacggaggcgaaggcacgcgtacgaggctcgtgcgagcggtgctacgtgcgaggggatgtctgttgcggcgctggttggggctaacgct

SEQ ID NO: 24242 - DNA, 372 bp, Gossypium hirsutum
  unsure (1)..(372): unsure at all n locations; Clone ID: LIB3147-017-Q1-K1-F4
cccacgcgtccgtccacgcgtccggtactaagaaaaaggacacgaacttagcagaagaagatgttgatttgagtcctgctgtatcaactacacctgtcactgcacctccggttactgaaaccccatcacctgtatcatccatcacacagcctttgaagttgcctgaaccgattccggagagccaacagcgtgaactttttaagtatatattggaagagaagaggaaagtgaaaccaaaagatcccgaggagaagaagcggctggacgaagagaaagctatactcaaacaatttatccgagctaaatccataccacagttatgacttgataatccattgttgaaactngnatatattaccttttgttgttggt

SEQ ID NO: 24243 - DNA, 364 bp, Gossypium hirsutum
  Clone ID: LIB3147-017-Q1-K1-F5
gccacgcgtccgtttagaaggaatttttattgaccaacaacgtctcatattcgccggaagacagctcgaagatggcggtaccttggctgactacaacatccagaaagaatcaacacttcatcttgttctgaggttgagaggtggaattattgagccttctttgatggctttggctcgcaaatacaaccaagacaagatgatttgccgcaagtgttatgctcgtctgcatccaagagccgtgaactgccgcaagaagaagtgtggtcacagcaatcagttgaggccgaaaaagaagatcaagtagacactgactagtgttatactgtctgctttaaaaagaattgaatgtcagactaggaaaata

SEQ ID NO: 24244 - DNA, 334 bp, Gossypium hirsutum
  unsure (1)..(334): unsure at all n locations; Clone ID: LIB3147-017-Q1-K1-F6
aaatgctgtagtttgtggagcttgaagaaggtgccaggctcnagactcattactctgagagtggaaccttcactgttttagttaaccctgaggagtctttcttcgaatggaatggaagcctaatcatgtgtttacaaaccggagtaaataatggacatattcaatttagaaatggtgcctataagattaggggtaactaggacagtgcatattcatgatccccgaaggttataaatattctaattatacatggagctgcctaccattgactttctttgtactttgtgatgatatgacgtatagtagaaaaggatatgatggttttcaccctana

SEQ ID NO: 24245 - DNA, 271 bp, Gossypium hirsutum
  unsure (1)..(271): unsure at all n locations; Clone ID: LIB3147-017-Q1-K1-F7
gacccagcgtccggatggtcngtttttaccaccggtttgaacgncacagatgccccgaaatgcccgcccatttatacaagagtggggtggaaacaaaangcatccatgaaactacatacaattcaataatgaagtgtgatgtggatatcaggaaggacttgtatggtaacattgtccttagtggtggtacaaccatgttcccgggtattgcggacagaatgagcaaggagctttctgcactccctcctagcagcatgaagatcaaggttgt

SEQ ID NO: 24246 - DNA, 387 bp, Gossypium hirsutum
  Clone ID: LIB3147-017-Q1-K1-F8
gaaacccgcggcgacccacgcgtccggtcttttataccttgggaagctggtaatagcggaggcgactgcggaggtctcaggggcgtttaatgaaaaaatgggggaatattgtgatatgacactactttcttgtgcttatgctggaactgggaatgttctgaaggcaaaaccttcttggtcattgtgctcagcatcttgagaagggcgaaacccaccaaggtccagctgtgcttggtatcgccatggtagcaatggctgaagaattgggtcttgatatgtcaattcgttcactagagcatcttttgcagtatggtgagcagaaaatccgtcgtgcaagttctttggctcttggtcttctttggatatcaaacccaaaggttaatgtta

SEQ ID NO: 24247 - DNA, 297 bp, Gossypium hirsutum
  unsure (1)..(297): unsure at all n locations; Clone ID: LIB3147-017-Q1-K1-F9
ataaattagagcctccccagcagctgntatattcttcgtaaaaagtaaaaattgcggcattttgattttgattttgggtttcatttgcattgttgtgtttcacttgttgatgatacatatgattttggaagacatgcatttgtctgttgtaagtcatgggtcatgaacttcaattgctttgataggtgggctaaattgttaacttgtattattttccatgtttgtatcaatgagcacgcattcttttctaaaaaccttttgattaacttaaatatatatactactttagttaggatc

SEQ ID NO: 24248 - DNA, 365 bp, Gossypium hirsutum
  Clone ID: LIB3147-017-Q1-K1-G10
tatcgttctatcttttaacgttgtttaacacccgcgtgagcttcctaagctgcgcagggtttacatcatgtcgggggggatttacaacgtcaattctcctctcttccgctctttcctcagccagaagggaggctcctccgacaagagaaaaatggaggagcagaagcctaaggaacagagacccaaagcaaatgagaataagcctgtcatgacagagtaacagctgcttttgtttagtatgaatggcaagttggtggatggttgttcttaaaactctgatatgttcgagattggaaatgcttgttgatgtattcaaatactatcacaacgatttttcttctttgaaatggaatgatattcaactt

SEQ ID NO: 24249 - DNA, 225 bp, Gossypium hirsutum
  unsure (1)..(225): unsure at all n locations; Clone ID: LIB3147-017-Q1-K1-G12
aaacccgcggcgacccacgcgtccgagttattagctattgtgtcgnngtcngcaaagaacggcgttcaattgtaatggcgtgcttatatctcagatttatgggttccaacaagtgataagctgttttggggctctgcttttcttttttaatgttgttttggaacttgtaatatatgcctggtctactactagcgtttaacttgtaagggcacttcttctctcctc

SEQ ID NO: 24250 - DNA, 143 bp, Gossypium hirsutum
  unsure (1)..(143): unsure at all n locations; Clone ID: LIB3147-017-Q1-K1-G2
atatgaactttcattttggtaatttnttgnttttgtaatatttgaatggtataatgaggtgataaaatgtcattacggtgttgtaacctttttatgttgtggattatgacatataaactaatgaaatcatgtaactttttgtt

SEQ ID NO: 24251 - DNA, 422 bp, Gossypium hirsutum
  unsure (1)..(422): unsure at all n locations; Clone ID: LIB3147-017-Q1-K1-G4
aggggcgacccacgcgtncgcccacgcgtccggtgttcctaagtgtcttgttactggaaagcgaattcagggtatgccgcacttgagacctgctgggtagaagcggtctcgattgcctaggaaccgtaggacggtgaatcgtgcctatggtggtgttttgtctgggagtgctgttagagaaaggataattcgggccttcttagtcgaagagcaaaagattgtgaagaaggttctgaaaatccagaagactaaggaaaagcaatcatcaaagagctaggaattttaaatgctgatgaagctgaattgtgtttggcttgttagatttatctgagagaaatttttgtttgttattatggtgaattgatgaaatgtggaactgagtttgagtacttttctcattttgtaggttcatactgatatta

SEQ ID NO: 24252 - DNA, 221 bp, Gossypium hirsutum
  unsure (1)..(221): unsure at all n locations; Clone ID: LIB3147-017-Q1-K1-G5
cccaaaaaaattttcntttccgcctattttatttaaggaggcgcggcataaaataattttgtattgtaagaattttccaatataattgttgttatggtggatctttggtggtgttttccacttttgcttattgatgtctatggattttgctgcctttagtaaaatccttgtgtgatagttaattctatatgtttttgaatatgaaattcttgacaagaata

SEQ ID NO: 24253 - DNA, 198 bp, Gossypium hirsutum
  Clone ID: LIB3147-017-Q1-K1-G6
ctctctaacacaaagcatggctaatttgatcatccgccattgagtctgaatccgttattggaaattactgttttgttctgtgatgttaaaaagtacttaaactatgaattttgtgcattttgatccttgtatttatcaaacttcctttttaaggaaataatcttaaatgtgtgctcgcgttcgtgattacatcgcaat

SEQ ID NO: 24254 - DNA, 353 bp, Gossypium hirsutum
  Clone ID: LIB3147-017-Q1-K1-G7
gcagaaaccgatgggaaacgccatttttaaaaactccacagcgcatttacaaaccggcatattcaactcgcttgaagttggactctggaacatggaaagtgctgcctccgaactcctcagatcctatggggatgctggaccctgtctggacggagagcaattggaatacgattggtctccgggtatacaccgtccaggaagctgcatatgaccgattggttctgcttggacgataagtgtcacaatcttggcttatttaacaatagtactaacaagaaccctcttaacaaaagcctttaaatcaaaattttacaaataaaaattataccttcaatgtctttaccaaaattttt

SEQ ID NO: 24255 - DNA, 436 bp, Gossypium hirsutum
  Clone ID: LIB3147-017-Q1-K1-G8
aaaacccgcggcgacccacgcgtccgcgcatcttgcagtatttggctactatacagtctgaaagacccacagacaaaaccgggtttgatgcactaaacaagcgactttcaaaagttaattcagggattgagggtgccactgagaaaattttgatggaggaggagaaattcaagaagtggagaactgaaaacattcgaaggaaacacaactacatacccttcttgttcaacttccttaaaattcttgctgaaaagaagcaactgaaaccccttattgagaaagctaagcagaagaatagcagctctaggtgaagtgtatcttgttttgtttttattttcttgggttgacaagatgcttaatgcaaattcaaagaaaactggagtcacgtaaaggacccttttatgataaaatcaactctgctgttttcaaatgactt

SEQ ID NO: 24256 - DNA, 426 bp, Gossypium hirsutum
  Clone ID: LIB3147-017-Q1-K1-H10
tggtgcgaaaaacccgcggcgacccacgcgtccgtccacgcgttcgttcacgcgttttgtttgtaagaggccaaataaaaacaataggtattattctaatacacacacgagggtcctgagtaggaaagctgtaaatttctaattctctgtctaatgctgtgtacttccctacttatttgcggggtcatcatgatgctgatgctgtaagttttggcgtgtatatttttttaaattcaatttgcttagattcgggtcagatctgattctcttctgcatataggttgctctgtatatgaaagactatggtggtggttttgaattctgtaatcggtctgaggacaagatatatgatgattcgggtgatggcaccaatggtgctggagcaaatccacacaacatggaactgtcacaagagaatacctttac

SEQ ID NO: 24257 - DNA, 233 bp, Gossypium hirsutum
  Clone ID: LIB3147-017-Q1-K1-H11
aaagctgtaaatttctaattctctgtctaatgctgtgtacttccctacttatttgcggggtcatcatgatgctgatgctgtaagttttggcgtgtatatttttttaaattcaatttgcttagattccgctcagatctgattctcttctgcatataggttgctctgtatatgaaagactatggtggtggttttgaattccttaatcggtctgaagacaagatatatgattattc

SEQ ID NO: 24258 - DNA, 230 bp, Gossypium hirsutum
  unsure (1)..(230): unsure at all n locations; Clone ID: LIB3147-017-Q1-K1-H2
gcatgagccacacagcnttttatagaactgatgctgtttatactacangaaacaccactgctgctattggaaagggtttcgccattggttcagcagcccttgtgtcccttgccctctttggtgcctttgtgagccgtgctgctatttcaacagttgatgtattgacccctaaagtttttattgggttgcttgtcggggcaatgcttccttactggttctttgttatgacc

SEQ ID NO: 24259 - DNA, 368 bp, Gossypium hirsutum
  unsure (1)..(368): unsure at all n locations; Clone ID: LIB3147-017-Q1-K1-H3
cacgcgtacgggagagctgaggtaatctattgagtcttctctcatgaatcctgagcttttccttagaggaggaattaaacctgccaagggtgtcctcctctatgggcctcctggtactggcaagacattgttagccagagcaatagcaagtaatattgatgccaacttcttaaaggttgtttcaagtgcaataattgacaaatacataggagaaagtgcaagactgataagagaaatgtttggatatgcacgtgatcaccaaccttgcattatctntatggatgagattgatgctattggtggacgccgtttcagtgagggaacaagtgctgaccgtgaaatacaaagaacactaatggagttactta

SEQ ID NO: 24260 - DNA, 327 bp, Gossypium hirsutum
  unsure (1)..(327): unsure at all n locations; Clone ID: LIB3147-017-Q1-K1-H4
acgcgtccggccacgcctccgccattatcatganagtgcagagttnctgccaatgcaactctcggatcgtcttctaagttcgatgtgggatttggatagaatcaaaagaatcttatttctgctttttatctttaaaaatcggctagtttgttttcccagcacactcttcctttgtttactaattgttatgttttgacttttgagacgtgtttagaataagccgagcctaaaacagtttattgaattttaaagaaaggactttgcaaatggagggatggatttttggatgcatgatggtggcatgcataaagtagtaatgatttgttt

SEQ ID NO: 24261 - DNA, 209 bp, Gossypium hirsutum
  unsure (1)..(209): unsure at all n locations; Clone ID: LIB3147-017-Q1-K1-H6
gccaaanaaaaacaanacagcccttttttatacacacagcgcgtgtcctaaataggaaagctgtaaatttctaattctctgtctaatgctgtgtacttccctacttatttgcggggtcatcatgatgctgatgctgtaagttttggcgtgtatatttttttaaattaaattgcataaaaatgttgactgaggtataactctcagatgca

SEQ ID NO: 24262 - DNA, 241 bp, Gossypium hirsutum
  Clone ID: LIB3147-017-Q1-K1-H7
cgacccagcgttttaaaaaaaaatataaaaacaaaaaataaaaaacaaaaaaaaaaaaaaaaaaaaagaagaaaattaaaaaaaaaaaggggggcaaaaaaaaaaaaaaaaaaaaaaaaaaaaaaaacaaaaaaaaaaaaacaacgacgtccgctgacaacaccctaactgcaaaaaccctgacacccaccaaacaaaatccgcttgcagcaaaatccccttaaaacaataagccaaaaac

SEQ ID NO: 24263 - DNA, 315 bp, Gossypium hirsutum
  Clone ID: LIB3147-017-Q1-K1-H8
aacccgcggcgacccacgcgtccggttttgataatagttacccgtctttatcttgcttcccacaaggtatatggcgggggagctaggatttccaccttacgagagctattcccgaagatggaaaacaaaaagagccttgcctcttcagaggaaagggtccttataaaaggaaaagcttcattgttagcagcagttgattactatgttggtatgcatagtgatatctttgtctcggcctctcctgggaatatgcacaatgcgttggttggacaccgaactttcgagaacatgaagaccataagaccaaacatgcca

SEQ ID NO: 24264 - DNA, 226 bp, Gossypium hirsutum
  unsure (1)..(226): unsure at all n locations; Clone ID: LIB3147-017-Q1-K1-H9
cgaccaaacnccgaaaaaaaaaatattaccccctggttatttcaccccacaacgnaaanaacccccgcccttttttaaacacctggcgccccctaaaaccnaananggaaaacaaaaacagccttgcctcttcagaggaaacggtccttatcaaacgaaaagcttcactgttagcaacacttcattactacaccgctatgcatacccacaccccagcctccccctc

SEQ ID NO: 24265 - DNA, 264 bp, Gossypium hirsutum
  unsure (1)..(264): unsure at all n locations; Clone ID: LIB3147-018-Q1-K1-A10
tggagcgaagaaagggaatagtcanaaaacaacatgatacaaaaattattacaaatggccagtaacgcaaaagaggccgcattacactggtttatctataaactcccaccaacccatcagcaataaattactgacatctaaacaatcaggtagatagcacagacacatgtatcaatataccaggcggacaacacctataaggtctctagtgctctctcctgctataaaactggcagctaacgtatacatgcactcctttatcaa

SEQ ID NO: 24266 - DNA, 286 bp, Gossypium hirsutum
  Clone ID: LIB3147-018-Q1-K1-A12
acgtgtgtcttcaagaaatggatcgtcgaactgcattcgcagttgctttgattagctttgtggggaccgctgtcggtggtcaatctccggcagtctcacctactaaagatccgccggccgaggctactcctgctactgctcactatactgcccctgttagcaaacctaaatgaccggctccaactgctgcccctaccactttcccaccaacattcttcaccaccggctgcggtttcggagaagtctgtggcggtttcagccccatctaaatctgctacggcttctt

SEQ ID NO: 24267 - DNA, 347 bp, Gossypium hirsutum
  Clone ID: LIB3147-018-Q1-K1-A9
cccacgcgtccgcccacgcgtccgcccacgcgtccgcaagattgcagcagctcgtggaatggggggcatgtaatcaagacactacactttcagtggttcaactctaattaagtggactgttatttcaggacatagaccctaaactgacgggtacgtactggctgtatttagatttagactaatcattatttatgttgtgcttgtgattctgtgatgtactaaaagttttaaacctcatgaagctacctttgaagcttccgcttggtgtactgattgtagcattgccatgtcctgattggataatgttcttgataataacttgcaattatataaaaccaatgttgtgc

SEQ ID NO: 24268 - DNA, 233 bp, Gossypium hirsutum
  unsure (1)..(233): unsure at all n locations; Clone ID: LIB3147-018-Q1-K1-B10
acaggangatgcgtgggacatgaagcacggcaggctgataaaggacttcacgctccctaagctgactgttacgctgaagtacttggggggctccacgacgtgctttgagagggccagtgagccggtgagaaaactgagaacataccccgcttcctttgcctgtgaatagtgtaaagctcgcccaggatggacaagatgcccagcgtagtttacttgcattgaccctcgggtga

SEQ ID NO: 24269 - DNA, 89 bp, Gossypium hirsutum
  Clone ID: LIB3147-018-Q1-K1-B12
cgcgtcaaacccggtaacaaagaccatcatagcttcctcttatactttatttatgcgcgagctcacatgggtgctcactcaaaaaccac

SEQ ID NO: 24270 - DNA, 409 bp, Gossypium hirsutum
  unsure (1)..(409): unsure at all n locations; Clone ID: LIB3147-018-Q1-K1-C10
cccaatggggggtgcagccaactgaggcaagggtttgccagtcacaaagccataagttccgcggtgcatgtgtgagtagccacaactgtgcgatggtgtgcagggacgaaggtttctccggcggcagatgtcgaggattccgtcgccgctgcttctgcactaagctttgctaatgcaagcttgcccttagttcatattttaaggatttttcttgagtaaaagacctttatgttttttcgtgcatgcatgtcaatgtttcaataaggtatctcctaattacttctgttttgggagatcattttcgtctctttttcatgcctttaagggggttctctntgtgttctttgctgtactcgaactgcatttgcagctactttttcatctataagctccatcaaaatctgttatc

SEQ ID NO: 24271 - DNA, 359 bp, Gossypium hirsutum
  unsure (1)..(359): unsure at all n locations; Clone ID: LIB3147-018-Q1-K1-C11
tctctctactcaactccacgcaaatggccctctttctttgcgtcttattccttctcctttcgctctgcttctgcttgtgatcgctgcctgcaccagtccaaggctgcttatttctccaaagcctctgctctttcagcgggagcttgtggatacggntccttggctttaggtttaagtggtggacaccttgctgctggtgtttcttctctttacaaagatggagccggttgcggtgcctgcttccagataaggtgcaagaattcaactctgtgcagcagtgaagggactaggatcacactaactgatctcaatcataataatgaaacggaatttgttcttagcagcagagcattcatggc

SEQ ID NO: 24272 - DNA, 323 bp, Gossypium hirsutum
  Clone ID: LIB3147-018-Q1-K1-C12
gcaaaagccctgtcagactcaacgggaaatgacaaagaagcctattatgagcccttaagagaccttgtcaaaatggtcttcggctcgatattggcatctctcttgctattgacaccaaaagtactgctcgcatttaagaataacctcttttagatagaaaattaatggaaaaaaataaaaaagcttactatgttcataaagtaaatacgggtctatgattctgataaaaattacaggaacttgtttgaatgccactattttggctttgcataaaaaaaaaagagatttttgaagactaagtatccaattttttgaatttaagg

SEQ ID NO: 24273 - DNA, 420 bp, Gossypium hirsutum
  Clone ID: LIB3147-018-Q1-K1-C9
cccacgcgtccggaaattccaagagataaaccagcaggggagagtgataatagaagcagcgggttatctggggtagtcaataaggaagctaagagtagtgggactaagaatctggtgtttttcgggaaggcgtcgatggcttttgatctggaggatttgttaagggcatctgctgaggtatcggggaagggaacattcgggaccacgtataaagccactttggaaatgggagtggttgtcgcagtgaaaaggttaaaggatgtgacagcgtccgaaaaggaattcaaggagaagatggaggtagttggctccatggatcaccagaacttggtcccattaagggcctactactttagtgcagatgagaaacttctagtttatgattacatgcctgagggcagcttgtcttcacttttacat

SEQ ID NO: 24274 - DNA, 432 bp, Gossypium hirsutum
  Clone ID: LIB3147-018-Q1-K1-D11
ctaagagacgcccaaaccaggttaaaaggacttgttacgctcagtccagccagattagacggatacgccgaaagatgagggaaataatgactgcccaggcaacatcttgtgatttgaaggaactggttcaaaagttcatccctgagatgattggaaaagaaatcgagaaggcaacatctagcatctatcctttgcagaatgtgtttattcgtaaggtcaaaatcttgaaggctcccaagtttgatctcgggaagttgatggaggttcatggtgactactcagaggatgttggtgtgaaactagaaaagcctgctgatgagacaatggctgaggctcctgcagaagttgttggagcttgaacgaaaaacaatagtccatgaatgtctttttttttttatgcttctaggaagttttgctgatcattttaatttt

SEQ ID NO: 24275 - DNA, 355 bp, Gossypium hirsutum
  Clone ID: LIB3147-018-Q1-K1-D12
acggtttgccatttgccctactcatctctctctttctcataaaacctcttgctatacactatccggctacactggcaccggactccatggctactgcacaggccgtctcacttcacactgcaatccatgaggagaaacccgccgaagtcgtcaacgttgcagaaattgcaacaaacgaggaaccgcctgttgctcctgcagcctaacactgtcgatgcataaccaaatgacgcagtgcctgaagcaccatcccgagaaccccacgctccagaaactgaagccacagttgaaactgaatcaaaggaggtggttaaagagcccacggctgctactgacgagcccgaagttgacaaaa

SEQ ID NO: 24276 - DNA, 430 bp, Gossypium hirsutum
  Clone ID: LIB3147-018-Q1-K1-D9
ccgggctcacagaacacaagtatccagtctagtcctccaatcaaacgccctttttgttaactgtctcaactttatccattggccttgtttttagcaaaacaatgtctactttagttcctgatttcccaaatctttcttaatttttcttccgattttcattttcgggttttacaaatagatttcgtcttccaattttccctagaaaaagaaataaaaaaatgatgccaagtgaacagcaaagtcatgatcaacatcgggatccgttatcgagtgttatttacgagctgtcggcgctagtactgaatctcctacgatcgccaccgacgccggttccgactaagatatcggcggtgggattcgcttggctgatgctagggatatcggtttctttaatgctttgtggatcagtgactttctttttagggttcga

SEQ ID NO: 24277 - DNA, 303 bp, Gossypium hirsutum
  Clone ID: LIB3147-018-Q1-K1-E10
agaacactgaattcctggcgtctcacccgagggtcaagcaagtaaactacgctgggcttactgaccatcctgggcgagctttacactattgggaggcatagggagcgggctctgttctcagttttctcaccggctcactggccctgtcaaagcacgtcgtggagaccaccaagtacttcagcgtaacagtcagcttcgggagcgtgaagtccctcatcagcctgccgtgcttcatgtcccatgcatcaatccctgcctcggtccgcgaggagcgtggcctaaccgactacctcgtccggatat

SEQ ID NO: 24278 - DNA, 250 bp, Gossypium hirsutum
  Clone ID: LIB3147-018-Q1-K1-E11
accacgcgtccggttggctcatggaatcaaagttcttttttttttccttaagttgaaaaaggtttgatttgcatttccatctctacaattacaagaatgaccccaaagagaaggttcatagtgttgaaagatgggtggcaaattgggcaaaagaacaaaaaggaaaggaaaaaaaatgcgcattgaacgatgagttgctgtatgtttgtttccctacggagatattgagattccttaaattttccatcta

SEQ ID NO: 24279 - DNA, 386 bp, Gossypium hirsutum
  Clone ID: LIB3147-018-Q1-K1-E12
tgtgtctgtcgtgtcgacggcaaagatttttcagattttggtcagacatggtggacaacggttcatgggattccctttctgaattcaccttagctgaggttctggaaatggagaacaagtacaaggcaataggagatgaaacgcttaatgaggaattctgcaacaatctagctaccagattcagttgctcttcaaaccgtcttggaaaatctactataacatggcaacaggtccaactttttttccaagaaaaacaaatggaggtacaaactcagcaagagtcatcagcaatggccttaaagctatttgttgatctttctggtgaagattcaagcaaaccgcttgagggtcatgcaaaagcgaaaaggtacagttgaagaccttaa

SEQ ID NO: 24280 - DNA, 341 bp, Gossypium hirsutum
  unsure (1)..(341): unsure at all n locations; Clone ID: LIB3147-018-Q1-K1-E9
cccacgcgtccgnccacgcgttcgcccacgttttcgaagaaccagtatctgtgtgggaagatcgatatgaacattaaactggtcccaggcaactctgctggcactgttaccacttattatcttcgttcggaagggtcgacatgggatgaaatcgacttcgagttcttggggaacctaagcggagacccatacatagtccacaccaatgtatatacacaaggcaaaggtgacaaagagcaacagctctacctttggttcgatcccaccaaagactttcacacctacttccttctttggaaccctcaacgtattatcttctcttgttgatgggactccgatca

SEQ ID NO: 24281 - DNA, 451 bp, Gossypium hirsutum
  Clone ID: LIB3147-018-Q1-K1-F10
cacaatccaagataaggaacgcatacctgtataccagcagcgtttgatcttcgccggcagggagctcgaaaacggccgcgccttggccgatttcaacatccaaaaggagtcaactcttcacctggaactccctatgcgcggtgggatgcaaatctttacgaaaaccttgactggcaagacaatcactctcgacgtatacagctccgacacgatcgacaacgttaaagcgaacatccaagacaaggaaggcattcccccagaccaataacctctcatctttgccgaaaaacaactacgaaacggccgtacctttgccgactacaacatccagaaggagtcaactctccaccttgtacttcgtttgcgcggcgggatgcaaatcttcgttaagacgcttaccggaaagacgatcactctcgaggtcgagagctctgacacgatcgacaacgtg

SEQ ID NO: 24282 - DNA, 322 bp, Gossypium hirsutum
  Clone ID: LIB3147-018-Q1-K1-F12
cgcgtacgattccgtcttcacttaacacgttacccgcctccaaacaaacctctctcaccgccactctggcactgtctactaacccctatcttgcctttcaagtttccggcgaaattaattcataatgaatgcaaaaaggaaacgcccggatacggcttctgcttctgtgacagaacacgaacgaattgttcatgaagtaatccgaagcaagcaagacatgggaatatcgcaacaagacatgaaacgtgaaattaatcttgacagcaacctaatcgccaaatgtattaagtcactggtatctaagaatctcataaaagaagtg

SEQ ID NO: 24283 - DNA, 318 bp, Gossypium hirsutum
  Clone ID: LIB3147-018-Q1-K1-F9
gcgggcatacaaaaaatccaaccttggaaatgaatggaagaagccatttgctggtgcttaccatgccaaaagcatctggccctgaaaagataagaattgaagctaaccagcgcgaactctgttaataagaagtgtgctagagatcaattgatcaacaatgggaagaagattgcggcattcgcaccaaatgatggttgcttaaactacattgaacagaatgatgaggagttgatggccgcaattggacaaaagggtcatgctgtgagcgatatacatggtgttaggttcaaggttgtgaacgaatctgacgtttaactg

SEQ ID NO: 24284 - DNA, 296 bp, Gossypium hirsutum
  Clone ID: LIB3147-018-Q1-K1-G10
aaataccggcccgaagcacattaccaaagtaaacacacctatgtaccacgtttttatccccgatcacctatatccgtctatccgcgggccaaaatccaatattcgacccatcccgcatacaaacatcacaatctcttatgaatcacaacaatattaccaagattattttctcttaaccgcgcctgcgcttctcctactaatctatcacaaacatctactctcttacctactatactacacactctttattggctgatatgactgttcatacaccattttactaaatctgttccctg

SEQ ID NO: 24285 - DNA, 333 bp, Gossypium hirsutum
  Clone ID: LIB3147-018-Q1-K1-G11
tgcagacatacagaagggtttacgggagtcaatctctgaaattttcaagggatcatttcatggttattgtctccgatacttaactgaacagctcattagagacttgaaagggcagttttcccatgagatgaaacggctcatgattgatgacctttataatgcagctttggcacctagacctgaagccttccattcgtatatcaacagcatcaaaaaaatttcactggaagcttacaattggatcattcagagtgagccccaatattgggcaaattcatatttccagggtgctagatataaccatatggcatcaaactttttgggaaactcttt

SEQ ID NO: 24286 - DNA, 447 bp, Gossypium hirsutum
  Clone ID: LIB3147-018-Q1-K1-G9
gagaaatcgtatgaagaagctcgaagattcgtatgtgccgtcttttgagcccggatcgcctatatccggctatggaggggccaaagtcgtggattcgactcatccggaatacaaaaatggcgatctcgtgtgggggacgaccggttgggaagagtattctctcttaacggcgcctggtcttttgttcaaaattcaacacacagatttgcctcttacctactatactggacttcttggtatggctggtatgactgcttatactggtttttacgaaatctgcaccccgaagaaaggggaatatgtctatgtatcggctgcatccggagcacttggtcagctttgttgggcaaatttgcgaaattgttaggctgttatgttgttggaagtgccggaagcaaagagaaaattgatctgctgaagaataagtttgggttcgatgaggcattc

SEQ ID NO: 24287 - DNA, 187 bp, Gossypium hirsutum
  Clone ID: LIB3147-018-Q1-K1-H10
aacagggatcggcgggatgacgacaaactgtaatacgactttctatggggagatttgatacccctgcaagtacaggcccttaagtgcggtttataccaacgcggtgccctcataccatgtcttacaccctcacgctgtctactatcataccgcctcccaaatggagaaccacgccagcaacgcttct

SEQ ID NO: 24288 - DNA, 399 bp, Gossypium hirsutum
  unsure (1)..(399): unsure at all n locations; Clone ID: LIB3147-018-Q1-K1-H9
acagangaggcagggggtgatgcgtgggacatgaancacggcaggctgattagggactttacgctcccgaagctgactggtactcttagatacttggtggtctccacgacgttctttgagagggccagtgagccggttagaaaactgagaacagagcccgctccctttgcctgggaatagtgtaaagctcgcccaggatggtcaggaagcccagcgtagtttacttgcttgaccctcgggtgagacgccaggaattcagcaatcttctgggcattagcctgttgtgtcttcacccgcagagacatggttttatttcccttaaaccaaacccagcagtaaaatgggcccagaccttacctttaaccattttgcaaaaaccctacctttttatccaaactt

SEQ ID NO: 24289 - DNA, 487 bp, Gossypium hirsutum
  Clone ID: LIB3147-019-Q1-K1-A1
gacccccaattgaagcactcttgagcagcaacagaggcttcattcagatcacatatcagtagccatggtgaagtattcgaaggaacccgataatcccaccaaatcctgcaaggcaaggggctctgatcttagggttcatttcaagaacacaagagagacagctttcgccattagaaagttgccattggtaaaggctaaaaggtatttggaggatgttattgcccacaagcaagccataccgttccgacgcttttgtggtggtgttggacgtacggcacaagcaaagaacaggcattctaatggacaaggtcgctggcctgtaaaatcggctaagttcattctagatttgctgaagaatgctgagagtaatgccgaggttaagggtttagacgtcgatgcactccatatttctcacatccaggttaaccaggcccaaaaacaaaggcgtcgtacttaccgagctcatggaagaatcaacccttacatg

SEQ ID NO: 24290 - DNA, 331 bp, Gossypium hirsutum
  Clone ID: LIB3147-019-Q1-K1-A11
gcggctccggagaagtctgcggcggttccagccccatctaaatctgctacggcttcttctgctgcggctgctgctccggtgagttctccacctgctccagtacctgtgagctctcctccagccaaatcgcctcccgttgctgcaccgacgactccaccagagagctcggcctctcctccggctcctgttgctgcaccaactactgctgaggttccggccccagctccaagcatgagcaagagcaaaagcaagaaatccaagaaacaccatgctccgactccttcacctgatatgcttggacctcccgctccaccaactgggagctcctgga

SEQ ID NO: 24291 - DNA, 479 bp, Gossypium hirsutum
  Clone ID: LIB3147-019-Q1-K1-A12
gcgagaaacccttgttattaatcggcggaagcagatagcctctagccatgactttcaagcgttggaatggtggccgcaacaagcatggccgcggccatgtcaaattcatccgatgttctaactgtggcaaatgctgccccaaggataagtcaatctagaggttctttgtgaggaacatagaggaacaagctgctgatagagatgtgcaagaagcctgcgtttatgacacttatactttgcctaagctgtatgttaagatgcaatactgtgtctcgtgtgcgatccactcacacgttgagagagttcgatcccgcaccgataggaagaaacgtgatccacccgcccgcttcatcagacgcagggatgatatgccaaaggctgatcagtctggtcaagcaccacgtacaggtgttgcagttactgctcgtgcttaacgactgtgaaagctcttaagataaatattctatatgcgtatttag

SEQ ID NO: 24292 - DNA, 349 bp, Gossypium hirsutum
  Clone ID: LIB3147-019-Q1-K1-A2
cttggggacaagggagtggtggtagcaagggaggatggtaattttaacctttgcttactgaacaaggtttttagtgctgtagatacttctattttgggtctgttctgcagtttctacagtgtagagagccggaatggaacaaggtagtgtttccgggcagactggtagtagtgaagacatttgctgtttagtgtttactagaacagctttatgtttgttaatattcctttccgagttagtaatgctaccatattatgtagggcttcctcattgggcatagtaatgcatagatgttgctcaaaactacatcaactgataatattatgactactgtttcaagctcactgca

SEQ ID NO: 24293 - DNA, 268 bp, Gossypium hirsutum
  Clone ID: LIB3147-019-Q1-K1-A3
tgattcttgagaatctttactttcatgctctcttttgttctttcgagtagtgtttttttctcttgctttatatttttcattgcaccctactttttggtttttgtttaatttatttgttatgtatgtttgatgatgacgattctattattttgggttcggatggttgattgtattgggggtgtgacacgcgtaaagaccggatggttgtagagattggactgttgtacatataattacactggaataaaaacactgtgttattttttat

SEQ ID NO: 24294 - DNA, 416 bp, Gossypium hirsutum
  Clone ID: LIB3147-019-Q1-K1-A4
ttacaagctgcagtccgtgagcagacagaaatcacccagtttagccagcaggagtttgaaagacttcaaaatgaaaagattctctgtagagtttgcttcgaagaacaaatcaacatagtcctcctcccatgtagacatcatgtcctctgcagtacatgctgtgagaagtgtaaaaggtgcccaatctgccgtgtttctattgaagagcgactgccggtgtatgatgtgtagtctgaaattacctgtagaaaaaattcatgtaaagttttcaagaattgcttgtgatttttggtgaagcaagcattgagaagcaggtcaatttggtttcttggaacatgatacagttgtgtaatcgcacccaagaattgtaaataacatttggttgcatttatgaaatgaaatttagggattttgac

SEQ ID NO: 24295 - DNA, 463 bp, Gossypium hirsutum
  unsure (1)..(463): unsure at all n locations; Clone ID: LIB3147-019-Q1-K1-A5
ccgggaaggaannnccgggcgcaggccacgcgtccgttacaagaaacaatccttactctcacacaaacttttgttttctgcacaccagatttgggagcgcttattaaataagtaatgccacccaaatatccctccaagaacacaacagacaagtgtctatgatcatataaacacacattcactcatgcaggacatgcagtcataagttttataggggtcacatacaccaagactgtactgaagatcgactatatcattatgatctacctatccaaactgcttcaacaaaaaagttatgttttgtgacgaacaaaacaaacagaggacaggcttactaatccacaacaacactcgcctgcaagcttccctcaacatatatcatatgtgcaaccgaactcaattattttagctgacgtttacatccatctctgagatgaaatccatgtttttcgcatccaaatta

SEQ ID NO: 24296 - DNA, 294 bp, Gossypium hirsutum
  Clone ID: LIB3147-019-Q1-K1-A6
aacaaatcacatgtcctctcccatgtgcatcatgtcctctcgtcatgctgtgaaagtgtaaagtcccatctccggtttctatgaaagcactgcccgttgatggtatctaaattaccttaaaaaaattatgcaagtttaagaatgcttggatttttcgaacaagcttgaaagcagcaatttggttttcgaactgatcattgtgtatccacccaaaatgtaatacattggttctttataaataaattaggatttgacaaaaaaaaaaaaaggcgccgtctaagatcaacttactcc

SEQ ID NO: 24297 - DNA, 268 bp, Gossypium hirsutum
  unsure (1)..(268): unsure at all n locations; Clone ID: LIB3147-019-Q1-K1-A7
ctcacaaatttttctcttctttntctctaattgttcttgttcttctctgcaactttgtcaacgctcaactccctgcagctttccaaaaagagtacgctagatgggtaagtgatgatctttttattaatctgtagataggcttttatttctgtagggtgagcttttggtgtgcttgtattaattcatgctatgcatgtacttgtcttagatgcgaaaatcatagcatcattgtaaaacattattcagtcaacaaatcaggtttggtncc

SEQ ID NO: 24298 - DNA, 438 bp, Gossypium hirsutum
  Clone ID: LIB3147-019-Q1-K1-A8
ctttggtgcagagcagtcagatgatgactgttgtaactcctgcgaagaggttcgtgacgcatatcgacgaaaagggtgggcaatgactaatgcatacttgattgaccagcgcaaaagagaaggctttttcgaaaggataaaagagcaggacggtgaaggatgcaatgttcaaggatctcttgaagctaatagggtatgctggaaattctcattttgcacctggcaaaacttttcatcagccgaacattatctttgatgacttgatgtctgaccataaggacagttacaatataagtcacagaatcaatcgggtagcttttggtgaatactacccgggtgtggtaaatcctcttgacgggggacattggacccatgaaacctcaaatgggatgtaccagtacttcataatgctgtacccacaatatatactgacattag

SEQ ID NO: 24299 - DNA, 377 bp, Gossypium hirsutum
  Clone ID: LIB3147-019-Q1-K1-B1
tacggttggtggtgtttgttgtctttgtaaattttatgggagcagttgaattatttgaatgatgaactttgaagattattgtagggttagaaataagtcatttctgaagtgaattccttataattttcaaatgtccttgggggatatattttattctgaaaaaaaaaagaagagcaaagaaaaaaaaaaagcataaacaagaactagaaaaaaatgcaaaaaaaataaaaataatagaaaaacattattcaaacaacaaaaaaaggttttgttaacaaaaaaaaaaaaaaaaaaaaaaaaagggggggcccttttaaggggtccaatttttattccccgggtttggaaaaaaaaaatttttttatggggcccccaaa

SEQ ID NO: 24300 - DNA, 228 bp, Gossypium hirsutum
  Clone ID: LIB3147-019-Q1-K1-B11
ccgagttgttgtatgaactaagatacgagtatttttatctatttttaaagagattaggtggtctttttgggttagaattcggtccatttccggtacacattcttcattgtcattcacatggtgaagaatccatccattaaattatatttgtgagtgaatagtgaaaatatgtattggagggttgggaggggagatcaaaaaaataaactatagacttgtttttatttg

SEQ ID NO: 24301 - DNA, 485 bp, Gossypium hirsutum
  Clone ID: LIB3147-019-Q1-K1-B12
gcggtccaaggcataacccaaaaaatatatattttcatgtatagttttggcatgtgtctaattggggggtggaatttgtacaaaggaaaacatatgaagttcataacatggatttcctttatttttctttttcatgtatattataaaccaaatccttcttttgactatggtctttatttacattatccatcactcttgaaagaggaaaaaagaatgatggaatctgtggatttcaaagttaatatatataatgatgaaagatgttttcaaaaagagagaggtaaggaagaaaatggatttaaagtaattcttaactttcagtaggtctaacatataggaaatgatatgataatttgttcatgaaaaaaaatatttgtggctcctattgtgtgatataattcgcacgatgaaaaagttacatgtttgttgaggtcagttgttgtgagacggtcatgcttgttgagtatttataggttttatgacat

SEQ ID NO: 24302 - DNA, 479 bp, Gossypium hirsutum
  Clone ID: LIB3147-019-Q1-K1-B2
cccacgcgtccgcggacgcgtccgagatttgcagagtggaatcctccatgcagaggagaaagactataaaactgcttatagttatttcttcgaagcatttgaagctttcaatgctcttgaagatcctcgagctgtctttagcctcaagtatatgctgttgtgcaaaataatggtgagccaggctgatgatgttgctggtataatatcatcaaaagctgggcttcaatacgtggggcctgaacttgatgccatgaaagctgtcgctgatgcccatgcaaaacgttccctgaagcttttcgagattgctcttcgtgatttcaaggctcaactagaggaagatcctattgtccacaggcacctttcttccctctatgacactctactggagcagaatctctgcagattgattgagccattctcaagggttgagatcgctcatattgccgaactcattgaactgcctgtagaccatgtggaga

SEQ ID NO: 24303 - DNA, 464 bp, Gossypium hirsutum
  Clone ID: LIB3147-019-Q1-K1-B3
aaagcgtttgtcttagatctcagaagatggcccgtaccaagcaaactgcgcgtaagtcgactggtgggaaggctccaaggaagcaacttgctaccaaggctgcccgtaaatctgccccaaccaccggtggtgtgaagaagcctcatcgctaccgtcctggaactgttgctcttcgtgaaattcgaaagtaccagaagagtactgagcttcttatcaggaaattgcctttccagaggcttgttcgtgaaattgcccaggacttcaagactgatttgcgtttccagagccatgccgttcttgctcttcaggaagctgcagaagcataccttgtgggtctctttgaagacaccaacctgtgtgcgatccacgccaagcgtgttactataatgcccaaggacatccagttggctcgtaggatcaggggcgagcgtgcttaatttccaagtgttttgatcacttaactt

SEQ ID NO: 24304 - DNA, 341 bp, Gossypium hirsutum
  Clone ID: LIB3147-019-Q1-K1-B4
cccacgcgtccgcccagaaatgcaaggcttgtgaaaaaactgtttacttggttgaccagcttactgctgacaacaaagtttatcataaagcttgcttcaggtgccaccattgcaagggtacccttaagctaagtaattatagctcctttgagggtgtcttgtattgcaagcctcactttgatcaactatttaagatgactggcagcttggataaaagttttgaaggaactcctaaaaccgttagggtagaccgatcagctgaccaggtcaccaacagcaaattttcgggcttgtttgccggaactcaagagaaatgtgttgcttgcaagaaactgtgtacc

SEQ ID NO: 24305 - DNA, 212 bp, Gossypium hirsutum
  Clone ID: LIB3147-019-Q1-K1-B5
cccacgcgttcgtccaaacatacaagatttgccaaatcacaccatccttgcattaccagggtggtgctgaccccaagatgcatcttcctgctaactatgcctcgccaatattgcacccctaccattggtctgatgaatactcattacttccaccgtggaactgctgctcttcctcaatccagtcagcatctatcaagatgactgctcttctt

SEQ ID NO: 24306 - DNA, 471 bp, Gossypium hirsutum
  Clone ID: LIB3147-019-Q1-K1-B6
cccacgcgtccgcccacgcgtccggtgcgagcagccgcagccagcaagcagcagtagcaacagcaggagcggaagaatgtctcacaggaaatttgagcacccaaggcatggttcccttggatttcttccaaggaagcgagcctctcgtcacagaggaaaagtgaaggcattcccaaaggatgaccctaccaaaccttgcaagctcactgcctttctggggtacaaggctggtatgacacacattgtcagagaggtcgaaaaacccggatctaagcttcacaagaaggagacatgtgaagctgttacaatcattgaaacccctcctatggtgattgttggggtggttggatatgtgaagacaccacgtggccttcgctccttgaacaccgtctgggctcagcatctgagtgaggaagtcaagcgccggttctacaagcactggtgcaagtccaagaagagggctttgcaagt

SEQ ID NO: 24307 - DNA, 289 bp, Gossypium hirsutum
  Clone ID: LIB3147-019-Q1-K1-B7
atcaatgttcatgcttgcaaacaccttagtgtcgttgatgaattcgggatccgaaggatgcgggtgggtcaacatagtttatacattggggatctaaagcattctatttctctccaagcaaatttggagggcatcaagaattagagtataattattatcggtattattattagttccactgcatttccaaagggaaaaaaaagtggtcataattgtacaagtttttaggcatttgagtcttcaatctattttgtttttgtttcttaaataaaagaacaaatattgattg

SEQ ID NO: 24308 - DNA, 409 bp, Gossypium hirsutum
  unsure (1)..(409): unsure at all n locations; Clone ID: LIB3147-019-Q1-K1-B8
ccgggaccaacgcagtcctcccacccatgctatcacaaaaacaatgtttgtaaaaaaactttatacttggatgaccataatggtggtgacaacaaagtgcatcataaaacttgcttcangtaccaccattgcaagggtacccttaagctaagaaattatagctcctctaaaggtgtcttgtattgcaagcctcactttgatcaactatttactatgactagcagcttggataaaaatttagaaggaactcctaaaaccgttaaggtataccgatcaactgaccaagtcaccaacaacaaattttcgggcttgtttgccggaactcatgagaaatgtgttgcttgcaagaaaactgtgtacccaaatgaaaaagtggctggtgatggcacttcatatcacaaagcttgtt

SEQ ID NO: 24309 - DNA, 292 bp, Gossypium hirsutum
  Clone ID: LIB3147-019-Q1-K1-C1
gcgaaaaatggctagtctttaatcattagtattggttttggttaatgtcttatgggttcttggtggagtgtttaactttataaatacagttatggcttatatacatgtaaaatactgcaagctatgttttgttgattatatggtgaatgagatgatatataagatgagatgaatgtatgcaatggattttcaaagggaaaaaaaagtggtcataattgtacaagtttttaggcatttgagtcttcaatctattttgtttttgtttcttaaataaaagaacaaatattgattg

SEQ ID NO: 24310 - DNA, 467 bp, Gossypium hirsutum
  unsure (1)..(467): unsure at all n locations; Clone ID: LIB3147-019-Q1-K1-C10
atttccttcttttcttgttttacacattcctcgaaactagtcttgtgactttggccttatggggtcatttcatagcattctttagtgatgtataaattccaggaacccctggaaccttggctaccactttcctttcctttgttttgaatctggcatttgcattaagtgtcttgggctttttgatcatgcacatatctttggtggccgctaatacgactactattgaggcctatgagaagaaaaccactccaaaatggcgttatgaccttggtcggaagaaaaattttgaacaggtgtttggtacagacaagcgatactggtttattccagcttattcggatgaggatttacgacggatgccagcgctgctgggccttgaatatccatcaaagcctgattttgattcgcaggagttctaaaaggttgatataataggaacaataaanacctcctccgtgccaaacaat

SEQ ID NO: 24311 - DNA, 508 bp, Gossypium hirsutum
  Clone ID: LIB3147-019-Q1-K1-C11
cgggtcggccgacgcgtacgcccacgcgtccgggcaacctaaggctcatcggtgctacgatcgagctgaagatgttatccgaggttgttttgaggggaacccatttaagaccgttccaggaccttttaagctcttttggcagtgcatgcgttctaaacctggggaggaaccaacagagccatacacctatttgcagctggatcccccaaagagggaggtggagcttgaatgaaatgcccttttttgcactttcttttagattttgattgttgctgttactggaggacacttttcatatcagtcatctacgagaaaggtagatgttctgaatgtcactgatataaggctctcttggcaataagtaggagtgtgtgaacaaagaattttagaagtattgcagtgactattatctattcaaatgctggttttctctcatttgcaatacacagttatttattctttgttgaatggtattgtccttttactggaaaatcgatttgttccattt

SEQ ID NO: 24312 - DNA, 490 bp, Gossypium hirsutum
  Clone ID: LIB3147-019-Q1-K1-C12
cgtacgccacgcgtccggttgatttggatgctctccttgatatgtccactgatgagcttgtcaatgtcgttcctgcccgtgctcgcagaaggttccagaggggtctcaagagaaagcccatggctttgatcaagaaacttcgcaaggcgaaaagggaggctccaccaggtgagaagccagaaccagtcagaacccacctccgaaatatgatcatcgtacccgaaatgattggtagcattatcggtgtgtacaatggcaagacattcaatcaggttgagatcaagcccgaaatgatcagccattaccttgctgagttctctatttcgtacaagccagttaagcacgggagacccggtatcggtgctactcattcttcaaggttcatccctctgaagtgaagccctttcatgctgcttggagcctcaatttggggtttactatttgagagttaaattttgtttgttgcactcctagtaatgaaaatttcaca

SEQ ID NO: 24313 - DNA, 327 bp, Gossypium hirsutum
  unsure (1)..(327): unsure at all n locations; Clone ID: LIB3147-019-Q1-K1-C2
ggcttctgaactggctgcctttccagtttgccactccctttttatcatttttctaattttcagctctctttctgtttaggttaaaatttttttcttggggaaatctttttgtattttcagggtgaatcactaaaagggttaatgtatttattataaatatgttatatagcgttgctgaaaaataaaaaagacattgcagaggggtttagttgaaaacccaacattttcttctctaaataataaaaattggactgaaatatccccanngaaaaaaaaacaaaaaaaaaaaataacaagaacataaataaaaaaaaaagtgataaaaac

SEQ ID NO: 24314 - DNA, 489 bp, Gossypium hirsutum
  Clone ID: LIB3147-019-Q1-K1-C3
ctgcgaagtttacctttatccatgggcaatgagtttcgatttattgggggtacccgtattcatagggtcttttattttcgtgcttatcctaattgttggtttaatttatgcatggcgaaaaggagcattggaatggtcttagttcctgaatattcagataataaaaagaaagaaaaaagtcaaaataataataacattgagtatgaattccatcgaatttcccttacttgatcgaacaacccaaaattcagttatttcaactacattaaatgatctttcaaattggtcaagactctccagtttatggccgcttctttatggtaccagttgttgctttattgaatttgcttcattaataggctcacgcttcgactttgatcgttatgggctggtaccaagatcgagtcctagacaggcagacctaattttaacagctggaacagtaacaatgaaaatggcgccctctttagtgagattatatgaacaaat

SEQ ID NO: 24315 - DNA, 437 bp, Gossypium hirsutum
  unsure (1)..(437): unsure at all n locations; Clone ID: LIB3147-019-Q1-K1-C4
ttctataatcatattgagcagtaatagacatttatattgcaagaccttccactcaagaaggagcttcatcagcgaagccggtgcctacaaaggggagagaatcaatgctttccactctgacgactccgcaaaaggagaacggagggtcttctaaagttattagtatggagacaagaatgctaaagctgctccatcttattctggcttgaaaagtgatgaaagacctgacagaagaaaggagctctccaagaaactggaatgaaaattcaatggaagggaagccgaaaggaaaaatctccaaacaaaatcaaaggataacagatacgcatacatcaaaaaattaaggcatacccttaattttaaagctacaccactgtcttgtttttatcatggacagagaacatcacatagtnctctcgaatagatangtttcaaga

SEQ ID NO: 24316 - DNA, 401 bp, Gossypium hirsutum
  Clone ID: LIB3147-019-Q1-K1-C5
ctcgtcgccagtccctgccaatttcagccaatagtaaaatccactcacagtcaccaagggcgcggagactggttcatgcagggaaggaagggagcaaaagcgacagaccactgtcatccagagacagaaatgctaaggcgactcaagtagagtggaggaggtgatcttattgagatttgaggagttgttggcactattaggttcaagattcatatgctttgtggtgtaaattaatagaacttgctttgaaactgaaaccgggtcgataggatgtgtgcgcgggttgagtgcctctgaaaattcaatgtttctcagtgtttgtgagtgaatttgagtgtaaatcaatagattttgaactttcaaacatgccgcaaaataatcatcgttgtgataaattgctt

SEQ ID NO: 24317 - DNA, 454 bp, Gossypium hirsutum
  Clone ID: LIB3147-019-Q1-K1-C6
attctgcatcatttcttattagtgcatttacaaccttgctgatgctgccctgtataggtgtggccatgaaactcatggatatatcaggcaggaggcggctgctactcaccacgatcccggtgcttatagtgtcactgatcattctagtttttagtgaacttgtggatttgggcacggttgtgaatgctgccatctcaactgcatgtgttattgtttacttctgctgctttgtgatgggctatggaccaataccaaatatcctctgctctgagatctttccaacaagggtccgggggctttgtattgcaatctgtgctttggtttattggatcggagacatcattgttacttacacactgccagtgatgctgagttctataggcctagcgggcatcttcgggatatatgctgttgtatgtctgatatcgtgggtgtttgtgttcttgaaagtacc

SEQ ID NO: 24318 - DNA, 470 bp, Gossypium hirsutum
  Clone ID: LIB3147-019-Q1-K1-C7
cggtttttctttatccatgggcaatgagtttcgatgtattgggggtacccgtattcatagaagctttcattttcgtgcttatcctaattgttggtttagtttatgcatggcgaaaaggagcattggaatggtcttagttcctgaatattcagataataaaaagaaagaaaaaagtcaaaataataataacattgagtatgaattccatcgaatttcccttacttgatcgaacaacccaaaattcagttatttcaactacattaaatgatctttcaaattggtcaagactctccagtttatggccgcttctttatggtaccagttgttgctttattgaatttgcttcattaataggctcacgcttcgactttgatcgttatgggctggtaccaagatcgagtcctagacaggcagacctaattttaacagctggaacagtaacaatgaaaatggcgccctctttagtgaga

SEQ ID NO: 24319 - DNA, 454 bp, Gossypium hirsutum
  Clone ID: LIB3147-019-Q1-K1-C8
cccacgcgtccgaaaacatttcagagtaattacaatcaattgaaaccttccagtcaggaacggtctccatcagcaaagccggtgcctacaaaggggagagaatcaaggctttccactttgacgactccgcaaaaggagaacggagggtcttctaaagttagtagtatggagaaaagaatgctaaggctgctccatcttattctggcttgaaaagtgatgaaagacctgagagaagaaaggagctctccaagaaactggaaggaaaatccaatggaagggaagccgaaaggaaaaatctccagacaaaatcaaaggataacagagacgcagagatcaaaaaattaaggcagagccttaattttaaagctacaccactgcctggtttttatcatggacagagaacatcaaaaagtcctctcgataagataagttccaagagtgacatccattggca

SEQ ID NO: 24320 - DNA, 419 bp, Gossypium hirsutum
  Clone ID: LIB3147-019-Q1-K1-C9
aaaaaaaaaaaaaaaaaaaaaaaaaacaaaaaaatttaacaataaaaaaaaaaaaaaaaaagaaaaatttaatataaaataaaaaccactttacaaaacaaattcttgcttgcctttttaatgtttccaacttactttcccttacttatctcgggaattccttttttttattctcccttaaaccaatcccactgccccatcttaaccaccccctatctacaaaaaccctttccaaacccaaattaatttccttcccttactatccctttttccctactttccttatcattaaaaagccccactcctttctcctttcccaataattcccctcactaattcccaatttacaccccccttaatgggacaaattaacccctaccttttttattttactttcaaattattccccttccttcccc

SEQ ID NO: 24321 - DNA, 394 bp, Gossypium hirsutum
  Clone ID: LIB3147-019-Q1-K1-D1
gaaacttggaagttgatacagttcaagcatttggcatcccttgtttcaactgtgtaacaatcttattaaaattaatgtaagaagagccatcagggcttgtagcttaaaaaaaaaaaaaaaaaaaaaaaaaaaaaaaaaaaaaaaaaaaaaaaaaaaaaaaaaaaaaaaaaaaaaaaaagaaaaaaaaataataaaaaaaaaaataaaaaaaaaacaaatgtcccttaataaaatagaacaaaccaaaattaaagatataaaaactacatggggggctcttttaaattgaccaagactctccaatttatggccgattaataatggtatcagatggaacactaattgaatttgcttgattaataagttaaacgcttcgactttgataaatatgggc

SEQ ID NO: 24322 - DNA, 490 bp, Gossypium hirsutum
  Clone ID: LIB3147-019-Q1-K1-D10
ggcgaagatgggtttttcgtcgacggtgatgccaccgtcgtgttccaggacgacgaagcgagtgatgatagggtcaccgggttataccgaccctcattacttgagaaccgggttggcttccaaaaagaacgatgtttacagcttgggtgttattattttagagcttgttactgggatggaagctttttgtcccgaaaggggacaattattgacgtcgataatggcgcccaatttaaaagccattagtgaagttgggacggcggtcgaagtggcggagctggtggatccacgtttgggtggagaatatgatttggatgaagctaaggctatggtttcaattgctgggctttgccttcaccagtcgccgactgttaggccatcagcttcgcaaatcatgcaaataatgaaggagaaaatgggttccattgacttactcttgtcgcccgccaaagattgccgccataaataactaattgatggtgacaaacat

SEQ ID NO: 24323 - DNA, 503 bp, Gossypium hirsutum
  Clone ID: LIB3147-019-Q1-K1-D12
gtcgagcgcgcgtacgcggacgcgtgggcgacgagccgtttctcacttcagcgaccagacagtcagagatcctccggatgaaacaacaatgacaaagagaaccaagaaggctggaattgttggaaaatatggtactcgttatggtgccagtttgaggaagcaaattaagaagatggaggttagtcaacacagcaagtacttctgtgagttctgtggaaagtatgcggtggagagaaaagctgtcggtatctggggatgcaaggattgcgggaaagtcaaagcaggcggtgcttatactttgaacactgctagcgctgtgactgtgaggagtaccatcaggaggctgagggagcaaactgagagctgagccaccactggtgattgatttatattctactttcataggatgttgttttgcatgttttagctatgagacttaattgagacctttttttgacaatgatgttcgtgctatgtgttctcatttttttatctgagtctgg

SEQ ID NO: 24324 - DNA, 463 bp, Gossypium hirsutum
  Clone ID: LIB3147-019-Q1-K1-D2
gccatactcatttcttccttcaatggcagcagaaaagttaagaactgcagctgaccagattaaaagagtccttggtgactatgatgctatccatgtccgccgaggtgataaaataaaaacaaggaaggataggtatggggttaaaaggagcctacatcctcatttggatagggacacccgtgcagaatttatccttcacagaattcagaagtgggtaccatctggacgaactctttttattgcttcaaatgagaggacacctggatttttttcgccgctttctgtcaggtacaaattggcttattcatcaaattatagtcatattttggatcctttgattcataacaattaccagttattcatgattgagaggcttatcttgatgggagccaaaacattcattaagactttcaaggaagatgatacagatctcagtctaaccgatgacccaaagaagaacact

SEQ ID NO: 24325 - DNA, 422 bp, Gossypium hirsutum
  unsure (1)..(422): unsure at all n locations; Clone ID: LIB3147-019-Q1-K1-D3
ggacaatagatatctcttgtccttccatgatggactggttcttcggtggtttacagttccagttagagcaccatttgttccccaggttgccgcggtgccatttgaggaaggtttcccctctggtgagggaactctgcaagaagcacaaattgccttaccggagtctgtctttctgggaggcgaataaatcaacgattaggactctgaggactgccgccttgcaagctcgagacttaactaaccctgccccaaagaatttgttgtgggaagcttttaatacccacggctgagttaaaattttttttggcttggcgccggcctagatttactgctttttagaccgtcagattttaaattgctctgcatttcaatacggtgttcagttattctatcttaattntatatgatttttgtttttgttg

SEQ ID NO: 24326 - DNA, 479 bp, Gossypium hirsutum
  Clone ID: LIB3147-019-Q1-K1-D4
cccacgcgtccgagagtatgaaaatagtaattgagaggatgaagctaaagaaagtatcgttgagatggagacagttgtatgaggcaaaattgaaggatgttcaggaggccgagaacaaagcaattgaccggcttaaacaattatacaagaaagaagatgctcgaaaacaaagtcggcaggttcagctttgcacaaaggttccaccttcaagcaaaagaagcttttttgctggaagtggacctggttacaatatgtccaatgttaagagcaacataatgaagaaagcgaagatagatcttatgaagagccaggaagtgaaaaacctcgcagccatgaagaaaaaagcagtgcaaagtcatcatagtggtaccaccataacgaaatcaagtggattttgcggaaagaattcagcttcgacatcaaagcatagcaaaccattagagaggagattctagaagaagcagtttgtaaaaatttaa

SEQ ID NO: 24327 - DNA, 265 bp, Gossypium hirsutum
  Clone ID: LIB3147-019-Q1-K1-D5
gataaaaggaactcattgctggaagccatgaaggtgtgcttggaaggtggcttacacgggagggtttcaaatataagaggggtatgtcaagatcccatatcagggcctaatatcaaatactgcaacctctctgtactaacatataataaactcaccaatgtgcctcttgctgtgcacatgctatacttactgtgaatactttgggtgatagctgctttcgttctagagatctaactaaccgtgcctcatataataaatccagcca

SEQ ID NO: 24328 - DNA, 469 bp, Gossypium hirsutum
  unsure (1)..(469): unsure at all n locations; Clone ID: LIB3147-019-Q1-K1-D6
accacgcgtccgaatcaattgagctccctctaatgaaccccgagcttttccttagagttgggggtaaacctcccaagggtgtcctcctttatggacctcctggtactggcaagacattattagccagagcaatagcaagcaatattgatgctaactttttaaaggtcgtttcaagtgcaataattgacaaatacattggagaaagtgcgaggctgataagagaaatgtttggatatgctcgtgatcaccaaccttgcatcatctttatggatgagattgatgcaatcggtggacgccgatttagtgaaggaacaagcgctgaccgtcaaatacagagaactctgatggagttacttaatcagcttgatggatttgatcagcttggaaaggttaaaatgatcatggctacaaaccgacctgatgtacttgaccctgcacttcttcgtcctgngcggctatatagaaaaat

SEQ ID NO: 24329 - DNA, 119 bp, Gossypium hirsutum
  Clone ID: LIB3147-019-Q1-K1-D7
caaactataatggtctagtgtggttacgaggttttcctgtttttctatgtattaatgcgagggatatgctatccaagaattcgaagtctacttaaaaccatatacaagaggcttttttt

SEQ ID NO: 24330 - DNA, 463 bp, Gossypium hirsutum
  Clone ID: LIB3147-019-Q1-K1-D8
ggccaaggcagtcaaaaaccaggtgacagacaactactacaggccggatttaacaaaagctggcctagcaaggttgagtgctgtgaaccgaagtctgaaggttgccaaatccggtgtcaagaagaggaacagacaagcatcgaggatccatggcaggaagtgagcttttttacacaacttcacaatcattttgctgcaattttcgttgtttccgatactttttcatccttgtttcgtggttttagcttgttggtgtattttataactagattttgaaacaaaaaaaaagtgagaatcatggtggtttcgagttttgtttttcggactataatatcctaagtttgataaacaaaactcgaaaccaccatgattctcactttttcatccttgtttcgaggatttagcttgttggtgtattttataactagattttgaaacaaaaaaaagtgagaatcatggtggt

SEQ ID NO: 24331 - DNA, 510 bp, Gossypium hirsutum
  Clone ID: LIB3147-019-Q1-K1-D9
gggtcggccgcgcgtgcgcccacgcgtccgggtgggatactggcctgcctttctttttagtcacttgagaagccatgggaggtggtacaatttggaggagaaattgtgaacactagatcctcaggattccacacatcaacacaaatgggcagtggtcattttgcagaagaaggctttagaaaagcagcttatttcaggaacttactgacagttgattgggacaataatttggtcccattgacaaacattcatttaaaggctgatcgtgccaattgttacgacatcagacaaggaagaaaccgtgtttggggaacttacttttattatggaggccctggaaggaatgtaagatgtccttaactatttcatcttttaaccctttaattttttttctctctttttcttttaccccaatttttctgtcccaggtcttaataaggtttgggttattcttagatttttttttttttctttgcttttggcctcgcaagtaatgcattttttggtccc

SEQ ID NO: 24332 - DNA, 504 bp, Gossypium hirsutum
  Clone ID: LIB3147-019-Q1-K1-E1
ggtcgccgcgcacgcgtccgcccacgcgtccggttttaaacaaatagttctaaaaaaagaaagaagaagaagaaagcaagggggggggaagatgggtcttccatgcactatggctctttggtttcagcttctacttttgatgtgtggcagtgggatacatggtgtgaagaatttgagggaaaaacaaggggatgctcaacttgttagaaaggtggaggataaatattctcttgtttctaatatagcacatcctgcagctgaggagtcatcttctcaagttgctaagcaactgggggatatatattctagtttttctgtgttggtggacaaaagtactaagttgtcttctgatcaacttgctaaggagctggaggataaatattctagaattgctgcctggaaaccttttgttgacaaaactccccaatcatcttctcaacttgctaaggagctggaggataaatattctagaattgctgcctggaaaccttttgttgacaaaac

SEQ ID NO: 24333 - DNA, 257 bp, Gossypium hirsutum
  Clone ID: LIB3147-019-Q1-K1-E10
cccacgcgtccgcccacgcgttctcccacgcgtctgtccacgcgtccgggttagtttgtagtaagtatggagtttgggttatgtaattggtcattttaatggactgttaacatttaatttaatttttaaaaaaaataatttatagtataaaaagaatttaaaattatattttaaaaaaaataaaaaataaatgtttttttgtaaaaaagataaaaaattaatttgcttgtttttagtaaaataaaaatttttttttt

SEQ ID NO: 24334 - DNA, 491 bp, Gossypium hirsutum
  Clone ID: LIB3147-019-Q1-K1-E11
acttgccttatcttgtaaaagtatttgaggggcattcagtgaaagttgtaccaattttggggggtgctcttagtgcggaaaatgaagcaatgtacggaaagttgttggccaaatatatagatgatcctcaaaatttcttctcagtatcatcagatttttgtcactggggttctcggttcaactacatacactatgacaagaagtatggggccatacataaatcaatagaagccttagacaagatgggcatggatataatagaaacaggagatgcagtcgccttcaaggaatatctgtcagagtatgacaacactatctgtggacgccatccaatcagtgttttccttcatatgctaaggaacagttcaacaagaataaagatcaagttcctccgttacgagcaatcaagtcagtgcaaaactacgagagacagtagtgtaagttatgcatcttcagcagcaaaggtggatgcttgaagatgtgaaatacat

SEQ ID NO: 24335 - DNA, 112 bp, Gossypium hirsutum
  Clone ID: LIB3147-019-Q1-K1-E2
aacgttaacatcattgatattgatcctaaaggtggtatgataatcacatcgaacggccaaggggagctggaccaggtggccggaaggtttgcagttgccttctgagtgactt

SEQ ID NO: 24336 - DNA, 382 bp, Gossypium hirsutum
  Clone ID: LIB3147-019-Q1-K1-E3
cccacgcgtccgcccacgcgtccgcccacgcgtccgttcacgcgtccgcaaatgcctaacctgcgggtaatatgaagttatttattatagactaaaaaaaaaaaaaaaaaaaaaaaaaaaaaaaaaaaaaaaaaaaaaaaaaaaaaaaaaaaagggcggccaaaaaaaaggaaagaaaaataaagaccaaaaaaaagggaggggggcgctctaaaataatgaaacttaaaataaactcacatgcaagtgtttattcattttaaatgattggaaaaaccaaaattaaacgcactttatttaaaaaggttgaaatggaaaaaaccgtggcgtggctaaaaaaataaaatgtaagaaaaaaacccctttccaaacagggggtaaa

SEQ ID NO: 24337 - DNA, 359 bp, Gossypium hirsutum
  Clone ID: LIB3147-019-Q1-K1-E4
cccacgcgtccggtaaaactcatgaatggagatattttgtacttgagggaagcaggcagggcgacgttcattgtgacagttgaacttgctgcagcaaatggtccagattccagaacctaactgactttgttggatatgatttgacaatggtgctgtacagttaacgagaagtttgggtgtttgacaatgtaatttgcaaaagcctgtgggttttatttgttgaatgagttgcactttcataagatgtctgttcttacaaggctgcagtaaaaggtgctcattaagttttgtgaacttattgttgagtgttgccaggccgactggtacttgggaaattgtaacatgtaattgtttcagtg

SEQ ID NO: 24338 - DNA, 478 bp, Gossypium hirsutum
  Clone ID: LIB3147-019-Q1-K1-E5
cagagatctccgtctccacaggaatggctaccaagcagccaaatactggcctctttgtgggactgaacaagggccatgttgtaaccaagaaggagttggctccacgtccctctaatcggaaaggaaaaactagcaaaagagtccattttgtgaggaacttgattagggaagttgctggttttgcaccatatgagaagaggattactgaacttctgaaagttggtaaggacaaacgagcgctcaaggttgctaaaagaaagttgggaactcacaaaagggcaaagaagaagcgtgaggagatgtctagtgtgctccgcaagatgagggctcaccctggaggtggagaaaagaagaagtgaagctctctggtgacaagtcaccttgatgatttcattagagaactttgtttagcatatatttcaacttattgggttgagactgaaaactatgcactgaatctcgtttgttaatttataat

SEQ ID NO: 24339 - DNA, 412 bp, Gossypium hirsutum
  Clone ID: LIB3147-019-Q1-K1-E6
cttagtacaaggacctccatggtatttttaccaatgattttcataatgttgaaactgtggggttcctgaacattggcagaaaacattgagaagatcatacaaaaggaatagaaaaaaaaagtcctctagctagctgtatagccaaaaaaccatacccaaaaactgcagcaatatcatcatcatatgatcattatgatcatcatcatgatgaatacatactacttacaatgaattaaagatacatataaatgtataggtaaaggacagtaggttctttttctctgtgtatgttggaccatacagtaaaattagacccagtaataactctcttttttttattacctgatactgtaatattatttcagtttaccctttgctcgaaattgtaaacaatcctaatttcgtggttttt

SEQ ID NO: 24340 - DNA, 436 bp, Gossypium hirsutum
  Clone ID: LIB3147-019-Q1-K1-E7
ctaccattaccggcgtttccgtcaccgtcggctatctctccgggataaaaccaggattaagagtgccttcaatggtgacaggagggttgattgggttaatgggtggatttatgtacgcgtaccagaactcagcgggtcgactcatgggatttttccctaatgatggcgaggtcgctcgataccaaaaacgtggactcaaaaactagccatttctctctttttctattctcgtctattcacttttatgtttttaggacaatttgaataatcttcattgctgtctttgatttcctgttgttcatttcaaggcatttgtattgctgcttaaaatatgacttatatgggtctaagatcccactgaaatgaggttgtctttgaataactgttagaaggcaccaaccttttgatgcaattgattgtttgcagcattaaaatg

SEQ ID NO: 24341 - DNA, 397 bp, Gossypium hirsutum
  unsure (1)..(397): unsure at all n locations; Clone ID: LIB3147-019-Q1-K1-E8
ctttgtgtgagttcctttaagcaattagccaagatgcagaacgaagagggtcaaaacatggggctttacatccccaggaagtgttccgccactaacaggctcatcacctctaaggatcacgcttccgtccaaatcaacgtgggacacttggatgagcttggcagatacactggcacattctccacttttgctctttgtggatttgtccgtgcccagggtgatgctgacagtgctctcgacaggctttggcagaagaagaaagctgaagtccgacagcagtagttggatacctttttaccctagtctatctccgagcttgggaatgaaaaatctcatggcagtgactattatgttctangtcttttcaaagtaaactatgtcaaaattaatatttttg

SEQ ID NO: 24342 - DNA, 494 bp, Gossypium hirsutum
  Clone ID: LIB3147-019-Q1-K1-E9
cccacgcgtccgcggacgcgtgggaaaaatatggatccaaatgatcaacaaaatgagaaggcaggggggcagcttgtcttggaagccttgtacaaacctttcaaggaggatgagataccaaaagacgttgacgactcaattatggtacaaaaggctccagaaggaacacctgcaggtggaggtttacttgtagttattgtgcatgaagctgaagatatcgaagggaagtaccacacaaacccacatgtgcggctgttattcagaggggaggagagaaaaaccaagcgtgtaaagaaaagcagagatccgagatgggaagaagaatttcagtttatggtggatgaaccacccacgaattataaaattcacattgaagcgttcagtacatcctccaggatagggctactgcatcccaaggaatctttgggttatgttactataagcctagctgatgttgtgaataacagaagaatcaatgaaaagtatcatctgat

SEQ ID NO: 24343 - DNA, 486 bp, Gossypium hirsutum
  Clone ID: LIB3147-019-Q1-K1-F1
ctaatagcagatcccagcaagagccactctctctaccttaagaatcgccatggactacgcttctcgaagaagtcaaggaggcctattcgaaggtctctacagagtcatcatgcgccgtaactctgtctacgtcacatttgtcatcgccggcgctttcctcggagaacgggctgtggattatggagttcataagctctgggaatacaacaatgttgggaaacgatacaaagacatttctgtgctaggacagaggcaatcagaggaatgaactcatccttttctttctctttgtggatgttttgaagtttttatttgaggaatgggtatgagcatatatctatgatgtagcaatgctcattgttgcaataaaatgtcacttttttttttttgggggggggaggggaaacgtacatctttattaacaatgagtcgattgattgtctttgaaaatattgaatgattcagaatcgcggattatatgcaatg

SEQ ID NO: 24344 - DNA, 492 bp, Gossypium hirsutum
  Clone ID: LIB3147-019-Q1-K1-F10
cccacgcgtccgcggaactctgagattcctcacgaaggcccattctgtgatctcatgtggggtgatcctgaagatattgaaacatgggcagtcagtccacgcggagcaggttggctatttgggtccagggtcacatcggagttcaaccacataaataatctcgatcttgtttgtcgagcccaccaactcgtgcaagaaggccttaagtatatgtttgaagataaaggccttgtaactgtgtggtctgcaccaaattattgttaccgttgtgggaatgtagcttctatattgagcttcaatgagaatatggagagaaaagtgaagtatttcactgaaacagaagagaataatcagatgagagggccgaggaccggagtcccgtatttcttgtaatcgaaaagagataacatactgcagtacttgtaatattatccaagcatttgattattgaaagaaggtgtcaaaggaggaagccttgaaatacataaaatg

SEQ ID NO: 24345 - DNA, 129 bp, Gossypium hirsutum
  Clone ID: LIB3147-019-Q1-K1-F11
cccacgcgtccgcccacgcgtccggtcgcaaataagcctttaggaaagtgcctattttcttgatggtcttaatgtaacatgttaagctaagtaaaccttctgtttggaataaaagtttggtgatttcgt

SEQ ID NO: 24346 - DNA, 438 bp, Gossypium hirsutum
  unsure (1)..(438): unsure at all n locations; Clone ID: LIB3147-019-Q1-K1-F12
gtcttttaatccatcgctcacaaaattatgggtttgaaggaggaattcgaggagcatgcggaggaagttaagaccctcccggccgccccttcgaacgatgacatgctcattctctatggactgtacaagcaagccactgttggaccagtgaataccggccgtcctggaatgttcaacatgagggaaaggtacaagtgggatgcatggaaggctgttgaagggaaatcaaaggaggaagcaatgggggattatatcaccaaagtaaaacaactgtttgaggctgctggaagttcttgatgtgtgtgtgtatggccaatgaaaatggtgtaatttcaagcccttgtttgttacttggggttttcattactatgaataaattatgtactctttttctattgctatatgttatntatagtagaaactccttgatttactttt

SEQ ID NO: 24347 - DNA, 361 bp, Gossypium hirsutum
  Clone ID: LIB3147-019-Q1-K1-F2
gctagaaaatcagggcagaaggttattggagagcccgtggtttctggattggtcctcaatgagtctgggctttgggatcctgacttcgtcactgcagcaaagtatgtcatgagtcctcctataagggaatcaggacatgacaaggctctgcaagctgccctttcaactggagttctgcagctggtaggaactgatcattgtacttttaattctactcaaaaagctcttggcattgatgatttccggaaaattcccaatggtgtcaatgggattgacgagaggatgcacctagtttgggatacaatggtggaatctggccaaatttccgtcactgattttgtacggattacaagcactgaat

SEQ ID NO: 24348 - DNA, 88 bp, Gossypium hirsutum
  Clone ID: LIB3147-019-Q1-K1-F3
cccacgcgtccgtttaaattctgtatgaattcaatgtatcctatgcttttatttgtgttctaatgaatataagtaagtatgatttcgt

SEQ ID NO: 24349 - DNA, 489 bp, Gossypium hirsutum
  unsure (1)..(489): unsure at all n locations; Clone ID: LIB3147-019-Q1-K1-F4
cttcactccacatttcacactctttttcaactttctcttcttctctttgttttaaagaggggcgtgggagttttagccaaagaaaactccatggctaaacttgttgctactttcttcttggctctcattgccatctccatggttcaaactttggttatggcatcacatggacatggtggtcaccattatgataacaaacgttatggacctggaagtctcaagccttaccaatgtccatctcagtgcacaaggaggtgtagccagacacagtaccataaaccatgcatgttcttctgtcagaaatgttgcaggacatgcctttgtgttcctccagggtattatgggaacaaacaagtttgcccttgctacaacaactggaaaaccaangaaggagggccccaatgcccttaaattactcanaagaagaccctnttttttttacaattatatccctataaanttcctatttgaaattcaagtcatttaagc

SEQ ID NO: 24350 - DNA, 402 bp, Gossypium hirsutum
  unsure (1)..(402): unsure at all n locations; Clone ID: LIB3147-019-Q1-K1-F5
cccacgcgtccgaattccactaaatcctctatattttaatttttactttcgagggcatgttgagaactccataatttcttgtaaaaatttttggtatcggtttgtataaaattactagggatcagtgtagattcttgtaatagtttataggcacccctcactaagaagttccctgatggctcccctcttcacacttgaaaatcgtcatagatcgatttcgccaacgggatttgtaggattttcctagcaatattcgcgtcaaaggtattgacaatcaacttattattccaagttcaaaaaaaaaaatnaaaacaagaagacgtttttacaacatgtattttagaaaaaaaaatgctcgtggttgctataacaaacaatattttctttttaaggggggggggg

SEQ ID NO: 24351 - DNA, 479 bp, Gossypium hirsutum
  Clone ID: LIB3147-019-Q1-K1-F6
aggttaacgtctcaagcggggttgtcgagactcatattaacaacgcattatatcaaaagagacctctggcaatttatcaagcggacaaggtgttgttgcctgaagagttttttgaagctaaatccccagcggctgcaccttcaccggcgacaaagaaatcatcgacagggtctaaatcgaactcaagagcatcagcaaccgcagatgagccagcttctgctgataattcacgctcaaccggaaggaatatggggctgggattcgttgttgggcttgcattggcttgcatgggatttctctcatgagcggatatatatgaagttggtctgcattttttactataaatcttcgtttttcaaatggatcgataagggtctgattggtcgttgaacatattcttgttatccacattatttgtatatccagaattttttgtcgattttgcttctgcgcgctgctagatgttaataataatatat

SEQ ID NO: 24352 - DNA, 292 bp, Gossypium hirsutum
  Clone ID: LIB3147-019-Q1-K1-F7
aaataaggggtttttttatgtatgatgtcgtcaatcttatattccctttataatattctccaaaaaaaaaaacattttttttccttaatctctgacaaataaaatatcgacctgtttttaatggaactaaatatcataagcacccacccatttttattttataatataagtcacgcacattcaatttatttctgggaattttattcatacaaccgctaacaattacgattttaccaaatttattaccattgctaaaaattgaagttttgcctgctatttttattattaaaaa

SEQ ID NO: 24353 - DNA, 378 bp, Gossypium hirsutum
  Clone ID: LIB3147-019-Q1-K1-F9
acgcctgggtcgatccaaagccaaatgtgtcctcttacaataactaattaaaagcgaaagcaaggtaccagtggcttagacccacatcttccaataatttcttcatcagattgtgtgttgcactcttgcgtgtgaagctttatgttggatatttgtgaaaaaaaataattgggttgttctgaatatctatgattatgtgaccactatcattacactagaatggcaaagaactgtcggtgttcgtagttatctcatcttgtaacatctctttcagcactcaatttcatttaagggtatgcattttctttttcaataacacgaaacacatcaaaaatcgattcacgttttctagattcccaaaaatgaattttgtttaat

SEQ ID NO: 24354 - DNA, 482 bp, Gossypium hirsutum
  Clone ID: LIB3147-019-Q1-K1-G1
cccacgcgtccgcccacgcgtccgcggaagagctttcctttttttctctctatattttctcatgtgcttttccaccgccgtcgatctcgatccttatccccgttttcaaaaaagctccaaaaagatggccaatgctgcatcgggaatggctgtgcatgatgattgcaagttgaagttcttggaacttaaggcaaaaagaacccaccgctttattgttttcaaaatcgaggagaagcagaagcaagttattgtggagaagcttggtgagccaaccgagagctatgaggattttactaaatgtcttcccgctgatgaatgtcgttatgctgtgtacgattttgattttctaacggccgagaacgtcccaaagagcagaatctttttcattgcatggtctcccgatacatcaaggatcaggagcaaaatgatatacgctagctccaaagacagattcaagcgagaactggatggaatccaagtgg

SEQ ID NO: 24355 - DNA, 373 bp, Gossypium hirsutum
  Clone ID: LIB3147-019-Q1-K1-G10
atcgagcgttctttgatggctttggctcgcaaatacaaccaagacaagatgatttgccgcaagtgttatgctcgtgttgatccaagagccgtgaactgccgcaagaagaagtgtggtcacagcaatcagttgaggccgaagaagaagatcaagtagatactgactggtgttatcctgtctgctttaaaagaaattgaatgtcagacgaggaaaatatttccatttggttcttttgctattattctattttgttaagattttgttttgggttccggatttgatgttccaatctatgtttggacaatcttatgtgttttgtcttggaaattttaagaacactgttttagaaatattatttaaaaatgttagtgtt

SEQ ID NO: 24356 - DNA, 465 bp, Gossypium hirsutum
  Clone ID: LIB3147-019-Q1-K1-G11
gcgtccgcccacgcgtccggagaaagtcaatagaaagttacctgatggtcatacaaagatcgaagatgggtggctttaagagtgaggcaataataagttttgaagagatccctgccctgctgaataccccaaaagaggaaccagactctcaaaatgacaaggttgctgataatattaaaagcaaaatcataaatgtagacaagatattggtgcccaaagaagatctgcaacaggaagtaggcactggaaagttaccaaaagctgtagatggttccgctggtagcacgagaatggaatttgatgctattgagaaggatgaaaatagggagcagaacgatttgaaaaagatttttgagcccggctgtgtttttgttcaatatagaagaacagaagcatcatgcatggctgcacactctatacatggacggttatttgataaccgggtgtgacagtagagtacatcaa

SEQ ID NO: 24357 - DNA, 481 bp, Gossypium hirsutum
  Clone ID: LIB3147-019-Q1-K1-G12
cccacgcgtccgtttttttggacagagtagacaaaccactctttttttcttttgatattgcgggaccgctgaaacgaatatctcgaaattggatatgtaaaaacaaagaatcaaaaatttctgattatacagaaaaaaagatcgagaaaaaagacgaggccaaaagagaaaaatacaaaagagaagagaaaatgaggatagaaatagcagaagcttgggatagtcttttacttgctcaagtaataaggggctccgtgttaataacccaatcaattcttagaaaatatattatattaccttcactgataatagttaaaaacattgcccgtatgttattatttcaatttcctgagtggtctgaggatttaacggattggaatcgagaaatgcatgttaaatgcacttataatggtgttcaattatccgaaaccgaatttccaaaaaaactggttaacagacggtattcagataaagatcctat

SEQ ID NO: 24358 - DNA, 447 bp, Gossypium hirsutum
  Clone ID: LIB3147-019-Q1-K1-G2
gtacttctgcaacaggtagctgcagatttattgaagcaatacaaggacaagttccaaggtggtgctctttctgtcacatggaactacttgagagaatctatgaacacatacttgtctcagccaaatcctgtaactgcccgttgggaaagtgaagatcacttgcgagaccctaaatttcagttggatgctttccggtaccgaacgtcaagacttcttcaaagtgtagcagcacgacttcaaaagcacaccaaaactcttggcagctttggtgcttggaataggtgtctgaatcaccttctcacacttgcagagtctcatattgaatctgcattctcgcaaaatttattgaagctgttcagaactgtcctgatgcaagcagtcaagctgctctaaaactctatgcgatctgtatgcgctggatcggatctggaaagacatacgaacata

SEQ ID NO: 24359 - DNA, 482 bp, Gossypium hirsutum
  Clone ID: LIB3147-019-Q1-K1-G3
aagagccgagtgatcaaaacacagataggaaaggactgaaaaagaaaaacagaaatggctccgaaagcagatacccaatctgccggcgctgtcgctgcagctgacgcatcctctcaattctcaatggacccactattccacatcttgaaagtcgtcccttactccttccttcgcgctccgcgcctccgcctcaagatcccctccgtctcccttccttccgccatgactgtcttttctctcgtcctcctcacttacttcatggtggtctccggcttcgtctacgacgtcatcgtggagccccctggcattggctctacccaagatcctgccactggcgccgtccgacctgttgttttccttccaggtcgagtcaatggtcagtacatcatagaaggactctcctctgggtttatgtttgtgcttggtggcattgggattgtcctcctggatcttgcccttgataaaaacagggctaggagtgt

SEQ ID NO: 24360 - DNA, 298 bp, Gossypium hirsutum
  unsure (1)..(298): unsure at all n locations; Clone ID: LIB3147-019-Q1-K1-G4
cacgcccgtccgtgtttccnttggtttgcttagtatttttagtatttattgcagaagccttttctgnngtgtcgtgaatttctgcgtgatggnncattgttccttgtagccttaacctcttttnctttttaatgtttctctattatactttatttttgatatctgttaaatcatcgattgtntgacttatttatatttaaacaaaacaaaaataaaacatacaaaaaaaataaaaataaaaaaagaaaaacaaaaataaaaataaaataaaaaaatgaaaagaaaataaaaaataaaa

SEQ ID NO: 24361 - DNA, 382 bp, Gossypium hirsutum
  Clone ID: LIB3147-019-Q1-K1-G5
aaccaaacaaggcattgcttcacccgatatatcgagtaccatcgttgtgtagctgcaaaaggggaagatgcttcagagtgtgacaagtttgccaagtactatcgtgccctatgtccgggagaatggatagatcgatggaacgagcaaagggagaacggtacttttccaggtcctctgtaagatggtacattacgggaaatccagtgaagttgtcaactgagaaacggcattttcaggaaataagaaattttggcatgtacccgttttgactggatcatgattgataaaatggagttatatatagcctatgttacatgggttcaagtgttggatattgatatctgtccgacaccaataaatttaatttctttttgagagctat

SEQ ID NO: 24362 - DNA, 277 bp, Gossypium hirsutum
  Clone ID: LIB3147-019-Q1-K1-G6
atcttgtggaaaccattgcaaaagatataaaaatgttcaacaagctttcatctaaaggggggggatttttctaagggtatcactcatgtctcttgtacgatgataacatatgtccagcagatattcgctatgatcggtgcgtgcaatcttatttctaaacagaacctgattatcattaagacgcttgaagcaaacaaacgtaatgacttcatcaaaacttataagggcgacttataaaacacaacaaaactttatgaacctttagagcctggaatat

SEQ ID NO: 24363 - DNA, 466 bp, Gossypium hirsutum
  Clone ID: LIB3147-019-Q1-K1-G7
gggacccggaggcgtacaaaccaagtgatcaaaacacatatcgtaaatgactgtttacaaaaaacagaaatggctccggaggcagattctcaatgtggcggcgctatctctccatctgacgcatcctttcaattctcaatggacccactattccacatcttgaaagtcgtcccttactccttccttcgctctccgcgccttcgcctcaagatcccctacgtctcccttccttccgccatgactgtcttttctctcgtcctcctcacttacttcatggtggtctcctgcttcgtctacgacgtcatcttgcaaccccctggcattggctctacccaagatcctgccactggcaccgtacgacctgctgttttccttccatgtctagtcaatggtcaatacatcatacaaggactctcctctgtgtttatttttgtgcttgcttgcattgggattgccctactggatc

SEQ ID NO: 24364 - DNA, 302 bp, Gossypium hirsutum
  unsure (1)..(302): unsure at all n locations; Clone ID: LIB3147-019-Q1-K1-G8
tcttggttngctactatttaatatattgcatattctttctcctgtgtgaatctcttcggcgcgcattttaactagtggcttaactctcttctttttatgttttctatatattaatttttgatattgttaatcatgattattgactattatatttaaataaatattttttattatattaataggaaaaaaaaatataaaattattaaattacaaaaaaaaaaaaaaaatatacttcatatttaaatatttaaacaaaaaaactattatattaaaatttttgtccttttaaaaaaaaccaaaat

SEQ ID NO: 24365 - DNA, 492 bp, Gossypium hirsutum
  unsure (1)..(492): unsure at all n locations; Clone ID: LIB3147-019-Q1-K1-G9
cgtacgcccacgcgtccgccgagatctcgtcttcctgtgttatgttagctgatctccaaagctctatgttgtgttgagttctggacttcatttgcaatggcggacgaggaacctgttgatcagaaaaaatatcttgaagatggttgcaagcctaaatgtgtgaaacagcttctttcatatgaggcatgtgttaagagaatccaaggtgatgaaagtgggcacaagcattgcactggtcaatattttgactattggtcttgtgttgataaatgtgttgcaccatctctattcacaaaactgaaataaccagggccagagttgtacaacggtagcatcatgtcatgctgttgaatgattgtttcagacaatttggctccataaacttgacaagtgttaaaatttttttgtgttactttggaagcatntaaataaatttggatcctgggatacatccctcttgtgaataggatcacaagtgttttgacaagtttg

SEQ ID NO: 24366 - DNA, 191 bp, Gossypium hirsutum
  unsure (1)..(191): unsure at all n locations; Clone ID: LIB3147-019-Q1-K1-H1
cccacgcgtncgggaaaaaggccggggtttgaacatatatttacagacttcctcttgagcctggggcagagtcgatacaggaaaagatctagctagaaacttaatggaagcctaggacactccaaagcatcagatggtgttgttaataatcatatgcaggatatgatgtgttcgctgttgttccattaccc

SEQ ID NO: 24367 - DNA, 436 bp, Gossypium hirsutum
  unsure (1)..(436): unsure at all n locations; Clone ID: LIB3147-019-Q1-K1-H10
gcagacgtgaagaatggggctgtctttcacaaatctgttcagccggctttttgccaagaagtagatgcgtatattgatggttggacttgatgctgctggtaaaaccaccattctttacaagctcaagttgggagagattgtcaccacaattccaaccattggtttcaatgtggaaactgtggaatacaagaacatcagctttactgtctgggatgttggtggccaggacaagattcgtccattgtggaggcattacttccaaaacacacaaggactcatttttgtggttgatagcaatgatcgtgatcgtgtggtcgaagccagggatgagttgcacaggatgttgaacgaggatgagttgagggatgctgtgctactggtatttgcaaacaagcaagatcnttcaaatgctatgaatgctgccgagatcactgac

SEQ ID NO: 24368 - DNA, 486 bp, Gossypium hirsutum
  Clone ID: LIB3147-019-Q1-K1-H11
aataaagagagattttacgccatggttgaaggaaatgggtgttgcaagcttgcaggaccagtatatggcttccaacactgttgcatccgctgctcttcttcttaccttgaacttgttgttcttcactttggttagctctacctacgtgccttgcccaccaccaccaaagagccacaagcctacccacaagagcccaccctcggcacctaaacagccagccacttgccccaaagatacactgaaactaggtgtttgtgctgatttgttgggctcggtgcgcgttgttgttggaccgtcgaggaccaaatgctgctcactcatttcgggtttggctgatctcgatgctgctgtttgcctttgcactgctattaaagctaatgtgttgggggttaacctaaacgttcctgtttcattgtctttgctcctcaattcctgcgaaaagcatatgcctgctggttacaaatgtgcttaagcaatgtttgggtt

SEQ ID NO: 24369 - DNA, 483 bp, Gossypium hirsutum
  Clone ID: LIB3147-019-Q1-K1-H12
ctttgagcaaagcagcctcatttcatttctccaatatggctagagggttgaagaaacatgggaggaggctcaatgcccccaggcattggatgcttgacaagcttggtggtgcttttgcacccaagccatcgtctggtccccacaagtccagggaatgcttgccattgatccttattttgcgaaaccgattgaagtatgctctcacctatagagaagtcattgctattcttatgcagaggcatgttatggttgatgggaaggttaggacggataagacctatccagctggtttcatggatgttgtgtccattcctaaaacaaatgaggacttccgtctactttacgacaccaaagggcgatttcgtctccatgccatcactggcgatgaaaccaagttcaagctctgcaaggttcgatctgtccagtttggccagaacggtattccatacttgaatacatatgatggtcgtactatccgttacc

SEQ ID NO: 24370 - DNA, 388 bp, Gossypium hirsutum
  Clone ID: LIB3147-019-Q1-K1-H2
gtgcttatggtggagttctatctggaagtgctgttcgagaaaggatcataagggccttcttggtggaagagcaaaagattgtgaagaaggtactgaagattcagaagacaaaggaaaagcaatcatccaagtgagagctaggatttgctaatggattgatagtgaatcttggaatagtagtttgaggggatttaagatttggatttatgtttttacatttgttatgaatcatgttctactttttcatcttgtcgacaaatcaactttcatgtcaaaattttgtttttggaacactcactttgtttgctcttctccaaatttggtatttccactgaatgtgcaatgttgcctggttatgcgattgcccccaaaaaaaaaaaacactttt

SEQ ID NO: 24371 - DNA, 256 bp, Gossypium hirsutum
  Clone ID: LIB3147-019-Q1-K1-H3
catccccaaagtatccacctttttctgattttagaaacttgtaaagtggtgtagcattctttgcatttacttccacctacaatggtcagatcatatgacagtattacaaaacataagtttgtataccaatcaactggtttcattttcatgctaaggaggtgattgctggcataaggcactcaatcaaacatatttataaccttatcaaaaattgggaattcagctttgaacattgtgcatgcaacttcctgaatct

SEQ ID NO: 24372 - DNA, 415 bp, Gossypium hirsutum
  unsure (1)..(415): unsure at all n locations; Clone ID: LIB3147-019-Q1-K1-H4
cccacgcgtccgcccacgcgtccgcccacgcgtccgcccacgcgtccgcccacgcgtccgcggacgcgtgggctaaaacaaacatcttcgatggttgctgccactgaaaaaagattgatactgttaagtgtttagtgaaatgagataatactgtactaattttggtagaattttaaatgggagaaaaaaaacttcgcccatcattcgctttttttatttgggggcgaatatatacattttgaagtatcttttgttgtcattagaacaacacttcgattcacgccnnanaaaaaaaaaaaaaaaaaaaaaaaaaaaaaaaaaaaaaaaaaaaaaaaaaaaaaaaaggggcgcccgttcgcgcccacgcgtncgagcaaagtccacaggagtgctgggttaggagatgacatcagtc

SEQ ID NO: 24373 - DNA, 283 bp, Gossypium hirsutum
  Clone ID: LIB3147-019-Q1-K1-H6
cccacgcgtccgcccacgcgtccgcagatctgattttccgggaaaacatacaacgagaaggaaaaattcgtagagagagaaaaaaaatgtttggataccatcgcgtaagccactcgagtgccaacaaggcggatgagatagatttagaatcaggggagactttgtacccgggactcagctacagcgagaaccaacttcggtggggttttatccgcaaggtgtactgcatctaggcggcacagctggttctaaccaccgaggtctccgccttagtggtctttct

SEQ ID NO: 24374 - DNA, 336 bp, Gossypium hirsutum
  Clone ID: LIB3147-019-Q1-K1-H7
ggcatccgcccacgcatccgaagattgttattttaaccttatcttatctgaacaaggttcatacttctgtagagacttatattttgggtgctgtctacaatttctacaatgtagaaagccggtatggaacaaagttacgttttcgggcatgactggtaaacgcgaagacatttgctgtttagtgtttactagaacagctttatgtttgttaatattcctttccgagttagtaatgctaccatattatgtagggcttccttattgggcataataattcatatatgttgctcaaaactacatcaactgataatattatgactactgtttcaagctcac

SEQ ID NO: 24375 - DNA, 418 bp, Gossypium hirsutum
  Clone ID: LIB3147-019-Q1-K1-H8
ctagagtcgtcggacgccaaagcatcaacgaaagctttcacaaaaccctagtctctaacgtacgttgttttgcctaagccatgtcgagaaggaaggttcgagagcccaaggaggagaatgctaacctatgacctgctgttccaaagggcgagcatgtttttgggggggctcacatctttgcttcatataatgacacattcattcatgtgactgatttgtctggaagggaaacaatggtacgcattactggtggcatgaaggcgaaagctgatagggatgagtcttccccttatgcagccatgcttgcagcccaagatgtttctcatcgcttgcaggagttgggtcttacttgccttcatataaagcttacagctactggagggaataagaccaagacaccaggttctggtgcacagtc

SEQ ID NO: 24376 - DNA, 186 bp, Gossypium hirsutum
  Clone ID: LIB3147-019-Q1-K1-H9
gcaaagtggtttaccaatagaggagtgacgcatctaattctttaattatatttaaattttaattattttttttattattaatttttttaatggtggtttttttttattttttttaataaattttttaaatttatataatatttattttaataaattttaataaaataatataatttattattttta

SEQ ID NO: 24377 - DNA, 435 bp, Gossypium hirsutum
  unsure (1)..(435): unsure at all n locations; Clone ID: LIB3147-020-Q1-K1-A1
gagaaaaggctggcttgttttcagagtctcaacggattaaatacaccatcgaaacacgaactcagggcattccagatgtccgaacatatttattgacactgaaggaaataagatccaagagaggactcactgatgaacttggtgctgaggctatgatgatgggtgcgttggataaagttgaaaaagaaatcaagaagcctcttatgagggatgacaagaaatcaatggctcttcttactgctgagtttgataagatcaataagaagcttgggatccggaaggaagacctgcccaagtatgaagaacaactggagctaaaaattgccaaggcgcaattggaggagctgaagaaggatgctcttgaagcaatggaaacacanaagaaagcggaggaattcaaggatgagggcatgcctgatgtgaagtcatttgaca

SEQ ID NO: 24378 - DNA, 114 bp, Gossypium hirsutum
  Clone ID: LIB3147-020-Q1-K1-A10
tacttcataaattttctataacataacccatttttaatacactgtccttttttaaacaacttcatcaattttttaaccctgaccctacccaactaaatatactcccaacacatt

SEQ ID NO: 24379 - DNA, 447 bp, Gossypium hirsutum
  Clone ID: LIB3147-020-Q1-K1-A11
agcccccggacgccacgcggcatcatgaattcgcgtcgtgtaacgcctgacatgcaggagggggtcggagtccctgaaattccccgaactcaagcccttaagcagatttgggcttacattaaagagcacaatcttcaggaccctgaaaacaagaagattataaactgtgatgagaagctgaagaagatatttggtgggaaagatcgcattggatttcttgaaattgctgggctgattagtcctcactttctttgatgaatcctagcgagagagagtgttggtttggagaataggtaggtaaaaacttcagttggttgatcctctctttgaagaaaataatgcttttttgttttcaattttaacagtgctacttggttactacacaagtacctttttaagggttttgttttatttacgcattccctaatatgtagactggttttatga

SEQ ID NO: 24380 - DNA, 383 bp, Gossypium hirsutum
  Clone ID: LIB3147-020-Q1-K1-A12
ctccgccggacgagctggtggcggccggtttccgaactccatcacctaagataacggcgggggctctggtgaaacggttccttgagaccaactcctccggcgtgtccatgcagatcggagaccatgtccaattcgcttattctcaccataaagagtctcctttacggcccagatcatttgctgtgaaagatgaaatcttctgcttgtttgagggagcccttgataacttggggagtttaaagcagcaatatggtctggcaaagtcggcaaatgaagtgattttggtcattgaagcttacaaggcccttcgtgaccgagcaccttattctccaaaccatgtggttggccatctaattgggagctttgctttcattgtctttgac

SEQ ID NO: 24381 - DNA, 359 bp, Gossypium hirsutum
  unsure (1)..(359): unsure at all n locations; Clone ID: LIB3147-020-Q1-K1-A2
gcgagcanaactcttgcatagatgtcttttttagaaaaagatctgacaggtgacattacaggacttgttccattcgaattggacgcattccacgatttgtagtacaagctcatgagcaagtacgtgaatgttggaaccatcaagaacacaacagtttcagtaaccgaaggggatgccagtggagaaacctnaggagctgtatattctgattctaatccaactgaagatggtccatcacaaacaccagttactgggtcagaagaaaaatcttcttctgcatatactaacgaagagttacttgttcaaactttagctgtttttttttcaaacaggtcaacaatttttgtactgaacatgcc

SEQ ID NO: 24382 - DNA, 467 bp, Gossypium hirsutum
  unsure (1)..(467): unsure at all n locations; Clone ID: LIB3147-020-Q1-K1-A3
ctgatttgtctggaagggaaacaatggttcgcattactgctggcatgaaggtgaaagctgatagggatgagtcttccccttatgcagccatgcttgcagcccaagatgtttctcaacgctgcaaggagttgggtattactgcccttcatataaagctaagagctactggagggaataagaccaagacaccaggtcctggtgcacagtcagcacttagagcccttgctcgttcaggcatgaaaattggacgcatagaggatgttactcccattcccactgacagtacccgtagaaagggaggcagacgtgggagaaggctgtgattctttgcttcgtatctgttgctcactgttgctgctcctccaatatgcgtggaatttcttttttaaacaatttttggtttagattgaagctngttttgccctgttatgtngttgcacattagttccagaattgattttgatcgt

SEQ ID NO: 24383 - DNA, 411 bp, Gossypium hirsutum
  Clone ID: LIB3147-020-Q1-K1-A4
cttttaagcctccaaaggttaagtttgagactgcctgtttccatccaaatgttgatgtctgtggcaacatttgcttggacattcttcaggataaatggtcatctgcttatgatgtaagaaccatactgctatccatccagagtctgcttggagaacccaacattagctcacctttgaacacccacgcagctcaactttggagcaaccaagaagaatataggaagatggttgaaaagttgtacaaacctcctaatgcataacttgagaaaccagaacaggagttttgttatgtttttttcttcttattattaatttttttttcttattgaagaaacgagaacatgaaatttgtcatttttctacagcatgtatgattttactttactattgaatgtgataatgataaaagct

SEQ ID NO: 24384 - DNA, 361 bp, Gossypium hirsutum
  Clone ID: LIB3147-020-Q1-K1-A5
gtgaaaaggctggatggttaacaaaggcttttatgactgattgcatgatcgtaacagcagcggcaggatgtggcatacgtccgtgcatacatactggcactcaaagatgtatgataccgcagaggggtgactgatgaacctgccgctgatgctatgatgatagctgctgtgggtaatgagaccaaaacactaagtactgctgctctgacggatgacaaagcattaaggggtctaggcactgatgaggttcacatgaacgatgagactcttatgatcactgacgaagacctgcccaagtgtgacaaacaactgaaactgctgagagtcaatgctcaatatgaggagctgactgatgatgctc

SEQ ID NO: 24385 - DNA, 334 bp, Gossypium hirsutum
  Clone ID: LIB3147-020-Q1-K1-A6
gggcggttcgctgcccgcgacgtcgcgagaagtgcactcgccatatatcattgagaggcagaggcggaagcaacatcaggcgcagagaagcaaccacataaacttgagagaaagtggaccttccggtttgatatccaatcaaagcctaaacaaggcgccgcttgaggtacctatctacgcaaggtttacacatttgacaccgtagaagaattttggagtttgtatgaacaaatattcaagcgcaccaagctgctcgtgaatgcttatttacacttgtttaaggccggaatagaacccaaatgggaagataccgagtgtgctagtggatgaaagt

SEQ ID NO: 24386 - DNA, 367 bp, Gossypium hirsutum
  Clone ID: LIB3147-020-Q1-K1-A7
gaataatgactagaacgtttacaaacttttctttgcaagttagagctgggggggatggggctaacattgaggcacctgagcatgcagaacgggttcttgatgcaaacattgggggctacatggtaagtgtacacctttggcaaaacgtggctgatgcatattacaatagggatacacaatctacacatgataaaatactagatgttggcatcatatgttgaaccaggccaccttgaagcactgaagtggtgacttccagtgccctaagacttgcacatagacagtcggtaaaatacagatcttgcttgcatggctgttcaaatgatggagaaccttggtctcatcaccatgacattgccatatacat

SEQ ID NO: 24387 - DNA, 410 bp, Gossypium hirsutum
  Clone ID: LIB3147-020-Q1-K1-A8
cttttaagcctccaaaggttaagtttgagactgcctgttttcatccaaatgttgatgtctggggcaacatttgcttggacattcttcacgataaatggtcatctgcttatgatgtaagaaccatactgctatccatccagagtctgcttggagaacccaacattagctcacctttgaacacccacgcagctcaactttggagcaaccaagaagaatataggaagatggttgaaaagttgtacaaacctcctaatgcataacttgagaaaccagaacaggagttttgctatgtttttttcttcttattattaatttttttttcttattgaagaaacgagaacatgaaatttgtcatttttctacagcatgtatgattttactttactattgaatgtgataatgataaaagc

SEQ ID NO: 24388 - DNA, 64 bp, Gossypium hirsutum
  Clone ID: LIB3147-020-Q1-K1-A9
aaaggattctacccgccgctcggtgggaattacgctccagggaggcgcccgcgacttgtgggcc

SEQ ID NO: 24389 - DNA, 461 bp, Gossypium hirsutum
  Clone ID: LIB3147-020-Q1-K1-B1
cccacgcgtccggtataatggatagaacgtttgcagactttccttggcaagttagagttgaagtggatggtgttgagatagaggtccctgaggatgcagaaggggtacttgttgcaaacattggaagctacatgggaggtgtagacctttggcaaaacgaggatgatacatatgagaattttgatcctcagtctatgcatgataaaatactagaggttgtaagcatatctggaacttggcaccttggaacactgcaggtggggctttctcgtgcccgaagacttgcacaaggacagtcgattaaaatacagctctttgctgcattgcctgttcaaattgatggagaaccttggtctcagcagccatgtacattggccatatcacatcacagccaggccttcatgttgaggaggacagccgaggaacgtctagggcatgcagctggcataataccaatgtgc

SEQ ID NO: 24390 - DNA, 445 bp, Gossypium hirsutum
  Clone ID: LIB3147-020-Q1-K1-B11
gtgatgtcggaaagggttgtgctgctgccttgaagcaagccggtgctcgtgtcattgttgctgagattgatcccatctgtgcccttcaggctctcatggaaggacttcaggttttgaccctagaagatgttgtctccgaggctgatatcttcgtcaccacaaccggtaacaaggacatcatcatggttgatcacatgaggaagatgaagaacaatgccattgtttgcaacattggtcactttgacaatgaaatcgatatgctcggtcttgagacctatcctggtgttaaacgcatcaccattaagcctcaaaccgataggtgggtcttccctgaaaccaaaaccggcatcattgtgttggctgaaggacgtctgatgaacttgggatgtgccactggacacccaagttttgtcatgtcctgctcgttcactaaccaggtgattgc

SEQ ID NO: 24391 - DNA, 353 bp, Gossypium hirsutum
  Clone ID: LIB3147-020-Q1-K1-B12
cccacgcgtccgatcctctaattctaaagcttagagttttaagttaacgaagcatttggagcgtttctaagtaatggaaacttcacgaaaagtaaagaagggagccggaggaaggaaaggtggtggcccgaagaagaagcccgtttcaaggtctgtcaaagctggtctccagttccctgttggtaggatcggccgttatttgaagaaaggaaggtattcgcagcgggtctgaaccggagccccggtttacttggctgctgttcttgagtacttggccgctgaggttctggaatttgctgggaacgctgcacgtgacaacaagaaaaacaggatcatcccaaggcaccttctac

SEQ ID NO: 24392 - DNA, 377 bp, Gossypium hirsutum
  Clone ID: LIB3147-020-Q1-K1-B3
cagacgcgtgggcagacgcttgggcagactcgtggactgacgcgttgtcaggaaagaagggttcgaaagattctaatctcgggggcgatatgttatccaagatcgacatggaacgagctggagtgctagttggaactggcatgggtcgtctaacggtattatgtgacggaattcaaaatctgatggagcaaggctattgaacaataacatcattcttcattccctatgctataacaaacatgtcatctgccttgctagccattgatctaggactcatgggaacaaattattcaatgtcaactgcttgtgctacctccaattattgcttctatgctgctgccaaacacatccgtcgaggtgaggcttgaatgatgatt

SEQ ID NO: 24393 - DNA, 433 bp, Gossypium hirsutum
  Clone ID: LIB3147-020-Q1-K1-B4
cccacgcgtccggtttctgatgctgatcagggtcagaccagtgcttataatggtggaattgatgaaggatcagcatccagcggacgggatagaagcattgagccttcaaatggttctgcttttgatacaagtggtgaaccgaattcatttctggtttcatcaaatgatcgaagttcaccaatttccacgtcagggacagtacagggttcagaaacatctgctcggaaacataacttcttcacccctaaacaaataagttctgccattgatggatctgagaaagcacgccttttatgttcagtaattgtgggtgttttagttgtattgttgcatttggggtttcctcttccaggaaacaagttcgtagggagcattcttaactttaggccactttacttggttttgttgaccaatgtaacattggtgatggggc

SEQ ID NO: 24394 - DNA, 385 bp, Gossypium hirsutum
  Clone ID: LIB3147-020-Q1-K1-B5
cccacgcgtccggtataatggatagaacgtttgcagacttttcttggcaagttagagttggagtggatggtgttgagatagaggtccctgaggatgcaaaaggggtacttgttgcaaacattggaagctacatgggaggtgtagacctttggcaaaacgaggatgatacatatgagaattttgatcctcagtctatgcatgataaaatactagaggttgtaagcatatctggaacttggcaccttggaacactgcaggtggtgctttctcgtgcccgaagacttgcacaaggacagtcaattaaaatacagctctttgctgcattgcctgttcaaattgatagagaaccttggtctgagcaggcatgtacattggccatatcaca

SEQ ID NO: 24395 - DNA, 397 bp, Gossypium hirsutum
  Clone ID: LIB3147-020-Q1-K1-B6
cccacgcgtccggtttctgatgctgatcagtttcagaccagtgcttataatggcggaatggatgaaggatcagcatccagcggacggtatagaaacattgagccttcaaatggctctgcttttgatacaagtggtgaaccgaattcatttctggtttcatcaaatgatcgaagttcaccaatttgcacgtcagggacagtacagggttcagaaacatctgctcggaaacataacttgttcacccctaaacaaataagtactgccattgatggatctgagaaagcacgccttttatgttcagcaattgcgggtgttatagttgtattgttgcatttgaggtttactcttccaagacacacgttcgcatggagcattcttaactgtaggacactatact

SEQ ID NO: 24396 - DNA, 248 bp, Gossypium hirsutum
  Clone ID: LIB3147-020-Q1-K1-B7
cacacgcgtccgcagactcatgcccagtctttatcgctgtttcttaaacactaaagatgggttcaattgaggctaatatccggtcctatatgtgatccaagaacgacaacgtaccagctgacctgctaccttgaactaacaatgggcctgtaacgacttgattagacagcattaaaaagctgatggaacacagctgttgtatagcaacagttgattcatacacctactcgctaacagacaattcataa

SEQ ID NO: 24397 - DNA, 433 bp, Gossypium hirsutum
  Clone ID: LIB3147-020-Q1-K1-B8
cccacgcgtccggtttctgatgctgatcatgttcagaccattgcttataatggtggaatcgatgaaggatcagcatccagcggacggtatagaaacattgagccttcaaatggttctgcttttgatacaagtggtgaaccgaattcatttctggtttcatcaaatgatcgaagttcaccaatttgcacgtcagggacagtacagggttcagaaacatctgctcggaaacataacttcttcacccctaaacaaataagttctgccattgatggatctgagaaagcacgccttttatgttcaagaattgagggtgttttagttgtattgttgcattaggggtttcctcttccaggaaacaagttcgtagggagcattcttaactttaagccactttacttggttttgttgaccaatgtaacattggtgatggggc

SEQ ID NO: 24398 - DNA, 264 bp, Gossypium hirsutum
  Clone ID: LIB3147-020-Q1-K1-C1
gaaggtaacagattgcatgataccatggagttgaagaacgcaatggataatatgttgcatagcatttgaagcgctaccttgagccatgcaatgacatggtattttacctactcagtctgagcactatattattctactcctttgatattatcagcctatctttagatgtcactatgtgggcatgacaaagcctgcgaaaactcattactgcggttcgctttgtataacgcctccataacaatccaacggtttattttatcacct

SEQ ID NO: 24399 - DNA, 437 bp, Gossypium hirsutum
  Clone ID: LIB3147-020-Q1-K1-C11
gggatgttcttgatgacctcaagacaaatgttgagttgtctcatcctggtgctgaacttagattacttgaggttttttatcacaagatttacaagatcttccctctcagtgaaaagatagagaacataaatgatcaatattggacattacgtgcagaggagataccggaagaggagaaagagcttggtccccatgatcgcttgattcatgtttaccatttcatgaaagatgcaacacaaaaccagcaggtacagaattttggggagccatttttccttgttattcatgaaactgaaacattagctgaagttaaagtgcgagttcagaaaagattacaggttccagatgaggaatttgcaaagtggaagtttgcatttttatcactgggtcgtccagagtatcttcaggactcttatgttgtgtctacctcgtttcag

SEQ ID NO: 24400 - DNA, 71 bp, Gossypium hirsutum
  Clone ID: LIB3147-020-Q1-K1-C12
aaaaaaaaaaaaaaaaaaaaaaaaaaaaatttaaaaaaaaaaaaaaaaaaaaaaaaaaaagagaaaaaaaa

SEQ ID NO: 24401 - DNA, 355 bp, Gossypium hirsutum
  Clone ID: LIB3147-020-Q1-K1-C2
cagcttttgtgtcttctttcaatgacgcaagttggcatgttgaagccatttttgttggccttggtaatggctatcttaaccgttgcctcggcgcaggttagtgaggcgccgtcgccatcgccagacgctggagctggattctccgccggcgtttccaccgccaccgtcggcttatctttgattgtttctcttattgctttcttcaaacattaaattcacgggctttgactcaatgtgtggttttctttttttctctttgtatatgataccattcatttgattattgtaaggaagtcgattctttgaatcgaatgcttccactgtggtttattaataaaattaaaatttttttaat

SEQ ID NO: 24402 - DNA, 404 bp, Gossypium hirsutum
  Clone ID: LIB3147-020-Q1-K1-C3
cttccaatttagggtttgcacgagccggagtgcgccgttcgcatcaggaagaaatggcggtccctttgctgtctaagaagattgcgaagaagcgtgtcaagaagttcaagaggccccaaagtgaccgcaagatctccgtcaagacaaactggcgaaggcctaaaggtattgactcccgtgttaggaggaagttcaagggatgcactttgatgcccaatattggttatgggtccgacaagaagactcgccactatcttcccaatgggtttaagaaatttgtcgtgcataacgtccaagagctggagcttctcatgatgcacaacaggacatactgtgctgagatagctcatgatgtttcaacaaagaagaggaaggaaattgtcgagcgggcagcacagttggat

SEQ ID NO: 24403 - DNA, 427 bp, Gossypium hirsutum
  Clone ID: LIB3147-020-Q1-K1-C4
ctcacgcttccggattgtcatgctcagcacggcacgattcgtactaagaaaaaatgacactcagattggtgagtaataagagtgccagctaacgagaatggacactcatctagtcacatagtgaatcacaagatcgtgggtcacgacagactggctatggcatcagagtattgactctggtcttaagacgaacttcagggaatgcactttcatgcccaatattggttatggctccgacaagaccactctccactatcttcccaatgggtttaagaaatttgtcctgcataacgttcaagagctggagcttctcatgatgcacaacaagacatactgtgctgagatagctcatgatgtttcaacaaaaaagaagaaggaaatttgtcagcggtcagcacagtttggatgtttgtgtgaccaacaaatt

SEQ ID NO: 24404 - DNA, 178 bp, Gossypium hirsutum
  Clone ID: LIB3147-020-Q1-K1-C5
attccaagaccctactgttttgccagaatccatacactgtattcggtatgaggaacatatgggaagaagcatgtggtgagagcgacacatgatacatatgatagaccaactgaagtgtatacatatcaatacatgccaactgcccactcgatcgatgtgtccactacagtgattctat

SEQ ID NO: 24405 - DNA, 442 bp, Gossypium hirsutum
  Clone ID: LIB3147-020-Q1-K1-C6
gcgtggacgcgtgggaaagggcgcaaggaggctggcgcctaccatcaattgattgatgaaagaatggttaaaacgctgcatgggagagagaagaaggtatatctgcctgcacagtcggtgacgtcaattccatgatgaggatgctgcatatgcgtgcagatgccattgttactagcagccccactttactccaacggactatgcaagacaaacgaacacagtgctcttggagaaggtttttctttaacacgatgacgatgcttgatttttatcgaattcaagacctgattagtgatatgatattgttgaacagtcgcatgttttcagtgcacctgtctttatttgttgatttgcgttttttatcttttgaaatttcgatcttataatttatctattcaagaatatacttaacctcgaaagaaacagggagcacttagttggg

SEQ ID NO: 24406 - DNA, 404 bp, Gossypium hirsutum
  Clone ID: LIB3147-020-Q1-K1-C7
cccacgcgtccggtaatcattgacggatcgacggtgagagccttcgtgactgacgaccaagagttcacgaagagcgtggatgagcgtttcgaagctcttgacctcaacaacgacggtgtcctcttcaggtccgagcttcgcaaggccttcgagtctatgcgtctcctggagtaccactacggtgtcgacgtcgccactcacaccgacgagctcactcaggtgtacaactacattttcgagaggtttgattgcgatggcactgacacctgtgacctatatgagttcacatctgagatgaagaagattctgcttgctattgatgacggatcgtgatcttgccctatacacatggttcttgacgatgatgaccaacggtttctgaacaacgctgctgatcttgaggc

SEQ ID NO: 24407 - DNA, 377 bp, Gossypium hirsutum
  Clone ID: LIB3147-020-Q1-K1-C8
cgctttctgaccattagcacaggcaataaatcttggctctgtagaatctagagaagatggggtccatgctgcacgtgttgcttacagtgcaatgggcatggtaactttgctgtctggccaacctaaagaaggtgtctgaattgacgcccgctcagagtcaaaaggctactatgaggtgacagtgactgattcatctgggacttatcgtctgcgaggactggttcctgatgcattgtattcaatcaaagttgtgaagaaggatggcttgggtagtgctaaaattgagtgagcatatcctgaatcttgtcctgtaaaggtttggaataacgatatcaagggactggactttttggtctttgaagaaccaaagatgacta

SEQ ID NO: 24408 - DNA, 387 bp, Gossypium hirsutum
  unsure (1)..(387): unsure at all n locations; Clone ID: LIB3147-020-Q1-K1-D1
gcgtgacacctgccgtggcatcggtttcacatctgacgatgtgggtctggatgccgacaactgcaaagtgctggttaacatagagcaacaaagccctgatattgcccaaggtgtccatggccatctcagtaagcgtcccgaggaaatcggtgctggtgaccagggccatatgtttggttacgccacagatgaaacccctgaactgatgcctttgacccatgttttggcaaccaggcttggtgctcgcctcactgaagttcgcaagaacggaacttgcccttggctcagacctgatggcaagactcaagtcaccgtcgagtattacaacgacaagggtgccatggtgcctgttcgtgtccacaccgtgctcatctncactcaacatga

SEQ ID NO: 24409 - DNA, 252 bp, Gossypium hirsutum
  Clone ID: LIB3147-020-Q1-K1-D11
ttctttctgaggcatttggtcctaaaaaaaaattcttgtgccatagtgagtgtagaaataatttgagaatttattgacgattccccaattcagtgcattttatgttgtttttaggcactattttttggtcccttcttgaggcctcgactcttctggttggtttttttggggattctctgtttttagtctcttcatatggaacttgtactgtaaacgtatttctacataaaacgcatacggttgttcaatcac

SEQ ID NO: 24410 - DNA, 373 bp, Gossypium hirsutum
  Clone ID: LIB3147-020-Q1-K1-D12
ctttatctgggcctaaatatttgtaaattgtcattggtatgtagattttttttatttggagcgtttttttttattttttatttatttttgatttttaatttctattttttaatgggcccaggtgaatgggcctctttcagaataaaaaaaaaaaaaaaaaaaaatttttaaaaaaaattttaaaaaaataaaaaaaaaatatgggctgcggctttctctgaataaaacttacgttcgcgtgcgtgcgaagtcataatttttattttttgttacctaaaataaatttactgtccttggaatgacaacgacatgtgctgggaaaaaaaaaacgttaactatctacattaaacttgtggcataaacaccttttttt

SEQ ID NO: 24411 - DNA, 422 bp, Gossypium hirsutum
  Clone ID: LIB3147-020-Q1-K1-D2
tgctttctcaccatcagcacaggcaatagaacttggctctggagaatctagagaagttgttttccatgctacacgtgttgcttacagtgcaatgggcatggtaactttgctgtctggccaacctaaagaaggtgtctcaattgaggcccgctcagagtcaaaaggctactatgaggtgacagtgactgattcatctgggacttatcgtctgcgaggactggttcctgatgcattgtattcaatcaaagttgtgaagaaagatggcttgggtagtgctaaaattgagtgagcatctcctgaatctgttcctgtaaaggttgggaataacgatatcaagggactccacttttttggtctttgaagaccagaaatgactatcttaagtgccatgttgaagcgaataggacaggggaattacattc

SEQ ID NO: 24412 - DNA, 452 bp, Gossypium hirsutum
  Clone ID: LIB3147-020-Q1-K1-D3
tgaaatctttccttcctttctttgcattcctctcacttctcctgtttgtagacaccattgcagcagctaggaaagatgctggagagtactggggagctgtaatgaaagatcagcctatgcctgaggcactccaagagcttgttcggattgaggctgccgttgccaaccccgatgagaaaaccaagtgccatacatcaggtaacattgagcttaaggaagagaagattattgttaatgaggagttcgaaccaaggccaaacatttcagcttacggtgatgacgctaatctaaaaggagataaatcatcatcttttgcagaagattttgaaccgagacctaacatttcggcttacgggggcgatgatgctggtcttaaaggacagaaagaatcattcactaaagatttcgatccacagccaaatatctccgcttacaataactaattaaaagcg

SEQ ID NO: 24413 - DNA, 301 bp, Gossypium hirsutum
  Clone ID: LIB3147-020-Q1-K1-D4
tgcaatcttaccatcatttcatggcatagtttttgcttcttgagaatgtagacacgatggcggccattcggaaagatgcgcgttacgtaccagtgagcatgtgatgaaagaccagccgatccctcgagcactggaggagcatttgcggattgatgatagcgaagacgaccctattaagaaacaccaagctccatacattaggacacattgagctcaaggacgagaagatgattgataatgaggagttcaagccatggacaaacatttcatcttacggcgatgactctaatgtacaacgaca

SEQ ID NO: 24414 - DNA, 302 bp, Gossypium hirsutum
  Clone ID: LIB3147-020-Q1-K1-D5
cccacgcgtccgttcacgcgttcggaaagcttgagcgtaacaaaagcgtagacaccgggcgggcggtgcttgacacctgccgtggcatacgtttgacatctgacgatatgggtctcgatgcctacagctgtaaagggctggttaacataggacagcaaatctctcatcttggctaaggcgtccatgtccatttcatcatgcgtcctgggggcatcggcgctggtgaccagcgccatttgcgtgtttacaccacagataaaacctccgaactgatgccattgaccaattttttaccaacccaa

SEQ ID NO: 24415 - DNA, 293 bp, Gossypium hirsutum
  Clone ID: LIB3147-020-Q1-K1-D6
acggcttttaaggtcctcaatatgagtctgaaacaatagatcaagtgctgacgatgcctaaaaaaatctttcccaatcattgggaacttaaattattaatcttgtcctggaaaacactggggagcataattttaattttttaataacctaaggggttttcttgggtttcttacttaattggaaaccttccaattttggtagggacggtgttttggttggctaattaataatcccttctagaagggtggggccttccttatggttgggtgagggggtgagaatatattatatcg

SEQ ID NO: 24416 - DNA, 397 bp, Gossypium hirsutum
  Clone ID: LIB3147-020-Q1-K1-D7
cacgcgtccgcgcaagcgttcctttatttctttgcatttttttgacttgttttgtctgtagacaccattggggcaattcggaaagatgctggtgagtactggggagctgtaacgaaagatcagcctatgcgccgaggcacatacagcagcattgctcggattgatgctgccgttgccgacaactaggagaaaacctagtgccatacatcatgtaacattgatcttaaggaagagaatattattgtttatgaagaattccaaccaaggccaaacatttcaacttacggtgatgactctaatctaaaaagagatggatcatcatctttagcagacgattttgaacacgacacctaacatttcggcttacgggggcaatgatgctggtcttaaatgacag

SEQ ID NO: 24417 - DNA, 438 bp, Gossypium hirsutum
  Clone ID: LIB3147-020-Q1-K1-D8
cccacgcgtccgcttgattacttgtcttcaaaatacctgaacaagactctgcctgagttggccagggttgcctcggatggtctcattatttttgcaggtacccctggtcatcagaaggctaaagtggcagaactgtcgaaattcggtcgtccagctaaaatgcggagttcctcttggtggattcgttttttcgaccaaagtagtttaaaagaaaacgaaactgccgtgaagaagtttgagcaggctacgtcaaagagttcatacctgccagcatgtcaagtattccacctaaatccataccactgatacaaagagaaaagttatcaagatcaaatttccattatttttgttgtcatatgcattgaaggtgaagtaaaaatatcttcagctctcatacaacatgtactcttgtggggaactaaatttggtaaagtgatg

SEQ ID NO: 24418 - DNA, 115 bp, Gossypium hirsutum
  Clone ID: LIB3147-020-Q1-K1-D9
aaaaaaaaaaaaaaaaaataaaaaaaaatttttcttccgctctaaaaagaaccaaacttactgacgctttcatacgacgtcatacctcttctataaaatcacctaaatccaattt

SEQ ID NO: 24419 - DNA, 282 bp, Gossypium hirsutum
  Clone ID: LIB3147-020-Q1-K1-E1
tggagtcattcttggaaagcgttattaatttagggcttttttagcattcctttacgtgtatgattgtactacgcagctgatttttgttgtgtttgcattttccttctttaagctatgaagcagaatagataagctttatttgctcggttttgaggttcttgtggggaacttgttttcattttttaccttgaccgctttgtcaaaaacagtcagctttatgcatatcgatattgaagtctgtatgcatgaaaattgaattggattgatacatgtctctggttt

SEQ ID NO: 24420 - DNA, 354 bp, Gossypium hirsutum
  unsure (1)..(354): unsure at all n locations; Clone ID: LIB3147-020-Q1-K1-E10
cggacgcgtgggcggactcgtgggaaaaatatggactggatttcatttctccatcttttgcactggtaaaagggaaggttaaaattgtattctgaaaattcggatttttctacatatgtatgtatgtatgtatgtaatgtatgtattagtttaccatctcagcttatctcaatcatgttgccaatcactgtttgtattaacttgggagtttgtacaaaagtggaacggatacaggtattattttctcacaggaaaatgttgtaaaacaaattcttgaaatgatatttgtnagaatataatatatatgtattatccatcttgtggttnanaaataaaacaaaatgggatttaaaa

SEQ ID NO: 24421 - DNA, 315 bp, Gossypium hirsutum
  Clone ID: LIB3147-020-Q1-K1-E11
cccacgcgtccgggaacttctgtcatggtgttggttgaagtttttggggtttctacaatgcggactttgcacaagtgatgattgcttttagagtcgattttcacttgtttccttacaatcttaattttcattaccccattgtttttagtcattgttggagaaaatgttgtgccttctgttggtaaacattacgcaggcattgtctgaatctaatcaaattgaactcccaacttagcagagttaaaaaaaaaaaaaaaaaaaaaaaataaactaaacaaaaaaaaacattcaaaaataaaaaaaacataaaaattg

SEQ ID NO: 24422 - DNA, 411 bp, Gossypium hirsutum
  Clone ID: LIB3147-020-Q1-K1-E12
gcttcacagaggtactccctgcttccgtgggtatggtaggagaaatggagagcgaaggaggaagtcagttcgcggatgcattgttagtcaagatctttcagttctgaacttggttattgttaagaagggtgaaaatgatcttcctggattgaccgacactgagaagccaagaatgaggggtccaaagagagcttcgaaaatccggaagttgttcaacctctctaaggaagatgatgttcggaaatatgttaatacatatcgccgaacctttacaaccaaatctggtaaaaaagtaagcaaggctcccaaaattcagaggttggtgactccgttgaccttgcagaggaagcgtggcagaattgcagagaagaagaagagagttgcaaaagccaaggctgatgctgctgaata

SEQ ID NO: 24423 - DNA, 386 bp, Gossypium hirsutum
  Clone ID: LIB3147-020-Q1-K1-E2
gtcatattggcaggcaaatccaaagatactttccaggtagagagagctaaatcacggaacatggaatctgaacctcaaatggatgccacagccgatgcttcttgattcaggatctgagttctaagtacagagagggtgccagtgcctgcaaatgagggtctcacgactcaagtatgcacgacttaagtatgataatgctgcgactatatttcagctcatgcggttggtcatttacagaatcttagatacggcgagtcatagatctgacataatatgtcgtacctaggcatatattcgtcggacctcatactctaaggtgtctatgtataaaaaaaattataccgactgtatgctttgtgtaaagatcgcattaggaatatactacg

SEQ ID NO: 24424 - DNA, 297 bp, Gossypium hirsutum
  Clone ID: LIB3147-020-Q1-K1-E3
ggcattcttaccatcagatcagccaatagtttttgcgtctagagaatcgacaaacacaaggggccatacaacgcgattcgtttacaatgcagcgtgcctcttaactctgccagcgcctctgcagtaaaaatgcgctgcccctgccgcctgatgcaaggctagcaccgcccatgaggcgaccttaacacaatcatgggcgacttattgctgtccacgtacggctaataattgatggtatcgaattaaagccgagtagaaggatggccctactacggctaaaattgactgaccatcgcc

SEQ ID NO: 24425 - DNA, 349 bp, Gossypium hirsutum
  Clone ID: LIB3147-020-Q1-K1-E4
cccagtcatcctggcatatcagcagagcgtttgcgcgtattgaggaccgtcaaacagaaggggatgtagatggtcataggtgtcgaagcgtgcctgcctctgaccgctgccagcgcctctgcaatgcagatgccctgcccctgcgcggggctgcagggcttgtacggcgcttgcgccgacctgaccacgatcatgggcgcctgtgggctgtacccctacgcgtagtacctgatgcagccgcagtgcagcccggtagcagcagcgccctactacgctcggtgtgggcagacgagcgccatgtaccatcctctgcggcgacagggctgacagcagcaaatgacgatgatgg

SEQ ID NO: 24426 - DNA, 212 bp, Gossypium hirsutum
  Clone ID: LIB3147-020-Q1-K1-E5
cttactcttatatctaattttatgcgatgataatagaaaaaaagagaatcggaatctaccagcaatcaccacctttgaatatcttgcgtttgccttctatagattctgatactgtattatagatactacatgtgtcctatctttaggagcaaaatgaaaactagaagaaaaaccacccctcttacaattaaaaaaaaaacatgggctgtcat

SEQ ID NO: 24427 - DNA, 420 bp, Gossypium hirsutum
  Clone ID: LIB3147-020-Q1-K1-E6
ctggctatggctgtatctctgtctgaagctaaagctatgacaagtaaccctggagttccatggcaatagttttatgtccaagctatcagcgatcgtctttctcgaacagataatgctgaccatggctgttagcttgtggagtctcgagctgtgatgaagtgcaccaagtagctccaatgcaaccggtttaaaggtcaaggtagtgatgatccctttctcttcctcacacgattatcattccatacatagatattaaaattggaaactgattattctaccaaatccaaggttgcttgttttaaccaattcataaatgtttttggggtcccttttgctacattcagtttcatttgttagcatgttcatatcccacaaacaaaaccacttatgatggctttcattagtaccatagcatgcacg

SEQ ID NO: 24428 - DNA, 454 bp, Gossypium hirsutum
  unsure (1)..(454): unsure at all n locations; Clone ID: LIB3147-020-Q1-K1-E7
tcttcctcattttacctttagcttctttcctcctcctcctccctcttctcctccgccaccggcgtcaccgccaccgtcgtcaccatctccatccctcctctgggttttcctcgaaacagctcaaaaagcttccccaattcagattctctcacgaaacggaatccgtcgggtcggattcggattcttgtgtgatttgcttagatgggttcaggcaaggtcaatggtgtagaagcctcgttgggtgtggccatttgttccataggaagtgtttggatggttggttaatcaaagttgctgcttgcccaatttgtagaacgagggttcgatttgaaaatgaagataattgcaattccggtccttgttgttcgaggagagcagagtttcagggcttgtttgatttgtaagtttattgcatatttagtcccntctttttgtattataaaaatggacagct

SEQ ID NO: 24429 - DNA, 481 bp, Gossypium hirsutum
  unsure (1)..(481): unsure at all n locations; Clone ID: LIB3147-020-Q1-K1-E8
aataacggtcgaagtattccacaaatgagaacacgtttactgttggaggggcttttgctgttgatcatctcactctgattaaaggtaagctcaggagtcatgggaggcttggagcactgctgcaacatgaagttgtaccgaagtcgttgttgacaatcttcagtgagcttgacacaaaggccttggaaaaaagtccccggttcggattggcgcttgctctgaagccctaattaggttttttcatttttggctattcaatgatgcttttggaatttgatacgttaaaattttttttcttggagattgattaagggtggcaataaatagttccacagatgataaatattcatttctagggtcttcaaagctgtggatggatgtttgatgatactttangcttttccatgattcaatattgaaagttttgaccatttgataatggtcatttaagccttgttttgctaaggttttcttttaaaaa

SEQ ID NO: 24430 - DNA, 444 bp, Gossypium hirsutum
  Clone ID: LIB3147-020-Q1-K1-E9
gagattgttgagattggctacctaaatgggctctttgtgctagcacgatccattggtttgattgggcacactttcgatcagaagagactgaagcagccactataccgtcatccatgggaagatgttctttacactaagtgagagaacattacgagcagtaggtgcaaatctcctcgagcattgttgttactggagtccttttgtctgcatttttatggggtatggttgtttggttcttagattattgtttgtaaggcaaggctaaatggtggatcaccatcatttctaagttgtattcaaggtccacataggagaaaaaaaatctcaaaaatgctgcgtgattcgtttttagattttttaccagtttcacggataaataagacatgtcttgcacattgaattgtaatattttatgagaaatttcgaaattaggaatcatttatt

SEQ ID NO: 24431 - DNA, 212 bp, Gossypium hirsutum
  Clone ID: LIB3147-020-Q1-K1-F1
gccaggcgtacgaggccagagatcctagccttgatacatgtgcactaagacgacaccgagagcgatactgctagatacgagacctggtgctacggcgttcccgttgttggtgagctaacatgcgctgtgacatactctgatcattagaactacccgagtccatcacgcggccatatacagctacaatgtgtgcatctacatcagagctgctg

SEQ ID NO: 24432 - DNA, 413 bp, Gossypium hirsutum
  Clone ID: LIB3147-020-Q1-K1-F10
gcagcattggctttttacatcctttcagctctctttttcaacagctttgtgatcatattgggggtgactgttcttctttcccccttgatttttgggtggttaagaatgttagtgggcgcatattagtcggtttgaggtggtggaatgaaattaacgatctcggcgagagtgtatggagatttgaatgtcttgaccaagagtcgttggctcggatgaacaagaaagattcatggctattttggtggaccctttacctttcagcggttgcgtggattgtgcttggaatattctctctcataaggtttcaagctgattatctccttgtcattggagtttgtttgactctcaacattgccaatatcgtcggcttcaccaaatgtcgcaaagatgccaagaagcagattcaacagttt

SEQ ID NO: 24433 - DNA, 442 bp, Gossypium hirsutum
  Clone ID: LIB3147-020-Q1-K1-F11
cccacgcgtccgataaatatggtgtagtgcctctccttccaggtgtgtttcttctcccctgcttagcacttcttctgcaattttatgagccaagatgttctcgattctattgataaattggaacctgatttcttgaaaaaactccgactttttttgaatatcactgatgattgctcctataactgacttatcttgcatcgatgtttgacatttctttatgatggttcgtgaatccccctttaccgtaactgagtgtatacccatggaaagtccaagattaatcgagtgaagacctgcataagcttctgctgcaaaagaagttgaaacatttgaatttaagaccgtcttcgtagcaagaattactcccatctgatcccgaaccaccaggcttgccatcgatttgaatcccttcggttaaaagcagcatcaaagtgaatcgtca

SEQ ID NO: 24434 - DNA, 280 bp, Gossypium hirsutum
  Clone ID: LIB3147-020-Q1-K1-F12
aaataaaaaaaaaaaatttaaaaaaaatttaataaaacaaaaaaaaaaaaaaaaaaaaaagagaaataatcaaaaataaaaaaataaaaaatattaaataaaaaaaaaaaaaaaaaataaaaataaacaaaaatggccccccctcttaaaaaaaaaaacctttttatcccccctcttaaaactctttttttttttttttgtttcccccaatttaatttttttcccctatttttaaaccattttcttttgataaaaccttttcatccccaatttttatttt

SEQ ID NO: 24435 - DNA, 474 bp, Gossypium hirsutum
  Clone ID: LIB3147-020-Q1-K1-F2
cgaagtttttccacaaatgagaacacgtttactgttggaggggcgtatgctgttgatcatctcactctgattaaagctaagctcaacagtcatgggaggcttggagcactgctgcaacatgaagttgtaccgaagtcgttgttgacaatctccagtgagcttgacacaaaggccttggaaaaaagtccccggttcggattggcgcttgctctgaagccctaattaggttttttcatttttggctattcaatgatgcttttggaatttgatacgttaaaattttttttcttggagattgattaagggtggcaataaatagttccacagatgataaatattcatttctaggttctcaaaagctgtggatggatgtttgatgatactttaggcttttccatgattcaatattgtaagttttgagccatttgataatggtacatttaagccttgtttgtcgaggtctttcttttaaaa

SEQ ID NO: 24436 - DNA, 401 bp, Gossypium hirsutum
  Clone ID: LIB3147-020-Q1-K1-F3
cacacgatgagaacacctttactgttggaggtgcgtttgctgctgatcatttcactctgattaaaggtgagctcatcagtcatgggaggcttggagcactgctgcaacatgaagttgaaccgaagtcgctgttgacaatctccagtgagcatgacacaaaggccttggaaaaaagtccatggctcggattggcgcttgctatgaagccctaattaggactcttcatttttggctattcaatgatgcttttggaatctgatacgttaaaagttcttttattggagaatgattaagggcggcaattaatagttccacagatgataaatattcatttctaggatctcaaaagctgtggatggatgttcgatgatacttcaggcttttccatgattcaatattgc

SEQ ID NO: 24437 - DNA, 261 bp, Gossypium hirsutum
  unsure (1)..(261): unsure at all n locations; Clone ID: LIB3147-020-Q1-K1-F4
cccacgcgtccggaataaagtagccatggcttgtcgtaggttttgcctgttgccgccacggttacttggtgcttgccaatagatagagtgaagtactaatatttacttgtttttctgtccagtgtgagcatctctgctatctcaggatatattgtgactattacataattaatgtaaggaagtgagtcagattcataatgaatgaaaagaagctcctatttcgttnaaaaaaaaaaaaaagataccaacacaatacgatag

SEQ ID NO: 24438 - DNA, 384 bp, Gossypium hirsutum
  Clone ID: LIB3147-020-Q1-K1-F5
cccacgcgtccggtactcactcaacattcctatttccaatctccagctgcgagggtaaatatgccgatcagaaacatagcacttggccggccctaagaggcgactcaccccgatgctctcaaggcagctttggctgagatcatctcaaccttgatcttcgttttcgctggatcgggctcaggaatggcttttaacaagttgaccgacaacggatcaacaaccccggccggtctcgtagccgccgctctagctcatggcttcggtcttttcgtcgctgtctccgttggcgccaacatctcaggtggccacgtcaaccccgccgtcaccttcggtgctttcgttggcgggaacatcactctcttgcgcggcattctttactggatc

SEQ ID NO: 24439 - DNA, 354 bp, Gossypium hirsutum
  Clone ID: LIB3147-020-Q1-K1-F6
aaaaaaaacaaaaaaaaaaatcctctgaagaggattcctggtcctctgagctccggcatttagccgatcagctctggtcatcggacctccacgctgagatccacgcgccgccaccgactccgccacacattacggtcggaacttgaaaagtttcacttttcaaggtacttgcgaaaaattcggcaatggcaaaggcttgatgatggtccaccggtggcgttgatctcggcgtgacttggggcctggaatcatggccttgacggggtagctggaacagcaggagctgaagggtcatgaggcttggcttctggaaccttctgtttgcggcgtgaggagaaagagggcagaaaccct

SEQ ID NO: 24440 - DNA, 316 bp, Gossypium hirsutum
  Clone ID: LIB3147-020-Q1-K1-F7
cgcgtcggcggacgcgtccgaaaaaaaacacagaaagattcctctgaagttgattcctggttctctgagggccgccattgagccgatgcgctatggtcatcggacctccacactgagatccacgctccgccaccgactccatcacacattatggtcggaacttgaagagtttaacttttgaagggacttgcgaaaaatcctgctctggcactggcttgatgatggtgctccgttggcgtctgtctcggcgtgacttgggaccggtaataatggactcgacggtttagctggaacaacatgagctaaagggtcatga

SEQ ID NO: 24441 - DNA, 324 bp, Gossypium hirsutum
  Clone ID: LIB3147-020-Q1-K1-F8
gacccacgcgtcgacccatgcgttctgacacgcatccgcccactctttccgagggtggaaacgatgcagctatgcgggaaatcgctgacggtcaagacaattactttcgcggtcaaaaggacgagagtagtcacatcaaaagagcgtatactctatactttgacagaatacaagctgtccaataaccaatgatttgtggcgcaaaacatctagaatgatgccatacatcgcctgacttcttttttagaatgaatcaacacttcatctctttatgatgttgataggcgtaattattgaaccgattgggatggcttttgcttgtaa

SEQ ID NO: 24442 - DNA, 433 bp, Gossypium hirsutum
  Clone ID: LIB3147-020-Q1-K1-F9
cccacgcgtccgctcccttactaacaacatttacccggaaatgtcggacgacgatcatcgtttcgaatccaaggctgatgccggcgcatccaaaacctatcctcagcaagccggtactatccgtaagaacggctatatcgtcattaaaggccgtccctgcaaggttgtggaagtttccacctccaagacggggaagcacggtcatgctaagtgtcacttcgttgggatcgatatcttcactggcaagaagttggaagatattgttccctcctcccataactgtgatgttccgcatgtcaatcgtactgactaccaattgattgacatttctgaggatggatttgtgagtttgctgactgagagtggtgacactaaagacgatctgaagctcccaactgatgagaacttgttgatacagatcaaggatgggttt

SEQ ID NO: 24443 - DNA, 382 bp, Gossypium hirsutum
  Clone ID: LIB3147-020-Q1-K1-G1
cggacgcgtgggcagtgaatccatggaggaccctgtacaagaagcaagaaaaataatggatacgtacaaatgacaaatgcaagatcatgattatggtctatcatccaaattttgagttacactcttatataatttgtgggcatgcactgcatagaaagaagaaacatactgtatggaatatctttaatccataatctacaactaaatattaaaaaaagatacataaagtactgtagaagttatgctttcgaatgctgacacgttagcagttggtttttttttattcattacggttaatgataaagcaagggtgaaaaaatgactaattgccccttctataatttaaccaactgacagttgttaactcttctgcttatttaca

SEQ ID NO: 24444 - DNA, 358 bp, Gossypium hirsutum
  Clone ID: LIB3147-020-Q1-K1-G10
cccacgcgtccgctcccttactaacaacatttacccggaaatgtcggacgacgatcatcagtgcgaatccaaggctgatgccggcgcatccaaaacctatcctcagcaagccggtactatccgtaagaacggctatatcgtcattaaaggccgtccctgcaaggttgtggaagtttccacctccaagacggggaagcacggtcatgctaagtgtcacttcgttgggatcgatatcttcactggcaagaagttggaagatattgttccctcctcccataactgtgatgttccgcatgtcaatcgtactgactaccaattgattgacatttctgaggatggatttgtgagtttgctgact

SEQ ID NO: 24445 - DNA, 393 bp, Gossypium hirsutum
  Clone ID: LIB3147-020-Q1-K1-G12
cccacgcgtccgcccacgcgtccggaaagatcgaaagtcaccattctcgcctaaaacaatggatttcagagtcatgggtttcgattcaccactgttccataccctccaccacatgatggacctcaacgaagacggcgataacaagaacaaccccaacgccgcgtcaaggacctacgtacgagacgccaaagccatggcggtgacaccggcggacatcaaagaggactcgaagtcgtacatgttcgttgtcgacatgccagggctaaaaccgggggacataaaggtgcaagtggaggaagagaatgtgctgttgataagcggagaacggaagcgagaggaagagaaagaaggggcgaagtatattcggatggaaaggagggtggggaagttgat

SEQ ID NO: 24446 - DNA, 431 bp, Gossypium hirsutum
  Clone ID: LIB3147-020-Q1-K1-G2
ctctcctctctgagaacaatcctctcactggtagcaagggtgagatcaggaagcaatgcaatcttgcaaacaagcttcactaaaatgcctcgccaaagagaaagccgagagtggccgaataaaatggttgtttacttgtttcttttccaagagacaagtttgttaatgtgcagtgagtaatggtgcaatggtactagtttgatacgatcgacccattgcatttttttttagcataagccaggttgccttctcttgatgttggtcatgggcgtagtggatgtagggatggatgtaatgtatgtatgtaaggatggtgttgactgtgtatgatgcatgaatttcaaagatttaaaagttatgatgattcatgcataatcccttccttctccattacgatgcaatactatgagcaatattattgtatttggatc

SEQ ID NO: 24447 - DNA, 286 bp, Gossypium hirsutum
  Clone ID: LIB3147-020-Q1-K1-G3
cccacgcgtgcgagcaaagaccttgcgtttgtgagcaacgttagctctgaacgaacagtggagaacaaggagcgatggttgttcaatttcatggggaaaaaaggactggagaagcctcatgacgaggtgatcgtctccgattttgaacaggttaatactggaacatacatgcgcaaaggaaaagtgcgacgagaacaagaagcttcgtctcatggaaaagcttcaccgataagatagcattagttgcagctctttaagcgactatgaagaaggtgaacgataagag

SEQ ID NO: 24448 - DNA, 423 bp, Gossypium hirsutum
  Clone ID: LIB3147-020-Q1-K1-G4
cccacgcgtccgcggagatggaagccacattgaacttgcatgcaatgaatcagagccccagcccatggcacgtttctttctcttacgcacgtgcattgcagaacactgtgcttaagacatggcaaggacgtccagagaatgttgaagctgcacagaaggctcttttggtgcgtgcaaaggcaaactctctggctcaactcggaaaatactctgccgagggtgaaagtgaagaagccaagaaaggaatgtttgttaagggctatacctattaaggcgtaagacactgtaatatctggtttttgggcatctatggctttttgtgcgaggattattacttgctgttagataagttttttacatattattgttatgcctcctgaaactagggaggttgaataagttacttgggagattaagagaaac

SEQ ID NO: 24449 - DNA, 338 bp, Gossypium hirsutum
  Clone ID: LIB3147-020-Q1-K1-G5
cggacgcgtgggcagtgaatccatggaggtatcctgtagaagtatgcaagaaaaataatggaagggtacaaatgacaaatgcaagatcatgattatggtctatcatccaaattttgtgttacactcttatataatttgtgggcatgcactgcaaagaaagaagaaacatcctgtatggaatatctttaatccataatctacaactaaatattaaaaaaagatacataaagcactgtagaagttatgcttttgaatgctgacacgttagcagttggtttttttttcttcatttgggtgaatgagaaagtaagggagaaaaaatgcctaattaccccttt

SEQ ID NO: 24450 - DNA, 366 bp, Gossypium hirsutum
  unsure (1)..(366): unsure at all n locations; Clone ID: LIB3147-020-Q1-K1-G6
gccacgcgntcgaaacatgaagtcacatttactgggatgcgacagtgagaaccacgaggcagcataggagcttttcttttacgcacgatcatagtccaagactctgctgaagacatgacatggacgtccacatattgctgaagcaagcacacaaggctcttttggtgcagtgcagtagcgaactctctggctcaactcgaaacatactatgcctggggtgaaagtgaagaatccacacagggcacgtttgttaagggctatacctatcaatgcgtaagacactgaaatatctggtttttgtgcatctatggctttttgagcgaggattattacttgctgtcagataagctttttacatattattgt

SEQ ID NO: 24451 - DNA, 451 bp, Gossypium hirsutum
  Clone ID: LIB3147-020-Q1-K1-G7
gatttatttcttccttatcttccttcagatcccacttttcaggatcccatgcagatccggatgtgttcaactccaattcatgtcacatcttcccagttgatcgcaagtgacatctttcctgtacctgtggtgaaggcaatcctttttcccggagccattacaaatggccttgccaagaattggactgttccgagctgggacaacttgttaaacacgtataacttaactagtataaaggaatcctctgcattacccgatctccagcgcttagaggttctagcaggaagctacttttgtgtggcaggagcactcgtgggacttctaaaacccggaagaatgagcatgtttgggacactgctcgtaatatggggtctcgtcaaggaagggatcataggaaaaccggcaaataccgatcttacaaaagctgtatacgtatatccaacaatggtgc

SEQ ID NO: 24452 - DNA, 391 bp, Gossypium hirsutum
  Clone ID: LIB3147-020-Q1-K1-G8
gactcattcgttctgctacaacttccactcatattgaagctatctactgctcaattcatattctccacggcatctgctgttcctaaagacgactcagatgaggaaagaacctatcctgcttattatgaaaattcctcacatcatcaacgtcgataaatagacttattctaatagtaatgctagagatgctatcttactctcatatactgataacgcattgctattaccacacagtattagacatcatcaccacgttttcccctcgaaatttacgttcaagaaaacaagatctaaatagatttatgaggtagatgattctttgcaggatacaccaggctcacctgtccacagtcccaaggttagtgatgagtctaaaccaaatgatatgaat

SEQ ID NO: 24453 - DNA, 395 bp, Gossypium hirsutum
  Clone ID: LIB3147-020-Q1-K1-H2
ctcttctcttctgcttaatttgactgatatggaagattactctatcaattcatctatacacaaatctgctatttctaaggacgactcagttgaagaaagtggctggactgcttattttgaagatttctcaaatcatcagcagcaaaaagatagttattcttatagttttgattgtgattcttccttgatctcagatgctgctactgcatggaaatcaccccacaatattgaccatcatcaccatgttttccccaagaaattaaggttcaagaaaacaagaactaaagagatttatgaggaggatgattctttggaggatacagcaagctcacctgtcaacagtcccaaggttagtgatgagttgaaaccaaatgatatgaatcctagaaagagag

SEQ ID NO: 24454 - DNA, 428 bp, Gossypium hirsutum
  Clone ID: LIB3147-020-Q1-K1-H3
gcgagcagagctgttgcaaagatgtctttttgaaaaaaaggtctggacggttacacattaggggtttgtgcattctaaatggacaccttgtgagaatgggagttcaagttcatgagcaagtacgtgaaggttggaaccatcaagaagacaacagtttcagtaaccgaaggggatgccagtggtgaagcctcaggagctgcagaaactgatactaagccaactgaagatggtgcatcacaaactacagttactgggtcagaggaaaaatcttctcctgcagatactaaggaggagtaacatgttcgagctttagctgtgtctgattcgaacaggtgatcactctttgtactggacatgccggaagagacagcattggtgtgttcgaatgaatgtgaatcgacttctatatataaactcagagtagtgca

SEQ ID NO: 24455 - DNA, 318 bp, Gossypium hirsutum
  Clone ID: LIB3147-020-Q1-K1-H4
cccacgcgtccgcccacgcgtccgcccacgcgtccgcccacgcgtccggcacgccccgcctgcggaatcttgaagtgatcctgcccgtataagagcttttccacaagtatgttcaaaaccccaccaacctaaacaagatagaacctatggggctgaataaacccttctatatatatatattacttatttttatatatattttggggcgtaaaattaaattttggtgggatgaaatgaaagaacaaagaatgtatctatatatgtactgaattgatgggttttatattattagaagcggagttatttcttgtctttgat

SEQ ID NO: 24456 - DNA, 350 bp, Gossypium hirsutum
  Clone ID: LIB3147-020-Q1-K1-H5
cgtccgggaggaaaactcttgcatttatgtctttcttttaaaaagatttgacaggtgacatttcagggtgtgtttcggtcgaattgtactcattgcacgaatgggagttcaagtttcatgaacaagaacgtgaatgttggaaccatcaagaagacaacagttgcacttaccgaatggaatgccagtggagaaacctcaggagccgcatatactgattctaattcaactgaagaatggccatcacaaactacagttactgggtcaagaaaaaaatcttctcttgcatatactaaggaagaataacatgttcgaactttagctgtgtttgtttttaacaagttatcactctt

SEQ ID NO: 24457 - DNA, 424 bp, Gossypium hirsutum
  unsure (1)..(424): unsure at all n locations; Clone ID: LIB3147-020-Q1-K1-H6
ggctgccgacggagcaaggaaccagttgtttctcaacgaaatatagagatgggaagctcaagcaaagatcttctacggtttgaacaccataaatcctcttcttcacccttagaatccgctctacttgtttgtaagaaaaaggactcggaatctcaaactcatgaacctgatccttccaagaaaccccccttcactccttttcctaaaagccaagttttggggaaagtgaaagatttcttgggagtcatggcagaagctaataaaaggctggagcttgatgcaaagaataattctcaagcatatgatattgaagtactcaatgggaatgattctgaagtcattgaaatggatttgatgttaggtgtagctgatcttcacacancctaagctctggctgctgctgaatctgcaattgctggcaatc

SEQ ID NO: 24458 - DNA, 414 bp, Gossypium hirsutum
  Clone ID: LIB3147-020-Q1-K1-H7
gggcggttcgctgcccgcgacgtcgcgagaagtccactgaaccttatcatttagaggaagggtctattgactcttaatccatatcattctgaccgctttttgctatcaccgactgcacttgctggtttggttacaatgttgcacgcatgcctcgatatgaaagctatggtactgggaaaataccattatgtcctctacttcattgttctggcaatgcagccaaggatgttgatgaccgtcgacgaaaacctcaaacctctatcggtcccagtccgtgtaggtcaagctgttgatgttgttgggcaggctggtcgacccaagactatcactggctttcaaactcattccactccggttcttcttgctgccggtgatagagcagaactggctaccgaaaagtatatttccctttca

SEQ ID NO: 24459 - DNA, 325 bp, Gossypium hirsutum
  unsure (1)..(325): unsure at all n locations; Clone ID: LIB3147-020-Q1-K1-H8
gcgtccgccacgcgtacgcccacgcgtncgcccactcgtncgcccactcgtccggcacgccccgcctggggaatcttgaagtgatcctgcccgtataagaacttttccacaagtatgttcaaaaccccaccaacctaaacaagatagaacctatggggctgaataaacccttctatatatatatattacttatttttatatatattttgnggtgtaaaaataaattttggtgggatgaaatgaaagaacaaagaatgtatctatatatgtactgaattgatggggtttatattattagaagcggagttatttcttgtctttgatg

SEQ ID NO: 24460 - DNA, 347 bp, Gossypium hirsutum
  Clone ID: LIB3147-021-Q1-K1-A11
cggcaagacacaaactgtgaacttaacagcctaatttttccattattgctagaggcttgaagaaacgggtcattgtgctctattcccccaggcattgaatactacacaagcttggtggtgctttcgcacccaagccatcgtctggtccctacaagtccaaggaatgcttgccattgatccttattttgcgaaaccgattgtagtatgctctcacctataaacaagtcattgctattctcatgcataggcattttatggttgatggaaaggtttggactgataatatctatccagctggtttcatcgatcttatcttcatttactaatacaaatgaagacttccctct

SEQ ID NO: 24461 - DNA, 485 bp, Gossypium hirsutum
  Clone ID: LIB3147-021-Q1-K1-A12
ccattggtttcaatgtggaaactgtggaatacaagaacatcagctttactgtctgggatgttggtggccaggacaaggcattacttccaaaacacacaaggactcatttttgtggttgatagcaatgatcgtgatcgtgtggtcgaagccagggatgagttgcacaggatgttgaacgaggatgagttgagggatgctgtgctgcttgtatttgcaaacaagcaagatcttccaaatgctatgaatgctgccgagatcactgacaagcttggccttcattctctccgtcagcgccactggtacatacagagcacatgtgccacttccggtgaaggactgtatgagggactggattggctctcaaacaacattgcgaacaaggcttaaatgaaacaattgaaccgacggtcacactaacaatggccccattttgatgttctggatgtccatctcgttcaagtgttctggctttctttttttatatt

SEQ ID NO: 24462 - DNA, 479 bp, Gossypium hirsutum
  unsure (1)..(479): unsure at all n locations; Clone ID: LIB3147-021-Q1-K1-B10
attggtttcaatgtggaatttgtggaatacattaacatcttctttactgactgaaatattaggggccaggtgtgggctttacttccaaaacacacaaagactcatttttgtggttgataacaatgatcgtgatcgtgtggtcaaaaccagggatgaattgcacaagatgttgaactaagatgatttgagggatgctgagctgctggtatttgcaaacaagcaaaaacttccaaatgctatgaatgctgccgaaatcaatgacaagcttggccttcattttctccgtcagcgccacttttacatacataacacaattttctctttctgttaaagactgtatcaaggactgtatngtctctcaaacaacattgcgaaacaagcttatttgaaacaattgaaccgacttttatactaacaatggccccattttgatgttcttgatgtccatctcgtacaactgttctggcttttttttttta

SEQ ID NO: 24463 - DNA, 378 bp, Gossypium hirsutum
  Clone ID: LIB3147-021-Q1-K1-B11
cggacgcgtgggctcatttttaagtctgcaaaatttctagtttgccacttccccgccgcctctccgaaccatgtgccgagtccgtaccaagacggtaaagaaatcctctcgccatgtgatcgagaggtactactctcgcatgacgcttgatttccacaccaacaagaagatcatcgaagaagtggctatcatcccttccaagcgtctccgcaacaagatcgccggcttttccacccatctcatgaagcggatccagaagggtcccgttcgtggcatctctttgaagctccaagaagaagagcgtgaacgtcgcatggatttcgttcccgaccaatccggcatcaaggttgatcaaatcgaaatcgataaaggaactct

SEQ ID NO: 24464 - DNA, 256 bp, Gossypium hirsutum
  Clone ID: LIB3147-021-Q1-K1-B12
agggacgaacacgcgtacgaccacgcgtccgaaaaaaaaaaaaaaaaaaaaaattaaaaaaattaaaaaaaaaaaaaaaaaaaaaggggaaagggggaaaaaaaaaaaaaaaaaaaaaaaaaaaaaaaaaaaaagggggggcaaaaatagaagaaaaaaggtaaaaagaggcgagagggaaaagtaataaaccataaataacaaaaatgaaatgtaaaaaatgggaaaaagtaaaaaaaggaaacgattgggaaaa

SEQ ID NO: 24465 - DNA, 427 bp, Gossypium hirsutum
  unsure (1)..(427): unsure at all n locations; Clone ID: LIB3147-021-Q1-K1-C11
gccgctcattcagtanccggagattattgccgatgcaatgtatatggagatacctgttctcaatcttcaataactggatcaacgcgcggaatcctcctcgtacaacacggtttcttgtagaatgttttctactagtagaccctatactcgatttgcgttagaggagacaggttatgtttacgattcgtactcatctatgcaacccgagtttaggtttcatgagaacctggaacaggttagtgattcgttgtcggaattttctttagctagtgactatggcttgtttgtaaaatatgggaacaacccgaaaaatagtcttgatagaactgctaattatgaaccctactagttcatggaaattcctactgataatngttttactccatttttgggtttcaatgcttntgttgatcacatcaaaaggatg

SEQ ID NO: 24466 - DNA, 463 bp, Gossypium hirsutum
  unsure (1)..(463): unsure at all n locations; Clone ID: LIB3147-021-Q1-K1-C12
ctttaagaagccacgacgtccgtatgagaaggaacgattggatgctgagttgaggcttgtaggagagtatgggctccgatgcaagagggagctgtggagggttcagtatgctttgagccgcatccgtaatgctgctagggaccttctcactcttgatgagaagaaccctcgtcgtatttttgaaggtgaagcccttcttcgtaggatgaacaggtatggacttttggatgagagccagaacaagcttgattatttcttggcttttaattgtgaaaactttctttagcgtcgtttgcaaactctcgtgttcaagactggtatggccaagtcaattcaccatgcacgtgtgttgatcaggcaacgacacataanggtcgggaggcaagttgtgaacatcccgtccttcatggtgagggtcgactcccaaaagcatattgatttctctcttactaatccgtttgga

SEQ ID NO: 24467 - DNA, 247 bp, Gossypium hirsutum
  Clone ID: LIB3147-021-Q1-K1-D10
actaaatatttaaaccataatctctaaacttcattcaacgacacttcaatgagtggaatttgttaactttttctacgaccgagacccctacaaaatctatccattctcattcatctagatcgattatgaacactattgaatctacaaacaatccacttaaaacgatttctgtggtgttgaatttttatagagatatgaacatattgttgaaattttttcaaagtcgaaaaaagctttttaatgcatt

SEQ ID NO: 24468 - DNA, 330 bp, Gossypium hirsutum
  Clone ID: LIB3147-021-Q1-K1-D11
gggaaacagcccatggctttgtctgtggaccatataccaaatcgagaagatgaatatgaaaggattgaagccgctggaggcaaggttatccaatggaatggtcatagagtttttggtgttcttgcaatgtcaaggtccattggtgatagatatttgaagccgtggatcattccggatccagaagtagtgtttgttcctagagcgaaagaagatgaatgcctcattttggccagtgatggtctatgggatgtaatgtcaaatgaagaagcatgtgacctagctcggagacgaatacttcaatggcacaaaaagaacggtactacactgact

SEQ ID NO: 24469 - DNA, 483 bp, Gossypium hirsutum
  Clone ID: LIB3147-021-Q1-K1-D12
gaaccagcttgatggctttgatgctcgtggaaacatcaaagtcctgatggcaacaaacaggccagacacactagatcctgcattattacgtcctggacgtctggaccgcaaggtcgagtttggtcttcctgatttggagagtcggacacaaattttcaaaattcacacaagaacaatgaattgtgagcgtgacattagatttgagcttttagccaggctttgtcctaattccactggagctgacataaaaaagcgtgtgcacagaagctggaatggatgccattcgggctcggaaaaaaactgggaccaaaaaaaacttccttgatgctgtgaacaaagtgatcaaaggttatcaaaagttcagtgcaactcccaaatacatggtttacaattaaccgggttttacctctaccaactcctaaagacatgttctacattcaaaccaaaacatatatacctttttcaatgtattggaatagatat

SEQ ID NO: 24470 - DNA, 391 bp, Gossypium hirsutum
  Clone ID: LIB3147-021-Q1-K1-E10
gttcaattgaattagtttagtttaagctttgcctactctaaatctaggtgttggagttggcttgagggatgaaactaggaaggcattgacagtgaaacttctggaaccaaagaggacaaaattggtttgagagataaaaccataattaaaggtgaacttgggaaggtaaaaaaacaaagagaaaggaaagagatttggttaatggtaaaactgagatagaagggaggcagggctgcagaatatgcagaagggaaaagaaaaggttgtgttggatggaggagaaggaaaaaaaatactgaaaagtaatgcataaaatgatgcttttgtgggggataaggataaaatggaaagaaattataatgaaaatatgttttaaggattgggatgatgt

SEQ ID NO: 24471 - DNA, 375 bp, Gossypium hirsutum
  Clone ID: LIB3147-021-Q1-K1-E11
ctccaatttcaggaattttcttcgtcctaaattttttttggttgggagctctacctttgagttcggagccatggcagaagagtccgacttcgccgataaggttcctccctccttttatgaaatgggaaacaagatcatttatgaaactgaagccaaagggttgaacccgggattgatagtgctactagttgttctggggctgctgctgatattccttgtagggaactatgtactttactcgtatgcgcaaaagactcttccacctaggaaaaagaagccggtttccaagaagaagatgaagagagagaggctgaagcaaggagtctcagcgccaggagagtacgacttcgaggtctgatctcttcaactccccat

SEQ ID NO: 24472 - DNA, 407 bp, Gossypium hirsutum
  Clone ID: LIB3147-021-Q1-K1-E12
cccacgcgtccgcccacgcgtccggccccggtttaaagcgcccgaaggccgtgttctcttggcccgagctcgagagaagagcccattttcttcccctttgggaatcgatttcaacgacggagcaggggctccgacgacactactctgaggttcaggtaagtcctcttttctcttcccttttttattttttattttaaaaactaatttaagaacaaaaaataaaaataaaaaaacgagagaatgaaattcaaccttttttttttgcttaatcgtgtgtctttttttacaatatttcgcctttttggcttcttatagccgaaaacaaaaaatttaaatctattggttgctattggtttggctttggtttctctacctttttggcggtttcccttttctggcattgttgc

SEQ ID NO: 24473 - DNA, 358 bp, Gossypium hirsutum
  Clone ID: LIB3147-021-Q1-K1-E9
cccacgcgtccgcccacgcgttcgggtcgatactttactgcttttgctatgttccgtggtaaaatgagcaccagggaagtggatgagcagatgttgaatgtccagaacaagaactcctcatactttgttgagtggatcccgaacaatgtgaaatcgaccgtttgtgacatcccacccactgggctgaagatggcatcaacatttattggcaattcaacatccatacaggagatgttcaggcgtgtgagtgagcagttcacagctatgtttaggaggaaggccttcttgcattggtacacaggggaaggcatggatgagatggagttcactgaaacttagagcaacatgaatgatctgg

SEQ ID NO: 24474 - DNA, 463 bp, Gossypium hirsutum
  Clone ID: LIB3147-021-Q1-K1-F10
ccaaaatccccaaaagatcaatacataaaaaatattaaatacatcttttctttgtttttctatttgcgtactgctgtggtttgtctgttcttcgcaggtacggggtgcgttggcatcgtacggaggctgtgctggcgcgggcgtggctgctggaggtacggaggctggggctgctgcggcgcaaacagattgctagggttctgccctatttttgaatcttgggccacttgggctgatataatttggactagttttattagttttgggctatgggtcatgtaactgggctatggggtattgggtttgtgacttgggtcttggattttaattctgggtttaaggtcatgtattaattctaggttttggactgcaatgatttgggttgtaaaaagacactaaaatgggttgtttgtgtttaaaccttctgttcattgaattaatttatattttggtttgggctttt

SEQ ID NO: 24475 - DNA, 406 bp, Gossypium hirsutum
  Clone ID: LIB3147-021-Q1-K1-F11
cccacgcgtccgtccagcgtatccttcatctgcattccctcctccaccttcggcttatcctccaccacattcggcttaccctccaccaccttccgcataccctccgccaccttcatcgtatcccccatctacgtatccacaacaatcaccctattatccgccaggtcctttcccgggtcattatcccccaccaccgtactaaaacctccaaggaggagacaattcctcatcggccaagggtttcacgtgtcaaccgaaagcaaaaatgagaagtatttaaaatattgtgtggaaacagaaaacttagaactctgtaatagccattgtatagttttgaccttttaataatgatataccattcaagttggggatttctttttaggtcatttctacttctgttttggtc

SEQ ID NO: 24476 - DNA, 417 bp, Gossypium hirsutum
  Clone ID: LIB3147-021-Q1-K1-F12
ggaccacccacgcgtccggcgcgcccttttttttttttttttttcatatatttatcctttttcaccaacaaaaaaaacaaaccgcattctttttacccttcaccaccttccacataccctccaacacacttatcatatcccccatctacgtatccacaacaatcaccctattatacgccaaatcctttccctgatcattattccccaccaccgtactaaaacctacaattatgaaacaattccttatctttcaattatttcacttcttaatcaaaagcataaatgataagtatttataatattttctttaaacatataacttacaacttttgtataacccattcttttttttgactttttattattattatacatttcacttctcaattaattataaaacattctactctctttttc

SEQ ID NO: 24477 - DNA, 407 bp, Gossypium hirsutum
  Clone ID: LIB3147-021-Q1-K1-F9
cccacgcgtccgcccacgcgttcggaattaaagtttacataaggaaataagttactatcaaaacatgcaggaaaaaagtttcatctggcaatatagtaatttgtagacccaaaataatattcgacctcttcaatagctttccctttttttggtaaattggcctatttaccacctttttccaggatgatcttctcctgtgtatataatgtatacaccaataggtcgggtaaagaactgaagcagcttggcaatgtgacccaaaatcttttagcctttggggaaagcaaaatgtgagcaatagatgcaggtttttctatcttgcaactgtaaaaagtatttggattttttttcaatatttttcataattaatttttatttaataatatgataaaaggctttatggttta

SEQ ID NO: 24478 - DNA, 301 bp, Gossypium hirsutum
  Clone ID: LIB3147-021-Q1-K1-G10
cgggcgggagcttacttatttctaacttctttgtcatttataggcgcgctttatatacttgtgattgtggtgtttggtgtcagacccttaacacatattatattgcattcttcgcaaaggctatgctctactttagctccgagattctaccctgccacccagaagagccgctcatgtacacctttgtttgtggttcacatgatgatgccaagagctgacgggttcacaagaccaagctaagagccatccatgtcgcaaatatttcctttatatgttaaaagcatgggttcgaaccccacct

SEQ ID NO: 24479 - DNA, 338 bp, Gossypium hirsutum
  unsure (1)..(338): unsure at all n locations; Clone ID: LIB3147-021-Q1-K1-H10
caaaaaaaaaaaaaaaaaaatttaaaaaaaaaaaaaaaaaaaaaaaaaaaaagggggaaagggaaaaaaaaaaaaaaaaaaaaaaaaaaaaaaaaaaaaaaaaaaaaaaaaaaaaattaaaaagaaaaggaaaaaaaaaaaaaatgggaaaagaaaaagaaaaggggggagtggtaaaaaaatgaaatataaaaattaatgagatggaaaaaaataatggtaagaaaagagagaaaaataaaaaaaaggtgagtaanaaaaaaaagtaaaaaaaaaagagnattttgaatgagaaatgggaaaaaaatttaaaaggaaaaaaaaagagaggatggaaa

SEQ ID NO: 24480 - DNA, 85 bp, Gossypium hirsutum
  Clone ID: LIB3147-021-Q1-K1-H11
ggccgcccttttttttttttttttttgaaaagaagatacttcattccatttttatgattttaagagaacagtaacaacatcgatc

SEQ ID NO: 24481 - DNA, 95 bp, Gossypium hirsutum
  Clone ID: LIB3147-021-Q1-K1-H12
cacgcgtccgggccggccttttttttttttttttttgaaaagaatatacttttttccatttttatgattttaagagaacagtggcaacatcgatc

SEQ ID NO: 24482 - DNA, 174 bp, Gossypium hirsutum
  unsure (1)..(174): unsure at all n locations; Clone ID: LIB3147-021-Q1-K1-H9
agggggtgaaagaaggaattataaggaaaaaagaagaagaaattggagaagagaaatggaatgaagagatgaagaatgntaggggggaagatgatgaagaaaaggatgagatgaagaatgataatgaagaaaatggaaaattaataaatgattttaatgttattgaagttagtg

SEQ ID NO: 24483 - DNA, 275 bp, Gossypium hirsutum
  Clone ID: LIB3147-022-Q1-K1-A1
gacaacggagcaacaaccccggccggtctcgtagccgccgctctagctcatggcttcggtgttttcgtcgcgggctccgggggcccaacattttaaggggcccacttaaccccgccggcacctttggggctttcgttggcgggaacattacttttttgcgcggcattctttactggatcgcccaacttctaagcttaaccgtcgcttgcctggtgcttaaagtccgtatccggaaaccggcttgaccaacttttggattggaattaagggggggc

SEQ ID NO: 24484 - DNA, 427 bp, Gossypium hirsutum
  unsure (1)..(427): unsure at all n locations; Clone ID: LIB3147-022-Q1-K1-A10
gtgcattagagtacctccatgaagtttgctcgccatctgttgttcacaaaagtatcaagtgagctaacatcttacttgatgctgaactcaaccctcacctttcagactcgggcttggcgacgtttattccaaatgcagatgaggtactaaatcgtgacgatgtggggtctggacacagtgcacctgaggttactatgtccggacagtactctcttaagagtgatgtttatggttttggagtggttatgttggaacttctcactggacgtaagccatttgacagcacaaggcctagactggagcaatctttggttcgatgggcaacacctcaactccatgatatcgatgctctatccaagatggttgacccggcacttaaagggctttaccccgttaaatctctctcacgttntgccgatgtgatcgc

SEQ ID NO: 24485 - DNA, 431 bp, Gossypium hirsutum
  Clone ID: LIB3147-022-Q1-K1-A12
atgtaaaggcttgttgggggataaggctcggttgagtatttacgatccgcaggtgactgcggatcagattcagcgggatttgacgatgaacaagtttggttgggatcatccaattcatcgtcagcccatgagtccaaccggtgtgaagcaagtaagtattgcttgggatgcttatgaagcaagcaaggatgctcatgctttgtgtattcttactgaatgggatgaattcaagacgcttgattaccggagaattttcgacaatatgcagaaaccggcatttgtgtttgatggccggaatgtggtgaatgtggagatgttgagggacattggttttattgtgtattccattgggaagccgcttgatccttggcttaagaacatgcctgctgtggcatgatcgacctatctttctctttataactatactacta

SEQ ID NO: 24486 - DNA, 300 bp, Gossypium hirsutum
  Clone ID: LIB3147-022-Q1-K1-A2
tacactgagtagatagaacattatcgagcagcaggcgcaagtgttctgaagcattggtggagcaggtggacttggttgcgtatgctgtttaatggggtgtgctgactggcgacgaaaggaaccgtctgtctggagctgacaaaaaggtgaatgacgctaggagggcttcatggaggattgtctcttctattgagcagaaagatgagagctgatgaaatgaggatcatgtggcatccatcaagaagtctgggagctagatcgtagctgagctcatgaagatgtgtgatgggagattgagcc

SEQ ID NO: 24487 - DNA, 458 bp, Gossypium hirsutum
  Clone ID: LIB3147-022-Q1-K1-A3
gcgtccggaggaaataaagtatcggggaaaattaaaaagaaaatattgataatcttctaccactttcgtcttcacgacgtccaatctactcgggctttgagatcaacattgaagcatttcgaaaattttaaatattctttcccatccaaaatccttcttcaagtttaacctcaaattaatcaaaatctggtttctttattttacttgtactaaatttgtatttgtttttaaaaaattgactatgaaagaatcgaaatcagttaaattgaattcacagcaacatcaacagcacgaaaacggtcacttctctccgttcaaattcgctaagttattagatccagaagcttcttgggacaaggatcaattaagagatgtattgcattggattcgacaagttgtagctcttttctgtggcttgttatggggagcaatcccagtggttggaggcatttggatct

SEQ ID NO: 24488 - DNA, 392 bp, Gossypium hirsutum
  Clone ID: LIB3147-022-Q1-K1-A4
gacgcgtccgggggtcccgtcggcggcggttcttgtaatcaaggcgttaaaggagccagagagggataggaaaaagaccgagaacatcaagcacaacgggaacattaacctcgacgacgtcatcgaaattgccaaggtaatgaggccgaggtcgatggctaaggatttgagagggacagtgaaggagattttgggcacgtgcgtctccgttgggtgtactgttgatggaaaagaccctaaggatctgcagcaggagatcgatgatggagatgttgatgttcctttggagtgagaaagcttgttcttctcgttttttacgtctatcctcatgcttgcctcttttagaaaaatgttcaatataaaagattttgaacaaatttgcttatatttaa

SEQ ID NO: 24489 - DNA, 411 bp, Gossypium hirsutum
  unsure (1)..(411): unsure at all n locations; Clone ID: LIB3147-022-Q1-K1-A5
cccacgcgtncggatgagactgtgccaactgttgtaacttatccttattgtcacagccaggtaatattacatccagaccaagaccgagttctcacagtccgggaatgtgcaagattacaaggttttcccgattattatagattctgcgggacaattaaagataggtattgtcaaattgggaatgcggttgcaattccggttggtcgagccttgggatacacaatgggaatggcatttcagaaaggaagcgggaatgaaccactgatgatccttcctcctaagttttctctttccaccaatatccagttagcaaaatcattgtcccaaagcactgatgattgaaccaaaactgatttcttaactttatatgtgtatctctgacataaaagtttcatgcaaaagctcttatgc

SEQ ID NO: 24490 - DNA, 206 bp, Gossypium hirsutum
  Clone ID: LIB3147-022-Q1-K1-A6
ggaacgcaatcttaacataggagaacccatcattgatttctaaaacttcctgttgttgtaatgtaaatatatagagaaagtttccaaagagattgatcctaagccaaccggtcaccagatttttatgtttggtgatgattcgagttgtttcactgtggggagaaaagcccatatttaagcaatgaatagcatttgagttgttcaac

SEQ ID NO: 24491 - DNA, 220 bp, Gossypium hirsutum
  Clone ID: LIB3147-022-Q1-K1-A7
agcacgatccattgggttgattgggcacactttccatccgtataaaccgaagcacccgcggatattctcggccaagggaaaaaaggtctctacacttaatgagacaacacttccagccgccggtgccatctcctctagcattgttgttacacagagtcctcgtgtgtgtctgcatatttatatgggatgtcggggtgaggctcatattatattttgtgac

SEQ ID NO: 24492 - DNA, 399 bp, Gossypium hirsutum
  Clone ID: LIB3147-022-Q1-K1-A8
gaagaaatatccgatcgaacaaaagtcaatgtaaatatcggtaatcttctaccactttcggcttcacgacagccaatctactcttgcttttagatcaacattgaagcatttcgaaaattttaaatattctttcccatccaaaatccttcttcaagtttaacctcaaattaatcaaaatctggtttctttattttacttgtactaaatttgtatttgtttttaaaaaattgactatgaaagaatcgaaatcagttaaattgaattcacagcaacatcaacagcacgaaaacggtcacttctctccgttcaaattcgctaagttattaaatccagaagcttcttgggacaaggatcaattaagagatgtattgcattggattcgacaagttgtagctcttt

SEQ ID NO: 24493 - DNA, 465 bp, Gossypium hirsutum
  unsure (1)..(465): unsure at all n locations; Clone ID: LIB3147-022-Q1-K1-A9
ccggggnggaatganggggtcgagccacgcgtgcgaacaaatcttcagaatttcgaattgaatccttttttttcttctataatggaccgaatcgtgcggggattaggtgtgagtatatcccaaatggaatccactgtaacgaatccattgccgaactccaattccgaccatgtcagaaggaagaagaaaaagaaaacatcagcagcggcagcgacaagcgacggtgaatacgaatcattagcggcagaaccacaaccagagctacaatcacaccagatggaaatccgaggcgcagcaacaaatctattcttcgaagctgattcaagctttgagtcaagtcaatctcaacggtaaccattcttctccttcggctccgcgtcgtggacgagccgttcgtgaagctgctgatagagctttggctgtagcggctaaagggaggacgaggtggagccgtgctattttgac

SEQ ID NO: 24494 - DNA, 254 bp, Gossypium hirsutum
  Clone ID: LIB3147-022-Q1-K1-B1
agtgattgtgtggttgtataggtagtttcctttttttccccggaatttctgccgttgtcccattttccgtgttttgcatttcatatttgtaatctgcaattagtgtgatttgtctttcaagtttgttaatattcttgtattgagatctgtttggttgtgttattcattaatagttgcttatagatctggaatgattgtttttgttttttcttcggatgttggatgctgtttttaagggtgaggttttgtttggt

SEQ ID NO: 24495 - DNA, 440 bp, Gossypium hirsutum
  Clone ID: LIB3147-022-Q1-K1-B10
agatatcactgcaagaaaaaaaaaaaaccatacatggcttccaacactgttgcatccgctgctcttcttcttaccttgaacttgttgttcttcactttggttagctctacctacgtgccttgcccaccaccaccaaagagccacaagcctacccacaaaagcccaccctcggcacctgaacagccaggcacttgccccagagatgcactgaaactaggcgtttgtgctgatttgttgggctcagtgcgcgttgttgttggaccgtcgaggaccaaatgctgctctctcatttcgggtttggctgatctcgatgctgctgtttgcctttgcactgctattaaagctaatgtgttgggggttaacctaaacgttcctgtttcattgtctttgctcctcaattcctgcgaaaagcaaatgcctgctggttacaaatgtgctta

SEQ ID NO: 24496 - DNA, 396 bp, Gossypium hirsutum
  Clone ID: LIB3147-022-Q1-K1-B11
gctgcagttacagagtctttggagttacacaagataaaaaaccgacaatgggctattttgaaaacttcagcaataaaaggggaaggtctttttgaaggcttggattggttgagtaatacacttaaatccggaagcggctaactcttagcatgaagaatttgaagcattgctgctatgtgatccagatggagtggggaacgagcaatggtgttttgcttagtattatgatctgatagaaatttgagccatgagaaaagttgtgtcaattgaccttcctaaatttctgcttttattattatttttttggggtaaacatctggtatacatgtaaaatttttgttaaacatttaaccatttccttttattttatgttagcctctcttttagtttttcaaa

SEQ ID NO: 24497 - DNA, 52 bp, Gossypium hirsutum
  Clone ID: LIB3147-022-Q1-K1-B12
cccacgcgtccgcagctttcagattaatgaattttcacttgcttcttttggc

SEQ ID NO: 24498 - DNA, 396 bp, Gossypium hirsutum
  unsure (1)..(396): unsure at all n locations; Clone ID: LIB3147-022-Q1-K1-B2
ggcgaaggcgtcatcgcttccgacaacaagctcgccgatgccgatttcttcaacaacttcgaagacgattgtgatgactcccgatatcgactaaaaaaacaaagaagaatcgtttcaagtactcatctatctttttttcccttctaactttcgctttttagggtctgaaatttcttaaaactttgttcaattgagtcgaatctgaactgcactatggatgcttatctgtatgcaaatcaaaatagtgtagtttataagtttaaatcggtataaataaatgtaattttccttannaaaaaaaaaaaaaaaaaaaaaaaaaaaaaaaaaaaannannnaaaaaaaaaaaaaaaaaaaaaaaaaaaaaaaaaaaaaaaaaaaggggcggccgttttaaa

SEQ ID NO: 24499 - DNA, 402 bp, Gossypium hirsutum
  Clone ID: LIB3147-022-Q1-K1-B3
tgtgactcgtaagaccagaattttggatgtggtgtacaatgcgtctaacaatgagttggttcgtacacaaactctggtgaagagtgctattgttcaagtcgatgctgctccattcaagcaatggtatctccagcactatggtgttgacattggtcgcaagaagaaagcagcagcaggagccaagaaagaaggagaggaaggtgaaactgctactgaggaagtgaagaagagcagccatgtcttgaggaagctggagaaacgtcagcagagtcgcacacttgacccccatatcgaggagcaatttggtagtggtccgttactggcttgcatctcttcacggcctggtcaatgcggccgtgctgatggatatatcttggaaggcaaagagctggagttttacat

SEQ ID NO: 24500 - DNA, 416 bp, Gossypium hirsutum
  unsure (1)..(416): unsure at all n locations; Clone ID: LIB3147-022-Q1-K1-B5
caactcggaagcagcgatccaaaagaagcatgtgaaaaacgagactgtagagacttgagagacaaaagtgtttgtatatgaggtaaaattggattagatggagtgtgttatatatatatgtatatgggactgagtgaattttgataggtattagcactcgggtctctaaaagccagcatggttagtgtaacatcatcacccagttttatagggacaagattttggatattatctcaaacgttttaaggcctattaacatatggcgtaaattttaagcacaatccctatattattgtataaccatagatacagcccttaatctttaccattttggttaatttagtctgtaacatttcccttttatttcttcttcaattctatttagattctaccagaaagcaatttcncnnnnaaaa

SEQ ID NO: 24501 - DNA, 372 bp, Gossypium hirsutum
  unsure (1)..(372): unsure at all n locations; Clone ID: LIB3147-022-Q1-K1-B6
atctagtcctcggttttcagcagaaccggctaaatacgtggagaagccggcgaagactgtgaatgctaagagtggtcgtcggtgcatccatcaacctcgttgaatgtgtgtattagccgtccaggttttagctgaaattctctggtcgtttgtaactgttaacctttgtagattttcaagttctataactctgctaccattctaatgcctttgtttctagttgacgatatatcaaaaaggaaaaaaaatgtaaaaaagaatgtaaaattttagaaaaaaaaatagaaaaaaggaaaaaagagagaatcatctttcatcannnaaaaaaaaaaaanaaacacccnncctaaaaaacccaaactaacnaacccc

SEQ ID NO: 24502 - DNA, 259 bp, Gossypium hirsutum
  Clone ID: LIB3147-022-Q1-K1-B7
atggtatgaacgtggatgaggctggagactggagcacgtacatgacgcaccaggcatagcttgcctatcggataaactatcatgcaattggcatatgggccggagagagagattagagcacgttcaagctcgcgagacggggggggggggcattaaagatgaacaacccgtacgtgtaatgaggggtctctaggtgccaatcaggctcgttaaatttgagctcatgtgcatcggtgtttttattacaagacgcagattg

SEQ ID NO: 24503 - DNA, 307 bp, Gossypium hirsutum
  Clone ID: LIB3147-022-Q1-K1-B8
atagtattaaggtggatgaggcttgggactggggcatggaaatgacccaccaatgatagcttgcctattggctgaactatcatgcaattggcatatggcagggagagagagtttaaaaaaagttcaagccaggcttttgggggggggggggcattttcaatgtcaaaccggtctttggaatgggtgggtcctgggtcccaagcaggtcgcttaaatttaggcgttgcgcttgtatgtttttattaaaagaagcagtttgcatgttgtcttttacaagttataataataaatcataggggctttggtt

SEQ ID NO: 24504 - DNA, 382 bp, Gossypium hirsutum
  unsure (1)..(382): unsure at all n locations; Clone ID: LIB3147-022-Q1-K1-B9
gganngacgcgtccgcggacgcgtccgcccacgcgtcctcccactcgtgcgctcggttacgtacatgaagactcggtatcaactgactctgttggggacagcaggggaagcatctttgatgccaaggctgttattgcattaaatgacaattttgttaagcttgtcgcgtggtacgataacgaatggggttacagttctcgtgtgatcgacttgatccggcacatggcttctgcctaagtgagtgattttggtgaaccaaactcatttcataatggactttttaataatagcctcgttcttcagctttagcaaaatatggaagagatgctatgggaataataatagaaattgctcgggattctacgaggcactaattgtacac

SEQ ID NO: 24505 - DNA, 419 bp, Gossypium hirsutum
  Clone ID: LIB3147-022-Q1-K1-C1
cccacgcgtccgcccacgcgtccgcccacgcgtccgcttggctacgtagatgaagacttggtatcaactgactttgttggggacagcaggtcaagcatctttgatgccaaggctggcattgcattaaatgacaattttgttaagcttgtcgcgtggtacgataacgaatggggttacagttctcgtgtgatcgacttgatccggcacatggcttctgcctaagtgagtgattttggtgaaccaaactcatttcataatggactttttaataatagcctcgttcttcagctttagcaaaatatggaagagatgctatgggaataataatagaaattgctcgggattctgggagtttctaattttacactgtaattgtgttctgtctgaaacacttgtaatatatataattacaaggaacc

SEQ ID NO: 24506 - DNA, 402 bp, Gossypium hirsutum
  Clone ID: LIB3147-022-Q1-K1-C11
ggagaaagatgaatccatggaagaagcagtcattagagagacggttgaggaagccggtgtagttggcgtcatcgaatgtaaattaggtaaatggtgttataagagcaaaaggcaaagtatataccatgaaggccacatgtttggtctgcttgtgaagcaagagttagatggatggcctgagaaaaacatccgaaaacgggaatgggtgacagtgtcgaaagctagagaagaatgcccgcatttgtggatgatagaagccttagaagagttggtttggcgacaaacgcaggcaggtgcggcccaaggaggaagtaaatgaagtagcaactatggagttttgttgtttgaatttgtagggttaggaaaatagatcattgtaattaagaagacatcaaaacgtta

SEQ ID NO: 24507 - DNA, 352 bp, Gossypium hirsutum
  unsure (1)..(352): unsure at all n locations; Clone ID: LIB3147-022-Q1-K1-C12
cccacgcgtncgattggccgttgctgtcgcaactgagtattccttccctgaggctgatagagtgaaggagtacttggcggatccaagtaagtttgctgttgccgctgcccctgttgctgctgctggtggtggtgctgctcctgctgctgcccctgccgaggaggaaaagaaacccgaacctgaagaagagtctgatgacgatatgggattcagtctcttcgactaagtttatttgtgttaaagcataaacatataagattggtgacagggtacattatctgctttattggttctcataantctccgtgatggactttgattgcttctaagtttggatgatttgtgaaggttt

SEQ ID NO: 24508 - DNA, 438 bp, Gossypium hirsutum
  Clone ID: LIB3147-022-Q1-K1-C2
gaaccacggtatcctttatttggaggttggaaagctacttttgtcattggttatgggctaccattacaagacttccttttcgagacatctgatgacaggcgttatctcaactttacttttggatgcccccttcttgagacagtggttgacaagttaaccgtcaaagttgtgttacctgagggttcaaaagacccttctgctgtggttccctttcctgtggagcagcatttggagaccaaatattcttaccttgatgttgtgggaaggactgtggtggtcatggaaaagaaaaatcttgttcctgcgcacaactctcatttccaggtttactacaccttcaagccaatcttcatgcttgcggagcctttgatgttggcgtccgcgttcttcttgtttttcgtggcttgtgtggcttacctgcacatcgatctttccata

SEQ ID NO: 24509 - DNA, 143 bp, Gossypium hirsutum
  Clone ID: LIB3147-022-Q1-K1-C3
tgggaagtttctttctaaatattgtcttgagttttatgaaagcaaatgaactgaatgatgaaatattataggcaaatctagtgtgcaattctggtaaagcactaaatgtttatgaaatctggagttcgctttttgatagcttt

SEQ ID NO: 24510 - DNA, 323 bp, Gossypium hirsutum
  Clone ID: LIB3147-022-Q1-K1-C4
cccacgcgtccgatagtaaatgtgctgagaaaagccgacctttctttttgtttgcagttgaatagggttgccctgtgttgttgttttttaatttttcttttattacggttagaacatatgttatcgggaatttctattcaaatgagtttagcacaagaagaatcaactgattcctagttcctagggctagtaaacttgattgaaacaagtaatgctaggagtggattaagtaatattacagtgatggggtgtcaattttgaaatttgacacttatgattgtattgttatgttatgttgataaagttggtgagtcgttatatgc

SEQ ID NO: 24511 - DNA, 396 bp, Gossypium hirsutum
  unsure (1)..(396): unsure at all n locations; Clone ID: LIB3147-022-Q1-K1-C5
cgggatgacccgtttgcttgaggctgctaaatccgatatgttagtaggattgaagcaaagagaancttttgtttgcaagttgaggttagaggaaacatcggatgaattgactgatttcagaatctggtttgacatcctctgtaaaaattcaaatgatgtttctcttagggaccccaaaggaaccaaaaagggaatgttgggagatgaggatattggttcaaagtctgttaatttgaagacattggaaggcaatttaagaaggctaaagctcaaatacgaaaatcttgcttcaaaaaagagttgtcaaattgctgcacttatggcagagaataagttcgcatggaaccagctcaacattatggaaactcagtttacagataagtaaacagcaagaat

SEQ ID NO: 24512 - DNA, 419 bp, Gossypium hirsutum
  Clone ID: LIB3147-022-Q1-K1-C7
gttccagcttaaggccaatgaagcaaaacttgaggctgagaggcttcaaaggattgcacgggggaaatttgatgaattgggagaacagtatgctatcaaatacctgtaactacagctgagtgaggcaaaagctgagaagcaatatttgcttgaaaaactaaagctgcaggagttctaacagacattgcagaggagtagtggaggtgacccttaacttatgtattccaaaatacgtgatcacgctccatgggtacaatatgattgccgctgaaacagagtctcagccaaatgagcgccatcgctttagagcaaatccgtgactgtatgatgtgcgagttataatatgtcgctctgatgctaaaatagtgggttaagggttgctgttgcattttaatgtatgaaaccttcaatgaattgtc

SEQ ID NO: 24513 - DNA, 307 bp, Gossypium hirsutum
  unsure (1)..(307): unsure at all n locations; Clone ID: LIB3147-022-Q1-K1-D1
ccgggntcgacccgcacgccgtccgtgattggtctnncatgacctnnagctactcgagaaagttagttgaagcgacttattgagaagggaaataagagggaagaggtaggagtgacgcaattggctcagccttagggaaaaatcaatgcgcttgattcttttgagcctttttacacaatgtgtaccgccaaagcggttgggtgttgagtcatattggagcacgataggagaagaagtaagagctatactcttcataaatatgggactcttggtggaaaccgcttcattcttnttctttaagntttac

SEQ ID NO: 24514 - DNA, 278 bp, Gossypium hirsutum
  unsure (1)..(278): unsure at all n locations; Clone ID: LIB3147-022-Q1-K1-D10
actgccacaaggttntnattgggagggctttaagggcaacaggcctttaacctatctaacattgcatcggtgatgaatgtagccgcgaaattgaactcaaggcacgagtttccccctgataagtttgttgagactatgaagctcatggagcataggtacggagccaacgatttcgtgacaagcaaagactcgagccttttgtctcccggaacatactaccttacccaagatgattccatgtacctgagattttacccaaagaaagacagggactttgc

SEQ ID NO: 24515 - DNA, 403 bp, Gossypium hirsutum
  Clone ID: LIB3147-022-Q1-K1-D11
cttctccagtgaccaaaaaagcttcattgtctcttctatcgaaaaccccatggctgctcttaagctagtttgtgctctagtgttgtgcatgttggtggttgagcccattgccacaaccaccataacatgcggcgatgtgacaagcaaagtggccggttgcttatcatacttgcagaacggagggaacgtgccgaaggcttgctgcgacgggatccggtccctgaacaacatggctcgaaccacccctgaccgccaaaccgtgtgtgggtgcttgcaagctgccgctaaggctgtcaaaattaaaggcaacttggctgagaccctcccagccaaatgtagtgtcaacatcccttacaagatcagcacttccactaactgcaaaaatgtgaagtgagatggatga

SEQ ID NO: 24516 - DNA, 206 bp, Gossypium hirsutum
  unsure (1)..(206): unsure at all n locations; Clone ID: LIB3147-022-Q1-K1-D12
tttatttaggcattgaggagggtgctgtttagggttaatgtttttacgcagtatatatcggcacacttcatttgccttttgcataattagagtactgttagaaatatttgaacagcggcaaaaaagattctattgaaaaaaaaatgaatgattccggccgcttcatattagtgttaatggatatgatagttttgcttttnnaaaaa

SEQ ID NO: 24517 - DNA, 382 bp, Gossypium hirsutum
  Clone ID: LIB3147-022-Q1-K1-D2
acttgatcccgtgcttgtcctacgtacaaaacggcggtacacccgctgctgcatgctgcagtggggtaaaagcactctacggcgaggttcagacctccccggaccgccaaaacgtgtgcaagtgcatcaaatcggcggtgaacggaattccgtacaccagcaataacctcaatctcgcagccggcctacctgctaaatgtggtctccaactcccttacagcatcagcccctccactgactgcaacaaggtgcagtgaggttgatgatgatgatatggaaggagtggaagaaggttccagctcagctagataaagtagctagctaaggttaaataagctgtgttggtgtgttgttttttagaaaattccatatataatcgggg

SEQ ID NO: 24518 - DNA, 357 bp, Gossypium hirsutum
  Clone ID: LIB3147-022-Q1-K1-D3
cccacgcgtccgcccacgcgttcgtatccctgaaaacagaaagaggccgccgttgtcgtccctgcagcagaacagcaaaagaagcaaagcaatggcaaggatcaaggttcatgagttgcgacagaaatcaaaaaccgatcttttggctcagttgaaagatctcaaagctgaacttgctcttcttcgcgttgctaaagttaccggtggtgcacctaacaagctttctaagataaaggtggtgaggctgtccattgctcaagttctgactgtaatctcacagaagcagaagtctgcattgagggaggcttacatgaagaagaaattcttgcctgtcgatctccgtcccaagaagacccg

SEQ ID NO: 24519 - DNA, 445 bp, Gossypium hirsutum
  Clone ID: LIB3147-022-Q1-K1-D4
aggttttgagggaaagatggtgtcttgaggtggaaaggttagggttgagtgctgttataatggggagtagaggatttggagctgagaaaagagggagtgatggcaagttgggaagtgtcagtgattattgtgtgcatcactgtgtttgtcctgtttgttgttaggtatgctgacgataaagatgtcggcaatgcccagcccgtcgtgacggttaggcaggctgaggtggaagaggaaggtggcaaagatgcttagggtaatttcagcttaatcttatcagagtaccaggaattagccggaatgaagagaagtcgtgaaaatgtcttagtagttcatggttaaaatggaattgaacccaagggttttttttctcctttcatctgctctttatataaactcttaacgatgatgatgttgtatggttaatgaggtttcttgatacatt

SEQ ID NO: 24520 - DNA, 387 bp, Gossypium hirsutum
  Clone ID: LIB3147-022-Q1-K1-D5
gaaaaaagagagataagcttagacgaaatcgaccaaggatttttattagttttatggttcttgcagacatcgaattaagctctttttaaggattggttggtattttttggtgagacctagagctgtttgatatttctttgaagtcaaggattagttcatgtagaccatgactgaattttagcttggcagtagtggagttaagtatcttaaggatttggggtttatttttgaatggatcccttgtttacaagagaaagagatattgaagtagatcttgaaagtggtgggattaacagtgaggatgaaagaacaaaagatcgtgttccatcgaatttacaaacaaagagaactctcagtggagtttggagcgatctttttgagtttgat

SEQ ID NO: 24521 - DNA, 365 bp, Gossypium hirsutum
  Clone ID: LIB3147-022-Q1-K1-D6
gggacgcgtgggcggacccgtgggctcacacccaatacaaggatttgatatggaaactatggaagaaatgtccagacaatcctgtaaaccagatgtccgagtgatcgatacaaaattttcctcaggtgtgtggggggttatctgataaactttatgtgcagtgtctgctaagtgctgaaaactaaataaaaaattatttgtagaataatactggctatctattattactgttcaagatcctatatatgtgtttagttagtttaacttggtttgttgcccactttcataaaagattgactgatgtacgcacagaggaatagtgcaaattactgattaattttctattataatgaaagttttacatt

SEQ ID NO: 24522 - DNA, 369 bp, Gossypium hirsutum
  Clone ID: LIB3147-022-Q1-K1-D8
cccacgcgtccgccttgaccgagaaggatgaaacagctgaacaacttcacatttcgaagggagctatcgaagatggaacacagaaaattacttctgaagggcagagtttacaatctcagatttcttcactaatggaggagaataatttgctcaacgaatcacatcatatcacaaagaaagaacttcaatctgtaatatcacagcttgaagaacaattgaaaaacgtaaaagaaaatgaagaatctctaaaatcagagattaacaatctcaaggccaagattacggagagttccttactgcaaactcgtatcaaagaacttgaagaacagttggtgacagttgacgctcaattgaaagaagaggttgaaa

SEQ ID NO: 24523 - DNA, 345 bp, Gossypium hirsutum
  Clone ID: LIB3147-022-Q1-K1-E1
agcctgacctaatcaagggactcagggctcacactgatgctggtggaatcatcttactcttccaagatgacaaggtcagcgggcttcagcttctcaaggatggtcagaggattgatgttcctcctatgaaacactctattgtcatcaaccttggtgaccaacttgaggtaatcacaaatggtaaatataagagtgtgatgcaccgtgtgattgctcaaacagatgggaccagaatgtccattgcttccttctacaacccgggcagtgatgctgctatatatccagcaccagctttgctagaaaaagaagctgacaaatctcaagtggaccccaaatttgtgtttg

SEQ ID NO: 24524 - DNA, 381 bp, Gossypium hirsutum
  Clone ID: LIB3147-022-Q1-K1-E10
gtcaccagactatgagaggaatcctcgtcctaactttttggaagttaaagaaaacagatcagtagtatatggtgatggaattccgtcagctcgatcagatggcaaatttggtggtcctaagttgcagccatcaccgtcagaagcatctgagcggcccaagttgaagttacttcctcgcaccaagccattggataatttagaaccaccttttgttgatgctaagcaggagcagcagcagttgagtgaatctgttcttactcatggtggaattggtaatgattcatatggatatgtgaatattgtgaaacctggttcagctggtagtgagaatgggaaccaggcggtggagcgtcctaagctgaatttaaagcctcgatcaca

SEQ ID NO: 24525 - DNA, 249 bp, Gossypium hirsutum
  unsure (1)..(249): unsure at all n locations; Clone ID: LIB3147-022-Q1-K1-E11
aaaaaaaaaaaacccttttttttttaaaaaataattttttttttaaaaaaaacctttttttaaaaatttttttccaaaaaattttttttttcttataaaaataaaaccccccccttttttttttaaattaatttacacccccctcttttttttttttttaaaaaatttttaaaaaaaaaaaaaaaantttcccccccttttatataaaaaaatatttttttcccttttttaaaaanttttttttttttt

SEQ ID NO: 24526 - DNA, 476 bp, Gossypium hirsutum
  unsure (1)..(476): unsure at all n locations; Clone ID: LIB3147-022-Q1-K1-E12
cggnntggaatggccggcccgacgcacgcgtccgcccacgcgtccgcccacgcgtccgcagcatatgagagggataagggtgaaggtaaggaagggcaacttggagcgggcgttggcggtgatgcancgggtgatgcaatctagcggaatcgaacggctgataaagcaggaacaaactcatcacattaagaattcggagaaacggattttggcacgcaagattttggagcgtaagatcaaatcacaggaccacgctcgcaagctgcaaaccatcctcatcaagaaagtcaggggtctgtgagggcagctttggtgtagttttctgggtaaacttttgttttcttacggaattccaggattgttcaaaactttatttccctttttttagttcaactggatgaattgggcattggcatttgcactttgtactgggttgacattccttcgttcgtggttgagaattgatgaatgatgat

SEQ ID NO: 24527 - DNA, 266 bp, Gossypium hirsutum
  Clone ID: LIB3147-022-Q1-K1-E2
gaaaaatgtcttgctgtggtggaaactgtggctgcggttctggctgcaagtgtggcaggggctgtggaggatgcaagatgtacccagacctgaacgttgccgagatgaccacaactgagactctggttcttggtgtagcaccccagaaagcacactttgagggagctgagatggaattcggggctgagaacggctgcaagtgtggagacaactgcacctgcaacccttgcaattgtaaatgattagagaccaaagccaaagctccc

SEQ ID NO: 24528 - DNA, 434 bp, Gossypium hirsutum
  Clone ID: LIB3147-022-Q1-K1-E3
tctctctttcccatagtttcacccgtcttttaatccatcgctcacaaaattatgggtttgaaggaggaattcgaggagcatgccgagaaagttaagaccctcccggccgccccttcgaacgatgacatgctcattctctatggactgtacaagcaagccactgttggaccagtgaataccggccgtcctggaatgttcaacatgagggaaaggtacaagtgggatgcatggaaggctgttgaagggaaatcaaaggaggaagcaatgggggattatatcaccaaagtaaaacaactgtttgaggctgctggaagttcttgatgtgtgtgtgtatggccaatgaaaatggtgtaatttcaagcccttgttggtactttggggtttcattactatgaataaattatgtactctttttctattgctatatggtaatt

SEQ ID NO: 24529 - DNA, 385 bp, Gossypium hirsutum
  Clone ID: LIB3147-022-Q1-K1-E4
gtccgcccacccgtccgaaaaaaccctagttattaatcggcggaagcagaaagcctctagccatgactttcaaacgtaggaatggtggccgcaacaagcatggccgtggccatgtcaaattcatccgctgttctaactgtggcaaatgctgccccaaggataagtcaattaagaggtttcttgtgaggaacattgtggaacaagctgctgttagagatgtccaagaagcctgcgtttatgacacttatactttgcctaagctgtatgtgaagatgcaatactgtgtctcgtgtgcgatccactcccacgttgtgagagtccgatcccgcaccgataggaagaaacgtgacccacccgcccgcttcatcagacgcagggatgatat

SEQ ID NO: 24530 - DNA, 363 bp, Gossypium hirsutum
  unsure (1)..(363): unsure at all n locations; Clone ID: LIB3147-022-Q1-K1-E5
gcgngcgggaggtgtacctaaaatatgagttggagtttctgattattttgacggctagcaggtgtgtttnttttcgagaagtacgtgaggggctttgcnataatgtgtctgcactctttcatgatcttgataacggcatgctccctatcagtgatatcttcccttacctgcccatccctgctcatcgccgtcgtgatcaagctcgaaagaagcttgcagaaatctttgcaaatatcatttcctctcgtaaaaatgctggcaagtacgagaatgatatgttgcaatacttcattgactctaagtacaaagatggtcgtccaactacagagactgaaataactggcttgctcattgctgcgctct

SEQ ID NO: 24531 - DNA, 377 bp, Gossypium hirsutum
  Clone ID: LIB3147-022-Q1-K1-E6
ggactttgaagaaggaccgtaaccctaagtatcctcgcatcagtgcaacaccaagaaatgagttggatcgatatcaaattctcaagtatcctttaactactgagtctgcaatgaagaaaatcgaggacaacaacaccttggttttcattgttgacatccgtgctgacaagaagaagattaaagatgctgtgaagaagatgtgcgacattcagacaaagaaagtgaatacgttgatcaggcctgatggaaccaagaaggcgtatgttaggttgactccggattatgatgctttggatgtggcaaacaagattggaattatctaagcagatcaaccaatgtcttccttgatttcaacagttttgttagaacgattgact

SEQ ID NO: 24532 - DNA, 360 bp, Gossypium hirsutum
  Clone ID: LIB3147-022-Q1-K1-E7
cgtccacgcctgccctaatcaaagcactcaggccttttacttatgcttgtggaatcatcttactctgccaaaaatgcgagggtaaaggccgttaactttttaaaaatttgcaaaggatttatttttctcctataaaacactctattgtcatcaaccttggtgaccaacttgaggtaatcacaaatggtaaatataacagtgtgatgcaccgtgtgattgctcaaacagatgggaccagaatgtccattgcttccttctacaacccgggcagtgatgctgttatatatccagcaccagctttgctaaaaaaagaagctgacaaatctcaagtgtaccccaaatttgtgtttgaagactaca

SEQ ID NO: 24533 - DNA, 439 bp, Gossypium hirsutum
  Clone ID: LIB3147-022-Q1-K1-E9
caatcatgccgataatgaaattcaactcagatgaagaggttgtcaagcttgcaaatgattcaagatatgggcttggctgtgctgttttctccggcagtcaaaggcgtgccaaggagatagcttcccaaatacattgtggagttgctgcagttaatgattttgcatcaacttatatgtgccagtccctgccttttggtggcacaaaagatagtggattcggccgatttgctggtgttgagggattgagagcttgctgtttggtaaaggcagtcgttgaggatagatggtggccttatataaagaccaagataccaaagcctattcagtatcctgttgctgaaaatgggtttgagtttcaagaatcactggtggaggcactttatggcttgaacatttgggaccgtcttcgagcactggtcaatgttctaaagatcatttc

SEQ ID NO: 24534 - DNA, 276 bp, Gossypium hirsutum
  Clone ID: LIB3147-022-Q1-K1-F1
cccacgcgtccgcttgaattggaggaaagagagaaggtagtgaggaagatgtgggatgtgtatacacatagcacaggcattcgtttgcctagattttggcttgatgcttttgaagctgcttatgagaatttatcaagtgatgttaatggagttcgcgataatgccatatctgaaattgctaaattatctatgcagtccctaaatcttgttcccccctcggttcaatcaaagattagcagcagtcaagggagaaaaaagactaataaagaagcttat

SEQ ID NO: 24535 - DNA, 344 bp, Gossypium hirsutum
  unsure (1)..(344): unsure at all n locations; Clone ID: LIB3147-022-Q1-K1-F10
cccacgcgtccgagggctcaataatcaaagtgtattgtgtgagagtgggtggttcancggtgagaggagttgggagatgcttgtttgtaagttgttacccactcctccaatgttttgggttggatgattgtaggcatcgccaccatcatcacacccatttccattgatcccaaatttcccacaatgggtgggggtaggggttgtacaaaattgattccgagaccaggatcatcggaaacttgaacataagtcttttaccgatcgatctgtgattcagtatattgtgtatcttttgaattgtatgaaaggaaataaagttttagattttcattttttttttcaaa

SEQ ID NO: 24536 - DNA, 408 bp, Gossypium hirsutum
  unsure (1)..(408): unsure at all n locations; Clone ID: LIB3147-022-Q1-K1-F11
cccacgcgtccggtaccgttgagcttaacggaaccaaccgcgagactttgacccanggtgtggatggccttgcacagcgatgccagaagtactatgaagctggtgctcgctttgctaaatggcgtgctgtccttaagatcagtgctaatgagccaaccgagcttgcaatccaagaaaatgccaacgggctagctatgtatgctgccatctgccagcaatgtggccttgttccaatcgtcgaacctgaaattcttgttgacggatcacatgacattcaaaagtgtgctgcagtgacagagcgtgttcttgctacctgctacaaggctctaaatgaccaccatgtcatgcttgagggtactctnntgagcctaacatggtgacccctggttcggactccccgaaggtgcc

SEQ ID NO: 24537 - DNA, 451 bp, Gossypium hirsutum
  Clone ID: LIB3147-022-Q1-K1-F12
agcctaaggaagggaagagtacaaaaactactcctaaagcaaaggccaagacaaaaactacttcgaaggctaaggagaagccggcggctaagccaaagcctacttctaaggcgaaggctgctccagccaagactaaggcagtggcttctgtgaagccgaagactactgcagctacaaagtcaaaagctgcagccaagcctaaggacaagccggttaaggcttcgaggacttcaactaggacgtctcccggaaagagggctgctgctcccaagcctgctgcgaagaaggctcctgcggctaaaaaagctcctgcgaagagtgtaaagccgaagagtgtcaagtcaccggcgaagaaagccccgtcgaggaggggaaagaaatgagagaagagagggtggtcaacataggggtagttttgtaaattcgagtgaagcttagtggctgtatttgg

SEQ ID NO: 24538 - DNA, 387 bp, Gossypium hirsutum
  Clone ID: LIB3147-022-Q1-K1-F2
cccacgcgtccgcccacgcgtccgcccacgcgtccgccgcttcgcaagtagccagccgtgtcacacactcaagaagagcgagagctcgtaaatcatggcggaacagaccgaaaaagcttttttgaagcaacccaaagtgtttttgagctcgaagaaaggtgggaaagggaagaggccaggaaagggtgggaatcgcttctggaaaagcattggattgggcttcaagactccccgtgaagctattgaaggaacctacatcgataagaaatgccccttcactggcactgtttcaatccggggtcgtatcttagccggtacttgccacagtgccaagatggtcaggacaatcattgttcgacggaactaccttcattatatcaagaaata

SEQ ID NO: 24539 - DNA, 207 bp, Gossypium hirsutum
  Clone ID: LIB3147-022-Q1-K1-F3
gatgcaaatgccttccacgtacggttttaagtgtcttcatttactggtcaatttgatatgatatttttcaagtttttgctgttctgtctttataagagtttgcataaaacgtatgtactaattttatgtattcttttttgttgctagaaaagttttttttttgggggggggagataaaggagagaaatgaatggtgtttgattgaac

SEQ ID NO: 24540 - DNA, 72 bp, Gossypium hirsutum
  unsure (1)..(72): unsure at all n locations; Clone ID: LIB3147-022-Q1-K1-F4
cccacgcgtccgnnaaaaaaaaaaaaaaaataaaaaaaaaaataaaataaaaaaaaaaaaagggaaattaag

SEQ ID NO: 24541 - DNA, 374 bp, Gossypium hirsutum
  Clone ID: LIB3147-022-Q1-K1-F5
atcaaactctatatgatctacaatgtgttggagtgtttcttgctgcaacttataagttcaggacaaactgaaaaatcaacgagcttcagctcttccatgatgagaatttttcagcgtggtcttttgcgtcagagagattaactgagagtggtttccaattcttggtgtgcatcatgaaactcatggcccttttgcctcttttctggttgtctatcacctaaaattacttctcatctgtgtaatttacagttgatggatacaaatgctcagctttggtatattatcagagagtatatctccaattcagaagtatatttgatgagataattattgtgttctgcttggaacttgtttgttagagctattgtgtttac

SEQ ID NO: 24542 - DNA, 401 bp, Gossypium hirsutum
  unsure (1)..(401): unsure at all n locations; Clone ID: LIB3147-022-Q1-K1-F6
ggaaaagctccgaggaagcagctagcaacaaaggccgcgcgtaagtccgctccggcgaccggtggagtgaagaagcctcaccgtttcaggccaggaactgttgctttgagagagatccgtaagtatcagaagagcactgagctgttgatcaggaagcttcctttccagaggttggtgagggaaatcgcgcaagatttcaagaccgatctgaggttccaaagcagcgccgtcgctgctcttcaagaagcggcggaggcttatctcgtcggactgtttgaagacactaatttgtgtgcaatacatgccaagagagttacaatcatgcctaaggatatccaacttgctaggaggattagaggtgagagagcttangttgcttgtatttgctcgatcgattttaa

SEQ ID NO: 24543 - DNA, 285 bp, Gossypium hirsutum
  Clone ID: LIB3147-022-Q1-K1-F8
cgcctgcgtctctctgttcatttctctcaaccaaaaagtctgtaccttggcgcttccagagagaccatgttggtttaccaggatctcatctacggtggcgagcttcgttctgactcattcccctacgaggaaatcgagaatgggatgctgtgggacgttgaaggaaagtgcgttgtgcaacgcgctgcccatgtatacatggacgccaatccttcagccgaatgtgctgatgaagatgaaagtgttcatgaccaagctgtcaagcgttgttgacattgttgacac

SEQ ID NO: 24544 - DNA, 423 bp, Gossypium hirsutum
  Clone ID: LIB3147-022-Q1-K1-F9
cggtaatagcacagttgagccaagtgtccaaaccggccacatatctggcactgagcgcaagaccgaaacgctctcactcgactaacagacggtcgaccaccgcgcccagagtcaacaaccgctggcgtcgaaaaggcctctacgaaatgagcatggaccggcacctcttgaaccgctcgaacctgccgactttcaaattccaacagaacctccaccaaacgctgaaacggtagaggctcggatgagaatgacgcaagggtgagaacggtatcaaactccgacggcagtccggctaaaacgattccaaccttctccgtgtcagaaatccgagatccggccgcatctatcaaagcacacatgttctgaatcttcgcaatttaatccttaaccgacatcgctcccttcttgatcgaataagatcat

SEQ ID NO: 24545 - DNA, 284 bp, Gossypium hirsutum
  unsure (1)..(284): unsure at all n locations; Clone ID: LIB3147-022-Q1-K1-G1
aaaaaaaaaaaaaaaaaaaaaaaaaaaaaatttaaaaaaaaattaaaaaaaaaataaatagcggaaattttgaggagggtaaaaccaacctaccctcccatccaaacntaataactcaaattatctttcttcttaactccacttaaatgcacctcccttttacaaccaattacactacctaaaccatcccaaacccttaactaaatnaaagttttttaccattttaaatttctttaccttttcatccctttttaccaaaaccgaaaangatcccctcttcctaa

SEQ ID NO: 24546 - DNA, 443 bp, Gossypium hirsutum
  Clone ID: LIB3147-022-Q1-K1-G10
taataaagcgtttgtctcatatttcagaagatggcccgtaccaagcaaaccgcccgtaaggctactggtgggaaggctccaaggaagcaacttgctaccaaggctgcccgtaaatctgccccaaccaccggtggtgtgaagaagcctcatcgataccgtcctggaactgttgctcttcgtgaaattcgtaaataccagaagagtactgagcttcttatcaggaaattgcctttccagaggcttgttcgtgaaattgcccaggacttcaagactgatttgcgtttccagagccatgctgttctagctctccaggaagctgcagaggcataccttgtgggtctttttgaagacaccaacctttgcgcgatccatgccaagcgtgtcacaattatgcccaaggacatccagttggctcgtaggatcaggggagagcgtgcttaatt

SEQ ID NO: 24547 - DNA, 433 bp, Gossypium hirsutum
  Clone ID: LIB3147-022-Q1-K1-G12
cccacgcgtccggtggttcagccccaattgtctactccacttatttagctttccaccctgaaggattttcccaaattcactaatttgatcaaggtttaaccttataattccactaagatttctatctcaaaagagtaaacaaataagcaaacagtgaaaaatctttacaagattagaatgtttgtaagttaatcacacccaatgaaaaacacttggacttagaaaattcaatgaatgctcacagtgtttacaagaaaagatgaagaatttaagcacaaaaggttggtaaaagaattttttgatctttcttgataacttttgatctctagttattgtagaagctttggaaactggtatttatagttcttaattgattttcctaattgatttctaactgttttggttggtgaaaaattgaatagagtcattggat

SEQ ID NO: 24548 - DNA, 208 bp, Gossypium hirsutum
  unsure (1)..(208): unsure at all n locations; Clone ID: LIB3147-022-Q1-K1-G2
gcgtcgcggggtaaacattgcctgatgggaagaaaactatagggtttttccatgtttgtaagtggtatgggatgtatgtgatgcatgtggtgcatgcantgcacgcacgtatnggttttcggtcccaagagagtctatatgatgagtttgatactggtgtgatgagatgtgatctccatatttgcataataaatatctatttttgttt

SEQ ID NO: 24549 - DNA, 444 bp, Gossypium hirsutum
  Clone ID: LIB3147-022-Q1-K1-G5
cgtgcgggcaaaacatgccgaatttgggatgttcgaaacttgtcaaagtcaattgctgttctaaagggaaaccttggagcaatacggtccattcgctacacatctgatggtaagtacatggccatggctgagcctgctgactttgtgcatgtgtatgatgtcaaaagtgggtacgagaatgagcaagaaatcgatttctttggtgagatatccggcctatcctttagtccggacacagagtctctctttattggcttatgggatcgtacatatggcagccttcttgagtatagccggcagaggaactacttatatcttgattccctaatgtgagttgattgtgatgcgggcaaaacaagtatgttggtgtagtttatgatatttgaagaacttgtatcatttcaatctgtagaagagggtttactgtagatgtaaatgtaaaat

SEQ ID NO: 24550 - DNA, 391 bp, Gossypium hirsutum
  Clone ID: LIB3147-022-Q1-K1-G6
cgcgtccgaggaggtaatgtatgacttggaagacaaaattaatcaagctgtctttcctggtcttcaaggtggaccacatgatcacaccatagctggtttagcagttgcattgaagcaggtcagaacacccgagtacaaggcttaccaagagcaagttcttagtaattgctcgaaattttctcagaggttgctggagaacggctatgaactagtatctggtgggaccgagaaccatttagtcttggtcaatttgcgaaacaagggtattgatggctcaagagttgagaaggtattggaatcagttcatattgcagccaataaaaacactgttccaggggatgtgtctgctatggttcctggtggtatccgcatgggaaccccagctctcaca

SEQ ID NO: 24551 - DNA, 404 bp, Gossypium hirsutum
  Clone ID: LIB3147-022-Q1-K1-G8
gtacactcttaaccaaacatccggtaacttcgccattgatctcggtggcacgtgcaagatcacgctcccgcctgacaactacctggctacttactcgaagcgggtaacgggaaagattgaaaacggaaagatagcggaactcgatgggatcagggtacgggctttgttcaaatggtggtccataaccgggattcgatccaacggggataatttggtctttgaagttgggatggttacggctaaatatcctgctaagaactttgatgaaagccctctctgtgaaggccgtcattcgtcttcttaaaaagctaaaaccaaagtgaaaaataaagggcttctcagtttgctgcaaggattaagttattacgtacgtgtttctgaatcgtaagtatgtttgtctcgtc

SEQ ID NO: 24552 - DNA, 477 bp, Gossypium hirsutum
  unsure (1)..(477): unsure at all n locations; Clone ID: LIB3147-022-Q1-K1-G9
accggnccggaangccgggcccactgacccagagagtgttcccattaatgccttggttgcggtgaaaggcacacctcttcaagagcaaaaggtgcggctctgtcatttggttctttcctccctttgttttagtccacattcaccactacagcttgaagctttgttctttttaataaagaatatctgatatgtatatagttttaggcaccatcaccagtttttacattcttactttcaaaaggcatcatttgcttatggttttggatatgctagcactttgcattaactggacatgaaagtgtatcgaattagggtgtgtgttcgactcatgtatatccaaatttctaaagtgctttttcataaatttggatggttggacctgcatacccttatcaatctgacgtgtggngcaacttaatggataatgaagagctggagcagcataagccagcagtctagttgtaaagatgagtggaa

SEQ ID NO: 24553 - DNA, 441 bp, Gossypium hirsutum
  unsure (1)..(441): unsure at all n locations; Clone ID: LIB3147-022-Q1-K1-H1
tgtccctatgctcgctgatccacgacatcctgcagagtctacaagcgcatcaaatgagtcagttttgaaggttgcacttgaccacgggaaggctgccggagttattaagtcacatgaccgagtcgtagtttgccagaaggtcggagatgcttctgttgtgaagattatcgagctcgaagattaaacttatgttagtttctctcctttccgaatctgatttttgaaagcgatgaatgactttatgtagcacctgtgaggtattggctccaggttttggtggatttgaatttgtgttaagaatgcatacactattttaagtctcataaaagggaaatatggcccataatcccataattagctaatgggaaaaggcaaaagaacaaccccattttttccttgattcagtgggtaataaagatattggattcagtagagtanctg

SEQ ID NO: 24554 - DNA, 450 bp, Gossypium hirsutum
  Clone ID: LIB3147-022-Q1-K1-H10
acgagcggaggaggaaaagggagatgaaaaagctgaagagattcctgttgagaaagttgaagagtagagcgaccaatgccatacgtaaggtggcaaaagcttaaaggagcttcttttttctataggctgtatgtcatagttggcggagtcatactactattatttatgattactatgtcggatgtgggatgatgagggctttctttttctttaatggttgtttttctgctttggggtttgatatttagtattgaacttccttttgggtccaggggtcaacatgctgatggaagaaactataggttttccattttgaagtggtatggatgtatgtatgcatgtgtgcatgcatgcacgcacgtatggttttcggtcccaagagagtctatatgatgagtttgatactggtgtgatgagatgtgatctccatatttgcataataaatatcta

SEQ ID NO: 24555 - DNA, 445 bp, Gossypium hirsutum
  unsure (1)..(445): unsure at all n locations; Clone ID: LIB3147-022-Q1-K1-H11
cgggntggaatggangggtcgacgcacgcgtacgcccacgcgtccgaaactttgaattattcatacaaaacaatgaaaacccacttttttcccgggggttttctcctgatttttttcttancccaaggtctgaaccccaaatgtgccatccaagaccatggctcaaacctgcaagtgttccatgtttacagtccatgctcacccttcaaaccctcaaaaccactctcatgggaagaggatgtgctgcaaacgctagccaaggaccaagccagggtgcagtttttgtccagcctggtggctaagaaatctgtggtgcctatagcttcaggcaggcagattgtgcaaagcccaacttacattgtgaaggccaatattggaaccccacctcagcccatgcttatggccatggatacaagcagtgatgctgcttgggtgccttgcactg

SEQ ID NO: 24556 - DNA, 424 bp, Gossypium hirsutum
  unsure (1)..(424): unsure at all n locations; Clone ID: LIB3147-022-Q1-K1-H2
ataggctgcagacacgtgttcattcagatcctgcttggcttgaaactggagatgcagtcgcaaatttataccctgaactgcgggaagacgctcaagaccatgcacgatctcgtaacgcatattttgaccaggcacgtcaaggatttctcactggcaataaggctttaacaaaggaacttagtgtgaaaggacaactgcaaaatatgcatatgaaggcaactcatggaaacactcaagaatctttatttcgccagaggaaccaagttcctcctgagattgttggagggcaggaacggatcatagacctgcatggattgcctgttagtgaagccattcatatgcttgaactatgaactatcagtgctcaggagaacagnctcggctgcagatcagcgccttcaggtttacataagtgttggaactg

SEQ ID NO: 24557 - DNA, 376 bp, Gossypium hirsutum
  Clone ID: LIB3147-022-Q1-K1-H3
gaccgacgcgtccgcccacgcgtccgctcggctagattgacagtccctggaggagctagcgtggcatgcagcactgctaaagctgttgagtgggatgttgtctggaagaacaaccttgatccttcagggagggctgccctgggagtccatctctcggcttacgatgcagaggctcctctcatcagcaacgtgccatccaaggttatcgatagtataccacggatggtggaagttccaggagttgccatacacacttagtacctgcctgcctactggaaagggatcggaatcgatgaaatcaataagtgatagtagtatgttgtggcatattcatcaaaattctcatttactaaaatactttatgattggttggatc

SEQ ID NO: 24558 - DNA, 99 bp, Gossypium hirsutum
  unsure (1)..(99): unsure at all n locations; Clone ID: LIB3147-022-Q1-K1-H4
gtccgtgctttttaaacaaatcctagttttatatttcaatgttttccaaanaaaaaaaagnnaagagaaatttaagagtgggttaacagggccatacat

SEQ ID NO: 24559 - DNA, 365 bp, Gossypium hirsutum
  unsure (1)..(365): unsure at all n locations; Clone ID: LIB3147-022-Q1-K1-H5
ccgggntggaangangcgtcggcgctttcttattctcaatatcacaaatcctcctataaaaaccaaactcctaaaccctcatactccactccgctcatcttcggtcgctccgccgtttcgcatttcgtctttctctctccaatggcttctattgctggttcatccatctccatgcaacctcgcccctttgctaaaggcagtgtttctgggttgaaattgggttcatttatgaaccagggaagaagcaccctctcatttacgatgcgtccaatgcctgctcgcttgcagatctgctgtgctgccaaacaagagaccgtggataaggtatgtgaagtagtaaagagacaattagctttagacaatga

SEQ ID NO: 24560 - DNA, 323 bp, Gossypium hirsutum
  unsure (1)..(323): unsure at all n locations; Clone ID: LIB3147-022-Q1-K1-H6
gcgtccgcgctttcatccattcaaacccaaagaagacaaacccaagccaccatgtagccaccgcaaacggtggccgacggaaggtggtccattcggattctaactccgttcagacttgcaatcaagaatctaacctctctttgctttgaaaatttttgattaatattctgcaaccctttttttctttgtatttcagatttcttttttgtctaccaaaaataaaacaaaaaaaccccctgttcaaatatgagattgtggcttttaaagccatttacaagattatttactcctattttttggtcgttttctttctcngttttact

SEQ ID NO: 24561 - DNA, 440 bp, Gossypium hirsutum
  Clone ID: LIB3147-022-Q1-K1-H7
actaaacccaattcttctctttctcctgatcttcaaagactttctttttcctctcttcgcatctcaatcaaaccaagaacccacaaaaagcttcagatacaagcagctgggagcacatttggaaattatttccgtgttacaacttttggagaatctcatggaggtggtgttggttgtatagttgatggatgtcctcctaggattcctctctcagaagctgatttgcaaggtgatcttgatcgaaggaggccaggtcagagccgaattaccaccccaaggaaagagacagacacatgccgaatatattctggagtttctgaaggagtgactactggaacaccaatccatgtacttgtaccaaatactgatcagagaggacatgattacaaggaaatgtcaatagcttataagccatctcatgctgatgccacttatgacat

SEQ ID NO: 24562 - DNA, 376 bp, Gossypium hirsutum
  Clone ID: LIB3147-022-Q1-K1-H8
tgaatttgcgagcagtatcttcggatccaacactcgtttcaagaccctcggaacggagcatcttaccaagtcaagcacccttttccaaaactatactgttttaacaacaccagaagagataccagctccgatgatggtggcttgtcacaccgtgccttacccttatgctgtcctgtattgccatagccaagtgactgaaaacagggtgtttaaggtatcattggacggtgagaacggagataaggtgaccgcggtggctgtttgtcacaaggatactacgcaatggaaccgtaaccacgtgtcgtttcgtgtgttggggattgagccaggaacgcccggtgtctgccatttcttcccggcggataacttcgttctg

SEQ ID NO: 24563 - DNA, 406 bp, Gossypium hirsutum
  unsure (1)..(406): unsure at all n locations; Clone ID: LIB3147-022-Q1-K1-H9
gaaaacaggacaaccccagccttatggctatggtaataaaaggattggaccaaatggtgatgttggttgggtggaatatcttctcctcacaaccaaccaagacccgaatctccttggaactgaaaacccagagagtttcaggattgctttggataattatatggcagcagtgaagaaaatggcatgtgagatacttgaaatgatagctgatgggctaaaggttcagccaagaaatgtgttaagtaagctgatgatggatgaacagagtgactctgttttcaggctgaaccattaccctccgtgccnagaggtggttcagtccttgaatggaacgagcagtaatgtgattggattcggtgaacacactgacccacaaatcatttcagtcctaagatccaacaacact

SEQ ID NO: 24564 - DNA, 242 bp, Gossypium hirsutum
  unsure (1)..(242): unsure at all n locations; Clone ID: LIB3147-023-Q1-K1-A1
ggtagcgttgggggctgctgcggcgcaaagcagatgcggctagggttagggtttccaaaatgtttcaaaggattgggcctatcgggctctattttgttgggttttggtaattataggattgggcttgtaactgggttttaactttaggctgggtttgtgaaatcgggtagtgcattgggccagtcatattttgggccgttcttgtaattggactgaactttagacacttttattgtatnngt

SEQ ID NO: 24565 - DNA, 292 bp, Gossypium hirsutum
  Clone ID: LIB3147-023-Q1-K1-A10
gaaaacccggggcggccgacgcgtccgatttatgggataaacggtgatagctcgacttttccgcctccggcgaccatatgggtcgcgggaagaatactgggggctgggtgatttttttctcttttatttttgtttaattacattttcttagtgttcgtttatttatttatttttgatgttaaggatttttggatctttatttataaattttattaacgctttatttttatttaaaaaaaaaaaaaaaaaaaaaatataaacaaacaaaaattaaaaaaccataaataaaaat

SEQ ID NO: 24566 - DNA, 222 bp, Gossypium hirsutum
  Clone ID: LIB3147-023-Q1-K1-A11
tgcaatcttgttgagacacctatacaatttaaagttattcaactgctagtttagcatttagcctgaataggagggaggggagaaaaaaaagtgggggttaaaaagtttcttatatggtgaaaaataatgctagttaatagtttttgattgtttagtaattgttggaaaaaagtgtaaaaattcaaatattaaaaatatatttagaatactaaaagttcagag

SEQ ID NO: 24567 - DNA, 403 bp, Gossypium hirsutum
  unsure (1)..(403): unsure at all n locations; Clone ID: LIB3147-023-Q1-K1-A12
ggtagatattgttgctagctctgttgggtatttcattagggtcactcaagaaattatggggcgaaatctgctgggagctgacaaatttccccaattattccaatggtctgaagatttcgcaaattgcagcattgttaaggaaagtttgcctccaagagacaaactacttccctttgtcaaaggtctcattgccaaatatcagcaagataatgctaaggcctaagccctcccaatgaacgtctttcacaatgattgtcgcatgcattttgccatttttgtatttgctgcttttgtgtgtaatgacctacttgcttttatgttcgagtgaaaaaataaattaactcattgtactcttaaataaaattggttattaaagtatcaatgagtttttcccttttnnaaa

SEQ ID NO: 24568 - DNA, 305 bp, Gossypium hirsutum
  unsure (1)..(305): unsure at all n locations; Clone ID: LIB3147-023-Q1-K1-A2
gcggaattgtactcagcagcttcgaagttacagtttgactctctttgcgtggcttggcaagatggctctggagacttacattgcgcaatttcatatctggttgagatcagacatgcctaatggacagcccaagtggcttctttcttttatcccggaatatcccctgctcaacttcatgctcacaacagctatttatgtcttgatatctcatcgtctgttcgacttgaccaataaacttaagtcagttttcattcccacanaagacaaccgacggctgctatataatttcattgctggagtagtcg

SEQ ID NO: 24569 - DNA, 454 bp, Gossypium hirsutum
  unsure (1)..(454): unsure at all n locations; Clone ID: LIB3147-023-Q1-K1-A3
cccacgcgtccggtcgccgccaacaatgaaacttctagaacctagaaatcagtttgcagccgtgggatcactcctgagacttgaatttcagcgaagcaaagaagaacccgtggcgaatttgcaaagtacggggtctgctggtatgtgtacgggggtgtgggcgtggcgtacggaaactgtgctggcgcggggcgtggctgctggacggtacggaggccgtgcatggggggttgcttggttgcggcgcagaggaaaaggagatgtcctagggttttgtcctgttttagtgttctaggccctgtgggtcctgtagattcgggtcagggtttaaatatggggcttggggtaatagactggggnttttaatatnaatnaatnggttttgggttggttgaaatgggctcgggcacatttggccccactacactatatattggggttttggtcttttggc

SEQ ID NO: 24570 - DNA, 234 bp, Gossypium hirsutum
  unsure (1)..(234): unsure at all n locations; Clone ID: LIB3147-023-Q1-K1-A4
aaatccaancgaattttcaatctagtgttcctttgtgggtttctatttgacattgttcgcggatttggagatgtgggaagagctctttatatttcttctcaattgttatttgtcacagttacgccgttttaggcttaataatggaaatcggctgaacatgaaagatttattaaataaactaaaaaaaaaaaaaaaataataaacaaaacaaaaaacatacataaaaaaattatg

SEQ ID NO: 24571 - DNA, 377 bp, Gossypium hirsutum
  Clone ID: LIB3147-023-Q1-K1-A5
caaaaactctctcattttatcactgcccctttgccagcagccgcgccacactcgagagagagcgcgtcaaccatggccgaacagaccgagaaagcctttttgaagcaaccaaaagtgtttttaagctcaaagaaatcttcgaaagggaagagacctggaaagggagggaaccgcttctggaagagcattggtttgggcttcaagactcctcgtgaagctattgaaggaacctacatcgacaagaaatgcccatttaccggcactgtttcgatcaggggtcgtatcttagctggtacctgccatagtgctaagatgattaggacaatcgttgttcgacggaattaccttcattatatcaagaaataccaaaagtatga

SEQ ID NO: 24572 - DNA, 412 bp, Gossypium hirsutum
  unsure (1)..(412): unsure at all n locations; Clone ID: LIB3147-023-Q1-K1-A6
cgcgccacactcnanagagggcgggttttttatagccggtcggaccgataaatcctttttgaancaaccaaaagtgtttttaagctcaaagaaatcttcgaaagggaagagacctgtaaagggagggaacctcttctggaagagcattggtttgggcttcaagactcctcgtgaagctattgaaggaacctacatcgacaagaaatgcccatttaccggcactgtttcgatcaggggtcgtatcttagctggtacctgccatagtgctaagatgattaggacaatcgttgttccacggaattaccttcattatatcaagaaataccaaaagtatgaaaagaagcattcgaacatacctgcacatatttctccatgctttcgtgtaaaagaaagggatcatgtcattattggg

SEQ ID NO: 24573 - DNA, 301 bp, Gossypium hirsutum
  Clone ID: LIB3147-023-Q1-K1-A7
cacccacttcttgcagtgctggtccagtagctgaagacatgtttcattggcaagcaagggggatgggaccctgagatagcccgtatgctggaggtgtgtttttagttactatccatttccctccagattatcctttcaagcctcctaaggttgcatttaggaccaaggtcttccatcccaacatcaacagcaatggaagcatttgtcttgatatcctcaaagaacaatggagccctgcactaaccatttccaaggttctgctctcaatctgctcactgctgaccgatccaaaccctgatga

SEQ ID NO: 24574 - DNA, 262 bp, Gossypium hirsutum
  Clone ID: LIB3147-023-Q1-K1-A8
cccacgcgtccggtccttgactgccacacgttacacattgctgttaagtttgctgagcgtgtgaccaatattgacgggcgatctggtaaggagcttgagaaggaacccaagttcttgaagaacggtgatgctggtatgattaagatgattcctaccaagcccatggttgtggagaccttctctgagtacccacccctgggtcgttttgctgtgagggacatgcgtcagaccgtggctgttggtgttatcaagagtgtcgaga

SEQ ID NO: 24575 - DNA, 358 bp, Gossypium hirsutum
  Clone ID: LIB3147-023-Q1-K1-B1
tttgcatctttacgcgcaacatgcacaggaagcgctaataataaccggtgaggagaaacctgggtggaagaggggaacatatattactgtgctagataaaggacatgagctatctaatcaactatcagcagaccttgtattcgtaatctaactactctcgatggcggtggccgtgatcgacaccattttttaattaactgtatgagttctatgttcggacagtcttcgtacatacgagctatatgtgtgaaagcgaaccatatatacatggtgggcagatgaaacctcatacaatccatgctgatgtatgtgaactttattcgctcctgccatgaacactaccatgaatttattgtag

SEQ ID NO: 24576 - DNA, 177 bp, Gossypium hirsutum
  Clone ID: LIB3147-023-Q1-K1-B11
tcacttcttcaaggagttcaaccaaaactcttggaaactttgtcaaccccacctttgaatttcttctgaaaacatatcctttctttacacctgatttctccaaaaagactcttttcacaatgtctccattccatgaatatactcatctgttaacaaagccatccaagacccttgtac

SEQ ID NO: 24577 - DNA, 441 bp, Gossypium hirsutum
  unsure (1)..(441): unsure at all n locations; Clone ID: LIB3147-023-Q1-K1-B12
ccggggcggcgacgcgtacgcccacgcgtccggaaccttatgttggaagatgaaacgggtggggtaatgtccggcccggagagggatctcagatcggctggcgttaggtccatcnaaatgtgtantantggtcaccgataacaccggagattttattttattttatttttatttttagcatgtaattttatattccaatttttttctaaaataatgtgagaatgaggtaagcaatgacataggagtagttttgactaaaaactttaaggctcatcattaactttggttagcctagttgtaggggatgtggggaccacctgttcttttgtataataattatatatatacatatcaattccaatggaagatcaactaaccaccttttgtctaaaaaaaaaanaaattataatcttttaatttttattaataattattataatt

SEQ ID NO: 24578 - DNA, 432 bp, Gossypium hirsutum
  Clone ID: LIB3147-023-Q1-K1-B2
aaagaagtcaacgaaagacaagaaagcgatgaggagagctgaaaaggagagactcaaggagggtgaggctgctgatgaagagctgaagaagattaaaaaggaggcaaaaaagaaaggttcctctactacttcaaaggttgttgcttccaagggtgcagtaaccaagaagaaaagcaagcattctgatgaggatcattccccttcacaaagccaggttgatgagaatgaacaggtagccagtgatgacgacgatgatgtccagtggcaaacagatacttcactggcggctgctcaacaaaggattcaagagcagttaagtgctgttactgcagatatggtgatgctatctaccaatgaagagaagaaaaagtcagtgaagaagactccggagtgtgatgtcaaagtacatgagaaaagtttcaatacccatga

SEQ ID NO: 24579 - DNA, 354 bp, Gossypium hirsutum
  Clone ID: LIB3147-023-Q1-K1-B3
tcacattgcaaaatactatattttgcagcggcagaaggagctctctctctttctggggtgagacatccttgtgagcgtgggattttagtttataacaatcttaatccaaatgcctcctttggctttatctgacctcaaagagaagaaagaagagaaaatgatgaagaagaagatcgctctcgaaacacctgaatccgagaaaaaaacgaagaagatcaaggaacctaaggttagagaagaggaagatgattcggctgtgaagaagagtaaaaagaagcgtaaggcctcggagctccaaatggaagaggaggagaggagcgagacgagctcggagcttgttgagccggtggatcc

SEQ ID NO: 24580 - DNA, 312 bp, Gossypium hirsutum
  unsure (1)..(312): unsure at all n locations; Clone ID: LIB3147-023-Q1-K1-B4
cgactttagtctgtggaatcagacaaattactatataaggtttgggagcctttgtgctcgtcgantatttttggtgtggctggtgatttcagtttaaaacaaaattctctgcttagttgagtgtaagcccgcattgtgggacaaaaatgaccaagtataagcccttattctgttggttaaaaaaaaaaaaaaacacctaaatacaaaaaaaaaacaaaaaaaatcaaaagaaacataaagataaataaaaagaaaatgattccactgaaaagaagagtaaaaagaagcgtaaagccttatagctccaaatgg

SEQ ID NO: 24581 - DNA, 409 bp, Gossypium hirsutum
  unsure (1)..(409): unsure at all n locations; Clone ID: LIB3147-023-Q1-K1-B5
ggaaacagttanttacaattgangttatccagtttacatccctgtggaatttatacaacgaggagggtttttaatgagacgaacgtgcttgnnaattctttgggtgacaaagctgcagaagatttgagaatgagaattattgaacataatatccttgttgtttcaaagtactactcgaggattacattgaagagacttgcagagttgttgtgtctcactatccaggaagctgagaagcatctttctgaaatggttgtctccaaggcactggtggcaaagattgaccgaccaatgggaatagtctgcttccaggtagcaaaggatagcaatgaaattctcaattcgtgggcttcgaacttggaaaaacttcttgatcttgttgagaagagttgccaccaaatacacaaag

SEQ ID NO: 24582 - DNA, 405 bp, Gossypium hirsutum
  Clone ID: LIB3147-023-Q1-K1-B6
gcgcgacgcctccgggaatggacacctaaaagaactttcagaaggaggcaaaaactggtaggcgtggaatttggcaggatggagatgtggaggcgggtgatgatgaggatcttcctacacttgcagcagctgctgctaagaagacgggggctggtcgccgatagatttattaatattaatcacttgaaggtaaactccttcactttgggagttatgattaccccaaatgagtacttttagtagttatataggtagttaaaagagcacctagaagagattctcagcctaaacttgcttaaattttgactgcttttcttttttctttttctttatttaatcctttatttttggtagcgcggctgaccattgtttgaacattgttaaataaggctgaactgtaacact

SEQ ID NO: 24583 - DNA, 385 bp, Gossypium hirsutum
  Clone ID: LIB3147-023-Q1-K1-B7
cggacgcgtgggttccgatatgagggagaggaggtgaacatgacattggcaaaatctgaggctaagatacttgatgataaaatctcggacaagcattataccgatgaggaggtgattaggattgtatcaacaaggagtaaggcacagctcaatgcaactctcaaccattacaatacctcattcggcaatgctatcaacaaggatttgaaggctgatcccagtgatgaattcctcaaattactaagagctgtgatcaagtgcttgaccaccccagagcaatatttcgagaaagttctacgtcaagccatcaataagttgggatccgatgaatgggctcttacccgagtcgtcacaactcgtgcagaggtcgacatggtacgtatta

SEQ ID NO: 24584 - DNA, 116 bp, Gossypium hirsutum
  Clone ID: LIB3147-023-Q1-K1-B9
gaaaacccgggcccgcccacgcaaccacccactcttcctataaaaaaaaaaaaattatttaaaacccaccacaaaaaaaaaaatccccccctaataaacccacccccccccccccc

SEQ ID NO: 24585 - DNA, 432 bp, Gossypium hirsutum
  Clone ID: LIB3147-023-Q1-K1-C1
cttcgctctcaggcacaagatttcaggcagcagggaacccggatgaggagaaagatgtgggtgcggaacatgaaggtgaagctgagagttttgggaatcctgatcgcattgattctcattatcgtgctgtccatttgcggtggcttccattgttgaagagaatacgctcatctgctctgctatggactctatttccacttcatggatcagaggtattgttgcagtcgcacaactgtattgatgctcgtgtgcctatacatttcttgattacacgttcttttttattttctggtgtagcctaaatcacaagactgtgtgctgtatattacagtttggattcttttgattgcattaagttcattgatgtgtggaaattcattatccgtctttttgaaactggattttgatatataaaaattgataattataatt

SEQ ID NO: 24586 - DNA, 115 bp, Gossypium hirsutum
  Clone ID: LIB3147-023-Q1-K1-C10
ggaaaaaccggggcgaccgacgcgtacgctatcttgggtgacattgtgctcttttcctatttaggagaagccatttttcacgataaaggggacaatattaggagtatgggggttg

SEQ ID NO: 24587 - DNA, 447 bp, Gossypium hirsutum
  unsure (1)..(447): unsure at all n locations; Clone ID: LIB3147-023-Q1-K1-C11
gatgttgccgcgtctgaattttatggaacagataaaacttacgacctgaacttcaaaggggagaacaatgacggtggatgagggatctcangagatgctttgaaagatttatacaagtcattcgtagccgagtatccaattgtgtcaatcgaagatccatttgaccaagatgattgggagcactactccaaactaaccaaggaaatcggagaaaaagttcagattgtaggagatgatcttttggtcaccaacccaaagagggttgcgaaggctattgccgaaaaaacttgtaatgcccttcttctcaaggtcaatcaaattggatctgttaccgaaagtatcgaagctgtgaaaatgtccaagcaagctggatggggtgtgatggccagncaccgcagtggtgaaacgaggatacttttatgctgatcttcagtcggtttggcacgg

SEQ ID NO: 24588 - DNA, 434 bp, Gossypium hirsutum
  Clone ID: LIB3147-023-Q1-K1-C12
cggacgcgtggggaaatttcaagaaactgctctctctgtcttaacgctataatcataggagaaaaatgggttggagggaggaattcgaggagtatgcggagaaagctaagacccttcccgagaacactaccaacgacgacaaactcattctctatggactcttcaagcaagctactgttggaccagtgaacaccagccgtcctggaatgttcaacatgaaggaaaagtacaagtgggatgcatggaaggctgttgaagggaaaccgaaggaggaagcaatgaacgattatatcactaaggtaaaacagctgcaagaggctgctgctgcatcttcttgacgtgtgtgtgaatagaaaatggtgtaaatttcaagccctttgatacctatgggtttgaaaaggtctaaaactatgaataagcatgtactatggttt

SEQ ID NO: 24589 - DNA, 516 bp, Gossypium hirsutum
  unsure (1)..(516): unsure at all n locations; Clone ID: LIB3147-023-Q1-K1-C2
gaatacccgggtccgaccgcacgcnggtccgctcaatttgcgaacttcttgtagaggagcggaagtgtgtaagacgatcgagtgtgaccggagcccagttcagtgtgggaggtagtaacacgaggtgttgcgtgagtgccnnattactcanncnnattatgaacacgnntgtaaaggggccaggtacccccaactcnnttgggctannatgccantacttacttgtagaaataatggcgtttgtgttttgtcaatgataaatataatgcaagcgcacccaatgcatgaaatcctatttggtcgttcttttcgaggttggnagtgcttatatatantcgtttagccttgttatncctgttgaaatatttgattatagccattgaattcactagggttgtacttgacactgctattgtagatgaacaagcatgaattttgctctggtttgaagtgcgttatgttttttctttattgaatgatcacctgttcttaccatgaaaaanannannnnnnnna

SEQ ID NO: 24590 - DNA, 415 bp, Gossypium hirsutum
  Clone ID: LIB3147-023-Q1-K1-C3
caaaacccctccaccaaaaaccctcttccatttcgtaatataaaccatggcggctcaacccgaacgcggcggagtttccctacgcgagaggcggtctgccggcaagccggaatccaacatcctcgccaggatcagttcctcccctatcgtttctcgtggtaagcaagccgcgtgcgacgccgctttcgtctccaagaagctcctccttagcaccggaaaggctgcttggatcgccggaactactttcttgatcttagctgtccctttgatcatcgagatggaccgtgagcagcagctcaatgagcttgagctacagcaagctagtcttctcggtgccccgcctactgcgtccgtcagtaagtgatcaggtccgattgggtcatttcaggtcagagcttggtggttcatcaatttt

SEQ ID NO: 24591 - DNA, 421 bp, Gossypium hirsutum
  Clone ID: LIB3147-023-Q1-K1-C4
aaaggacagcagtatcaacaacggttgagattcgatcaccgtgattatcacgaaacttttggcgctggtgtacaaagcgactcagattcatcctccgtcgttgatttaaaccaccacgagatcaaacggcgaccgcttctcaatatcgatctcaaccaacctgctccggaagtcgcctgattatgattttttaaaatcgccgatatcaagaaccggaaaagaaaaacccacaaattttcaattttatctctttaaaatcgttaatcttctttttagtcccaattttgaaaattagacgagaaaattatacccaaaaagaaattacgcgagagcggcgtaaattgtgaatacgtagatgaaaaatctcctctttttcgcaacaaaagtaccgtaggttggtggctgtggttcatattaaatt

SEQ ID NO: 24592 - DNA, 355 bp, Gossypium hirsutum
  unsure (1)..(355): unsure at all n locations; Clone ID: LIB3147-023-Q1-K1-C5
ccacgcatccnnacctcttaaacattcggttttatcacaaggtggccaaaaaggtttaacgcgctttttaatcgggaagcgcgcctgcataactcttttttcatcatgctcaccacaagaacaaactcgtccactttcattgtaatgcatctgatccatctactgttgttagtgtatctgattactgtgataacactgctggaagaaggacattacaaatataacccatcagtgatctgatctacactccataagacgatgttttgccatatctgcacaaattcaaataccatatcatttcatgctcctcaaagccatgaaacatgaaagcgccccaacatatttccacattgac

SEQ ID NO: 24593 - DNA, 424 bp, Gossypium hirsutum
  Clone ID: LIB3147-023-Q1-K1-C6
aaattccacttaaaaatcgaacattaccccaggggaatcaattgaataacagggttccaacggcagggctaggcgtccggttccaaatttcccagctcttcagagatccgatctcaacacagacttaaatcctgcgacggatcctttatcgctgtcactcaagctgtctttgcaatccgatcaaatggattcatcatcatcttcaacttccaggcattctccatttcaggtgatgccaaactttagcagtggagataacaataacatcatcagtgttgcttaagaatgacaataattatataataagcaaaagcgacacaaagcttattattattagagcttaaatttggatttagagaaaataaaaaaaaagacataagtttaaattaggtaactggtttttgaatcccttttgttttcatgt

SEQ ID NO: 24594 - DNA, 313 bp, Gossypium hirsutum
  unsure (1)..(313): unsure at all n locations; Clone ID: LIB3147-023-Q1-K1-C7
caaaaatatttcatgatttataactattgcactgatttgaaacgtttccctcaaggtggtcgaccagagtgtgaacgccgaaggttctaaaatcaaacctgttccaccagagtgtaaacgcccagggttctaaaatcaaacctctcctcttttccacgtaatatattctttttttcactactttcttactatgtattcaagttgaataagttattattattattattattctttttatgtatttttatttctctttgttgcttcttaaatcatcttgaaaatagatgtaaattccctgtttctgatnnanaaa

SEQ ID NO: 24595 - DNA, 323 bp, Gossypium hirsutum
  Clone ID: LIB3147-023-Q1-K1-C8
gctactcctacttttactcctactatgatgccaccaactccaggagcaacacctccagggcgtgattcaaatggggatcgggccgctatttatgccactccatatacgataccgcatacgaccccaccttctgtcatgagctatcccttgactgaaaccactgcttatactcctaattatactcagatgcaacctcatgaagtcccagatcaatccgcacaaccggcctgccaatacttgctcaaaaccttggtctgtactgtcaaatgaaagtgcaaatctcatcgtccatatcatcgatctgcaaagcctgtcccatatgc

SEQ ID NO: 24596 - DNA, 438 bp, Gossypium hirsutum
  unsure (1)..(438): unsure at all n locations; Clone ID: LIB3147-023-Q1-K1-C9
ggaanacccggggcgagcgacgcgtacgcccacgcgtccgcccacgcgtccgacgatgtattcaacaagcatgttgagagtgcctccccggattttaatggggagttggggaaaccaacataaatgccaacagaagttttaaatcgtagcctaaaccttgcaagggtgatggatgtactttacagggaaggagatggatatacatatgttggaaaagcggctaagggtggaatcacttcattgctcattgaaccaattgcactttaaaattatgttaatttttcctctccaagcttgtttcctaagaaatagttattaagttctaattaataatgttttataatattcatatattataaaagaaagtccaaatctattgtctntgaacttatcggctcatattaattcaataaagttctatccaaacttttcattgtg

SEQ ID NO: 24597 - DNA, 427 bp, Gossypium hirsutum
  Clone ID: LIB3147-023-Q1-K1-D1
agcagccgaactccgaatccagaaacaccaactgaaacataacaacaaaaatggcggccggcgagaagacaaagaagacccatgaaagcatcaacaacaggttggctctcgttatgaagagtggaaaatacactcttggttataaaacagtgcttaagtctctaaggtcctccaaagggaaactgattattatttccaacaactgtccaccattgaggaaatctgagattgagtactatgccatgctttgtaaagttggggtgcatcattataatggaaacaataatgatctgggaactgcttgtgggaagtacttccgcgtatcctgcttgagtatagttgatccaggtgattccgacatcatcaagtctctacctggtgacagctgagtcgtttgacagcagaaacaatgttcgttcttattata

SEQ ID NO: 24598 - DNA, 220 bp, Gossypium hirsutum
  Clone ID: LIB3147-023-Q1-K1-D11
cccacgcgtccgcccacgcgtccgctcctttgatgagattaccttttttggaagattatgggaggcaaagggtggggttgggttgcaagtcctattttaacgtgcgcttttcttgtttctttctttatttttttttcttcctttctagtttcttaagttaatgttgttcttaaaaacatatttgaccattttaatgatatggttcctgcacattttctag

SEQ ID NO: 24599 - DNA, 196 bp, Gossypium hirsutum
  unsure (1)..(196): unsure at all n locations; Clone ID: LIB3147-023-Q1-K1-D2
tgaaaagctgaaggaactgttttcggagtatggcaaaattatttcgtgcaaggtcatgcgtgacgctantggagttagtggaggctctgggtttgttgcattttctaacactggaaaaacattaagaagccttggttaaaataattattaaatgggtggtaaccaaacaatttattgtggacctggttaaaagcca

SEQ ID NO: 24600 - DNA, 388 bp, Gossypium hirsutum
  Clone ID: LIB3147-023-Q1-K1-D3
ttcttccttcaagaagcggtggccaaaaacactcgtactcctaattacccctcctccgatggaggaagatggacgcggtgagacgaggcttatgttgagaacccatcgggtttgcccgagaggaaaatgaagctgccggctcttttgccaaggcatgtgttgaaacagctgaagaatgtgggatcgctgtggtggatctgtggaccaggatgcagcaatatactgactggcgcaaagcttatcttagcgatggtttgcacctcacaaaggaaggcaacaaggttgtatttgaggaagtgatgaaaaagctggaagagagaggtttaagccttgaaaagctaaaagctgatctcccacttattgctgatattgaccatgatgacccact

SEQ ID NO: 24601 - DNA, 372 bp, Gossypium hirsutum
  unsure (1)..(372): unsure at all n locations; Clone ID: LIB3147-023-Q1-K1-D4
cggacgcgtggggcaaatctcattcctcttcgatgggttttggcttaagattcatcttctgggtgcggttctgcaagagtctgttgttgtttcagaatgggtaagggcaacaaagaaaggacctccaatcaatttacgtggacaaaaccgatggaacatctttttcttgaaattctagcagagaaggcccagaaaggaaataagccttttaatactttcaaagcaatttctattaatcgatttgtcaaagctatttctgaaagatttcaagtccaatacaatgcgaagtatgtggaaaattatttgaggactgtaaaaaaccagtgacaaagtggacaatgagaagaatgaagatgatgaannattatactc

SEQ ID NO: 24602 - DNA, 275 bp, Gossypium hirsutum
  Clone ID: LIB3147-023-Q1-K1-D5
cgccatggaaagaagggataagaagctcttcgagaacctctcgtcctccgattgatcccttggtagttttcttctggagactgggtcgatggagtgagagaagaaataaaaaatgctctatgatattctgtaatgctgaagaagactaaagagcagatgaactcgagtattttctttttcattgtaatgttaagcatgaacttctgaaatgttgcacttttggcaacacttgctaatgttttacgctggtggtgtattggagatttgttgcttcc

SEQ ID NO: 24603 - DNA, 437 bp, Gossypium hirsutum
  Clone ID: LIB3147-023-Q1-K1-D6
ccaacccgtccgcccacgcgtccggaagcatatcaagcactgaagagaattccacgcattaggggtcctcaaagacgagcgcctaggcgctcgccttcaggttcaatctctgaaacacaagtaacacgcaaagatggagatgtcattggtaacttcattgcaaggtcaaggttgagctcagatgttcctgctccgcccagcaacactgctgtaggaggaaaagcatctcttttgccaaaacgtactcctgtctctgagagggaaatcgaggctattctgttaggcggctgcttctgaattttcagctgtcaaagctagctttcccgaagctcgaaataaaatttctgatctgttatttttctcccatcttagttctctgatatgtaaaagaactgttactgaaatttaaaaaagctaaaagaatcaaaatttgtctt

SEQ ID NO: 24604 - DNA, 365 bp, Gossypium hirsutum
  Clone ID: LIB3147-023-Q1-K1-D7
aaaaaaaaaaaaaaaaaaaaaaaaaaaaaaataaaaaaaaaaaaaaaaaaaaaaaaaacccgcgccatataaaaaccgcccacccccgcccaaaaaaaaaaaaaaaaaaaaacaacaccctccctcccccatcctatctccacattattctccccggccctccccctaaaaaccctcttttttaacaactccaaaaaccaaaaaccactcccactcctcacaaaaacctcctattacaccatgagacctcttgctatcccctccgttgctcctcatatgcccatgtaccctcctggtgcaccaagtcttggccaacaatttttatatgggcaagcacctccagctatcattcctcaaacttgttt

SEQ ID NO: 24605 - DNA, 446 bp, Gossypium hirsutum
  Clone ID: LIB3147-023-Q1-K1-D8
actgaaccactcaatcaacaggccgacccattgcttaattcctacagtgattatgaagacggtgtatatggcctggcttggagttctcgtgagccttggatatttgcttctctatcgtatgatggcagggtggtggtagaatcagttaagccattcctttcaagaaaatgaaaatgaaggtgttatttgttgtccctatgggcttctacggctattttttgtggaaagtttccaagtagcaacagcagtgctcgaagtgacttgaaatgaagaggggtagcattagcactcaaattaagtttttatgacttgtgctggcctgccagcccggccactgtattcttttggtttttttttcctgtcgaaatagtatatctgcttcttataatcaggatcatctgacatcttgtaatttccctgaatacttgatcatgccttttgttgtt

SEQ ID NO: 24606 - DNA, 394 bp, Gossypium hirsutum
  Clone ID: LIB3147-023-Q1-K1-D9
gaacctttggataatcttttctttggaggggaagcagttaccgaggagcaccaagggggggggcacggagcggactcgttggggagtcctggctgccagaaactgtgagagtcatctcttagagagattaggtgactttagaaagctccagctaatctcctttagtggtgatgcattattagaacccatatttcctctccagatatctaggatgtgaactttattttacctattacaaagacctgtctgagttgccttgattttctaattagatttaaaaaagaaaatcatccaacttgttaaaatactattatatactgtatcactaaatgtgactactgctttcaatttccatccccaaaaagtggaagaaaataaatttcagatgtttgat

SEQ ID NO: 24607 - DNA, 170 bp, Gossypium hirsutum
  Clone ID: LIB3147-023-Q1-K1-E1
ctgatataatatctgttttcagtactaagtctagcaaaaaacagactgtctacggccagggggagacatttttttaataaattgtaagattttcaaacaatataatggtgcttcttggaaaaaaaaaaaatttttaaaaaaaaaaaaaaaaaaacaccatctaaaattta

SEQ ID NO: 24608 - DNA, 437 bp, Gossypium hirsutum
  Clone ID: LIB3147-023-Q1-K1-E10
tctcaggcttctgccttggaacagcatgcagctcctaactgcaaggttttggttgttggggaccctgccaacgccgatgcagtgatcctgaaggaatttgcaccttcaatccctgcaaagaacattacctgtttgacaaggctggatcataacagggcactaggtcaaatctcagagaaactaaatgtccaagtttctgatgttaagaatgtgattatttggggtaatcattcatcatctcaatatcctgatgtcaaccatgcaactgttatgactccatctggagaaaagccggttcgcgagcttgttaaggatgatgcatggttgaatggagaattcataaccactgtccaacaacgtggtgctgcaatcatcaaagctaggaaactctcaagtgcactatctgctgctagtgctgcttgtgatcacattcgtga

SEQ ID NO: 24609 - DNA, 460 bp, Gossypium hirsutum
  unsure (1)..(460): unsure at all n locations; Clone ID: LIB3147-023-Q1-K1-E11
cccacgcgtccgagattggctctcgttatgaagagtggtaaatacactttgggttacggggctgttcttaaagctctcagagactccaaaggtaagttgattataattgccaacaactgccctcctcttaggaagtcagagattgaatattatgccatgttgtgcaaggttggagttcaccactataatggaaacaatgttgacttgggcactgcctgcggcaaatatttcagagtgtgctgcctcagcattatcgacccgggcgactctgatattattaagagcatgcccggagatcactgagcaacagcggacgacacatcatactaggttttgttccaatttagtttatatttcttttgggtttctggaaacattgatgttaaaggcatcttattccgaaatttggaacttcctttgttatttgacttgtgtactangaaatttgtgaagtaatttc

SEQ ID NO: 24610 - DNA, 527 bp, Gossypium hirsutum
  unsure (1)..(527): unsure at all n locations; Clone ID: LIB3147-023-Q1-K1-E12
ggaannncccgggtgcgggccgacgcgtccgctgctcacttttctcctgggtttgtagacacgcagttgtctagcagctgaggaaacgatngtctggagagtggcggtggggatgctgtagggtgagaggaggcgagcctatanngcctgannggcactcncaagnnnagcttgtntnncggattggaggcttgccnnngttgccaacncnnccgatgagaanannaccaagtnngccataccatttcaggtaacannttgagcttaagcggaagaagaagatnntattgttaatgaggagttcgaacccaaggccaannnacatttcagtttaccggtcgatgaccgcttaatctaaaagcgagaataaatcatttcatcttttgcagaagaattttgaaccgagaaacctaacatttcggcttaccgggggcgatgatgcntggtcttaaaggacagaaagaatcattcactaaagatttcgatccacagccaaatatctccgcttacaataactaattaaaagc

SEQ ID NO: 24611 - DNA, 89 bp, Gossypium hirsutum
  Clone ID: LIB3147-023-Q1-K1-E2
ctcactcgtgcgacaatttgctctaatcctaattatgaaaagccatttaatcatgatacacgtgagcggtattatgagtgtgggggggg

SEQ ID NO: 24612 - DNA, 297 bp, Gossypium hirsutum
  Clone ID: LIB3147-023-Q1-K1-E4
ataaattagagccaccccagcagcagccatattcttcgtaaaaagtaaaaatttcttcattgggattttgattttgggtttcggttgcattgttgtgtttcacttgttgatgatacatatgattttggaagacatgcatttgtctgttgtaagtcatgggtcatgaacttcaattgctttgataggtgggctaaattgttaacttgtattattttccatgtttgtatcaatgagcacgcattcttttctaaaaaccttttgattaacttaaatatatatactactttagttaggatc

SEQ ID NO: 24613 - DNA, 403 bp, Gossypium hirsutum
  unsure (1)..(403): unsure at all n locations; Clone ID: LIB3147-023-Q1-K1-E5
gtgatttttaacaaggcaagggatgagaagaaaacaggtagcaaacctgagtcaccagcaagagctgatgctcacggtgaacggggaccggatcctagcaaaccccagagtaagaaatggctttgctgcgttcaagcaccaccggctgaatcttgatgaagtccggcacgtatacgagctttcacaagtacattcaagcccctcaccatggattcttaaacaaagataagatttaattatggtgggagggggagaaaaaaagataaacacacatactgtatctatatgtactaatttggtgggttattatattattagaagctaagctgagtttatttgttgttgtcatttgccttgatcatgttataagctgtaaagcttgtattgacanttctttcttctc

SEQ ID NO: 24614 - DNA, 421 bp, Gossypium hirsutum
  unsure (1)..(421): unsure at all n locations; Clone ID: LIB3147-023-Q1-K1-E6
accggaatcaaaaagccatctcaccgaggaacctgccaaaaagaaactgaagaagaaaatgagcctgacatggctggcggatggcagcgagatgaagaaatccccctcccgacagcctatcgaagttaggaaatgcttgcactgcgaagttacaaaaaccccacaatggcgagaaggaccaatgggcccaaaaaccctttgtaacgcatgcggcgttcgtttcaggtccggccgtctcctccctgagtatcgccctgctgcaagtcccacatttgttccagcattgcactccaactctcataagaaagtggtagagatgagaaaacaggccaacttgccaacgaccggaacaccacccatgctgtcgatcccgcangccccgattagtatgtagttgagagaaagcttcacatagggagct

SEQ ID NO: 24615 - DNA, 374 bp, Gossypium hirsutum
  Clone ID: LIB3147-023-Q1-K1-E7
agttcttggagctcaagacaaaaagaacccaccgcttcattgttttcaaaatcgaggagaagcaaaagcaagttattgtggagaagcttggtgaaccaaccgaaagctacgaggattttactaaatgtctccccgctgatgaatgtcgatatgctgtgtacgattttgattttctaacggccgagaacgtcccgaagagcagaatctttttcatcgcatggtactgcaaagtttcttaatcgtggtgttaaattgtttccttttattacttactatatgttgttgtcgtcctatgaaggtctcccgacacgtcaaggatcaggagcaagatgatttacgccagctccaaagacagattcaagcgagaactggac

SEQ ID NO: 24616 - DNA, 202 bp, Gossypium hirsutum
  unsure (1)..(202): unsure at all n locations; Clone ID: LIB3147-023-Q1-K1-E8
cccacgcgtccgcccacgcgtccgagcgaaactaactgtgatacgaggcaggactaatgggaccccttttttgttgctcggtttctttgttcatcggatttcggatttttggtttctgggttaaacttaagtattatcagtgtggtggtggtgtgttagaaatcttggtcacagctgctgtcancgttttcnaannnaaaaa

SEQ ID NO: 24617 - DNA, 428 bp, Gossypium hirsutum
  unsure (1)..(428): unsure at all n locations; Clone ID: LIB3147-023-Q1-K1-E9
cccacgccgtccgcccacgccgtccgcagaactgttgggnttcgcaaaggtggtgccttttacgcggagaaattagtgcgtgagatgctgtgttaatcntgagcanttccatggngttatcnatcggtcacttctgaaagaagggnctctcttgaatgagtccaatgagtttgttggagacaaagtagcgtatgcactttctcaaggcttgaaggttattgcctgcattggggagactcttgaagagcgagaatctggctctaccatggctgttgttgctgcacaaaccaaagcaattgctggaaaagtaacaaattgggacaatgttgttttggcttatgaacctgtttgggccattggaacaaggaaagttgcaacccctgctcangctcaggaagttcattgcgagttgaggaaatggcttcatg

SEQ ID NO: 24618 - DNA, 369 bp, Gossypium hirsutum
  Clone ID: LIB3147-023-Q1-K1-F10
cccacgcgtccggttttcagttctgaaaatatatttatttgcaccaaaattccctcacggcgaaatatataaaaagggggaggggaaaaaaaaaaaaaaaaaaaaaaaaaaaaaaaaaaaaaaaaaaaaaaaaaaaaaaaaaaaaaaaaaaaaaaaaaaaaaaaaaaaaaaaaaaaaaaaaaaaaaaaaaaaaaaaaaatggggccccccttttaaaaaaaaaaaattttattcccccttttttcaaaattaaaattttttttttaggaaacaaaaaataaattaattgcccccttttttaaaaccttgaaaattgaaaaaaccttctctacccaaaataaaaaccttttaaaaaaaatccctttttac

SEQ ID NO: 24619 - DNA, 304 bp, Gossypium hirsutum
  Clone ID: LIB3147-023-Q1-K1-F11
cccacgcgtccgctatcacttctcttttttccttcttttttgttggctgaaattccttgaggggaccaattgggaatgaggggctgctagttaaattgttctgtttctgcatggccatgtcattatttgtagaacctaatcattaattaattaacatgcaaactgaaagttgtttcatcaaaaaaaaaaaaaaaaaaaaaaaaaaaaaaaaaaaaaaaaaaaaaaaaaaaaaaaaaaaaaaaaaaaaaaaaaaaaaaaaaaaaaaaaaaaaaaaaaaaaaaaaaaaaaagggcgcccgttttaa

SEQ ID NO: 24620 - DNA, 255 bp, Gossypium hirsutum
  Clone ID: LIB3147-023-Q1-K1-F12
cttctctaaagcccgagtttgttgatatcatcaaggctgcgacggtgaaaaagaattagggggtgaaaagcaggagttaggggtgaaacagaaacaaccttctgggaaactttaatttttgtagttgagatctttccttggaacctaatgtctgttgaaaatttcccgatgtaataagccaaatttaacaatgtgttttttttgtggtggttgaggcattgatcctcatttcggactttccctgaatttacctta

SEQ ID NO: 24621 - DNA, 465 bp, Gossypium hirsutum
  Clone ID: LIB3147-023-Q1-K1-F2
cttgtccacatcggctggtcctgtcatgggagttttatatgtatctacagcaaagcttgcgtatggcagtgacaggccgctttcctatcaaaatggtagcaagactgaatggagctactacaaggtagttatcccattacatcaacttaaagcaattaatccttcaacaagcagagtcaatccttctgaaaagtacatccaagttagctctgttgatagtcatgaattttggttcatgggcttcttaaattacgagagtgctgttaaatgcctacaggaagctttgcaacagcatagcttacaatctgtgtgataatgatttgaccagtatatcggttgcaacatgttgtcatgcaagcatttggtctgctgcttcgaggcatttgatagtaaatgctccttcggaagctcttcaatattctgtggcaatgaaaaaataagtgaaaacatagagtgatatctgga

SEQ ID NO: 24622 - DNA, 432 bp, Gossypium hirsutum
  Clone ID: LIB3147-023-Q1-K1-F5
ccttaagccattcaaggttcttctacttgatgagataacggtggaccttgatgtgctagcgagagctgaccttcggaagttgggtaggaaggaatgcgaagagcgaggtgccacgatcatctacgcaacacatatattcgacggtcttgagaagtggccatcacatattgtttacgttgctcatgggaaattgcaattagcaatgccgatggataaggttaaggagattagcaattcgtcgcttatgagaacagtggagagctggttgaggaaagaacgagacgaagagagaaagaaaagaaaagagcggaaatcacaggggctcccggaattcgaaaaccaaaccgagggaagccgtgtgacaggggatcctgcccgagccgctgttcgttcactaaacaacggttgggctgccgggcggttgaactcgac

SEQ ID NO: 24623 - DNA, 406 bp, Gossypium hirsutum
  unsure (1)..(406): unsure at all n locations; Clone ID: LIB3147-023-Q1-K1-F6
ttgaggttatctttggntggatcgttgcaccacannatgctatccgcgggtgactccaagaatgggactggagcggtgcaatccggttcacaagcacangggaacttcgaaggacttacatcntgctggtaaagaaaaacaggnggtctccatggaaagggtcatttgcaccacaagaaccgtccttctcgcagggcaacctggaagagaaacaacactctctcccttcgccgctaccgctgagttactgtgttccttagactttttatcctagttgattttagaagtcattgttttgagtttgaaatttttggaagttttaaaaaactgactctttgaatttacatgcaatttatttttgtttttggatgctatgaatttctgaagttattgctacttgcttttc

SEQ ID NO: 24624 - DNA, 304 bp, Gossypium hirsutum
  Clone ID: LIB3147-023-Q1-K1-F7
gttgatcgcagatggagaaattgatagaacattcagttggtgatattttctgttctagagtgactaaagagatgggtagtgggatgaaaaatgagggctgttattgaaattattttgattcaatttcgctggtggttggtaagcagtcagcatgtttttccctgtttccacccaaaaaatcacaattgaacagctttttaatgtcattgaaaataatagtcctgttgaacagagctatagtgccatgtaaacttggtattttgcacgtattaatcaatcatttttccttgaagttgtttcttgt

SEQ ID NO: 24625 - DNA, 391 bp, Gossypium hirsutum
  Clone ID: LIB3147-023-Q1-K1-F8
atagtactgttgctccccctacccccctcttttttttttttcttttctttttgatttagatggactgaagcaagtgggtgatagtgattaacaatttgctatttgatatgggtgaaaacaatttgctatttcaggtttggcttttcacccagtggacggaatactgcaggcagtacctcatgtgatagcactcttcattataccaactcattttacaacacatgtcggactgctgttcctcgaggccgtctggacggcaaacattcacgattgcatccatggcaaactatggcctgtgatgggtgctgggtaccacactattcaccacactacgtatcgccataactatggccattacaccatttggatggattggatgcttggaacccta

SEQ ID NO: 24626 - DNA, 405 bp, Gossypium hirsutum
  unsure (1)..(405): unsure at all n locations; Clone ID: LIB3147-023-Q1-K1-F9
ctaatatataggagttaattgactcgtttttaataaaaggataaaatacaaggtgtctttttttgacgcatagcgagtactttttatttaagctaccaggaaatgtagagattccgattggttgggctcaaagtatttaattgatacagctaaatacgagcgggatagggccagttcgggtttggaaatatagagttgagtcaggtgcggcggcgggcaaagcacctgctttatgcattctttctctaagcaataatatgatgatagaaatgtcaaggtttctcannctataatgggtgctgggtaccacactattcaccacactacatatcaccataactatggccattacaccatctggatggattggatgctttgaaccctaccgttcccttttgaccaata

SEQ ID NO: 24627 - DNA, 384 bp, Gossypium hirsutum
  unsure (1)..(384): unsure at all n locations; Clone ID: LIB3147-023-Q1-K1-G10
ggctattgccgagcatcttcgtcgtgcttgttgcggtcaagacgccccactcctttctcgtcgcattgttgggcgggctggcgttactgtcccatcttcaaataacaagttgaagcttaagcgacttgcacctggtcttgtggaattatcttcaatgtctaaaactaagaccatggatgccctctccactattgatttacaaggagaagccgctacagttctaaccccaaagcatttctctacaatgtggccttttgcgtccatcaatggttccaatgctaatttaattggtttcgagagactgctatcatctgtgctggattcaaaggcaaacaaaaaaagatactttaagttactgaangctgatgtgtcagctcaaacatt

SEQ ID NO: 24628 - DNA, 149 bp, Gossypium hirsutum
  unsure (1)..(149): unsure at all n locations; Clone ID: LIB3147-023-Q1-K1-G11
ttattatataancattactttacatttttttaaaaaaaaaaaataataaaatttcatccattctatataatttatttttacttacacctccatacaaaattataatttttttataatctcacctaaatttaattcactacccttctttt

SEQ ID NO: 24629 - DNA, 388 bp, Gossypium hirsutum
  Clone ID: LIB3147-023-Q1-K1-G2
gcgtccgctttccgtacaccttgagaatctgaaaccgcgattccgcctttttagggttaggttctgatgtgaatttttgaagcgggggcggcggattcctatatttatcagtctccagctgagtctacgatggagaagatcatctagacgattcacggcaaagatgcatcgtcatcttcagattctcatcatgacaaaccgacttcccttcctccgttaacgctaaccatatatcggtatgattggaaaagacagaccatttcatcatgtgctcggtcttggaaaacctgctgatccgttcttgaggagcaacactatcatttcaacctgtgtcctttatgaaacaactgcaacatgagtccttatacagttgattgcataccaccta

SEQ ID NO: 24630 - DNA, 229 bp, Gossypium hirsutum
  Clone ID: LIB3147-023-Q1-K1-G3
ccttagtttgctgtccaccgctgtcactttgtttctctgctagtgattcaccacaccagctggggcgattggtgacggagggcgcgtggctccatggtgctatgtttcgcaggatggggtttgaatgtaattatgctaaagcctttcgggtgaatagaaaagttgaaagcatttttcattctttacagtttgtcgaatactactttaattaaaaaaactattttctgac

SEQ ID NO: 24631 - DNA, 396 bp, Gossypium hirsutum
  unsure (1)..(396): unsure at all n locations; Clone ID: LIB3147-023-Q1-K1-G4
ttcatgctgctattctttcanatccgaattatataaatccaagaaggaacctccaaagcgcgcatattttatacaagctggcggcctctcttatnaataaannaangctaaattaatctataattttaaaactcttaattcatctgctggagttgacaatgattcctattacgttgatgattacgttgctaaactacataaatttaacactcaacattacatatttcccaattatcttacccacttacctttcttttttcgtgctaaaattttcattcaaaaccacaattgttctttctttattatctaaaatgctccttccaattcaaaaactaaccttaaccttctgttgtttgtacgattcatcccaaatttaaatttcttttattttttaaa

SEQ ID NO: 24632 - DNA, 295 bp, Gossypium hirsutum
  Clone ID: LIB3147-023-Q1-K1-G7
gaattttctccgtcctaaattcgttttggtctttagctctacctttgagttcgcagccagcgcgagattattccgacgttcggcgataaggttcctccctccttttatgaaatgggaaacaagatcatttatgaaactgaagccaaagggttgaaccccggattgatagtgctactggttgttgtggggctgctgctgatattccttgtaaggaactatatactttactcgtatgcgcaaaaaactcttcctcctaggaaaaaaaagccagtatccaagaagaagatgaaaagag

SEQ ID NO: 24633 - DNA, 436 bp, Gossypium hirsutum
  unsure (1)..(436): unsure at all n locations; Clone ID: LIB3147-023-Q1-K1-G8
ggaaaacccggggcggccgacgcgtacgggacccaatancttttgttaatagtcttagttattagagcacattaattacggaactcgcgcgttttatttaagggacgggaggtactggctttttcaagaaagttaagtagattatgtgacctcttattctcttctttaaggagttccaagttcagtttggtttgaatgtttagcattggtgaaaaagaacctcttgttgcctctgttctcccttgtctcaacctgcacgaggaggcttcccatggagatgataagtgggatttgaattttgtaattccttatttaattaactatgttcgagagggttgaagaattatgtcagatatcaaccattttcacggtggtattcaacaatgaagacagtatatttggactaacgtttcaataatgaacgttgatagttttc

SEQ ID NO: 24634 - DNA, 295 bp, Gossypium hirsutum
  Clone ID: LIB3147-023-Q1-K1-H1
gccgcccgacggcgtccgcggacgcgtgggcctctagccaatcgggagccaggaagagcattcctccatgctgccgtttgagatctgacgatcctcaacaagttggctgagtcttaatagttatcttattcactcgtcttgttgaaagaacatttgttttgtttaatgcttagtgtaattgcccatagactactatgttcaagtatgtttttacttgaaatcttttgaagtgtttggttcattgtggatttttctactttataatgcattttatcggaaacagttttggttgctc

SEQ ID NO: 24635 - DNA, 393 bp, Gossypium hirsutum
  Clone ID: LIB3147-023-Q1-K1-H10
cggaaaaaccggggcgggcgacgcgtacgcccacgcctccgagttaatccacccatttactctccctccggttacggtccctccaatcggggtttcttcaaggacggttgctccagtaactaagccaccaagtgggaaaccctgcccaacaccaccaaccaaggacacttgccccattgacacactgaaattgggtgcttgtgtggatctgctgggagggttggtgcacattggactaggtgacccggttgtgaaccaatgttgtccggttctttcaagactcgccgagctcgaagctccggtctgcttgtgcaccaccctcaacttaaggttctcaaccttaaaattatgtcccactgcttttcaactccttgcacaattggaaaaccaccc

SEQ ID NO: 24636 - DNA, 227 bp, Gossypium hirsutum
  unsure (1)..(227): unsure at all n locations; Clone ID: LIB3147-023-Q1-K1-H12
cggaannncccggggcgagccgcacgcgataccgctttttnngtcccttgtttaatttgatacctccttttctcatgagctgcncnngctgatgtcnagtggcggcggtgctttcttctggaggggctgcgcgatgggctcaccgactaaccgggccccttgaaagaagctcttcaagtgccgtttggtgaaaatcgtccaaatcgaaagatcaattaatgatcgtg

SEQ ID NO: 24637 - DNA, 460 bp, Gossypium hirsutum
  unsure (1)..(460): unsure at all n locations; Clone ID: LIB3147-023-Q1-K1-H2
gaccgacgcgtccgcccaagacgacntcaccctcatctgtctccttctggtggcgaatgactgccaaatacaggggaggtttcagcagcgtcgttggggggaagcaaactctcgatgacaagtactctttaggcaaagctcttaaaacttcccaactcgaagttttggctttcaaatatggatatggagatggtaaagcggtcaacgttgttctgacttccgctgacgtggcggtcgatggtttctgcatgagccggtgcggtacgcatggttcggttcaggttaagaagagcaggttcccttacgcttgggtaggtaactcggtgagtcagtgtcctggttattgcgcgtggccgtttcatcaacccgtgtatgggccgcaaactccccccatggttgctcctaacggagacgtangggtggacggaatggtgatcaactcggcaacggttttggcggg

SEQ ID NO: 24638 - DNA, 345 bp, Gossypium hirsutum
  Clone ID: LIB3147-023-Q1-K1-H3
atgaggcgggctcggggaacctcaagcttggtatccatgaagactctcaaaacaggactaaaattgccgaattgctccgctaccactccaccaagagtggtgatgagctgaccagcttgaaagactatgtgaccagaatgaaagagggtcagaatgatatctactacatcactggtgagagtaaaaaggcagttgagaactctcccttccttgagaagctgaagaagaaaggttatgaagtcctttacatggttgatgctattgatgagtatgctgtcggacagctcaaagaatttgagggcaaaaagcttgtgtcagctaccaaagaaagtcttaaacttgatg

SEQ ID NO: 24639 - DNA, 324 bp, Gossypium hirsutum
  Clone ID: LIB3147-023-Q1-K1-H4
ggttcggtggcttgttattgacgccccagattttttatcggacttgacaccctcgagttctcagcttctttttgcggagctccgcgagtatcatatgttgttcaataacttgtaattatacaaagattacaaagtctgtagagttggaatgactgtgtgtttattatggcatcatccatacttttttgtgctctttggttgtctcagtactaattgctaaatcgatatgttttccgatcttgtcctgtatgaaatattgtctataatataatagaatcacactaaaaaactaagcaaaaaaagaaaattattgtaaaaaattta

SEQ ID NO: 24640 - DNA, 139 bp, Gossypium hirsutum
  unsure (1)..(139): unsure at all n locations; Clone ID: LIB3147-023-Q1-K1-H6
ccccattctcaccgcgggtcatcatattgcggacggcgaaatcactattcattnttatgttatgttttctcttaataattgttttacttggagaaatccaggcatcaagcccttctcaaaaacaaagacaaggcaacca

SEQ ID NO: 24641 - DNA, 356 bp, Gossypium hirsutum
  Clone ID: LIB3147-023-Q1-K1-H7
cccacgcgtccgagcactctgacaataggcctaaaagagcttatgcaattaatcagagcgcgcacacttttgagaggccagtgaaaatctacaattagggagcattttagattaccttccttgataagacatagcacaaaaatcaggctctgggcctgggttatatagagtgggaagaacacttctagcaaatgacaatgtgaggcaactagttagcgtgcgatttgttggatatgtaattcttttggtagtggtgattggaaagtatcttttgtcctaatcaaagtgtgccatctagaaatgtcagattatgatctgctgatgcttttgttacttgcgtgtctttaatggaggtc

SEQ ID NO: 24642 - DNA, 345 bp, Gossypium hirsutum
  Clone ID: LIB3147-023-Q1-K1-H8
caaagatctgctgaaaaatgaatgcccccacattgttgttgggacacctggaaggatatgggctctggctagagacagggacctttcattgaagaatgtcaggcatttcattcttgatgaatgtgacaagatgcttgaatcacttgacatgaggagagatgtgcaggaaattttcaagatgaccccccatgataagcaagttatgatgttttctgctacgctcagcaaagaaattcgcccggtttgcaagaaatttatgcaagatccaatggaaatttatgtggacgacgaggccaagttgacccttcatggtcttgtgcagcactacatcaaattgagtgagct

SEQ ID NO: 24643 - DNA, 432 bp, Gossypium hirsutum
  Clone ID: LIB3147-023-Q1-K1-H9
ggctcgtcaagctcttcgccatcgaccctgattgccagaagcgtgaggttgtcggcctggggggccagacctgggggggtgcgttgactaacagcggcctgatcgaccccgactctcaccgcctcgaggagatcgacgcttgctccgccgaatgcgaggtcaacattgcacaggagtggctcgagaagcttccgccacgtacctatgatgaggagtatgtgttggtgaggaattcgaggggtcgcatcttgaacaagcattccaggcttggatgtcaggtcgtgcttacgcctcatctccaaggtatggtcgtcgccgtccccgaggctaaaccgtgggatattccataaatatttgtaggggaaaaagagatgaatgtgggaacatttaatgcatttctggtggtttcctggaaagaataataattttggt

SEQ ID NO: 24644 - DNA, 392 bp, Gossypium hirsutum
  unsure (1)..(392): unsure at all n locations; Clone ID: LIB3147-024-Q1-K1-A1
tccatcttcactccccctcctcacccaaaccctacanaatggccgccgccgcgcgccctcttgtctccgtccaaaccatagagtccgacatggctactgatgccactccaaccgttcctctcgctgatgtgatgaaagcctcgattcgacccgacatcgtcaccttcgttcacgacaatatatccaaaaacagccgtcaaccctatgccgtctccaaacgcgctggtcaccaaacttcagctgaatcctggggtaccggtcgtgccgtctcacgtatccctcgtgttcctggtgggggtactcaccgtgcaggccaaggtgctttcggaaacatgtgtcgcggtggacgcatgtttgctcctaccaagatctggcgccgctggcacccggaa

SEQ ID NO: 24645 - DNA, 477 bp, Gossypium hirsutum
  unsure (1)..(477): unsure at all n locations; Clone ID: LIB3147-024-Q1-K1-A12
ggggctgatgagctttgagcatttaatgaataaaatcagggcaatgccgagggtggacagtgaaggagtgatttgtggtgctaatttcaaggttgatgtttacagtagagttaatagcattccacgagtgggcagtgcaaccaattggactgatcactgggattcccattaattagtatttaaaaagaggagagagaagcaaaattaaacataagagagatgccatgaatatgctctagacaaacaccggggtttcttctgtttttcatcctagttgttggtttttcttttggtacttttctatgttatatgttggttgtgttggtttaatttctttgggatattatagtttcaatcttaattccaatttattaaatgtgtacccaatatccaaatcaatgcgtttgtgatccaaactgtcctttggtcccaatacatattatgattnttcaaattaaacattatcattatttcaca

SEQ ID NO: 24646 - DNA, 430 bp, Gossypium hirsutum
  Clone ID: LIB3147-024-Q1-K1-A2
gaaggcctcgaacgaccgcacgcgacccgcgcgtcggaccctgcttacctggaaaaaagttttttatgttttccaaagggctcaactttcggtgccaaggggagcaattatcctccatgccccaaacctgacctaatcaagggactcagggctcacactgatgctggtggaatcatcttactcttccaagatgacaaggtcagcggccttcagcttctcaaggatggtcagtggattgatgttcctcctatgaaacactctattgtcatcaaccttggtgaccaacttgaggtaatcacaaatggtaaatataagagtgtgatgcaccgtgtgattgctcaaacagatgggaccagaatgtccattgcttccttctacaacccgggcagtgatgcttgtatatatccagcaccagctttgctagagaaag

SEQ ID NO: 24647 - DNA, 433 bp, Gossypium hirsutum
  Clone ID: LIB3147-024-Q1-K1-A3
catttctttactatctttcctcctcaaaaaacttctctactacccagtataagccatgagtcgtcatcctgaggtgaaatgggcacaaagaaccgataaggttttcattacggttctattacctgattcaaagaatgcaaaagttaaccttgagccggaaggagtgtttaatttctctgctactgctggaactgacaataacacatatgagttgaagttggatctttttgataaggtcaacgtggaggaaagcaaaattaatattggagttaggagtatattctgcatcttggagaaggctgaaaaagtgtggtggaaaaaattattgcgcggggatggcaaagccccccattacgtcaaagtggactgggacaaatgggtggatgaagatgaagacaagggtcttggtgatcttgacttaagaggaatggac

SEQ ID NO: 24648 - DNA, 415 bp, Gossypium hirsutum
  Clone ID: LIB3147-024-Q1-K1-A4
cctacgcgtccgaaatttttgcctagaaatgtttgtacttactaaggttaagccgtctaagggactgccgtgcttaaatgtgcactcggatcaggatctgggtttatgcatggaactgacccgatatcggaccgcaaaaaaatggatgatcccaggaagagcgggtaatgatttttagactgcaggagctggcttaagcgcatagatatgatatatgctgcgattggatcatggcagcgtggtggaacgcggcattgatacataagccaggagtgcagtctgttgcttggagaaggctgaaaaagtgtggtggaaaaaattattgcgcggggatggcaaagccccccattacgtcaaagtggactgggacaaatgggtggatgaagatgaagacaagggtcttggtgatcttgac

SEQ ID NO: 24649 - DNA, 441 bp, Gossypium hirsutum
  unsure (1)..(441): unsure at all n locations; Clone ID: LIB3147-024-Q1-K1-A5
gtccgccaagccgtccgtcaatctttccggaaaacttaactgttttgcctaatcacgaacctaacgggggaccggtaaatttatttgaccaatttcaccaccaaaccaatatagaacatgctttgttggggtcagaggaacaaagtgatgaggttgttgaacatgttgaaaacccaaagtggatctctttcagagcagtactgatgctcctagtatgcaccttgattgcagctgcatatgctgatccactcgtacatgctgtcgataacttttcaaccgcaacaagtattccatcgttcttcatctcatttatntgcattgccatggctacgaactctagtgaagccgtatcagccattatcttcgctacccgccaaaagcagagaactgcatcattaacattttccgagctttacggagcaataaccatgaataacgttc

SEQ ID NO: 24650 - DNA, 442 bp, Gossypium hirsutum
  unsure (1)..(442): unsure at all n locations; Clone ID: LIB3147-024-Q1-K1-A7
ccaaaacttcagggtgctagaataatagtttctgagtggacagatcttgactttgaggctagaaaattcactgccaaaatattaggtgatgaactggaaaaccctgatccactaccatcaccattatcatcatcacctgagacttcttctaatgaccaatcaacggacgatctagaatcaaaggcagagttgtgaaacttttggattaggaaaaaactagtttttgatactcaattttgccaaaaaaccatgataacatttcctgagctgaaactaaagctttttaccatagggaagagaacttccaagctttgctaactttgggcattttaatggcaattattatatatgtagactgatacttttaagatctangaagggaaagaagaaaaaaaaaataatgatattttgatagaatagttcatacatggaatttggtnnt

SEQ ID NO: 24651 - DNA, 374 bp, Gossypium hirsutum
  unsure (1)..(374): unsure at all n locations; Clone ID: LIB3147-024-Q1-K1-B1
gaaagcaacatcgagcatctatcctttacaaaatgtgttcattcgtaaagtcaaaattttgaaggctccgaagtttgatcttggaaagttgatggaggttcatggtgattactcggaagatgttggtgtgaaaatagagaggcctgctgatgaaacaatggctgaggctgccccggaggtcattggagcttgaatgaaacaccccttgaatttgtgtgttcttttctttctgatttcaacagatttgatgattttgtttaaaactaggagaaattttccatggttttgatttgatctctaggatatggttttgcnnannaaaaaaaaaaaaaaaaaaaaaaaaaaaaaaaaaaaaaaaaaaaaaaaaacccccc

SEQ ID NO: 24652 - DNA, 471 bp, Gossypium hirsutum
  Clone ID: LIB3147-024-Q1-K1-B11
cccacgcgtccgctaattaagtatgtgccgtctgctccgttctttgtagcaaagcaaagttggtgaagcatggccgtcgggaagaacaagaggatttccaagggaaagaagggaggaaagaagaaggcagcggatccttttgctaagaaggattggtacgatatcaaggctccttcagttttcactaccagaaatgtggggaaaactctcgtctcccgtactcagggtaccaagattgcttctgaaggactcaaacaccgtgtgtttgaggttttccttgctgatcttcaaggtggtgatgaggatcatgcttacagaaagattcgtttgagagctgaagatgttcaaggaaaaaatgttttgaccaacttttggggaatgaattttacaactgacaagctgaagtctttggtccgtaaatggcaaaccctgattgaaactcatgttgatgtgaagacaactgacaattac

SEQ ID NO: 24653 - DNA, 354 bp, Gossypium hirsutum
  Clone ID: LIB3147-024-Q1-K1-B12
gcggctctgtgcaagtagacacttattttaagttgttcaggtaatttccaacatttgaagacatgttttatggcgcatgacaaggcataaaccacaaactgaatgttgaacctattcttgaaatgccaagagcactttggaatcaattggatgtacatttttatgaaactggtacattttgtagtctccagctatatgttagctagagtcgggggtggctgtaggatataaacatgcatcaatgcatgttcatttttcctttaaaaaagggtttttatatttgatgtcctcactcatgtcaaataagtatactaaataataataaagaacccggataacatgggtctccttttt

SEQ ID NO: 24654 - DNA, 479 bp, Gossypium hirsutum
  unsure (1)..(479): unsure at all n locations; Clone ID: LIB3147-024-Q1-K1-B2
ccaacgcgtccgccaacccttccggcttgggtcaatgctcgatttcctaatggaccaaatggttattctctggatattctggctcgaattcctttgtggaggtatggtcttgattatcgacatggtactggtcatggaattgggtcttacctaaatgttctcgaagggccacatcaaattagtttcagaccacangctcgtaatgtgccacttcaagtttccatgacagtaacagatgaacctggatattatgaagatggcaactttggtataagattggagaatgtactcgtaatcaaggaggctgataccgaattcaactttggtgataagggatatttatcatttgagcatatcacatgggcaccgtatcaaataaaatngatagacttaagcatcttgacaccggaagaaatacagtggttaaataggtaccattcgaaatgtcgggaaattcttgcaccttacttggataaaaa

SEQ ID NO: 24655 - DNA, 136 bp, Gossypium hirsutum
  unsure (1)..(136): unsure at all n locations; Clone ID: LIB3147-024-Q1-K1-B3
tccgaaaaaaaaaaaaaaaaatttaaaaataaaatataaatttaaaaaaaaaaaaaaaaaaaaggagaagcgcaaattttntttttaaatcttaacctcccctttaaaagaacccaatttaacttaccctgccttc

SEQ ID NO: 24656 - DNA, 301 bp, Gossypium hirsutum
  unsure (1)..(301): unsure at all n locations; Clone ID: LIB3147-024-Q1-K1-B5
ggagctaaaacccagnctaanccggagaatacggnggggatnnngactatggcgggcaaaggagnacgngnattggctactcctactagcgatcttggaaaaatcttgtcttgcatgcacggtcttgaaatggggggtgagatgaacctagcagctggaattcagattgctcagttggctctaaagcatcgccaaaacaaaaatcagcagcaaaggattatagtttttgctggaagtcctattaagcatgaaaaaaaggcattggagatgattgggaagaagctgaaaaaaaatagcgtac

SEQ ID NO: 24657 - DNA, 433 bp, Gossypium hirsutum
  Clone ID: LIB3147-024-Q1-K1-B8
cccacgcgtccgaagatcaatgttttgattttaacaaaaaggggaaaagagccagtgatctgggggtatttttgtgaatggtggaaacaatttggagctgtagtatattgatgctctccccttgcaaatcgagggcgagcactctccttcctctttctgctgcttctgctttcgcattcggttcttgcaaagaaggctggtactaccgctgccttggccttgacccataaacaaccccacctcaatacctctattcctttccaccaataacccagatttgttttttttttgttatacgccccacaaaataacaaaacaaacccattgtttctcttttcgcggttgttggtgaattgttcattcatctgtttttggttttgattccttttcattttgaattttgacaaaaaaaattgaaagaatgttgctttac

SEQ ID NO: 24658 - DNA, 481 bp, Gossypium hirsutum
  unsure (1)..(481): unsure at all n locations; Clone ID: LIB3147-024-Q1-K1-C10
cccacgcgtccgccaagatatgattaatgaatttgacgctgacggaaatgggacgcgatcgatgtccctgaatttctcaaccttatggcaaggaaaatgaaagataccgattctgaggaggaacttaaagaagctttcagggtgttcgataaggatcagaacggtttcatatctgctgccgagcttcgtcacgttatgacaaatcttggcgagaagcttaccgatgaggaagtcgatgagatgatccgtgaagccgatgttgatggtgacggccagatcaactacgacgaattcgtcaaagtcatgatggccaagtaaggatctctccaaccaaaaaaaaaaaaaagaacagagtagataagtttgcaaagatttcaatctcgtaattggttcttgggtcgttcgtttatcngttgcattatttcgtcgaccggcttggttgctcttgttttttccttttaagagtctgggttttaatttt

SEQ ID NO: 24659 - DNA, 391 bp, Gossypium hirsutum
  Clone ID: LIB3147-024-Q1-K1-C11
gttgtctgctatttgttatgtgttttgctctgttatttctacgtttagaggactgctataggttatttttcttacaaattctattaccaattatataaacctaagctatggcttctatctcggaagtatttttttgggttaaaaaaaaaaaaaaaaaaaaaaaaaaaaaaaaaaaaaaaaacaaaaaaaaaaaaaaacaaaaaaaaaaaaaaaaactaaacaaaaagaaaaaaaaattaaataataacaaaaaaacaatttatataagtacggggcggcccttttaaaagaaataaggttaaaatcccgggggtccaacaaaaatattttttttttaggcccccaaaatacaaatcactggccggtgttttaaaaatttgaatatgggaaa

SEQ ID NO: 24660 - DNA, 391 bp, Gossypium hirsutum
  Clone ID: LIB3147-024-Q1-K1-C12
gagaacaaaggatttacctttggtttgacctatcaaaagaataccactcctactgtgtcctgtggaacatgtatcagatagtgttctttgtggacgacataccaatcagagtgttcaaaaactgcaaagatttgggagtgaggttcccattcaaccaaccaatgaagatatactccagcttatggaacgccgatgactgggccacaaggggtggtctcgaaaagaccgactggtccaaagccccattcattgccacatacaagagcttccacatcgacggctgcgagtcgtcggtggaagccaagttctgcgccacacagggcaagcggtggtgggaccaaaaggcattccaggacctcgacgcctatcagtggcgcagattgcgttgggt

SEQ ID NO: 24661 - DNA, 419 bp, Gossypium hirsutum
  Clone ID: LIB3147-024-Q1-K1-C2
gtcgaagagttccgtgttgctgtaatggcacacaaaggtaacacagctactgttctgaagacacctgaacattccccttaagctgcagaagcttgaaaggtatctccgttagatctgatctatcctgaacttgccatttccagtagtcctctttcgttattgaggaagtatcgttgcttgggcatatgcttttataatgcctatgctcttgtatgtagcagagtccgagtcaaccgagaccagttcaatctgtttttgattgttataaatcgtgtatgttggagagtcggtcaatagagaccgatcaaatcttttatcggtttgttataaactatgtagcctgcgggagaatgtttcaacctctcttgtttttcatggttcccgtcatggaattaaacaacttcatgagctgccaagct

SEQ ID NO: 24662 - DNA, 405 bp, Gossypium hirsutum
  Clone ID: LIB3147-024-Q1-K1-C3
gacagggctacactctatcttaatacacttggtggtgatggtgcagttgttgaaactgatgaaggtgtaaaggagtttctctttggttcactagatgtccctctggtgaacttggagaacagtttgaaaaattatgatccgtcagaaaaggcatttgacattaattctgtgccaaaggacgtcaagactcagccacttgctgagaagaaagctacaagtaaaaaaccaactggtcttggtgctcctccccctggccctccatcaactgttgatgcttacgagaagctgctttcatcaattcccgagttcgcaagctttggcaagctcttcaagtcctctgcacctgtggagttgacagaagcagaaacggaatatgcaagtaatgtcgtcaaacatatttttgat

SEQ ID NO: 24663 - DNA, 218 bp, Gossypium hirsutum
  unsure (1)..(218): unsure at all n locations; Clone ID: LIB3147-024-Q1-K1-C6
ccaattaaaaacacggtaatgttaaaatttttgataatttttggagaaataagttaattgtatttaattgatatatcggttgtatataaataatgcaaattaaaagctgatcaagtgcatttagtttgctnaaaaaaaaaaaaaaaataaaaaaaaataaaaaaaatataataaaaattaaaaaaaaaatataatataataaattaaattattttttt

SEQ ID NO: 24664 - DNA, 378 bp, Gossypium hirsutum
  Clone ID: LIB3147-024-Q1-K1-C7
ggccgacccacgcgtgcggcccgcctcacattgcaaaatattatatttttctgcggcagaaggagctctctcgctttctgtcttgatacatccttttagcttttgattttagtttataacaatcttaatccaaatgcctcctttggctttatctgacctcaaagagaagaaagaagagaaaatgatgaagaagaagatcgctctcgaaacacctgaatccgagaaaaaaacgaagaagatcaaggaacctaaggttagagaagaggaagatgattcggctgtgaagaagagtaaaaagaagcgtaaggcctcggagctccaaatggaagaggaggagaggagcgagacgagctcggagcttgttgagccggtggatcc

SEQ ID NO: 24665 - DNA, 409 bp, Gossypium hirsutum
  Clone ID: LIB3147-024-Q1-K1-C8
ggccgacccacgcgtgcggtttcgatttgttgatgtcggattacttcttccaccggtactgcagtttgtgggggttactgtcggatacacgcctgagaatctgatctacaagaacttggactttggggtagacttggactcaaggatagcattagtaggacctaatggtgcagggaagagtacactgctgaaactgatgacaggtgaattgactcctattgatggaatggtccgacggcataaccatctgcgaattgcgcaattccatcagcacttggcagagaaactggatatggaaatgtcagctctccagtacatgataagagaataccctggaaatgaggaagagaagatgagaggtgcaatcgggaaagttggattgtcagggaaagcgcaagtgatgccaatg

SEQ ID NO: 24666 - DNA, 470 bp, Gossypium hirsutum
  Clone ID: LIB3147-024-Q1-K1-D1
cgggtggctccgacaaagttaaggccttggttggagaagtaactatcctgcaggcaaaattgaagcagcgagaatccgatctcgaaacaaagacaaaagaaatggatgctgcagaagctaatgcagttgctttaaggaaacagtccgaaggttttcttctcgagtatgatcggttactcgaggagaaccaaaaccttcggaaccaattggaatctttggaacagagtccgtcgcgttcggggaataagaagaatacttgaggaaaatgaggacctatggtaaattttctttttttaagtttcattatcatttttaatatagttatgcaatggatttgtgggttgcagcagtttagtttatatgattcatgtatgagttttcaagttttttaagtgtggacagaaaaaaaatacaaagagaaagagaaaaaaaaaagttagagaaattaagcccttttgtgtattttttgg

SEQ ID NO: 24667 - DNA, 355 bp, Gossypium hirsutum
  unsure (1)..(355): unsure at all n locations; Clone ID: LIB3147-024-Q1-K1-D10
cccacgcgttctcnatgataaattttgttgttataactactaaatttaatgctagggaagtgtttgtgttttaaaaaaaaaaaaaaaaaaaaaaaaaaaaaaaaaaaaaaaaaaaaaaaaataaaaaataataaaaaaaaaaaaaaaaaaaaaataaataatattaaaaaaaaaaaaaaaaaatactataaaaaaaaatattgggcggactacaaaaaatataaaagaatatatgattattttatcactactattaattttttaaagaggcaaaaaaatttaaataatattcctatgttttaaacttttataactaggaaaacaacgataatacccaaatttaaatcttttaaaa

SEQ ID NO: 24668 - DNA, 479 bp, Gossypium hirsutum
  Clone ID: LIB3147-024-Q1-K1-D11
gttgagctttggattgctgatcgagctgttttaccggtggaaaattcactcggcggttcgggtcatcggaactatgatcttctcctccgtcaccgactccatatcgtcggtgaagttcaattacctgtccatcactgtcttttagctctcccgggagttaggaaagagtatttgacgcgcgtcatttctcatccacaagctctgtcacagtgtgaaaacactgtcaccaaactcggcctcaacgtcacgcgcgaagcagtcgatgatacagccggagccgccgaatatatcgcgacaaacaacctccgtgacacagcagccatagcgagcgcacgcgccgccgaactctacggactcaacgtcctcgctgacgggatccaagacgattcaagcaatgtcacgcgcttcgttatgttagctcgtgatccgatcattccacgcacggaccggccgttcaaacgagcatcgtcttcgcacac

SEQ ID NO: 24669 - DNA, 191 bp, Gossypium hirsutum
  unsure (1)..(191): unsure at all n locations; Clone ID: LIB3147-024-Q1-K1-D12
cccacgcnttttannactcttggtcttacgtatacagcaaanatntaacgcaccgcggtccgcaatatttattttcgcctatcatcaaatcttgtatttatagatattcaaggctcgtattatgatagaactctgatttatgtttatggaaaatcttgattttcttaatctaaaccaactactattttcaa

SEQ ID NO: 24670 - DNA, 402 bp, Gossypium hirsutum
  Clone ID: LIB3147-024-Q1-K1-D2
gtttctataaacaaagagaaactaggtgtgtaacaatggcgtcctcggatcttattggcaagctcgagactgatgtcgagatcgatatttctcccgaaaagttccaccatatgtggtgccacaggccgcaccatgtccaccacactagctctgaaaaagtacaaggatgcgatttacatgaaggtgaatttggaactcccggcgtcgttatctgctggagatatgtgcatgatggaaaggctaaaactgcaaagcaggtagttgaagttatggaccatgagaaaaagtcaataactttcaaaatgcttgaaggagatctgatggaggaatacaaaagcttcgtgattacaatccaaacttcccccaagagcgacggtaaaggcagtatagtgcactggactc

SEQ ID NO: 24671 - DNA, 440 bp, Gossypium hirsutum
  Clone ID: LIB3147-024-Q1-K1-D3
cccacggcgtccgggataaatattctagaattgttgcctgtaaacctttggttgacaaaactgcccaatcgtcttctcaacttgctaaggagctggaggataaatattctagaattgctgcctggaaaccttttgttgacaaaactccccaatcatcttctcaacttgctaaggagctggaggataaatattctgctctatctggttacaatattccttcttaaccctcctcttctccatatgttaattagttccttcataaatattctactattattggaatgtaattccacttaataaagtgtgtgaatttgtatggtatcttttttactttctttcaactttgcatctatttagtaaatattaataaagttaaattttgttattagcccctatattctgtaaaaagtgtgaatttaatctttatgttctaatttcgt

SEQ ID NO: 24672 - DNA, 367 bp, Gossypium hirsutum
  Clone ID: LIB3147-024-Q1-K1-D4
cggcaactgtaactgccctgatcgaagccatggcacgaagggaaacagcaccaccatgagcattgaaactgaaaaaagctacatcaacactgctgtgatggatgctccagctgaaaacgatggcaagtgcaagtgcggtactggctgcagctgcacagactgcacctgtggccactaagccaacatacaatggtcatgcttcaggtcatggcatatatagggatctaaataatgaatttaaggttgaataatttgtctgttgtagtttgtgtggtgacttatatctgtcagttaacctttgtatcctttactatgatgtaatggctatgcttatggccttatctggttaatgaagtatccttactat

SEQ ID NO: 24673 - DNA, 314 bp, Gossypium hirsutum
  unsure (1)..(314): unsure at all n locations; Clone ID: LIB3147-024-Q1-K1-D7
ctagtttctatatcgcgagcggttgtccttttttttttcnaanntaanagacaccgccaacgcgaaattttaaaccgctaattcctcctacaaaaaataccctaatacttaaaacaacacacccccccaaaaacaacacactacttattaaaaaacaaatctaatccatccacattacatctcaatataaaaactccaatctatcaatatcaccattaatattcccatcctgacttatccacttatatccaccccaatcctttgcttttataaaacaaaagtatctcacacaccaaaaaattaactaccaattc

SEQ ID NO: 24674 - DNA, 419 bp, Gossypium hirsutum
  Clone ID: LIB3147-024-Q1-K1-D8
taattttaaagctaagagatttattttaacgtagcatttggtcggttcgaagtaatggaaaggaccggaaaagtaaagaagggagccggaggaaggaaaggtggtggcccgaagaagaagcccgtttcaaggtctgtcaaagccggtctccagttcccagttggtaggatcggccgttacttgaagaaaggaaggtattcacagcgggtcgggaccggagccccggtttacttggctgcagttcttgagtacttggccgctgaggttctggaattggctgggaacgctgcacgtgacaacaagaaaaacaggatcatcccaaggcacgtgctacttgccgtgaggaacgacgaagaattagggaagcttctcgccggcgtaaccatcgctcacggtggtgtgttgccgaacattaaccc

SEQ ID NO: 24675 - DNA, 426 bp, Gossypium hirsutum
  Clone ID: LIB3147-024-Q1-K1-D9
aacaaccgggccgacccacgcgttcgttactcatttgtttcaatagtatgtcgatttcttacgaccaaaatcacctttcgcgttctgtccctgtcttcttattctctcttacatacttttgggggcaaacgaaaaaaaaagggtattatctcttcttcttgattgattgatttttcattgataatctcatcaacaagaacaagaatctgctaaaaagaataataacaagaaacagatgacagaagagaagataggataattttctttttacttttattttttgagaggcaaaaaaaccccaacaatattcccatggatttgacttcaacaacgacgacgactactataaccgtcgtgtcctgagctgttaaccacaaagagataactgacgaccctttcttgcttgacgcttctttaaaatccttg

SEQ ID NO: 24676 - DNA, 467 bp, Gossypium hirsutum
  Clone ID: LIB3147-024-Q1-K1-E1
aagaatcaaactctaccttcaaaactaggataaaaaactaaaaatggacgcaattgactcagtttttgatccgctaagagagttcgctaaggacagtgttcgtcttgtcaagagatgccacaagcccgatcgtaaagaatttacgaaagtagcggtccgtacagcgatcggattcgtggttatgggattcgtaggatttttcgtcaagctcatctttatccctattaacaacattattgttggatccggttagccttgcttcatgttacagactcacaggaaggacgggaactggtagaaattttcaacactgagataaaagaagaactgtatgtttttagatcaagagctatatcatgtgagtttttgaactagttttaatttaagccccgggttgtcttatatttggttttgttggaatagaatcttgttgaagcaagtgagttttggtctaaatgaattttatg

SEQ ID NO: 24677 - DNA, 459 bp, Gossypium hirsutum
  Clone ID: LIB3147-024-Q1-K1-E10
cccacgcgtccgcccacgcgtcttagcgaattcatttcacagagctgaaccaagtggctgaggaagccaaaaggagagcagaaattgctaggttgagagaactgcatacactgaaagggcatgtggaatcggtggtgagattgaagaacctggacatagacacaatccagcaagcgtacacggtgtaaggtgggggaatggtattccgaaggaatagtggaaaatgtaatgagagggagcgttttcctgagagtgaagctctaatatatgtatcttttattaccttaatcccgtccgccattttacaagggaaaggttattgtttatggcattttatgtttatattagtagtaaaaaaccatatgttttgcttttgttgtagtaaaaaaaaaaccaaaaaaaaaaaaaaaaacaaaactgtgatagtagaaataagaacccaaattaactttttcggat

SEQ ID NO: 24678 - DNA, 460 bp, Gossypium hirsutum
  unsure (1)..(460): unsure at all n locations; Clone ID: LIB3147-024-Q1-K1-E12
gcaaagctcactggcaatcattttactctgtttgcaaatgcatctttgggcacaggtgtgcagcgcaagctggagatggttaatcaggatcttaataagaatgataaatccttgaagagctttgccaaacaaccaaggtatcgaccaccaggaagaaagagtccatttgccacatccatcaacaaggataggaatgccattggagcttcagatgtagcggagaagttggcaaatgttacaattggaaatcggcggctgaatgttgggcaaataaggcactctgaatataaaggctggggttctgtggactgcggattttaacgacatgtttcttttgccaaccctactaatacttgatcaccggaaagaaggtagcgtggaatgatgagatggtctttttaataataatgcatatnctggggtattatatattgatggagtccaaatatcgaaatgagct

SEQ ID NO: 24679 - DNA, 411 bp, Gossypium hirsutum
  Clone ID: LIB3147-024-Q1-K1-E2
atccggacttcgatggaaaaatggctatcatagggtaagaaaatgcagttgctactgaatgtgggtggaccagacagggtttcccgtgttcaaatggctgaagctgtggcacaaattagaggatatgattcctcattaattaaaccagtgtctgcatcatctgttgaccgtggtgttaagtccccagctgatatatctatggatatcaccaagctggttcagaagctaaatatttgtcctactccatttaaagatggtgttaaactgacacttgcagctgaagcaagtttgtgagtttagtaagatcgatagtttccccttttcttgaactactcggcatctaaaagtagtataaaaatgtgtcatgctggtatttgttggtgataattaaaggaacaccagtatagctgt

SEQ ID NO: 24680 - DNA, 250 bp, Gossypium hirsutum
  Clone ID: LIB3147-024-Q1-K1-E3
ggaaaacagaggatttggtgtcgttgaaaggtcaatgatggtgtgtaaatgttgtgattctcgaaattcctgcgttttgttccttccttgcagacatctttgtacatgtaaggattgtgcagcttttcttgattgttgtcctgtttgtagaacagtaaagaaagctagtattgaagctttggtttcttagatgcttgagcagaaaattttctaggaaaattgaaaaggaaaaacaatgatgatataagac

SEQ ID NO: 24681 - DNA, 474 bp, Gossypium hirsutum
  unsure (1)..(474): unsure at all n locations; Clone ID: LIB3147-024-Q1-K1-E4
tgaaagccgcccttttgtggttattgccgataaccgaagggtcgagtttgaaaggaccttgggggcctacattaggagccaggctgagggtccccaaaaggatgaggaggaatctgagaagtctgtttctgaggtgaatgatgaaaaaaaagatgatgatgaaggcagtggagacgaagatgatgagtaggaaaaatccagggaggatagcataatcaaactaggctgtgatagtgtttgatcatcttatgttaatgctttntaaatgcanatttcatttaagcaaaaatgtaactctggatgctgttgtttcttttgacgtttcgaaattaatagttgtagatgggtaatttgttgctacatgtactttgcatttgaagttgaatggcgtaagataggtaaatccttttctagagaatttggtccctctttgtatggctttgttgcctgcccatattctattgcttttttgct

SEQ ID NO: 24682 - DNA, 351 bp, Gossypium hirsutum
  Clone ID: LIB3147-024-Q1-K1-E5
ggcgaccacgcgtccacaaataagtgtctgaggtgaatgatgaggttgatgattaaaaaggcagcggaaacaaagaggatgatgaggtaggaaggtccgtggtggataccataatcaatgtaggctgtgatagtgtttgatcaaaaccatatgttaatgctttcgatgtttccatgttattcttttagatgcgcatgccatctaagggagaaatgtacctctgaatcctgttggttccttttgaccttctgaaattaatagttgtagatgggataatctgcttctatatgtactttttgatttaaagttgaatggcttagataaatccttttgtagagaattagtccgatg

SEQ ID NO: 24683 - DNA, 471 bp, Gossypium hirsutum
  Clone ID: LIB3147-024-Q1-K1-E6
cggagaaaaagttcaaattgtaggaaatgtttttttggtcaccaacccaaagagggttgcgagggctatggccgaaaaaactggtaatgcccttcttctcaaggtcaatcaaattggatctgttaccgaaagtatcgaagctgtgaaaatgtccaagcaagctggatggggtgtgatggccagccaccgcagtggtgaaacggaggatacttttattgctgatctttcagtcggtttggccacgggccaaattaagaccggagctccatgcaggtctgagcgtttagccaagtacaatcagcttctgcgaattgaggaggagcttggtgcggaagctgtctatgctggagccagcttccgtgctccagttgcaccctattaagatgcttgtttagatgataatttgctgagactggatgcgtgcggcagaacttcagtggtttattgtgaccctaaacatgttcaataatt

SEQ ID NO: 24684 - DNA, 402 bp, Gossypium hirsutum
  unsure (1)..(402): unsure at all n locations; Clone ID: LIB3147-024-Q1-K1-E7
gctaaatcctgatatagaggatgggaaaggtgtgaaattgaattatgatactcgcacttgtatggcactttttcgaacattcactgcatcagactatgttgctgcccagtgtcttaggcgaaggataatgcaccatcacctggagatcttcaagaaggttgatgtcatagtgaccccaacaactggcatgacagcaccaaaaataccacctagtgctctggaaaatggagaatcgaacatgcaggtttcaggttatctcatgcggttcattcttgctgctaatcttcttggtcttcctgccattactgtccctgttggtcatgacaaacaaggacttccaataggtttacaactaataggccgtccatggngtgaagctacaattctacgtttggcttctgc

SEQ ID NO: 24685 - DNA, 365 bp, Gossypium hirsutum
  Clone ID: LIB3147-024-Q1-K1-E8
gcatgttcccgagacacaaagagttattggtcaagaaagtagttgacgtggctcgggaaatggccaaggcagaattgcctccttaccgatcccacctggatgtggtggtggcatgcgaggatgatgatgacaatgatatcgacattcctcaggtatccatctactatggctgagttatttcgttcgaacctccaaattatttagagttgaggatgagaaaattctcagagcaggctggcttccattccggttttatagtgatttgagcatacacaatggagtacattgtgcaaactttatatgaaatttgaagtacttttagttgcagaatatttatataatcttgtcattttaccttttctttt

SEQ ID NO: 24686 - DNA, 432 bp, Gossypium hirsutum
  Clone ID: LIB3147-024-Q1-K1-E9
gtgacgagtggaagcttgctcttgaacgtgttcctgacactgtagcttctgaagggatcaggggtttcatcaatgttgtccgtgtgatatctgccaaacaaactgaagagcttaagattaagaagcaaacagaaaatgcatcaaaggagcttgagaaaaaggcatcatctctccggaacatagaaaggaagttctaccactcgtactctatggttggtatggggcctcctgatttaggatctgatcatggaccggttctggatgctcgggatcccctttctgaaaagaaatcagagcttgcagcctgtcaaaggcgggtggaagatgaaatgatgaggcatgccaaagcagtagaggtaactagagcaatgaccctgaataatcttcaaacaggctttgcccggcgtttttcgagcattaaccagctttttt

SEQ ID NO: 24687 - DNA, 397 bp, Gossypium hirsutum
  unsure (1)..(397): unsure at all n locations; Clone ID: LIB3147-024-Q1-K1-F1
gtttttctattccttcctatataacattcaagtgtaggattgggtttggtctgtttagtatctgtcaggtgccgggttttttcggactcgtaatgtcatgttttttcggatgtagtcgtaaaattgaccgagggattgggttgtgactgagggattgggtcgtgtcggtgagtatagtttggtttgtatcatttttttcgttttcttcgtcgtggttcgtaaatttgtatgaatattttcgcttagaatgattggaactaatcgaagcgtttgtagcaaangacaagaactggtaaaaattttaacactgagataaaagaagaactgtatgttattagatcaagaagctttttaatgtgagtttttggactagttttaataaaagccccgggttgtc

SEQ ID NO: 24688 - DNA, 403 bp, Gossypium hirsutum
  Clone ID: LIB3147-024-Q1-K1-F10
cccacgcgtccgggagaagtagtatttagatagaatgaacgtaagtctccaagtgctgagcgggatgatgataccgaaagtttgtcgtttgctgtagaaatggccaaggtagcaagtgatgtgaaggctgctgatataagggtcctctttgtgaagcctcttgtgtattggtctcggtttttcatcattgcaacagcattttctcgcccgcagattgatgccattggatccagaataagagatttggctgagaagaagtacggaaaagttccatctggagatgcaaaaccaaactcatggacacttttagactttggtgatgtcgttgtccacatatttcttcctcaacaaagagctttttacaatttggaagagttttacggaaatgcaacactcattgagc

SEQ ID NO: 24689 - DNA, 470 bp, Gossypium hirsutum
  Clone ID: LIB3147-024-Q1-K1-F11
agagcatggactttacaagatgttcaagtgtattttcaatcagtaattgcaaccaaagattgtatctactttatctactgccttacatttgtcacttcacatctttgccttaaatttgctttgattcccattttatgccgatcagtcgaacgcattgcaaagttcttaaggcataattttagtcgttctaccttgtacaggaagtatttggaagatccttgtgtgtgggtagaatcaaacaccaccaccctgagcattctatcatcacatgctgagattggacttggctggcttctacttgtttccttgttctcgtggcaacgcaacattgtacaaactttcatgtactggcagctgttgaagcttatgtaccattctcctgttagcgctggttaccaccagagtgtgtgggcgaagatcgggaagactattaatccacttatcctgcgttatgtaccatttttgaacac

SEQ ID NO: 24690 - DNA, 134 bp, Gossypium hirsutum
  Clone ID: LIB3147-024-Q1-K1-F12
gaaaaataaaacaaactttgtaaagcagcttatcatgttttctgataacgtctgtgtttgaatcagtagtgttcttgtgtacctcaatgccaatcatggttttctgcattgtcttttaaagaatctttgatgcc

SEQ ID NO: 24691 - DNA, 481 bp, Gossypium hirsutum
  Clone ID: LIB3147-024-Q1-K1-F2
ttgaactgtcctttttgcccaactgatatttttgaattccttcaaaatcttcaggtcaatggagaacgagtggatgtgattgaatcattgaaacaaaagagtgaggagaatcaggaacctgctgaagagttgagtgaagaacagataaatggatcggttgaaaatgcatacttggattctggtgatggtgaaactggtaagaaaaatgagaatgccgatccagaaggtgactctcagaatcctccacttgattgcgaaacagaaagaagtagcaagaggaggaaagtggatactgctcaagtgacaaatgatgaaaatgactctccatcaagcatcctccaggtgcaatcatctgaaggtgatatcgaatgacatgttttctttaacaggaatttttatcacaaaagtaaaggttctttttcccaatttctcttttaagttgtttataggtgtgggttaatttcacagttttatttttttt

SEQ ID NO: 24692 - DNA, 461 bp, Gossypium hirsutum
  Clone ID: LIB3147-024-Q1-K1-F3
atctgttatctctgaatctaaagaagttagctttggatttgattacagacaccgagctcgaacaggtttggggtgacacatcttttgagaaatatggaaacgatttcatctgcatgcatttgtcggatcaacatccctacaagcacaagataatgcttatgattaaattttcccttcctgatgccaaccacatggtagacatgactcgcttgatagctcttgtaccatactacatcgatttaatcgggcgatacaagctcacttctcaagctcgatccataaccgaagctgcaagagtgaacgcagcacactacgcatacaaagaacttcaaaatgctatgctagaagcattgcacaataagatagccgagaggaaaaagatgttagaggaggctgaaacaaagctcactgcggtagcagttcgcaagaaagaagcaaaagagcgtgcacggcagatgatg

SEQ ID NO: 24693 - DNA, 468 bp, Gossypium hirsutum
  Clone ID: LIB3147-024-Q1-K1-F4
taaaacaggaaattcaaatctttcaatggttttttaattcacatccatattcattaaaatctgaaattagataattaccacttggggtttttctaatggcgttgaatatggattatgaattaaagaaagattgtcacgatggaattgtcgttaatggcggaagcgatggccttttactctcacatgccaacaggaacaagctcattatcgataccgatcccgggattgatgatagcatggcgatctttatggcatttcaaaatccagaatatgagatcttaggtttgaccaccatatttggcaatgtccaaaccgaagatgccactcgtaatgccttacttctgtgtgaaatcgcagggcgtcctgatgttcctgtagcacaaggcagccccgagccgcttacgggtgggaggccgaatgttgccgactttgttcatggctctgatggactggggaatatattcctat

SEQ ID NO: 24694 - DNA, 489 bp, Gossypium hirsutum
  Clone ID: LIB3147-024-Q1-K1-F5
gttcctacttaactctccttctgccttcaataaagggttcgtaaaattgcatttgcagtgggttggattggctttggggtaaccgctgtcggtggtcaatctccggcagcctcacctactaaagctccgccggccgcggctactcctgctactgctcccgctactgcccctgttagcaaacctaaatcaccggctccaactgctgcccctaccacttccccaccaacttcttcaccaccggctgcggctccggagaagtctgcggcggttccagccccatctaaatctgctacggcttcttctcctccggctgctgctccggtgagttctccacctgctccagtacctgtgagctctcctccagccaaatcgcctcccgttgctgcaccgacgactccaccagagagctcggcctctcctccggctcctgttgctgcaccaactactgctgagggtccggccccagctccaagcaagagcaagagcaaa

SEQ ID NO: 24695 - DNA, 484 bp, Gossypium hirsutum
  Clone ID: LIB3147-024-Q1-K1-F6
cttcttcatcctttctagcatctggctgggttggttcttttatgtatttggcttcttgcttatagttcgtctactgcttatcattgtttgtgctgaagtttcggtggtccttacctacatgcatctctgcgttgaggactggcgatggtggtggaaggctttctttgcttcgggttcagttgcactctatgtgttcctatactccatcaattacttggtgtttgacctacagagtttgagtggtcctgtgtcagctattctttatcttggctactcaatgatcatggcaattgcaatcatgttgtctacaggcaccattggcttcatcacatcattctattttgtccattatcttttctcatctgttaagatcgattaaaaaggttccattgcgatcttcagctaccatcctgaagaagactttggcctgtaagaggatgatttctctcaagttgcctttggtagccgatcatgcatcactgta

SEQ ID NO: 24696 - DNA, 354 bp, Gossypium hirsutum
  unsure (1)..(354): unsure at all n locations; Clone ID: LIB3147-024-Q1-K1-F8
cccacgcgtccgtgctcttgttattcagtctctggctgccaatttgggtgttgggacaggggagcatttagcagagcactgtagaactgaatatcctagaggcccaaacttcgtgttatgggttcttgctgaaatcgctattgttgcatgtgatattcctgaaggtgaccataagatcttaaaagctaaacaagctgagttcttcattgccacttgatgaagatcttaatgtaattggaaatatctcaaaagtgaaataagacaaaaaactatattttgtatcatcnaataaaaaaaaattaaataaaaattaatatattattattaatatatattttaaaatatatataataa

SEQ ID NO: 24697 - DNA, 165 bp, Gossypium hirsutum
  Clone ID: LIB3147-024-Q1-K1-F9
tgattttattacagacaccgacctcgaggaggggcgtgctgatcaatctctcgcagatatccaacaacgatttcatcagcatgcatttgctggatctgcatacctacaagcactctataccgctgatgataaaaaaatcccttcctgaaaccatccacatcctaa

SEQ ID NO: 24698 - DNA, 410 bp, Gossypium hirsutum
  Clone ID: LIB3147-024-Q1-K1-G1
cgcatgcgagtgcccggtttccgtgacagctgatgagatcgccaagaaatgcagcagcagtgctgagaagaggttctggtgggacgagccgacaatgtcggagttaagtttgcaccagagccaccaactggtgtgggttagggcaaaccacttggtctatgactattgtactgatactgttaggttccctatcaagcctgtagagtgtgagcaccatcgtcactagtagaccagctaaggcaaaaggggttcttttgggtacattgtaaaaatatgttgtatggggcactgggcagtggaagaaccttagtcataaaaaaaaacatgtactcatgtttcatattttggtttcttttagtttccattttgtatgagaatcacattagattaatagtattaacctttttttt

SEQ ID NO: 24699 - DNA, 442 bp, Gossypium hirsutum
  Clone ID: LIB3147-024-Q1-K1-G12
ggctttgccttcgttactttccgggatgagaaatctatgaaagatgctattgaaggagggaacggtcggagtctcgatggaaggaatataaccgtcaacgaagcacaatctcgccgaagcggcggcggcggtggtggtggaggatttggaggaaacggtgggtacaaccgtggaggcggtggatatggtggtcgccgtgaaggtggatatggaggtggtggttacggaggtggacgccgtgatggtggtggatacggtgacggtggatctcgttactcaagtggcggcggttcttgtgcttaggttaaggcgttttaggatttgagtgagcttcggctcttattttacggtttaatgggtttgtttgttagtgtgtggtttctatcgatattttttcttgtatcatcaagagttttaaaacataaaaatggaatgaagtata

SEQ ID NO: 24700 - DNA, 470 bp, Gossypium hirsutum
  unsure (1)..(470): unsure at all n locations; Clone ID: LIB3147-024-Q1-K1-G2
cccacgcgtcggcccacccgtccgcccactcgtccgaacttgctcggtaaccgacaaactgattattggtggaaaaatcatggggaaggacaagcataaccctgataataagggtctgttttcacatcttgctcatggtcttagtcatggtggtcatggacaccctcctggtgcatcccctccacctcctggcggatatccacctgctggagcttacccaccgtaaggctatccaccagctggctacccttctcaaggaggatacccatctcacggctatccaccatctggctatcctggtgcatcccattcanggcacggtggcatgggagcgctgcttgcatgtggtgcagcanatgccgcatctgctatggaggctcaccacgtgtctcacggtgctcatggtgctcatggtgcttatggtgctcatgggtttggtcatggtcatcatgcggagttcaaacatcatg

SEQ ID NO: 24701 - DNA, 280 bp, Gossypium hirsutum
  unsure (1)..(280): unsure at all n locations; Clone ID: LIB3147-024-Q1-K1-G3
ccgaaaagctcccttaacaatgaggaccgagttcagtcttgcaagcgtgtacttctaaaatggtgagtgaggaaggccaagctttttatacagtanaatgtattctcagtaaaactagcaacaatgtgaaatccagtagggaatttaactccatagagaaatgatgtatgtatgtgatgggaatgaattcaacaaatgattgatgcataatagatatgttttcagttnanaaaaaaaaaaaaaattaaaaaataaaaaaaaaaaaaacataaaaaaaata

SEQ ID NO: 24702 - DNA, 206 bp, Gossypium hirsutum
  unsure (1)..(206): unsure at all n locations; Clone ID: LIB3147-024-Q1-K1-G5
cttggtaaagttgacatcttcgtattgggtttagggagtggtggtactgtttcgggtgttggacagtacctcaaatcccaaaatcctaatgttcanatatacggagtggagcctgctgaaagtaatgtattaaatggtggcaaaccaagtcctcatcatattactggtaacggagttgggttcaagccaaacatattggacatgga

SEQ ID NO: 24703 - DNA, 467 bp, Gossypium hirsutum
  unsure (1)..(467): unsure at all n locations; Clone ID: LIB3147-024-Q1-K1-G7
aaccaccgagccgacccacgcggccgggcgaactgtctaaacataagttttacgctttatatctgcttcaacagctattcggcgcgaggaatatacatttaagggagggggaaacttttaagggagtagtagaaaatcatttggtttttgaagagcccttaaaagagcaaattgatgggctctatcaaatctgttgtgatctcattctaaatggggccaacagtagctactttctaaaaattgtggaattttatggatccacgcttggtatgtagccaagcccaagaaaaaaggaacgaggggaagaatcgacaaggaatccataacaaaaaaaaaattgtgaatgaaaaaaaaagcgtgacgagaataattntctcaacccaagataaaaggaacgaggggaagaatcgacaaggaatccataacataaaataaaattgtgaatgaaaaaaaaaaaaaaagggcgg

SEQ ID NO: 24704 - DNA, 477 bp, Gossypium hirsutum
  Clone ID: LIB3147-024-Q1-K1-G8
gaatgaaccacaacccgcaatctatcgatggtaagcacgatgatgactctgctcgctccgggttccttgcctctcttatggattatgctcccactatacctgacgaattggtggaacattacttagccaagagtggatttcaatgtcccgatgttcgattaataaggctcgttgctgttgccactcagaagttcgttgcggaagttgcaagtgatgcacttcagcattgcaaggcaaggcaagctgcagtcgtcaaagacaaaagggagaagcagcaaaaggataagcgcctaatcttgacgatggacgatctttcaaagtcattgcgcgagtatggggtgaatgtgaagcaccaggagtattttgctgacagcccgtcaaccggtatcgatcccgcttctagagaggaatagttgggccatgttatttacatgtttgtatttagttgatctacatttttttgcaaatctatgaaat

SEQ ID NO: 24705 - DNA, 461 bp, Gossypium hirsutum
  unsure (1)..(461): unsure at all n locations; Clone ID: LIB3147-024-Q1-K1-H1
cggacgcgtgggcggacgcgtgggcggacgcgtggggtttgctgggttctccaaggacaacaagcagcttgatgctgangttcatagcaagtacatatatggtggccatgttgctgcatatatgaggactttgatggaagatgaacctgagaagtatcagtctcacttcagcgagtatattaagaggggaattgaggctgataacatcgagtccttgtacaagaaagttcatgctgccatccgagctgatccaactgcaaagaagactgaaaaggagcctcctaagcagcacanaaggttcaacttgaagaagctaacatacgaggaaaggaaatctaaattgattgaacggttacacacccttaatgccgctgctggtgctgattcagaggaagaggattgaatgtangaatgctcatttcaaagcactaaaaatattccatgcttttctttaatataca

SEQ ID NO: 24706 - DNA, 486 bp, Gossypium hirsutum
  Clone ID: LIB3147-024-Q1-K1-H10
gtccgcccacgcgtccgttcgtgaaaaccctaaccgtcaagaccataactctcgaggtcgagagcagcgacaccggcgataatgtcaaagccaagatccaagacagagaaggaattcccccggaccagcaacgtttaatttttgctggtaaacaacttgaagatggccgtagattggctgattacaacattcaaaaagaatcaacgcttcatcttgttttaaggttgagaggcggaattattgagccttctttaatggctttggctcgtaaatacaaccaagacaaaatgatttgccgcaagtgttatgctcggttgcatccgagagcagtgaactgtcgcaagaagaaatgtggtcatagcaatcagttgaggcccaagaagaagatcaagtaaaccatgactgacgatggtggtttatgtcatttgcttcaaaagaacttgaataccagacttgtcaaatattttttttcccatttggttcttt

SEQ ID NO: 24707 - DNA, 151 bp, Gossypium hirsutum
  Clone ID: LIB3147-024-Q1-K1-H11
gtccgtttggcaaacaaatcgaaccgacaaaggccttaatctcattggatcgtggcaccaaggggggaaatagtgcctgctctgtaaaggtgcttttgactttccttttcttctagttttgttttaatgtaatgttgatcattggaactcc

SEQ ID NO: 24708 - DNA, 487 bp, Gossypium hirsutum
  Clone ID: LIB3147-024-Q1-K1-H12
gggccgacccacccgtccgcccacgcgtccgtcaccatggttttagatcttccaagtgtagatttcaaaaaagttgatgctgatgttcatcaattgaagggtagcagttccagcattggtgcacagagagttaaaaatgcttgcattgcttttcgtagcttctgcgaggagcagaacatcgatgcgacactgagatgtcttcaacaagtgaaacaagagtattaccttgtgaagaacaagcttgaaactatgctcaggttagagcagcaaatcgtggcggctggtgggtcgattccgatgattgaactgggtttttgaggaccataaacatgaaagggggaaagaatgattttgggggtggtttatacaataagaacatatggtgtttaagggttctcttttttatttaatcttaccagtgagtttgtgggtggttgatgttcatgaaagaagagatttcatactaatttcactccaaataacttct

SEQ ID NO: 24709 - DNA, 417 bp, Gossypium hirsutum
  unsure (1)..(417): unsure at all n locations; Clone ID: LIB3147-024-Q1-K1-H3
ggtaaaagaagacctaacgggggaggaggcatttgaagccaaaaagcgtaagctagctaaccttgaaatggcactacttgcaaacccagaggcaaacattaagtctctgaaagagatgttgcaatttgccaaagatggtgatcactcaattctaaagcttggactgctgtccttgttggctgtcttcaaagacattattccaggctatcggattaggctacctactgaaaaagagctagaaatgaaagtttccaaggaagttaagaaaatgcgattctatgaatcaacacttctttctgcttacaaaggatacctgcaaaagttgttagcattagaaaaacaacccangtttcatcaatgttggggttcgtgtatttgtactttgcttgatgcctgtcctcactttaacttcaaaaa

SEQ ID NO: 24710 - DNA, 352 bp, Gossypium hirsutum
  Clone ID: LIB3147-024-Q1-K1-H4
cggacgcgttttaccatatcatttctccagtttgggaaatgcttaccaagcctggtttggaggtctgcttgttgattttgccagtcctcgataagttcggatctgctatgagccttgtgaagagtgatgttggtggtaacatatcgaggttggaaaagaaatatgaaactgatcccgctaaatacaatcacttgtacagtatggtgaaagaagaggttgattgttaatcagctacagattcatctagttgtactaatgggcttctttggttgacacgatctttgtaattttttgtataatttgttctcatcttacttgaatctttcttatgtgtttaatgatttatttctta

SEQ ID NO: 24711 - DNA, 479 bp, Gossypium hirsutum
  unsure (1)..(479): unsure at all n locations; Clone ID: LIB3147-024-Q1-K1-H5
aaaaccgggccgangacgcgtgcgaagggttgtctgctttatccattgttggattttgattgggaagtggacttgcgtagcttggtgctaagttttactggggtttgtatttggttgaagattacagaggaaaaaatggctgccgaagaaggcaaagttagtcaatatatgcctgattattgaaaccttaatctgggtttaacttgttattcaacatcattcaactcaaatgcttccaaaaaaaaaaaaactcgaaaaattccagccttccaggtatgtcttatttagggaagttttcttttttttttcttcctatttttgtttcctttttggagagctttctgtgttccttttttagaatttttttgggtttttttttcattaggatattctctataatttttactttcaacaatcattccacaatgtataaagcaattcaaacattgatccgtatagtgcagttatttatttaatgt

SEQ ID NO: 24712 - DNA, 496 bp, Gossypium hirsutum
  unsure (1)..(496): unsure at all n locations; Clone ID: LIB3147-024-Q1-K1-H7
cggattgaataccgggccgacccacgcgtgcgaagtattgagaaaaatcgctttttttcacttccttatttgctaatatgtcgctggttacagatcttgttaaccttaatctctccgactgcactgacaaaatcattgctgaatacatatggatcggtggatctgggatggacctcagaagcaaagcaaggacactttctggtcctgtaagtgacccttcaaagctacccaaatggaattatgacggttccagcacaggtcaagcccctggtgaagatagtgaagtcatcctatatcctcaagctatcttcaaagacccattcaggaggggaaacaatattcttgttatgtgcgatgcttacacaccagctggtgagcccatccncacaaacaagagatgcaacgctgccaagatatttagccatcccgatgttgctgctgaagagcccttgtatggaattgagcaagagtacacccttgtgcagaaagatgtaag

SEQ ID NO: 24713 - DNA, 278 bp, Gossypium hirsutum
  Clone ID: LIB3147-024-Q1-K1-H8
ggccgacccacgcgggcggataagcctgactttgagcctattgctgcttttggtatcgagatttggacaatcgaagatcgcatattgtttgacaatattttgattgccaaaaatgacaaggttgctgagtcatatagggagaccacatggaagcctaagtttgaggttgagaaagaaaaacagaatgctgatgatgagtccactgattcatatggacttttatgctttcatatgtatgtctttgatgttccttttacttggtttctttttttttactt

SEQ ID NO: 24714 - DNA, 440 bp, Gossypium hirsutum
  Clone ID: LIB3147-026-Q1-K1-A1
cccacgcgtccggggttctacttctcggacagtttattgggctttgcactgcaagctatggttgtggagtccgccattattgctacaaagtctgtcgcttggttactcatgatgatgggaagtctgcctgatggaattgatagccatatcaaagagcctgaagcatatacagggtttccgcttgctcagcttcatgcagtgagaaaacctagtcctaagaacaaggatgcctgtgacaccgaggatgatgaggatgaggaagatgaagcaggagatgatcaagatgaagatgcagatgaggaggatgcatctggtgaagatgaaggagatccagaagatgaacccgaggccaatggggatggtgccagtggagacgaggatgatgaggacgaggatgatgacgatgacgacgacgatgatggtgaggaagaggaggaaga

SEQ ID NO: 24715 - DNA, 241 bp, Gossypium hirsutum
  Clone ID: LIB3147-026-Q1-K1-A12
tagtcgacccacgctttcgactcaactcatgtgagcactacacattgcggaaggctcatattccgagctgccgcatactcttcaacgattcatgcgactaacaaatcgtatatctataataccaacgacttgctactgaaaattgatgctggtatatgtaactacaactatatattgcctcactgcaaccataatcttctcaagaagacatgtgcctactaccctcataaaaatctagata

SEQ ID NO: 24716 - DNA, 351 bp, Gossypium hirsutum
  unsure (1)..(351): unsure at all n locations; Clone ID: LIB3147-026-Q1-K1-A2
cccacgcgtccgcccacgcgtccggttcaatatgggatgcttcatcatgggcaactgaagatggcgaatataaagctgattacaattaccaaccctttgttgcaaagttcaccagtttcaaagctggcggttgctcggcttactcgtcacctcggtgccggccggtctttgcctcgcctcatcgatccggcaggttaaccatgcaacaatataaagcaatgaaatgggttcaaaggtaccatttggtctatgattattacaaggaccccaaaaggaaccatgccttaaccccagagtgttggaattagcttttgaaatgaacttaagtgatagctntgtgggaaaaaaata

SEQ ID NO: 24717 - DNA, 301 bp, Gossypium hirsutum
  Clone ID: LIB3147-026-Q1-K1-A3
cccacgcgtccggctgatgtgaagattagagatttcgatcccgacggtgatggcgacaacgaggggggctgttaatgctgtggaaaaacattacctgtgttccgaatttccatatgtagataactttacaaaaaagaaactaagatgagaacctattgaaaactggaatttggatgatgaacaagtactggactaatattattttggtgtaatgaatgcatcacaatccggatttcttgagcttaaaaaaaaaaaaaaaaaaggaccacaaaaggaaccatgccttaaccccaaaaaaata

SEQ ID NO: 24718 - DNA, 240 bp, Gossypium hirsutum
  Clone ID: LIB3147-026-Q1-K1-A4
tcagctgatttatatcattttataaatctttatatcgaactgtacgcaaaagatttgatatttatgtagaatagttatttagtttattcatgtttaatttttctgcttcggatgagatttttttttgcttggaatcatttaatattgggataaatctcaaaactatacatgaagaatgatttaatgtacaattgtatttatgaactttgattttatacaattttatacatgatttttttt

SEQ ID NO: 24719 - DNA, 492 bp, Gossypium hirsutum
  unsure (1)..(492): unsure at all n locations; Clone ID: LIB3147-026-Q1-K1-A5
gttaaagaanttgttgtaagatctctgcttgtttctctatccttccatgcctatcagcagggagaatatatgatactgcaaagggtgtcccctgttactcattcagtgggcaactgagtaaagcgggtggttgttattgtcagctctgttattttcttcaagacacctgtctcactgatcaattctcttggcactggaattgctctcgctggagttttcctgtattctagggtgaagcgatttaagccgaatgcaaaggcagcctaatttgtttgctttgctgataaattccagttattacatatgttttacgccactgattttaagcagagaacttaattttgggtattatttctccattctattccattttcatctttggataattttatatcttctctttaaaaaaaaaataaaattcaaatcgtcaattgattttgaaaaaaacaatttttagattaacctttataacttttgcccccatttaaaaac

SEQ ID NO: 24720 - DNA, 438 bp, Gossypium hirsutum
  unsure (1)..(438): unsure at all n locations; Clone ID: LIB3147-026-Q1-K1-A6
gctgacaaccttgtctccttccttaacaatgcctaaggagcaactgttggggatgctgtgaggaagcttggattatggggtctgtttacccgtggtcttcccctccgtattgtgatgattggaactctaactggagctcagtggggtatctatgatgctttcaaagtgtttgtgggctgccaactactggtggtgttgctcctgctcctgcggctgtggagcttgccaaggcatagaatgttggaaatcctgttgtcatgggggacaagtaaacataggattgctggaatggtttgtcaagctggtggaaggatattcttttttgcgttgagaacattnttatcaagtcgctctgttttgaaaaaaaactgttggttctaggagaggatggntttgatctcatcctccanactacggagactaatttttttggaatag

SEQ ID NO: 24721 - DNA, 233 bp, Gossypium hirsutum
  Clone ID: LIB3147-026-Q1-K1-A7
aatttaacactttgccactgtctgttctgatgatgaatcgtaaaaataacacccaggttcttaataactgccggaacaacaaaaaacttctaagccgggtgagagcctttgatcgtcactgcaacatggttcttgaaaatgtctgggagatgtggactgtagtgccaaaaactgggtaaggcaagaagaaagccctccctgtttacaaaaacagattcatcattaaaatgttc

SEQ ID NO: 24722 - DNA, 235 bp, Gossypium hirsutum
  Clone ID: LIB3147-026-Q1-K1-A9
ttcatgcgttcgtctacctttctgtctagctattttgatgataaaaaaccggccaaacgcaaagtgggttttgttgtagagtaacgtgggctcactaaacaggaactttttagttatataccaaagtgataaaaatcttgtatgttgacaattgatctgctattataatttggcgcaatctaacacctatgatttagagacattggacagactgttacccatatcaaaataaaat

SEQ ID NO: 24723 - DNA, 400 bp, Gossypium hirsutum
  Clone ID: LIB3147-026-Q1-K1-B1
ggtggatagcctatcagatcttagttttgattttagtaggagatagtactgaacttccatagtggaaaatgagtcgaccaatggaggaagatacagtcaagaacgaggaagaggaatttaacactgggccactgtctgttctgatgatgagtgtgaaaaataacacccaggttctcatcaactgccggaacaacaaaaaacttctaggccgggtgagagcctttgatcgtcactgcaacatggttcttgaaaatgtcagggagatgtggactgaggtgccaaaaactggtaaaggcaagaagaaggcccttcctgttaacaaagacagattcatcagtaagatgttccttaagggagattctgttataattgttctcagaaatcccaagtagagtatcac

SEQ ID NO: 24724 - DNA, 325 bp, Gossypium hirsutum
  Clone ID: LIB3147-026-Q1-K1-B10
gggaccacccacgcgtccgggcacattgtaccaacaaatctatccaaacgacgttcacaggtgaattaatggcgtctacctctaagagcagggaccgacttctaattctcgcaaccaccttcctactatgcttgctcgcggctatcagctccatctccccgacctacttcttgccggagtggtccatcccgcacaacccgctccctagctatcgctactacgtgaccagcccaacctgcagaatcgtgccacccctcccacttccggagctgaaaagaagattcttcctataactgtcggacatcccggcttactgtcggtacac

SEQ ID NO: 24725 - DNA, 417 bp, Gossypium hirsutum
  unsure (1)..(417): unsure at all n locations; Clone ID: LIB3147-026-Q1-K1-B11
cccacgcgtccggccgtatcagccattatcttcgttacccgcaaaaagcagagaactgcatcattaacattttgcgagctttacggagcagtaaccatgaataacgttctctgcctgtcggttttcttggcactcgtttacgtccggggattgacatgggacttctcatccgaagtgctggtgattctcattgtttgcatcgtgatgggcgctttcgctagtttccgaactaccttccctctttggacatgttcaatcgcttacatcctttatcctttctcgttggcgctcgtttatgttctcgattatgtcttcggctggtcgtaggttcaatgaatagagatggtagtttaggagggtaaagcccaattgtttgtgagctttcatggtttttcccaatgtatgaactngtcactc

SEQ ID NO: 24726 - DNA, 385 bp, Gossypium hirsutum
  Clone ID: LIB3147-026-Q1-K1-B2
gttgggtttcactgtctacccatcaccccaggtctccacatctgttgttgagccctacaacagtggcctctcaactcactcccttttggagcacactgatgtggctgttcttcttgacaatgaggctatctatgacatttgcaggcgctctcttgacattgagcgacccacttacaccaatcttaaccgtcttgtctcccaggtgatctcctctttgactgcttcacttaggttcgatggtgccttgaacgtggatgtaacagaattccagaccaacttggtcccttacccaagaatacacttcatgctttcttcatacgctccagtcatctctgctgagaaggcttaccatgagcagctatcagttgctgaaatcaccaatagt

SEQ ID NO: 24727 - DNA, 411 bp, Gossypium hirsutum
  Clone ID: LIB3147-026-Q1-K1-B3
atttgaagctgcatttagttccacaaagaaacatcatatagattataagcacctccccataagcagaccacaaaggaaagcttggagagagacccaaaaacaatgtctaaagaagtgagtgaagaaggacagggtcgtaaggactatgtggaccctccaccggcacctctgattgatatggctgaactcaagtcatggtctttttacagagccctcatagctgagttcatagccactctcctcttcctctatgtcactgttgctaccgtaattggtcacaagaaacaacaagatgcatgtgatggtgttggtctcttgggtattgcatgggcttttcggtggcatgatctttatccttgtttactgcactgccggtatctcatgtggacacattaaccctgcggtgacttt

SEQ ID NO: 24728 - DNA, 233 bp, Gossypium hirsutum
  Clone ID: LIB3147-026-Q1-K1-B4
gcgcccacgcgtccggcatgttaccgtgccatggtttgaggttacattgactatggattggtggaaggggggatcaacttttttgagcagattcaggatactgccgaaccagataagtatatcatgagtgcagccgtgcatatttacaagtttgcgggaaaggaacctgaagctagcagtgttcaggattccatgaataattttgggatccccatttttggaataacctcaaa

SEQ ID NO: 24729 - DNA, 383 bp, Gossypium hirsutum
  Clone ID: LIB3147-026-Q1-K1-B6
cccacgcgtccgctggatatgaacgtgaactcttttcactcaatgggcacaacaatcatcggagggacctacaatggcggtgtcgtcctcggcgccgactctcgtaccagcaccgggatgtatgttgctaatcgggcatctgacaaaattacacagctcacggataacgtctacgtttgccgttctggatccgctgctgattctcagattgtttctgactacgtccgttatttccttcatcaacatacgatacaacttgggcagcctgcaactgtcaaagttgctgctaaccttatcaagctactatcctacaataacaagaacatgcttcaaactggtcttattgttggagggtgggataagtatgaaggtgggtaaatata

SEQ ID NO: 24730 - DNA, 483 bp, Gossypium hirsutum
  Clone ID: LIB3147-026-Q1-K1-B7
cgtgcgttgccagtgaaagaagtcatcttaaggctgttttttttaaacaccacaaagtcgtcctaacaaatgaaacctgctttgtacaggattaatgatcacttgcaatactcagttgagatctatgagtggtctggaactagctgggagccatacattactgacgatgtccaagtccagttttacatgatgagcccctatattttgataactttgtcgaatgacaaaaagggtctctattctgcgtcatttaaggttccagatgtttatggtgttttccagttcaaggttgagtaccaaaagctagggtatacaagcttatccctttgaaagcagattccagtcagaccatatttacacaatgaatatgaaagattcataccaactgcttatccctactacggagctgcattttctacgatggcaggattcttcatcttttcttttgttcatctatataacaaagaaagtgtggcatatcta

SEQ ID NO: 24731 - DNA, 309 bp, Gossypium hirsutum
  Clone ID: LIB3147-026-Q1-K1-B9
aagaacgggacgacccacgcgtgcgggcacatggcaccaacaaatctatccaaaggccgtttacaggtgaattaatggcgtctacgcctgggggcagcgaccgacgtctcatgctcgcagccaccatcctactctgcttactcgcggctatcagcgccagcgccgggacctacttcttaccagggtgggccataccgtacaaccagctcactagctaacgctgctacatgaccagccgaacctgcagaatcgtgccacgcctaccatggtcggagctgaaaaggaaatgctgcctatagctggcggaca

SEQ ID NO: 24732 - DNA, 434 bp, Gossypium hirsutum
  unsure (1)..(434): unsure at all n locations; Clone ID: LIB3147-026-Q1-K1-C1
cccacgcgtccgaaaacgtttacattgagagatggtgagcaaagggagaatggtacttttccagggccgctctagatgggatggtacccctattgtatccgaaaaatccctgttttgacttttttttccctctgttatatcaaaccgttacaattgaaccacagatgaatttccaggatgaaagcagaatttctcaggaaatatccaatttgaaaaggatgagttaataataaaatttggcgtgtaccctagcttagactagatcaatggaccattcaattgtgttgctcataaatggaaattcattgctcatcggttcccatgttggaacccgttttatttctttnttttttgtctggtgcagccagcattcagtttcaggttatagcgtaactcttactataataaaaaagaatgtaaacttgtgattagtt

SEQ ID NO: 24733 - DNA, 488 bp, Gossypium hirsutum
  unsure (1)..(488): unsure at all n locations; Clone ID: LIB3147-026-Q1-K1-C11
cccacgcgtccgaacttcttctctccaatctctctatctttcatccccattcctccatggctcaacgtccctgcctcttctctcaaaacccaactcttctccccctcaccaacccctccgatccccggcttttctccctccaatcagggcaatgaaatccatgcaaggccaggtcgtttgtgccacaaatgacaagacagtggcagtggaagtggtgcgtttagccccgcatcccaagtacaagaggcgtgttaggaagaagaagaagtttcaggctcacgacccaaataaccaattcaaagttggcgattatgtgcagcttgagaagagccggcctattagcaagaccaagactttcattgcggtggctgtaccaagtaggaatgggaagcangagaaggaggaggcaggggagcttgggattccattggagtctaaacagactcaagagcagccgcaggcttagtgttaagcccttcgcgtgggct

SEQ ID NO: 24734 - DNA, 372 bp, Gossypium hirsutum
  Clone ID: LIB3147-026-Q1-K1-C12
cccacgcgtccgctcatgttgtcataatccctttgtttcaacagctttcctgtcatccaacaaccccacacaactcaacgacccctgttctaatctcaaaaaccaacacatcttccccttaccaaaccctacgatcccccgcttttctccctccaatcatggcaatgaaatccatgcaaggccagttcttttgtgccacaaatgacaagacaatcgcaattgaaattgtgcctttaaccccccatcccaagtacacaaaaccttttataaaaaaaaaaaaatttcaatctcaccacccacataaccaattcaaagtttgcgattatattcacctttataaaagcccccctattatcaataccaaaactttca

SEQ ID NO: 24735 - DNA, 366 bp, Gossypium hirsutum
  Clone ID: LIB3147-026-Q1-K1-C2
ccgatctggaccttactcgccaatccgacgtcttattcttcttcgccgatgagaaacctcactatgtggtactagctgccgctaaagttggtgggatccacgccaacaacacttaccctgccgatttcattgccatcaacctccaaatccagaccaacgtcatcgattcctcttaccgccacggcgttaagaaaatcctcttcctcggttcctcttgtatttatcccaaatttgcgccgcaacccatccctgaaaacgcgctcttatccggtcccctggaacccaccaacgaatggtatgccgttgccaagatcgcggggatcaaaatgtgccaagcgtacagaattcagcacggcttcgatgcta

SEQ ID NO: 24736 - DNA, 434 bp, Gossypium hirsutum
  Clone ID: LIB3147-026-Q1-K1-C3
gctgaccacttgatcaccaaaagaataatgtccgtgactaaaactaggaagttcttgaacactggggggtttatagtctcttctcttgcattgatggcactaccaatcttcagaacatcagctggagccattttctgttcttctgtggctcttggtttcttggcgctcggaagggctgggtttgcggtgaatcatatggatattgcacccaaatatgcaggaattgtaatgggtgtctctaatacagctggcaccctagctgggatcattggggttgatatgactggaaagcttctcgaagctgctaaagctgaatattcagatctttctagtccagaaagctggagaacagtctttgtcatcccgggattgctctgcgtatttagctctttcatattcttgctattctcaacgggggagaggatttttgactg

SEQ ID NO: 24737 - DNA, 292 bp, Gossypium hirsutum
  Clone ID: LIB3147-026-Q1-K1-C4
cccacgcgtcctcccacgcgtccgtattagcattctcttcatttggctcttagatagaagatgaacgaagctcaatttggagcttctaagaataatgtcatcatattgggaccttgatttcatatttgcatagcaaatccaagcgaattttcaatctagtgtgcctttgtgggtttctatttgacattgttgtttgatttggagatgtttgaaagctctttatatttcttctcaattgttatttgtcacagttacgccggtttaggcttaataatggaaatcggctgaacat

SEQ ID NO: 24738 - DNA, 493 bp, Gossypium hirsutum
  Clone ID: LIB3147-026-Q1-K1-C5
cgaggcgtgcgcccacgcttcctcccactcgttcgcccacttttttcttccacgcgtccagccgccatatctaaaagaaacttctttcgccacgcttggccctgtaaagatcccaatccccaactcgaatcgccactccatttgcttcagtaacttagggtccctgctgcggaagccgaaactgaactggctatcgcatgagccggagcagcatatgcacatggcgtgggtccggagtatggccggtggttgcttcaagagtaaggagacgctgcctgaactccggatcaaagtctaagaagacagtggcgaccaagatcttttcgatccccacgccatggcctccaaagattctgctgatcatcttgtgatcatgcccaatggcctgattggaaagtacctttcattttataggaatttcatatgagattaaaaattttaggcgaataaataatcaattaaactaatactttgttaaaaaaaaagtaaactc

SEQ ID NO: 24739 - DNA, 371 bp, Gossypium hirsutum
  Clone ID: LIB3147-026-Q1-K1-C6
tggaagaatgggagtagtccttattagcaagggaccaaataaggagaagaaatttatcataacattgcagataacgagacatcactgacctttgttcccacatagctttggtttgcggtgaccattcctatatttatttgttagctttgctttctctttcttctttttcccttaagtctgcttgagtctttttctttttttatatgtacttaatgtaatattagaagccaaggcagggccatgcttttctattgtaaaattcatcacttcgctattttatatttgtatgtagacacatttcccgtttcaacatatttccttatttttatgcaagtcgattggtattcatcatcgctaaaacaacaaaattt

SEQ ID NO: 24740 - DNA, 306 bp, Gossypium hirsutum
  Clone ID: LIB3147-026-Q1-K1-C7
caaatttttaaaatattaaaaaaaattcttatcaaaccaaccaaccatcattaaacaaaagaaaatacttttaaacaaaaattctccctctttaaataaactcctttctacccctctgtttcaaaattttatatccctttaaaaaaactccgattttacttttactaaaatacaagaaaaaaaaaaaaaacgggtcttttttcatcaaaaaaaagtaaatcaaaatttcataaaatcaaaccacccttttacctaaaaaccattacatcctttgattctacattaaaaccctcaacacctaattac

SEQ ID NO: 24741 - DNA, 233 bp, Gossypium hirsutum
  Clone ID: LIB3147-026-Q1-K1-C9
gtcatatccaacaatctgcattgagcatcgagttttttagctacacaaaaactgcaattgctctcggcacaggggtcgttcttacaattctcactttctctgcatatcttactcacgcaacaatctctcctcatatactctctaatatcctatatcatccttacttacgactatcctttcataaatgatagctgcaccctttctcaaacccacctattcaaccctataagctc

SEQ ID NO: 24742 - DNA, 400 bp, Gossypium hirsutum
  Clone ID: LIB3147-026-Q1-K1-D1
tctttacccattcctcaaagggttgatggggaaacaagacaggcttcccaccatcattgtggttgggtgaatacttttagcttcaattctctctcttttatgggctcgagtcaacccctttgtttcaaaaggagatattgttttagaagtgtgcggtttggactgtgactaaaatacaggaaaagaaaaaaaagggggtcgtatttcatgaagaaaggttgtatgaaaattgcataaaatcaggcagcccttttggtggaaaatgaagacatgctgggatggcgacattgttgccctcagcatgtaataaggtaagcaaaagggaaacatgttgcatgatgtagatcatagactgcgaccccatattgtctgtgagtttcatgatcttcattgaatatag

SEQ ID NO: 24743 - DNA, 442 bp, Gossypium hirsutum
  unsure (1)..(442): unsure at all n locations; Clone ID: LIB3147-026-Q1-K1-D11
ccgggcgacccacgcgtcgaactcaggcagaaaaacatgggacagcccattgcagaccgaccctaaccaaaacacgggcgtnggatccagaaatgtggataggtgccactttgatttacagcctgttcgaaaaacttccacatatcttggcaggccctgaaggagtactcgaggactgtggtatgcaatcaacaatcatgacgtgattcaacctgctggttncacgagtggagcgggagtttcgccctgaaaacactgttttatgccgagtaccagaacaccggggctggtgcctcaacttctgcgagagtgaaatggggagggtacaaggtgatcactagtgcaagtgaagctcaggcttttactcctggcaggttcattgctggaggaagttggttaagctctacaggctttcctttcgctcttgggtngtaataaattt

SEQ ID NO: 24744 - DNA, 326 bp, Gossypium hirsutum
  unsure (1)..(326): unsure at all n locations; Clone ID: LIB3147-026-Q1-K1-D12
aaaacattgtgacaccccatttcattaccgaccctaaccaaaacacnggcagggtgatttanaaatgtaggataggccccacttctgatttacagcctgttcataaaaacttcccaacatatcttgtcatgccctgtaaggattactcgaggactgaggtaatgcaatcaacaatcattgacgtaattcaacctgcttgttgccactacaggagcggtagtatcaccctgaaaacactgttttatgccgagaaccacaacactctctctggagcctcaacttctgccatagtgaaatggagatgatacaaggtgatcactactgca

SEQ ID NO: 24745 - DNA, 259 bp, Gossypium hirsutum
  Clone ID: LIB3147-026-Q1-K1-D2
gcgaccacgagtccactctccaccaccaccatacttctactaatcacccccaccttcaatggaggggagaaggacctacctaccattacagctcccctcctccaccataaccatttcctcctccccaatactactacaaatttcccccaccacaagcccattttccctcaccaccattctattacaaatttccaccttctatatgtccctcacacaccttctatataataataccactcacctcccacacgtgagaaat

SEQ ID NO: 24746 - DNA, 432 bp, Gossypium hirsutum
  unsure (1)..(432): unsure at all n locations; Clone ID: LIB3147-026-Q1-K1-D3
tgaatctaacatgtctgaaattcctgatcttgttgaagattacagaaaggtgatgaaagaatttgcggaggagttggagaagcttgcagagcaacttttggaccttttgtgtgagaatctggggttggagcctggttacctgaaaaaagtgttttatgggtccaaagggccaacctttggtaccaaggtcagcaactatcctccatgccccaaacctgacttaatcaagggactcaaggctcacactgatgctggtggaatcatcttactcttccaagatgacaaggttagcggccttcagcttctcaaggatggtcagtggattgatgttcctcctatgaaacactctattgtcatcaacccttgtgaccaacttgagggtatcacanatgggtaatataagagtgtgatgcaccgtgtgattgctcaaac

SEQ ID NO: 24747 - DNA, 341 bp, Gossypium hirsutum
  Clone ID: LIB3147-026-Q1-K1-D4
gtttcaattatgttcttacgcaatgcatttcttgttgttatcgttaatgaaaaagataggcgagtggtggaactaaactccattgagaatggacgaatttggaaaggatatgacgtcttgatctttgacacttggcattggtggcttcttaccggtagaaaacaaccatgggattatgtccaagacaataatataactcgcaaaaacatgcatcgtacggttgcctataagaaagcattgagcacatgggctagatgggtgaacctcaatgtagatcctgctaaaaccaaggtgttcttccaaggggtctcccccgatcatgtggattcaagggattgggc

SEQ ID NO: 24748 - DNA, 424 bp, Gossypium hirsutum
  Clone ID: LIB3147-026-Q1-K1-D5
ggattattctttggaccactgattgtaaggtgtttactaagctcattccgaccgaaaaccagatgagttgggaggatatagtgagcatccttcatccctaccagagctctgacaacttgcccgtatcatgtgggggtgcattttccgcagaagctcatatccatgcaaatggagatggatctctaaacctgacagcacaaatcatgtggagcggttgcgagtaaatcatatattgctccatgccttatctctatcggtttatgctgtgtgacccatggaggctgtctacttctttatatttataatactattaaataaatgtgacagccacttctacctttcctattcaacattgtgtgccttgtttctccattttcttttcttttctgtaataatatatatacacacggttgtgtgaattaat

SEQ ID NO: 24749 - DNA, 376 bp, Gossypium hirsutum
  Clone ID: LIB3147-026-Q1-K1-D6
cacccacgcgtccgcccacgcgtccgagcttaagttatttactttgtctttacctcccctaccaatgctctagaagaagagcatttctttcctttttaccacacggaaatcagaatacaatatgcaaaaactaaatctgacataatagcaaaagcatatggctcttttgtcccccgagagaagcgaaaaatgcatgactaaaatggagggaaaaaaccgaaacaacatcttgatcctaatcaagctgcagcaagtttgaatccatcttatgcggatgcttacggtgcaacaccttctctatcacaaataccctacctgggtgctagacctatagttgcagaagcacctgcaccaccaaataacattctatttgttc

SEQ ID NO: 24750 - DNA, 377 bp, Gossypium hirsutum
  Clone ID: LIB3147-026-Q1-K1-D7
atggatttcacgatttctcaccaactacatcttttcttaaccaactcttgcaagcaatgctggagaggttgctgcacttgtggcattgtctggtgacaagtcaactggaattgacaagaataccatattttctgcagttccaccaatgtttcccacaccgccaccacctccagcaccttggaagccataaatatgcttttagatcctttaaatatttcctttttgtgtgacttagtctcatgattttgtaagtgttttttggcaccttgatgaccttgaaagtgaaagtagtgcaaagggcaaggaaggagatgtgcaatggaaaaaagctgcactaaactagatggtggtttggctattagattggagaatatgac

SEQ ID NO: 24751 - DNA, 121 bp, Gossypium hirsutum
  Clone ID: LIB3147-026-Q1-K1-D9
ccacgcgtccggttgtagatcacgagcaacctttctagacgaaccttgctttcttactcgtgcatccaacatcatcgggtcttgatagcttcacatactaccaattcactctccatctatg

SEQ ID NO: 24752 - DNA, 459 bp, Gossypium hirsutum
  Clone ID: LIB3147-026-Q1-K1-E1
cgcgtgcgcccacgcgtccgggttcatgcaatgcaatggtcttttctaaaagaatttgtagcatcgccagaaggtcgatttgtggttgatgggtcagaagcaagagtcttgaaaactcatggacctcttggttttcttaaggttcatgatgctggtcacatggtgcctatggaccagcccaaggcagccttagaaatgctgaaaagatggaccaagggttcactagctgaaggtggtaaggcagagaaactgtttgctgaaatgtgatttttttttttcacttttcactgcttgcagtcagtcttagttacccgctgctcttatagtgggaacaacgaaacaaaataaacttcgaatacctgtatatatatgtatgtggatgccatatgatcctggtcatcttggggttttgaatatacatactaaaaaatatgaagtgatttgaacttttttgtggtt

SEQ ID NO: 24753 - DNA, 390 bp, Gossypium hirsutum
  unsure (1)..(390): unsure at all n locations; Clone ID: LIB3147-026-Q1-K1-E10
cccacgcgtccgcccacgcgttcggggatctactttctgtacaatgtggacatacctggtactcgagttgttgaaggggaaaataccatcttctttaaacaaccaagatgcaacagtcctttccaaggattcatgtatgactacatccggttagaaggtccctcaactccatgttaattcaggattctgttacacacttttctatatattcatcgttaccattcatatatgtaggatccgtataatgttatatttgtgaatgatgattagtgatgtattgaaaaggaataaactacaaattgatggaagagagccagatttgtccgtagctaanatattttatacatatatgtaatgtacttgttttatgtaaaagaatagttcctttta

SEQ ID NO: 24754 - DNA, 463 bp, Gossypium hirsutum
  Clone ID: LIB3147-026-Q1-K1-E11
cccacgcgtccgaaagtcgacgacgaaactgccattaaactttggcgacccaactttacactgctcgtggtcacccttggtgaaaagggtagccgatactacaccaagaatttccgtggggcagtcgatgctttccatgtcaataccgtggacacaactggcgccggtgactcctttgttggtgcattgctatgcaagattgttgaaaacccaaccattcttgaggatgaagcaaaattaagggaagtgttgaaatttgcaaatgcatgtggagccatcacgacgaccaaaaagggagcaatccctgcactaccaaccgtggccgatgcccttgccttaatcaatggagcttagattttaagcaacttgaataatttgcacgtttgttttgcctcccgtgattatcctttcatttcaaagaattctcaaattattcccctttgatatgcgacctttgttcccc

SEQ ID NO: 24755 - DNA, 248 bp, Gossypium hirsutum
  Clone ID: LIB3147-026-Q1-K1-E12
ccgaacccgcaccttcgaaactataaatttggctttcgcttcaataaaatgcaaaaacagattcaagaaggtgacaactttttacccattccacttttactcaataaaacattgacgtcaatgattgttgtagttttacgtgcatgctcgatggctaattcatagtcatgtttaaaaacgagtgtttcaatgcacttctctgttgtaatgtatattcatatttattactaaataattttttttaattc

SEQ ID NO: 24756 - DNA, 336 bp, Gossypium hirsutum
  Clone ID: LIB3147-026-Q1-K1-E2
atagaactcttcttttcttttggggggaggggttttagaacttaaaatccaaatacgagtgagtgagtgagttttgatgcttggattatatcagttatgcaacactttcaattttactcaaaactcataacgtgcttttttggaggcactatcattcactaatctctggacttgaaattgattcattgaaggtagaaccataggatagaattcatatgcctccgacaactactccatagttttgtttaaaacataggtttcgactgtgttggatactcaattacaacaatatttgtgatcaagttatgttataaataaaatgtttcttgctctggc

SEQ ID NO: 24757 - DNA, 69 bp, Gossypium hirsutum
  Clone ID: LIB3147-026-Q1-K1-E3
ttcattgtcttgtttgtccttactcgaaacagatttcgtgcttgaatagacatttgccattcatggggg

SEQ ID NO: 24758 - DNA, 363 bp, Gossypium hirsutum
  unsure (1)..(363): unsure at all n locations; Clone ID: LIB3147-026-Q1-K1-E4
gcaagaattgaagctcgaataggggtgatgttttacattcttgtgaggtatgatgagtcaaggaagtcttttgagagtgcagtaacaaagcttanagcaagtggggagaggaagtcagccttctttggggttgtcttgaaccagatgggcttggcttgtgtccaattattcaagattgacgaggctgccgagttgtttgaagaagcacgagcaatactcgaacaagaatgcggcccatgtcatcaagataccctgggagtattacagcaatcttgcagcaacttatgatgctatgggaagggtcgaagatgcaatcgagatattggagtatgtactaaaattacgagaagaaaaacttggaat

SEQ ID NO: 24759 - DNA, 255 bp, Gossypium hirsutum
  Clone ID: LIB3147-026-Q1-K1-E5
ttcaaagccaatgagtcatttggttcacttgttcctgttttgttaactagtttatgtctagaagataactttcattcgcaatgaatgactggttaaaaatataaaatcaatgatataaatgctatgaaaggacagttcaaacagagaaaaaaaaaaaaaaaaaaaaaaaaaaaaaataataaaaaaaaatataaaaaataaaaaaaattataaataaaacaaaaaagttttataataaaaacctctttaataaaa

SEQ ID NO: 24760 - DNA, 333 bp, Gossypium hirsutum
  Clone ID: LIB3147-026-Q1-K1-E6
aatttgtctgtcacctcatcaatacataaaattgtggaaggaaccacactatatagtaattcatatagttggtttcaaaaatgattttggttgtatgtaatgtttcaccacaagctctgaaggatttgatgaaataagatgtttagcattttttttatgctctgcaagtttaaattctagccttgtcttcaaagggtagcccgctgatgaacatattgccttttgctggtatgttattgttagtacctaaagcttacactttcctatttgtacatggatatcatgtaatgtatttttttttcttcaaagcttctaggtacatagccatatttc

SEQ ID NO: 24761 - DNA, 425 bp, Gossypium hirsutum
  Clone ID: LIB3147-026-Q1-K1-E7
tggcatcggaaaagaagctgtcgaacgaaatgagttagatttaagttcataaacttgtcctcaacatctgtgtctgtgaaagcagtgatcgtctcacccgtgccactaaagtcttggaacaactcattgatcatacccctgtcttctccaaagctaggtacactgtgagatcttttcgaatcaggcataatgaaaagattgcttgctacgtgacgatgaggggagagaaagctatgcatcttctcgagagcggtttgtaggtttaggaagttctactttttgaagaaaacttctaagatactcgattctttcgaatggcattcaagagcacattgatcttggcatcaaatacgacccttcaactggtatctacagtatggacttttacgttgtcctgtaacgagctgggttccgcgttggtcgtc

SEQ ID NO: 24762 - DNA, 346 bp, Gossypium hirsutum
  unsure (1)..(346): unsure at all n locations; Clone ID: LIB3147-026-Q1-K1-E8
tggactttntgcatagtataagacggagataattggatccaaaagcagttgatcaaaggttctctcgtcatcaacatcggngatgcattgcatataatgagcaatggaaagtacaagagtgtggaacatcgtgtggttgccaacggaagcaataacagaatttccgtccctattttcgtaaacccaagacctattgatatgatcggaccattgcccgaattaatcgaaaacggtgagaagccgatttataaacaagttctttattcagattacgtcaaacattttttccgttaagcacatgacgggaagaaaacagttgcgcttgctgaattataaatattttaat

SEQ ID NO: 24763 - DNA, 203 bp, Gossypium hirsutum
  Clone ID: LIB3147-026-Q1-K1-E9
cccacgcgtccgtcgaaggataccctaaaccagttacaacttactcttcagtgttctccgcctcccaatccacccccggtgcaaggattaaatcttacataactgcaaacccaaacctacacccttttattcaccaaataaccattctttgccacattaatcttaaaatatactttcacacgataagccacaacatctttacc

SEQ ID NO: 24764 - DNA, 350 bp, Gossypium hirsutum
  Clone ID: LIB3147-026-Q1-K1-F1
gtggattttaagcgggctgatggagtctttgtttaattcactcttattataataatgaaaaagacgtgttcaaatagattttaagaggttttttaatgggatggtacggtcaaatcttatcataggggtgtaggggtgtagataaacagagcgatgaactgttcgtgaattattggtataatgtttgtttattaagctaaataaacgagcatgaacaaattttttatgtttgtttaatgaacgaacacgaatagatgtgtatttggtttatttatgctcatgaacaaatttgtttatcaatttgtctatgacttgtttatttattaatgttataaaaatttcattttggt

SEQ ID NO: 24765 - DNA, 419 bp, Gossypium hirsutum
  Clone ID: LIB3147-026-Q1-K1-F11
aggagccattaaagcttgatattgttataagttttccagatcatggcttccatctccgttttgaccgttggtctcagaggttgcgccttatcgaaatttttgatatcaaacgtcttcaaatgcgctatgccacttctttgataggaggaccatctactcttgctacgtttgtagctgtctatgcactttttggtccaacctatcctggaacttatgacaaggatagaggtgtttataccctattctacccaggtctttcttttgcttttcctattccaagtcagtattcagattgctgtcacgatggggaagcggaattgcctttggagtttcctgatggcacaactcctgttacctgccgcgtatccatatatgatagttctgcgggcaaaaaagtgggtgtggatccttatggataa

SEQ ID NO: 24766 - DNA, 390 bp, Gossypium hirsutum
  Clone ID: LIB3147-026-Q1-K1-F12
cccacgcgtccgcccacgcgtccgccagctgaaccagcattctcatggatgattactttggagacggttaccttgcccattccatctctaacaaccactcccgatcctaatctgaaaagttcactattaaagccgacatcaaaattaattttgatatcctctccagaagagggaacccatacttctctagtcacctctttgtccataaggcccaaagggagacacagaacactcgttgctgggagtttgagcagacactaaaagcccaagtaattgataagtgggtgaccatttttggttggaggttttggaagagttaagtcaccctctatcaagcaaggtacatgcctagttgggtgagaaaaatggcttctagaatggtctattttc

SEQ ID NO: 24767 - DNA, 384 bp, Gossypium hirsutum
  Clone ID: LIB3147-026-Q1-K1-F2
cccacgcgtccgagagcttctttctatctatattcttatcagctttcaaagatggcaggaatcgggtttggtcgcttcgatgattccttcagtttggggtctgtcaaggcctaccttgctgagtttatctcaactttggtgtttgttttcgccggcgttggctctgccattgcttacaacaagttgacaactgatgcagccctagatcccgatgggctagtcgccattgctgtttgccacggatttgctctctttgttgcagtggctatcggtgccaacatctcatgtggcatgtcaaccctgcagtaacttttgggttagctcttggtggccaaatcaccatactcactggcatcttttactggattgcccaacttcttggat

SEQ ID NO: 24768 - DNA, 408 bp, Gossypium hirsutum
  Clone ID: LIB3147-026-Q1-K1-F3
agagcttctttctatctatatccttatcagctttcttagatggcaggaatcgcctttggtcgcagagatgattccttcagtttggggactgtcaaggcctaccttgctgagtttatctcaactttggtgtttgttttcgccggcgttggctctgccattgcttacaacaagttgacaactgatgcagccctagatcccgatgggctagtcgccattgctgtttgccatggatttgctctctttgttgcagtggctatcggtgccaacatctcaagtggccatgtcaaccctgcagtcacttttgggttagctcttggtggccaaatcaccatactaactggcatcttttactggattgcccaacttcttggatccattgttgcttgcttcttgctcaaggctgtcact

SEQ ID NO: 24769 - DNA, 288 bp, Gossypium hirsutum
  Clone ID: LIB3147-026-Q1-K1-F4
gccacctcacccaagcaagttaagcagtatcacatgatgctattgttgccgctacttgaagcactgttgatctatttaatgaataaagtgacaacttcctttctcatgtattttgatctgaatatgtacgtttagatcaatatgcagtcacggggaggagctttgtattttcttgcatgtttgtctttttaattctgtatgaattcaatgtgtcctatgcttttatttgtgttctaataaatatttgtaagtatgatatcgtaatctatttccactctttctcttttc

SEQ ID NO: 24770 - DNA, 400 bp, Gossypium hirsutum
  Clone ID: LIB3147-026-Q1-K1-F5
cccacgcgtccgaattaccttatgggaatcttatccggtgcaagaattatcgggattctaagaagaacatcaagcttcttcaggttgctgcctgatcttcctaagatattctggcgttaccccatttcgtatatcagttttagctcatgggcacttcagggggcgtacaagaatgatttcataggcctggaattcgacccattactaccagggatcggaaactaaccggagatgaaatcattaccaagtactttggggtgacggtagaccggtccaagtggtgggatttaacagcagtggtggtcatccttatatgttaccgccttatcttcttcatcattcctgaagatgaaggaaaaggcttcaccatttttgcaagaaatttatgcaaaaaaaacac

SEQ ID NO: 24771 - DNA, 492 bp, Gossypium hirsutum
  unsure (1)..(492): unsure at all n locations; Clone ID: LIB3147-026-Q1-K1-F7
ggacgcgtcctcccactcgtccgcccactttttctcccacgcgtccgcaaaacccagattcaaagaagatggccaaattaaagacgattaccatgattatcaatgaaactttacggctttatcctcctttaagtggcgtgataagagaagtaggaagagaagtccaattaggaaaacttgtcctgcctacacattcagaggtcgacatgcgaatcatagcacttcaccatgatcctgacttatggggagatgatgttaatcttttcaagccagagaggtttgctgaagggatagcgaaagctactaagtacaatgcagctgcatttatgccttttggattgggacccttaacctgcagtggcatgagcttttcaatcactgaggcgaaactgcacttntcatgattctgcaacgctcacttttaccgtcttccctacttatgttcacgcacctgcactacgtcttacactcaagccacaacatgggatgcat

SEQ ID NO: 24772 - DNA, 450 bp, Gossypium hirsutum
  Clone ID: LIB3147-026-Q1-K1-F8
cacccacgcatccaagatttggtttccgatttcaaaaaaaaatttatttttaaaaaaaaaaaaaaaaaacaaaaaaaagaaaattttttaaaaaaaaaaaacaccccccccccacccaccaaaaaaataaaaaaaaaaaaaaaacaaaaaaaggccccccccctctaaaaaacccaaccttacctccccttccctccaactctttacctcttctatattaccccccaaatcaaatcccctccccccctttttccacctcctaaactgaaaaaccccctccttcccccaactaaatccccttccaaaccatccccctttcccccaccttttttattccaaaaaacccccccccaatccccctttcaaaaattttcccaccctaaatatcaaataaccccccccctttatcccccctttaacccccactatttttttttttcccccccaatt

SEQ ID NO: 24773 - DNA, 252 bp, Gossypium hirsutum
  Clone ID: LIB3147-026-Q1-K1-F9
attcccgggcaagaaggcgcggccgcctaccaggaagctgaagaccacttacaaggcatttaagcctaacttgtttatgtaagttctctcagtgcaatgaaaagagagttgatgtggtttatagttctaaaatttttggtagtgaacatctggcagtcttgctgattgggtattgtttttcatttgagaagcctaggccacatctgactggttgaagttgaattttctttaatttactatcacattttgttt

SEQ ID NO: 24774 - DNA, 393 bp, Gossypium hirsutum
  Clone ID: LIB3147-026-Q1-K1-G1
cggacgcgtgggctccaacccagaaatcctccatcgtcaaccaggaggaactccaaaaagtcttgagccagttcgacgccaacagggatggcaagatctcggtgacggagctccgcgatgtgttgaaatcaatgggctccagcatcactgaggaagaactcaaacgtgtcttggaagacatcgacaccgacaaagacggcttcatcaacctctccgagttctcctctctcttccggtcttcatccgatgaagtcaccgccgccttggagctgcgcgacgccttcgatttgtacgaccaggacaagaacggcctgatttcgacgagcgagttgcacctggttctgaatcagctagggatgaagtgttcggttgattgattgtgctaagatgatc

SEQ ID NO: 24775 - DNA, 412 bp, Gossypium hirsutum
  Clone ID: LIB3147-026-Q1-K1-G10
aaccaacaacaatggctaccagaatttgtcccttcttgcgctggttgcgctatttaccaccacaacaaatgcatccattattccacaatgctcacttgctcctagttatcattattccacaattcctaccaccagatacttcaatggccttcgaacacccatatgtgcaagcctatatgctacaacaagctattgcgtcgagcgtcttacaacaaccaattgtccaattgcaacaacaatccttggcacatctaacaatacaaaccatcgcaacgcaacagcaacaacagtttctaccagcactgatccacctatccatggtgaaaccctgtcccctactttcaacaacaactgcttgcattcaacccacttgctctatcaaacttattttcaaaccaataacaacaacaac

SEQ ID NO: 24776 - DNA, 244 bp, Gossypium hirsutum
  unsure (1)..(244): unsure at all n locations; Clone ID: LIB3147-026-Q1-K1-G11
cccaacaacaaccnctacgagaactgtgttgtacctttacaaggaggccgcgctctatcccaacaacgactacaatcctttctaagcacccgcatatctatgtgcccaacctctcattgatcaagctcatgcacaactttcattacaaggagtatatcacgcagaccttctcctgccataactactactaggatctcaccaacaatgtcattcaacacctactcaactacctgaacctcccttc

SEQ ID NO: 24777 - DNA, 341 bp, Gossypium hirsutum
  unsure (1)..(341): unsure at all n locations; Clone ID: LIB3147-026-Q1-K1-G2
cgcgtccgtctatatcgcgtnccgccctttttttttttttttttttttttttnttttttttttttttttttaagaagtttttttttttttttttttaaaaaaaaaaaacaaccttttattttattgaacccaaatttaaaatacatccccttattttttgcaacatttaagtcaaaatttaacaccaacattttcttacaaacatttaacaaccagcatgtctaaaaactttttcaaacccgcaatttattggaattaaaaccttttttttttttttttttgaaatacccatttacaaactttgtttcatgtcctttttgcttttaaaaatcttaaatcac

SEQ ID NO: 24778 - DNA, 345 bp, Gossypium hirsutum
  unsure (1)..(345): unsure at all n locations; Clone ID: LIB3147-026-Q1-K1-G3
ccacgcgtgcgcccacccgtcctctcttacactttttattagnaannacaacatcccattgccaaagaaaacggtttnaaaaagggggctgtcaaatctttcttttctttttttaatatganaaggaagacattnatcttctgcgagttctgctgctacattctattaccggtaaactggtcacattcncaaaagaaaaggaagggctcaaactcgagctggaaaaaagctcagctgaaaggccatcgaagttaaaaggtgtgattgatccctcaatacgaggcacttttgcagatgaatcaatgaacaccacagttgaatccgctataaaaagcccgtcaaaaa

SEQ ID NO: 24779 - DNA, 443 bp, Gossypium hirsutum
  unsure (1)..(443): unsure at all n locations; Clone ID: LIB3147-026-Q1-K1-G4
ctattcctcagatggcaatggcaggtttcttgctattcagtgctatctatattgaactttactacgtagttgccagcgtgtggggacataagatctacaccatatacagcatcctgtttattgtctttatcattctcttgattgtcactgcttttatcactgtggctttgacttattttcaacttgctgctgaagaccatgagtggtggtggaggtccttcctttgtggtgggtctaccgggctgttcatatacacctactgtttgtattattacaatgcacggtcagacatgtcaagcttcatgcaaacttcgttcttctttgggtacatggcctgcatttgctatggcttcttcctcatgctcagggctattggcttccgtgcatctctgctctttgttcgacacatntatccgtcaatcaagtgtgagtaggaagttgga

SEQ ID NO: 24780 - DNA, 368 bp, Gossypium hirsutum
  unsure (1)..(368): unsure at all n locations; Clone ID: LIB3147-026-Q1-K1-G7
gcgtccgactgtggttcttcaagggcttccccgaagtgctgtctttagaggatgttgagcgtttccttgggaggtgtgagtatgactcggccgcaanccaaacggttacattttcttgtcctgtattcaccaaccttgtcagattaacaactgngcaattcccctctcatatccaagcaatgaacgcatgcattagcaaaaacagaaaaatctgtctcaataatcaaatctctgtccgagttctttattaaaaacttcagtctgttagggtattgcctaaagatggaccaccacatcagtaggctgcctggtccatattgaactatgtgtatattttgcctgtttgagggtttgtgcacgcattggac

SEQ ID NO: 24781 - DNA, 490 bp, Gossypium hirsutum
  unsure (1)..(490): unsure at all n locations; Clone ID: LIB3147-026-Q1-K1-G9
cgcgtccgattttgagcattcanaaacacaccaaacgaagctttctaactacaacctaacaacaatggctaccagaatatggtccctccttgcgcttcttgcgctatttgccagcgcaacaaatgcattcattattccacaatgctcacttgctcctagttccattattccacagttcctaccaccagatacttcaatggccttcgaacacccatctgtgcaagcctataagctacaacaagcgattgcggcgagcgtcttacaacaaccaattgcccaattgcaacaacaatccttggcacatctaacaatacaaaccatcgcaacgcaacatcaacaacagttcctaccaacactgatccacctaaccatggtgaaccctgtcgcctacttgcacaacagctgctttgattcaacccacttgctctagcaaacgtagttgcaaaccacacacaacaacaactgcaacagtttctgtcaacgcttaatt

SEQ ID NO: 24782 - DNA, 400 bp, Gossypium hirsutum
  Clone ID: LIB3147-026-Q1-K1-H1
ccctacctctccaagttacaatccgcaatcagccaagtacagtccatctctagcatactcaccaagcagtccaaggttgtctccttccagtccttacagtccaacatcaccgaattatagcccgacgtcgccatctcattcgcctacttctccatcttattccccttcaaacccaacctatagtcctagcagcccatataattctggaggcaatcctgactacagcccaagttcgccacagtacagtccaagtgctgggtactcccctagtgctccagggtattcgccatcctcaactggtcagtacactccaagcaacaaggatgatcaggcagctaaagacggaaaaacatgacaggagttaatgataaggcacgccgtttttgaaaagctcgagaaa

SEQ ID NO: 24783 - DNA, 265 bp, Gossypium hirsutum
  Clone ID: LIB3147-026-Q1-K1-H11
cattctcttgcctcaggaaagatttatgggggaggtgggttcaactacatcaaagaatcttttgaaaatggtactcttcaccttattgggttgttgagtgatggtggtgtccactcccgccttgaccaactacagttacttctgaaaggtgtcagtgagagaggagcaaaaaaaattcgtgtgcacatccttaccgatgtgcgtgactttattgatggaagcagcattagtttcgctgataccctatatattgatctgttggagc

SEQ ID NO: 24784 - DNA, 397 bp, Gossypium hirsutum
  Clone ID: LIB3147-026-Q1-K1-H2
ggttgatggggaaacaagacaggcttcccaccatcattgtggtttggtcaatacttttagcttcggttctctctcttttatgggctcgagtcaacccctttgtttcaaaaggagatattgttttagaagtgtgcggtttggactgtgactaaaatacaggaaaagaaaaaaaagggggtcgtatttcatgaagaaaggttgtatgaaaattgcataaaatcaggcagcccttttggtggaaaatgaagacatgctgggatgcgacattgttgccctcagcatgtaataaggtaagcaaaagggaaaaacatgttggcatgattgtagatacatagaactgcgatccccatatttgttctgttgagtttttcattgattctttcgatttggaattcat

SEQ ID NO: 24785 - DNA, 400 bp, Gossypium hirsutum
  Clone ID: LIB3147-026-Q1-K1-H3
cccacgcgtccgtagctgaagaagatcttaatctggttgctgctgcaactggtggaaccatacaaacaggtgttaacaatataattgatgaggttctaggaacatgtgttgtttttgttgttatgcaggttggaaatgaaagatgtaatatattcagcgggtgcccgtcaagacggacagctactatagttctacgcggtggagcagatcagttcattgaagaagctgagaggagcttacatgatgcaattatgattgttagaagagctttgaagaactctactgtagttgctggaggtggtgctatagatatggagataagtcgatacttgaggcagcatgcacgcacaatagctgggaaatctcaactatttattaactcttattcaaaaagcacttg

SEQ ID NO: 24786 - DNA, 288 bp, Gossypium hirsutum
  unsure (1)..(288): unsure at all n locations; Clone ID: LIB3147-026-Q1-K1-H5
cggtnatcctgaaacaacgggcatagggnccgccgaccaggaaagtcggcaaaagaacgaccggcccaccgggcaagagggcacantgtgttttaccgcccagcaagggaacaacaccgccgaaancaccagnggaggannaagccccggccggaagaagaacaaagcaaagggatatgggaaaccaggattacacaaggcaggcaccaaagcaaagaagtaggtaagaggaaaggcccatgacggagtagtcacaaaaatgccctaaatacccacaaaacactacaa

SEQ ID NO: 24787 - DNA, 262 bp, Gossypium hirsutum
  Clone ID: LIB3147-026-Q1-K1-H6
cccacgcgtgcggcgaagcacaacaagagttaaagcaaactttaatgtaacatgtttatatgcctacttgaaaaagaatgatgtttaatcattcttaaaaaaaaacacaaaaaaaaaaaaaaaaaaaataaaaaaaaaaaaaaacaaataaaactgaaactaaaaatacaagaaaaaaaaaaaaacggggtcacaatttcaaaaaaaaaagttatctaaaaaattcttaaaaaatcacgccaccctttacgtggaaaaataa

SEQ ID NO: 24788 - DNA, 350 bp, Gossypium hirsutum
  unsure (1)..(350): unsure at all n locations; Clone ID: LIB3147-026-Q1-K1-H7
ccagcaaaccttacttaactacagagccgcagcttctcttcatcgaatcccaaaaaggtagcttggaggccccancaataccaagtggtttttttatgtcttcctacagacgcagatgagcatcccaagatttaccggatgaagctttgggccactaacgaagtccgcgccaaatccaagttttggtattttttgaggaagctgaagaaagtgaacaaaagcagcggacaagttttggccatcaacgagatcttcgataaaaaccctaccaagatcaagaactatggcatttggctgcgatatcaaagtcaaactgggtatcacaatatgtacaaggaataccgagacac

SEQ ID NO: 24789 - DNA, 426 bp, Gossypium hirsutum
  Clone ID: LIB3147-026-Q1-K1-H8
ggcatgtggtggtgcagctggtgcttcttcccttctctttgtctactccttggattatgctcgagctcgtcttgcaaatgatgcaaaggctgcaaagaatggaggagagagacaattcaacgggcttgttgatgtctacaggaaaaccctaaaatctgatggtattgccgggctttaccgtggtttcaacatttcatgtgttggaatcattgtttaccgtggtctatattttggaatgtacgactctctgaagccggtgcttttgactggaaacatgcaggatagtttcttcgctagctttgctcttggttggctcatcacaaatggagctggccttgcatcttacccaattgacactgttcgtagaagaatgatgatgacttctggtgaagctgtcaaatacaagagctcgcttgatgccctctc

SEQ ID NO: 24790 - DNA, 395 bp, Gossypium hirsutum
  unsure (1)..(395): unsure at all n locations; Clone ID: LIB3147-026-Q1-K1-H9
agggnncacccacgccgtccggaccaacgatcaacataacattttgaatccacgttctacattttagcacccatgcaaaccaccagagtgccggtgcttattctcattgctctttctgcatctgtactaacgctacaattttccctcaatgctacacaagctcctatacctacccttcttgcctcataccttacatcaatgatagcttcagtctgtgaaaacccaactcttcaaccctataggctccaacaagcaatctcagcaagcaacatacctttatcaccctcttttcaacaatcttcaaccctatctatggtgcagtcattggtacaaaacatcatggcacagcaactgcagcaactcctgctacctgtgatcaaccaaataactttttc

SEQ ID NO: 24791 - DNA, 192 bp, Gossypium hirsutum
  Clone ID: LIB3147-027-Q1-K1-A1
tgtatttacagaagaagagtctagacttctatctgattatgtgtaccatacctcagctgccaaagcaagtggagagctctgcttaaaatatatatttgcatttggagcatttaatcgggcacttttaaacagtgcatctgagtggaaagtgccaaccacttttatatatggggctgaagattggatgaacta

SEQ ID NO: 24792 - DNA, 362 bp, Gossypium hirsutum
  Clone ID: LIB3147-027-Q1-K1-A11
ggttcataccactattttgatcccttctcatttgaaataatccgcaaggataattgtgttggccattacgagttgttggaaaagagaccgtcgctacctcaacattaatattcttccccctcatttacactgtaaagcacaagcatgtaattcattccttataacatcagtttgcagcgtttgtgtttttgcaaattttagcgattttaagcatttctgtttatctttttcccaatgagtagccattgtagcttctttacaaatctaatgcataccaacatttccatcaaaaaaaaaatttaaaatattatttaaattttattatttttattaatattttatatatttttatcattattata

SEQ ID NO: 24793 - DNA, 374 bp, Gossypium hirsutum
  unsure (1)..(374): unsure at all n locations; Clone ID: LIB3147-027-Q1-K1-A12
gcggatggcgataatgctcaatgatctcaattgacaggatgagaactgggaagagaggtcagatgggcaacaactcaggactaggctactgtggaggcaaagacatcagactagtacgcgctgatggcggaagacctgataggtgttataaacgaccgtccgatgttcattcggacagatgagccaatacctatgtcagccttgagtggttcaatgtcggcagtccagacccttattgtgggagtagttntctgaaaaaatcaccaaccaggatgccctactctgttgcagaggctctctgagtaaatctgtcctttatatcacggacaagaaaaagctctcacttttatcgatccttgcgataaataataagc

SEQ ID NO: 24794 - DNA, 367 bp, Gossypium hirsutum
  unsure (1)..(367): unsure at all n locations; Clone ID: LIB3147-027-Q1-K1-A2
gaagaagaagaagaagaagaagaagaaagaatgaaagaatgaaagaaaaaaggttgtttgaaagaaactaatcaggtaaattatgagaaattatgagatatttaccgtgtttttttgtttcagaaatttgaaataatttattgtattttttgaaacaaattaaatgaatttttttttaattgcagatttgcaacaaatgagttctttgattaataataatcacatatcaagtactattaanaaaaaaaaaaaaaaaaaaaaaaaaaaaaaaaaaaaaaaaaaaaaaaaaaaagggaagggccgtccgatataaaggatcctagcttcccggcgcgggcatgcaaaaacatagatgggggggggcgtt

SEQ ID NO: 24795 - DNA, 481 bp, Gossypium hirsutum
  unsure (1)..(481): unsure at all n locations; Clone ID: LIB3147-027-Q1-K1-A3
cccacgcgtccgcccacgcgtccgtttcccatagtttcacccatcttttaatccatcgctcacaaaattatgggtttgaaggaggaattcgaggagcatgccgagaaagttaagaccctcccggccgccccttcgaatgatgacatgctcattctctatggactgtacaagcaagctactgttggaccagtgaataccagccgtcctggaatgttcaacatgagggaaaagtacaagtgggatgcatggaaggctgttgaagggaaatcaaaggaggaagcaatgggggattatatcaccaaagtaaaacaactgtttgaggctgctggaagttcttgatgtgtgtgtgtatgaccaatgaaactggtgtaatttcaagcccttgtcggttacttggggttttcattactatgnaataaatatgtactctntntctattgctattatgttatttacagnagaaactctttgattactttta

SEQ ID NO: 24796 - DNA, 482 bp, Gossypium hirsutum
  Clone ID: LIB3147-027-Q1-K1-A4
cttcttccaggtaaaggacctgccaaggggaaaacatcccgttcaactcaaatccaatctcccttctagccctcacaaattcgagtcggaggttattgaggttgacctagagaagaatgctcaagttcatgtcggtcccctgaaatatagtgtggaggagtatcatcacaaacaggaattaactccggcaccggtattccctcttattgttggagtttcagtgatcattctctttctcagcattccaagactaaaggacatttaccaagctgccacgggaatacccaacaccgggttttatgacaactgcaaaaaaagaaccacggaagccagttgtgagaaagaagactttttgaagaacccttttcccacaaagggggtgcgactttggggctcagaagacttgtaaaaaagttaatattttcgtacattccccccggccccagaagctttggtagatgataaaactaatttggatgaca

SEQ ID NO: 24797 - DNA, 397 bp, Gossypium hirsutum
  unsure (1)..(397): unsure at all n locations; Clone ID: LIB3147-027-Q1-K1-A5
gnggtttgttaggctcggctgttgattacatggtctgtcttctttcggacatttttatgccaacgtatgatggaccgagcaactttgccaacaacctacttggtcaccgtctctattatggctttcgaactacaataagaccggacagaaaaggtcttgctccaatattcattgatcgagagaatggacagactgctggttttgaacaagcagttaggcgtgtcatgctcaaaacgaatttcggtgggcctcacaagcgtgtgccaccggaatcattttatacgaattcttggccggaattgcttctgtcaaatatcacctagcaatcctgcagacaaatgccctccggataatgttttggaaattttagaaagccagttggagaatgaagtgaata

SEQ ID NO: 24798 - DNA, 372 bp, Gossypium hirsutum
  unsure (1)..(372): unsure at all n locations; Clone ID: LIB3147-027-Q1-K1-A8
ggccgacccacgcgttcggctacaangattatactaaatgttttcctgttgatgaatgtcgatatgctgggggcgattgtgattttctaacggccganaacgtcccgaagagcagaatctttttcatcgcatggtctcccgacacgtcaaggatcaggagcaagatgatttacgccagctccaaagacagattcaagcgagaactggacggaattcaggtggaattgcaagcaacagatccaactgagatgggtctcgatgtgttcaaaagccgtgctaactgaatacggttcttttaggcatctgcaaccgggaagctttcttccttcctacctacagtatgtctttacttaagtgaaatgtttataggtt

SEQ ID NO: 24799 - DNA, 489 bp, Gossypium hirsutum
  unsure (1)..(489): unsure at all n locations; Clone ID: LIB3147-027-Q1-K1-B1
gtccattaaaatatctaaatgttagtggctgcaaccaaataggtgatgctggaattgtagccgttgcaagaggatgtcctaatctcacttacctcgatgtcagtgttctccagaatttgcgcgatatagcactaaccgagttaggagaaggttgccccttactcaaggatatagtactgtcccattgccaccaaataactgacattggtctttcccacctcgtcaaaaactgccaaatgctcgagtcatgccacatggtgtactgtccgagcataaccgcggcaggagttgccaccgtggtctctagttgtcccaacataaagaaggtcctggtcgagaaatggaaggttagtcccagaaccaaaagaagagccagttcagttctttcttatctctgtgtagacctctaattaggaccatccgagttgtgtattaaccaagctcgtcgcttctcaaaacaacctaacattatatgannatattatgtac

SEQ ID NO: 24800 - DNA, 260 bp, Gossypium hirsutum
  Clone ID: LIB3147-027-Q1-K1-B10
cccacgcgtccgatgagttcttacatgtatggtgatctctataaagaatagttgtatggaattgagtgtttgaatttggaaaattttcattactgtccacggcttatgtatggtactgcagattttagtttatcaagggacagattaggcatattttgtgacaaattgcctgctgtaacactgcctctgcagatccttccccatttatttgtaggatactatcaagttaacaaatgcatctcgatcgatgcagttcaatg

SEQ ID NO: 24801 - DNA, 64 bp, Gossypium hirsutum
  Clone ID: LIB3147-027-Q1-K1-B11
cccacgcgtccgctaaggtgtgagtatcagttatgaatctgcatccgagacgggtttatttttt

SEQ ID NO: 24802 - DNA, 407 bp, Gossypium hirsutum
  unsure (1)..(407): unsure at all n locations; Clone ID: LIB3147-027-Q1-K1-B2
ngttccaaggtttacatcattcacaggagggatacgttcagggcattcaagattatgcagaacagggttatttcgaaccctaagatagaagtcatatggaactcggtggtcgtagaggcctacggcgatagggttttgggagggctcaaggtgaagaacttggtcaccgaagaagtttccgatttgaaagtcaatggtctattctttgccatcgggcacgagcctgccaccaagtttttgggaggtcagctggagctcgactcagatggctacgttgtcactaaaccaggtaccaactcagaccagcgtgcacggcgtttttgctgccggagatgtccaggacaagaagtatagacaagctgttactgcggccggcaccgggtgcatggcagccttggaagccgaac

SEQ ID NO: 24803 - DNA, 459 bp, Gossypium hirsutum
  unsure (1)..(459): unsure at all n locations; Clone ID: LIB3147-027-Q1-K1-B6
cccacgcgtccgcccacgcgtccgtgaaaattagctttttcctggccaaaagataactcagcaagtgctgttattgcttgccctggtttctgtgccatggatgctattaccaaagccttttcttctaaagagacaacacgaaaataggcaccaaggccaatcctacgcaccactcgaaagcacagatgaaactctcctttcagtggcaaataatgattcccatggtcatgaccatgaggaatttgagtttagtgaagtctttgtgcatcaactgatccataccatagagtttgtgcttggtgcagtttcaaatacagcttcataccttcgtttatgggccctcagtcttgctcactcagagttgtcagttgtgttctacgagaaggttcttcttcttgcttggnggtataacaatataatcatcctcattgtcggcataatcgtctttattttcgcaac

SEQ ID NO: 24804 - DNA, 453 bp, Gossypium hirsutum
  Clone ID: LIB3147-027-Q1-K1-B7
gcccgggcgacaccacgcgtccgggcttcaaattcgggatcaagaacatctactatgaattacagaggcttcaaattcgggatcaagaacagctcgctatgtataggaagaagactgaagaagctgcttctttcccttatacaggggaatactacgcccagaagttacctgaaaaaccacaaccggtgaccgtacaacagcatgtgccagcgacagccggaatctggtcggataaacaaatttcagccgggggtttcccagcaaccgtagcggcatgcgcacgaccaccaccgccggcggatcaccctgtttacatgatcccagctccagttccaggatcggctccggccaacctctatcacgcaccttcaccagttccagcttcagcacctgcacctgcattagcattagcagcaccacaaatggttcgaccagtaaccggacaagccggtc

SEQ ID NO: 24805 - DNA, 367 bp, Gossypium hirsutum
  Clone ID: LIB3147-027-Q1-K1-C1
aaggtgaccaaagcaaagtcaaggtcatcttcaggaagtccaaacgggggaaaaggactggtctcttatgatgatggttcacctgattcaggaaggtgaaatcgagtggaaagttggttgaagatttttgcttagtgtttgatgacccccatcttctgttgatgcactgaactgtgcagttttacgaacttcttgtctctgatttgtgttgttgccagaggtttgtggttagtaattacattaatccgattccaagtatttttctttgagatggttgtttgttgttggttggccctgtcatgcctcggtttaggataaatttttactttcggttataaaattaaaaattaaatgaaatttagtatgc

SEQ ID NO: 24806 - DNA, 468 bp, Gossypium hirsutum
  Clone ID: LIB3147-027-Q1-K1-C10
gcgatcaaccaaccaaaatagatatttaagatggtttcagggtcagggatctgcgcgcaagagagtggttgtggatgcaaggcatcacatgctaggaaggttggcttccattttggccaaggagttgttgaatggccaaaaagtagtggttgttcgatgcgaagagatttgtatgtcgggtggtttagtgaggcagaagatgaagtacatgaggttcttgaggaagcggatgaacactaagccttctcatggccccatccattttcgtgctcctgctaagatcctctggcgtaccattcgtggcatgattccccacaagaacaaagcgtggggcaagctgctcttgctcgattgaaggcttatgaagggaatcccagcttcatatgataagacaaagaggatgggtatttcctgatgctctcaaagttttggaggtttcagaaaggacacaggtactggttgttgggc

SEQ ID NO: 24807 - DNA, 178 bp, Gossypium hirsutum
  Clone ID: LIB3147-027-Q1-K1-C2
attcaaatggaggacccaccaccttaccctaattttgcacccttaaccacaaaatgttgttaaggttttcaatccatgataattggttaacaactaataaggtatgcactgggtttttattgataactgggtgggtgattggctttaaactgtgattttatatatatacgaagtttag

SEQ ID NO: 24808 - DNA, 400 bp, Gossypium hirsutum
  unsure (1)..(400): unsure at all n locations; Clone ID: LIB3147-027-Q1-K1-C3
agaaaaccctttcctctttctctatctgaaaatcactgccccataaacaccaaatggttagtggttataatggcctctctctcttttttctcatcttcttcctgagttaaggttttttgaagcaacatttgtgaaaatggaaaatggggtagtaatggtaataataagattgcggaagaaagagttgccaatgaggaagtgaaggtgaggcttgctggngattccggtgaaacagaagaaccagtagatgaggtttttgaggaggcaagttcatcactggagaatttgcaagaacaggcagaaatatctggagtggatggccgccagttcagttgaagatgcaattggaaatgttgagacatttggcgatactggttcagaggtagttaaggagaacttg

SEQ ID NO: 24809 - DNA, 303 bp, Gossypium hirsutum
  Clone ID: LIB3147-027-Q1-K1-C4
acaagacctaattattggtgggggcaggatgcatttaacatggccctcacccttaatttcaagggggattccgcctttaaccacctttttaaaatggcccgtccttatttgggttccaaggtaatggaagggaaaagcggtgaaaaaatgctcaggttcaaaattgtaaatgggaatctggaggtccccgaagattgtctacgtgaagctgattattttagcggcaagcctcttagcaccggtttgctccgctagtaattttctacctaaagccataacctatgccacttatcactatcagct

SEQ ID NO: 24810 - DNA, 341 bp, Gossypium hirsutum
  unsure (1)..(341): unsure at all n locations; Clone ID: LIB3147-027-Q1-K1-C5
tttacatcactgttggagatggtggaaataaagaaggtttagcaggaaagtttagagatccccaaccggattattcagcattccgggaagccagttacggccattcgacactggagatcatgaacagaacacatgcagtctatcactggaaccganatgatgatgggaaaaaagtggcaattgactcatttgtattgaacaatcagtactggtcaagtaacgttcgagaaaggaaactgaagaggcattatttgaatgggatgaggatgattgcttcttaatgaaaagaaaatatgaaaaatatcatctctggtagtgcttgatgaagtttcattgcaaga

SEQ ID NO: 24811 - DNA, 415 bp, Gossypium hirsutum
  Clone ID: LIB3147-027-Q1-K1-C6
gtcggccacgccgtcggccaagccgtcggccaagctttcggtggacatttcaagcaggtggaaaagaaggggcgattagctatggaaatggcggcggtgaaaggagttgtgctaaagcacctgagagtgaatgcaacatccttgtccctgcttcgtaaccctaaacccatccctaacgaccactgtgctctcaccttcaacgccatacggcgccgatattccgacgacgtcatgggctcattccttgacaaatctgaggtcaccgatcgcgttgtctccgtagtaaaaaacttccagaaaattgatccatccaaggttactccaaatgcccattttcaaaaagatctcgggttagatagtttggacactgtggaggttgttatggctcttgaagaagattttgggtttgagatac

SEQ ID NO: 24812 - DNA, 388 bp, Gossypium hirsutum
  Clone ID: LIB3147-027-Q1-K1-C7
cccacgcgtccttttcctagcctttatgattaattcggtaccgaagctgctcagggggtgagtgagcagacaatgggaagctcactgcagtttaatgctatgatagaggaaagggatgtctctggcggtaaagtcatgggaaaaggaactggcaccgttctcattgtaactctcgttgctgagaagtcagaccttagcattaatgctgcaatgctccaggagggactagctaggttggagaaaaggaagagatgggaatccaaggatagaaaaatcggtgattgacaatttacagaactttcagaaagaggcacaaacttggtaggcgtggaaatttggcaatatggaaatgtggattcggatgatgatgaggatctccctacctttg

SEQ ID NO: 24813 - DNA, 124 bp, Gossypium hirsutum
  Clone ID: LIB3147-027-Q1-K1-C8
gggccgacccacgcgtacacccacgcgtcctaaacataaacattttaattatcccacaccaccaaatagagagggggaggggaaaaaatgaaaaagacgttacaaacaggggcggccttcttaa

SEQ ID NO: 24814 - DNA, 408 bp, Gossypium hirsutum
  unsure (1)..(408): unsure at all n locations; Clone ID: LIB3147-027-Q1-K1-D11
cccacgcgtccgcttctgcaagaggtatttttaagattctttgggcaatttctgtttgaaagatcacatttcctcttccaactctccaacaaagtccatctcgaagaagaccctttgctacccaaatactcttccaggtaaatgaagatgcagatctccaccttggctatctttcttcaaactgtaggagacaaatgtgcaagatgcgccgacttcaagcaatagaaaacaaaaaacagcagaaaaacctagaactcttgccagagacgacagacaataacgtgctggggtagcaaactttctttttatatttataataaaatttacaatactataaatacatgaaaaaaaaagtagaaaattttcaatttcnnaaaanaaaaaanaaaaataattaaattttaaaaa

SEQ ID NO: 24815 - DNA, 463 bp, Gossypium hirsutum
  Clone ID: LIB3147-027-Q1-K1-D12
ggaacttggaaatgtccgctatgctggtgttgctttcagatctccttagaggagttaacttacaggaacaagatgctcagcatattgtcaatgctgcaagaaatgcaaaaatggctagactgaaacaggccaaggaagaggcagagaaagagattgctgaatatcgtgctcaagtagagtatgagttcaagaagaaggtggcggagagtagcggatactcgggggctaatgtgaagcggctcgagacggaaacagatgcaaagatcaatcacttgaaaaacgaagctgcaaggatatctcatgatgttgtacagatgcttttgaagaatgtgacaactgtgaggaactagggggtcttccatgaagactgatggtttaattttctactacattctatcaattcccaaaactcagctcatgcttggaacaattttatgtcattattttatcatttggtgttatt

SEQ ID NO: 24816 - DNA, 361 bp, Gossypium hirsutum
  Clone ID: LIB3147-027-Q1-K1-D3
cccacgcgtccggccaaatgttgacctgttaggcattgttgcccccacttctaattctgggggttattttctcaatcttcacaaggcaacaggccatcctattcttgtctatatggctgctggaagatttgctgacgatctggagaagttttctgatgaatatgcctgtgaactttgtgatgtcgcagttgaagaaaatgtttcctgatgcaactgagccggtacaatatctggtgtcacattggggaacagatccaaattcccttggctgttattcgtatgatccagtcgggatggcaagagatgtgtatgataagcttagagaacctttggataatcttttctttggaggggaagcagt

SEQ ID NO: 24817 - DNA, 443 bp, Gossypium hirsutum
  unsure (1)..(443): unsure at all n locations; Clone ID: LIB3147-027-Q1-K1-D4
nncgccacgcgntccgcccaacccggtcgaattaacggtacccgtacggtcgtcatcaaccgtcggatcggcaggctgatttttttacgtagaaccccccgacgttaatgggtccctccccgcccgtgggcttttcacgtgggactaggaacccgcagggttcttcaaagtcgttaccggggttttcacttttcttcctccaagacacancccggaatcntgccatcgaatggtgctgtttggtctgtcggaatttgaagaaannacgaatcgggtcgnggtattacccaaatgtaaacatagttttcattcagagtgtatcgatatgtggtttcattctcactccacgtgtcctctttgtcgaacctccgttgaaagatccgtacccgtttctgataacgcgggagatttggttattacgattaatgaaccgtcgggtggag

SEQ ID NO: 24818 - DNA, 458 bp, Gossypium hirsutum
  unsure (1)..(458): unsure at all n locations; Clone ID: LIB3147-027-Q1-K1-D5
cccacgcgtccgcccacgcgtccgtctagctcctgttcgggcctacatatggaagaaacctgaggatttggtacttaattacagagtggttcaaggcaggtgattttatcaactgctgggagcaggtgagtgggttacctgtgttgcttttaactagggttgagaaaattttggtcagaactccttacccaatgtcccgaccaaaactgttgttagtatcagttttagtattaaaccgaccaacttgatcaaactattataaattattatatttatatattttaaaatatttcattatataataaatatttntaatatattaatattcttaccctgacccaattaaacccacccaatccattacccaataaactcgttaccaaatttccaaaatagctgagcgaactaagttgatctggttattgccggttatcaatataaagtttggttggtttcag

SEQ ID NO: 24819 - DNA, 433 bp, Gossypium hirsutum
  Clone ID: LIB3147-027-Q1-K1-D8
cccacgcgtccgcccacgcgtccgttaatattcaaaaaaaaaaaagggtttaacatgttttgttcaggtctattccttctgaggagagtcctgaaacagctccgttgacgattttttacaacggaacggtttccgtaatccaatgtacctcgagacaaggcggaagcatcttcaaacttgccgttgaaggaagctcaaaaaacattgaatcagtagactcatcaaaagctgcaaatccttcaagtgatcaacaaaacctcctcgaagctcgtaatggagatttgccaattgctagaagaaagtcgctgcaaagatttctggaaaagcgcaaagagaggttgacttccccttatgcttggtagtcgctatacaccaccacctaaaccaaaaaaacgcgttttgaagaaaggaaaaaaggaggagggccccattt

SEQ ID NO: 24820 - DNA, 496 bp, Gossypium hirsutum
  unsure (1)..(496): unsure at all n locations; Clone ID: LIB3147-027-Q1-K1-D9
cgcccacgccgtccgatcatgtgttaacttacatgtatgaagatgnaagaaccaatgccattggggtgcaagcatcggtcactttcgacaatganaattgacantgtcttggtctcgagaattatncctggttgtcaagcgcattaccatcaagctctcaaaccgataggtggggtcttccctgaaaccaacaccggcatcattgtgttggctgaaggacgtctcatgaacttgggttgtgctactggccaccctagctttgtcatgtcatgctcgttcactaaccaggtgatcgcccagctggagctgtggaaggagaaggcaacaggcaagtacgagaagaaggtgtacgttttgcctaagcaccttgatgagaaggtggctgctcttcaccttggaaagcttggggctaacctcaccaagctcaccaaggatcaagctgactacattagcgtccccattgagggtccttacaagccctctcactacaggtact

SEQ ID NO: 24821 - DNA, 327 bp, Gossypium hirsutum
  unsure (1)..(327): unsure at all n locations; Clone ID: LIB3147-027-Q1-K1-E1
ttaaaacaaggtgaagtccctaaaactctaaaaaaacctttaataagtcgacatagagataattaaaggtaggtttcaattatgaacgttctctaatagaacaatttactagggataagaagtcgcttcgtaagtgatttatttagccttgttgctgatttggcttattagaataatttaaggctgcaaaggatttgtgctgggtggattaaggcgtcaataactaagcaattattttccttgataattttcagcattctcaattcaagctaaaagctatatgctactnntagatatnnttagcatcgtaaaacataaatttcccnc

SEQ ID NO: 24822 - DNA, 465 bp, Gossypium hirsutum
  Clone ID: LIB3147-027-Q1-K1-E11
gcgttttcttcttttcaattagcttcttgatagctttattttcttaagaacaggaaaccgctgaagagatggcaccaccaattgagactccaaccaagtcctctggctctcaccacgcatcacatcctcctttgaatgaaaggattctttcatcgatgagcagaaggtctgttgctgctcacccatggcatgatcttgagattggacctggagctccaatggttttcaactgtgtgattgaaatcccaaaaggtagcaaggtgaaaatatgaacttgacaagaaaactggtctgatcatggttgatcgagtgctttactcatcagttgtgtatcctcacaactacggattcatccctcgtactctttgtgaagacaatgatcccatggatgtcttgatcattatgcaggaaccagttattccaggatgctttcttcgcgctaaagctataggtctgatgcctatg

SEQ ID NO: 24823 - DNA, 456 bp, Gossypium hirsutum
  Clone ID: LIB3147-027-Q1-K1-E12
cgacgtcgagtccaaatttgcatgtgtcttcttcatccttttcaggttctttggctagatggaggtcaccgtggaccttgacgttgttgcgaggatggatttacttgatttctttaaggaagaatgtgagcagagaggagccacagtcgtatatgctacccatatttttgatggtttggagacatgggcaacacatttggcttacatccaagatggtcaattgaagagatctgagaagttaacagaaattaatgagttgaaaagctcagaaaatttgctctctgttgttgaagcctggcttcgctctgaaaccaagtgtgagaaaaagaaatcttccaattcccctgcccaagtccagaagtcctcgccttttggtacttcgcctttcatgtcgtcgaggcacatggcatactaccgttgatctttctgaatccagctatttttcaataatttttg

SEQ ID NO: 24824 - DNA, 418 bp, Gossypium hirsutum
  unsure (1)..(418): unsure at all n locations; Clone ID: LIB3147-027-Q1-K1-E2
cccacgcgtccgcccacgcgtncgnccacgcgtccgataaaggagtaaaagccatatccagggattggaaggaagagaaaacgcatgtttcttcattaaaccaggaaagacaggctttagagaatcagattgtgaaagacaaggaagcaaganaatcactcanaaccaacctggaagaggctaccaactcacttgatgaagtgaaccaaaaaatattgaaactttccagagatctggaaatcgctaatgctaaaatatcgagtctcgaggatgagaaaatggttctctataaaacacttaccgagcagaagaatgcatcgaaagaagctcgagaaaacatggaagatgctcatagcattgtgatgacactgaacaaggaaagggagagtcttgaaagcgagtgaagaactcgaggaga

SEQ ID NO: 24825 - DNA, 393 bp, Gossypium hirsutum
  Clone ID: LIB3147-027-Q1-K1-E3
ccacgcctccgagagggagaagaaggagcccggaaggggaggaattatttttttcgttggcacttgttaaaccaaatacctttaactatcctccaaaatggaatccaggtcaggcctccttgaccaggtttaatggccaccatcctttgaaagaaaggccaaggaaaataaatcaaggctttttgattataaggtccgaaatgcctttcaatatttgggggggggggggcaattctatgatagcaaaaggtgtacggttcaatcctgaaaaaaagcaagtgggaaattatttttctccaaagatatggagctttaccatgaagtctgcgtgctgcaaacatgagatagtcattcagacggaccccaaaaaatggtgagtatgtgatcattagt

SEQ ID NO: 24826 - DNA, 401 bp, Gossypium hirsutum
  unsure (1)..(401): unsure at all n locations; Clone ID: LIB3147-027-Q1-K1-E5
aagaatggcaagggcaagaccggttccaccattaagtttttgggacaaaggaagaacctggggatcatagttaacaaaaatggaaggaaaaaaaaccaagtccccaaactgtacagaaaagaaaagcaaaatctgcaaacagtttcctgtttattctttcttactgtttattctttctttctccaactcatagcaaagaataaaaaaatggaaaaggagtgtcttttgtaagctttcttaatttaaatgaagtccgcaaggcanaaaaaaaaattcatatttatatgaattatttgaaaattttatacatctgtattgatttggttggaaaaaaaaaaaanactacacaatcaaatttataccattttcttcttttttaaaaaaaattttccaaaaatttt

SEQ ID NO: 24827 - DNA, 109 bp, Gossypium hirsutum
  Clone ID: LIB3147-027-Q1-K1-E6
cgggcaccacgcgtccgtctatttgtccaagttaaaataatcgtcaatttgtttaacttaataatgtaacaatgggcactgataattcaagcacttctatttagctctt

SEQ ID NO: 24828 - DNA, 456 bp, Gossypium hirsutum
  Clone ID: LIB3147-027-Q1-K1-E7
cccacgcgtccgcagactcccccaaaaccctcacgacaaaagaattctctattctatttttgaccactctcctgcaaaaatgtttcgatccgtcgctagatcggccgtcggtaagaacctacttcgacgaggatatgcaaccgccgtacctgaacggaaagtcgctgtcttgggcgcagctggagggatcggtcaacccttggctctcctcatgaagcttaaccctcttgtttctcaactggctctctatgatatcgctaacactcccggtgttgccgatgatgtcagtcacatcaactctagatctgacgttgccggatacgttggtgaagagcaattggagaaagctttggagggatgtgatgctgtcatcattccagctggggtgcctataacgcccggtatgactcgtgatgatcttttcaacattaatgccggaatcggcaagggtctatg

SEQ ID NO: 24829 - DNA, 463 bp, Gossypium hirsutum
  unsure (1)..(463): unsure at all n locations; Clone ID: LIB3147-027-Q1-K1-E8
aaaaaagaaaaagtttgaaacccggaaatgtcggacgaggaacaccattttgaatccaaggccgacgccggtgcctccaaaacctacccacaacaggccggaaccattcgtaagaatggttacatcgtcataaaaaaccgtccctgcaaggttgttgaagtttcgacctccaagactggaaagcagcagtcaagtgggtggaatccaaaaaccaaacagaaacaagcaactcaaggatctaaaattaaagggatcatctctcagattcccactaaaatcaagtatttttggcaaggagaaaacaagcaaaccataggagaggattggcacggtaaagtatactgtagatgaacagacacacaaaaagaaaaagatttaatttaagatgcatgatgattttgaggttttgattntgttaaatccgtgttggaataaaattttcatagaaatattcatgggattc

SEQ ID NO: 24830 - DNA, 300 bp, Gossypium hirsutum
  Clone ID: LIB3147-027-Q1-K1-E9
gagcatataacttggactatcctccacaatgggatccaagtcagggctccttgaacaagttccatggacaacatgctttgagagagagggcgaggaaaatagatcaaggcattttgattataaggttcgaattgccttttaatatatggagtggggggtgcaattttatgatagcaaaaggagtacggttcaatgctgaaataaagcaagtgtgaaattattattctacaaagatatggagctttaccatgaagtctgtcttgctgcaacatgagatggtcattcatacggaccccaaaa

SEQ ID NO: 24831 - DNA, 172 bp, Gossypium hirsutum
  unsure (1)..(172): unsure at all n locations; Clone ID: LIB3147-027-Q1-K1-F1
aatccggtcgaccacgcgtccgtttatctcatatattacccccccttttttttttcttaaatcaaaatgtcctttttatggatcaaattaacattttcttttttcaaaaaccttttcttctttctctgccatcaactttaactgatggacgtatatacttgtatctttaant

SEQ ID NO: 24832 - DNA, 122 bp, Gossypium hirsutum
  unsure (1)..(122): unsure at all n locations; Clone ID: LIB3147-027-Q1-K1-F10
nnnngnnnnaggnncatnnctatcctgncactaagngagnaaaanaaaacacangcancaagcaaaaaaaaaaaaaaaaaaaaaaaaaaaaaaaaaaaaaaaagaagaaaaaaaaaagggag

SEQ ID NO: 24833 - DNA, 465 bp, Gossypium hirsutum
  Clone ID: LIB3147-027-Q1-K1-F11
ccctatagcagctgcagcagaagcttaagcttagggtttagagacgaaatggcagcgaaaaggaagactcccgtcaagaccagaaacccggatctgatccgtggtgtgggaaagtattccaggtctaagatgtaccacaagcgtggcctttgggcaatcaaggccaaaaatggcggtgctttcccccgccatgatcccaaacctaaggcccccgctgccgctgagaaacctcccaagttttacccggctgaggatgtcaagaagccgctccttaacaagcgcaaacctaaacccaccaaactcagagcaagcattacaccagggactgtgttgattttgttggctggaaggtttatggggaagagagttgttttcttgaagcaacttacttctgggctccttttggtcaccggaccattcaagatcaacggtgtttctttaaggcgcgcgttaccaatcctatgt

SEQ ID NO: 24834 - DNA, 465 bp, Gossypium hirsutum
  Clone ID: LIB3147-027-Q1-K1-F12
cccacgcgtccgcccacgcgtccgctattccattcaggcgcttctgtggtggagttgggcgaaccgcacaggctaagaatcgccattctaatggacaaggccgttggcccatgaaatctgcaaaattcattctcgatttgctcaagaatgccgagagcaatgctgaggtgaaaggcttggatgtagattcacttatcatatctcacatccaagtaaaccaagcacagaagcaaaggcgccgaacatatcgtgcacatggaagaaattaacccctacatgtcttcaccgtgtcacattgaactgatcctgtctgagaaagaggaagccgtcaaaaaagagccggagactcagttggctccgaggaaatcaaagggtgcttcgtcttaaactgctgagtgatggattgttagtcggaagcttttaatttgttgtctctgtaatgagaacatttttgtttacttcaca

SEQ ID NO: 24835 - DNA, 393 bp, Gossypium hirsutum
  unsure (1)..(393): unsure at all n locations; Clone ID: LIB3147-027-Q1-K1-F2
aaaaaaaaaaaaaaaaattaaaataaaaatttttattttaaaaaaaaaaataaaaaaatttggggaatgaaaaattaaaaaaattaaatttggaaaaagggaaaggaaataaaattgaatttgttttnnttgggggcccgccttttttaaaaacccaactttactccccgtccttgcaaccttttaacttttttatttttgcccctaatttcaatttccccccccgccttttacaacctctggccttgaaaaccccttcctttccccaatttaattgctttgcaacccattccccttttcccaacttgccttaaaacaaaaaagccccccccgatttccttttccaacaattcccccccctcaattgcatattggaccccccctttacccccc

SEQ ID NO: 24836 - DNA, 454 bp, Gossypium hirsutum
  unsure (1)..(454): unsure at all n locations; Clone ID: LIB3147-027-Q1-K1-F3
cggacgcgtgggcggctttaagcgactgcgtggaacaaatggctgagtcggtggatgagttaagcaaaacgttgagtgagttgaagcatttgagaggcgaaacgttcgagttccagatgagtaatgcacggacgtgggtgagtgcggcgctgacgtatgaggacacgtgtattgatgggttcgaaggggttgatcggaaggtgaaaggtgatgtgaagaagaagatcacaaatgtggctatggttacaagtaatgctttgtatctgattcgtaggcttgacgaaagtggtggtctgaaccgttgatcatgatgaattggacggttgtgattntatctggcttattgatggttatcgnggtcttttttttttttatcttaattccggagaagttgtatgtaactgtaatgtaatattattttcgtggtaaatacattcaatactatttctctagt

SEQ ID NO: 24837 - DNA, 445 bp, Gossypium hirsutum
  Clone ID: LIB3147-027-Q1-K1-F5
gagggctccagccgctatccaattcttttggttgagatcttcccaggcctttaaaggttcatcaaatggacccaattttaatgtcggccgtccctcgcttctctaaattcccaactcttcttccgactcctttcatcggccacaaccttcgtctagatcagaatacgaaggatgggataaattgttttccttctcttagaaggcatggagtcccaagatgtgcagtggatattgccttacggaggtaatgctccaacttttcctcgaataagagtctgggatccgtataagcggctcggcattagtccttatgcttcagaggaagaaatttggtccgcacgcaattttctcttagaacaatatgccggacatgagagaagcgaagaatcaattgaagcagcattcgagaaactacttatggccagcttccagcatagaaagaaaa

SEQ ID NO: 24838 - DNA, 456 bp, Gossypium hirsutum
  Clone ID: LIB3147-027-Q1-K1-F7
cccacgcgtccggacagagattgccaaaccattacagcaactccaagaaagtgcaagaaaaatagcagagatacaacatgaatgcaaattggatgtaaacatcgacgaatatgtagaatcaactgtgagaccatttttgatggatgtgatttattgttggtcgaagggtgcaacttttgcagaggtaatacagatgaccgatatatttgagggtagcattattaggagtgctagaaggcttgatgagtttctgaaccagctccgcgctgccgcacaagctgttggagaagtcaatttggagagtaagttcgctgcagcaagtgaaagcctacgtcgaggtatcatgttcgccaactccctttatctgtaagatgtgtttttgccatggatatagacgtaaaagctgtgtgatctaatggtacattgacacccatagatttctccccttcatcttct

SEQ ID NO: 24839 - DNA, 368 bp, Gossypium hirsutum
  Clone ID: LIB3147-027-Q1-K1-F8
cccacgcgtccggagcaagttggtttaatatttgctgcgacacctgaccatggcaatgctgaggacatggtgaagaggaataagtccgggcaacctctttatgacaagagcggcaagctccaaagcctaactctccacacttgtcaggctgtgcctattgcaatcggaggtccaggatcggcagcaggcgttagattcaggaatgatgttccggatcgcggactcgcgaatgtggctgcacctgtcatgaacctgcatggttatgtagctccaaatgactatgagccaacactcattgaagtagtgaaccattatgcatatgatgccatcgctgaatgggctaaacgagtttataacactgatatatt

SEQ ID NO: 24840 - DNA, 477 bp, Gossypium hirsutum
  Clone ID: LIB3147-027-Q1-K1-F9
ctcttgtactgtttctgtcttcaatacgccttgaaagatctaatctttcaccttcgtctaaactcttcaaataaggcaaagaaaaaaaaaacacccaaaaagatgaaaatcgggttccttgtatttgtagctgttgcattgctagcattcttgtgtagcccgaatgccgtgtatggaattagattcgtaattgatagagaagaatgcttctctcacgatgttaagtatgaaggggatacaattcatgtgtcgtttgttgtcatcaaggctgattcaacttggcataatagtcatgagggtgttgatctggtggtgaagggacctaccggtgatcagattcaagactatcgagacaagataagtgagaaatttgagtttgttgctcatcagaaaggaatacaccgtttctgtttcagtaataaatctccttactatgaaacggttgactttgatgtacatgaaagtcattttacatac

SEQ ID NO: 24841 - DNA, 463 bp, Gossypium hirsutum
  unsure (1)..(463): unsure at all n locations; Clone ID: LIB3147-027-Q1-K1-G1
cacatttcttgtggaaccactttcccccccgaaggaaaatgaaatggagtcagggaaaaccaatcagcatgcagcttctcctgaagtggggttggataaaaaatctccaaagcaggactgcaatggaagtgtagatggaagtgtgagtgggagagctatggtgaaggaagaagtacaatgtgctgagaatagtgtcaagcaaagctgctaatgcagttgtgagagagagaaagagagaaaagcagttaggcctgcaaactccaatgagttaaaagcaaatgtaaagagcggcaacagtcgagacatttggcatttgatacgagtaggtgggagggggagcaaaggggagggaggaacttctcagttgtctctgcaatccttcatgtngncttttccatttcttttttgctgtcttagtatatgaacacactcacgctaggtggaaaactcattcttaatatac

SEQ ID NO: 24842 - DNA, 400 bp, Gossypium hirsutum
  unsure (1)..(400): unsure at all n locations; Clone ID: LIB3147-027-Q1-K1-G2
cccacgcgtncgcattttggtctcccaagtttaaccaaaggaaaccccgtttcacattcaaagcctttgatgcacacatactaaggtaacatcacgtctacctcttcattcatctcagaccaatccgattcgccactatgtcaatcaaaaccaaccatttccatcctctatttctatttctgaccataagcttcctaatcgccactgttgcataccccatcgacgctttggaatcaaggaagcttgacgagagcacagtaccaggtgatcaaggcatcaagtggtaccccatcatgcgtacaaagtcctncaccaccgtcgccgncttcaccaagcccttcaccaccaatcaccgccgctctttcgccacctacaccaaaaaaagtcgccattccaatac

SEQ ID NO: 24843 - DNA, 455 bp, Gossypium hirsutum
  unsure (1)..(455): unsure at all n locations; Clone ID: LIB3147-027-Q1-K1-G4
cccacgcgtncggctgtaccagcttttggaattggcatcaggtgggggccgtgtctaacgcatgggttttcgaaatcgtgatgaccttcggatgggtgtacacagtgtacgccacagccgttgatcccaaaaagggaagcttgggaacaatcgcaccattggcaattggtttcatcgtgggggccaacattttggcaggaggtgccttcgatggagcctcaatgaacccagctgtttcattcggaccagccttggttagctggacatgggacaaccactggatctactgggtcggaccccttaatcggtggtgggctcgctggtctcatctacgagttcatcttcatcagcaacacccacgagcagctcccaaccaccgattattaagcctaatcagggtttaattgatttgtctgtcactttgaaaccggattttctccgatcacatttgagtc

SEQ ID NO: 24844 - DNA, 453 bp, Gossypium hirsutum
  Clone ID: LIB3147-027-Q1-K1-G5
gcaggatacatgggaagaagttgatcctgattagctttcgtatgaggtaaactgggtagagtctactgcatttaactttctgcttaaacactctaagtatgattctatcatccaggaactccttgcacttggtgaagttgttggaactgagagcagagggctttcggctgattcacttgcctccttgccttccataaagtacaaggcaggaagcagtcagacaggaagcaatgattcgtgtggtcatatgccgtgtagactacgatgatggtgactccctgacagtgctttcttgcaagcattcatatcatcccgagtgcataaataattggttgaaaataaacaaggtctgccctgtttgtagtgttgaagtctcaacctcgggtcagagctagtactttgggaatactcctccatcgagccacaaggtagcagcgtcttgttttaatacac

SEQ ID NO: 24845 - DNA, 235 bp, Gossypium hirsutum
  Clone ID: LIB3147-027-Q1-K1-G7
agaaaaataatgaatatggtgccaggatatcaatttctcagcagacactactacaatgcgtaataaaaaacatgactgccatctaatttttcattcccgtagtcaataaagaacctatgtaacacgaagaatgtcaatgagaccataaatcgtgttaaacgtaacttgtgaatgcacccttcaaagatataaaaataaaaaagcatttctagtgcacactcccatgagttcaaag

SEQ ID NO: 24846 - DNA, 259 bp, Gossypium hirsutum
  unsure (1)..(259): unsure at all n locations; Clone ID: LIB3147-027-Q1-K1-H1
cgtnnncgcccacgccgtntcgnnccacgcggtncggggggaatggaaggtcttaccaccattattgtttcaaaacccgagaaatgtgattgtgaatcgaccactgaggagcatctgaattagctatgatggatgattttgtgtcttctggtgtttggttttgtatgtaacccgaatttgagcatgaacttaaaagtttgtgttggcacttgttatcagtttctcatttgttatattatcatcttttattcaaatttca

SEQ ID NO: 24847 - DNA, 209 bp, Gossypium hirsutum
  unsure (1)..(209): unsure at all n locations; Clone ID: LIB3147-027-Q1-K1-H10
ccgacccacgcgtncggcgttgccttgacataagtgagcttataagtttctaagattngctctggtgctggctgaagattgtgattatgttgtttgcatcattaccacttactatacatgaaccccataactcttgctgtcggtagcatgttgttctttatacgtgatattcgtgataggttataaatatttataatgaatcgctcttg

SEQ ID NO: 24848 - DNA, 487 bp, Gossypium hirsutum
  Clone ID: LIB3147-027-Q1-K1-H11
gacccacgcatacgagaaaatctgtacttttccgtcattaggttttagttggggtcgttttatgatttcaccattgttgttgtattttcaattgatttagcgttttttcctttaatcttcaaaaaaaaaaaaaaaaaaaaaaaaaaaaaaaaaaaaaaaaaaaaaaaaaaaaagaaagggcggccaattaaaaaaaaactaaactaactaacccatacatgcaaaaaaataactataaataattgagaaaaaaaaatggggtgccctgtttaaagaaataaaatttactggactgggaaaaccctgtcatactttattttaatggcctaaaaatacaatccccttgcccgggttttaaaaataagagaaaaggaaaaacacccgggcgtccaaaaaaaaaatatgctcaaaaaaaaaaatccattttggaccctctctttaaaaaaaaaaaaaaccccccccttttttctatttaaaaaaatgggcg

SEQ ID NO: 24849 - DNA, 106 bp, Gossypium hirsutum
  unsure (1)..(106): unsure at all n locations; Clone ID: LIB3147-027-Q1-K1-H2
accatatngggatgaaactccacagtccagagggggctttttcagcttcatatgaaggatacggagctcgtctggctggtgctaataagggtccttttcatggtcc

SEQ ID NO: 24850 - DNA, 353 bp, Gossypium hirsutum
  Clone ID: LIB3147-027-Q1-K1-H3
gtccgaaaccaccaccttcacctatcccggtcagcatggtcgtgcaactccttgaacgagtccattatgccttgaattaataataacaacatgctatttgagacagcgttgatgaaggagagatcaatgacagtaacaaatatggcttgtcttcatagttctgattcgagatatcaagggaacatcaaaagtggcagtgtgagggctgggtacaagaagctgacaaccaccggctgcaatcttgcacattttggttttatagtttattacagaaaccggaggttgggtaaaaacagctgcaggcacaaggaataaagagctgtagtaaatgggtaaagttggtgctatgtttt

SEQ ID NO: 24851 - DNA, 451 bp, Gossypium hirsutum
  Clone ID: LIB3147-027-Q1-K1-H4
cccacgcgtccgggagcatttgccaggggttcctaagaagaagctggaagatgagaagcaaaaagggtccataaagttgctgccattaacttcccccggccactcaccaacttcaaaaggaacaattttggaaaagattttagcccggaaaaaagcatcaatgccagccggaaggatacatttttcgcggcgatggtggaatgttgcaaagatgataatgatgaagaatcacgaagcaatttatggagtggagttaaagtaacaaggagtatcagtgacaggttgggatttattaatctctactcttcttgtaaaagaacctgtgctgtctcggaatcagtagtgtatctgccaaggtctagcagagcagctaattacagcatacttactactcgtcgctcaacttaaacagatccagtgatcacattctgctgctcttaatttctctttc

SEQ ID NO: 24852 - DNA, 264 bp, Gossypium hirsutum
  Clone ID: LIB3147-027-Q1-K1-H5
caggcgttcgacaaaatttcttcttttccgggattgtatatttaaaattaacctaatggaatctgccttagatttattttgaatgcctgtactttatataaaggcaaattttatccactaacctatcttactgcctatgaattatgtattatgcttgcgatctcaagtactgtattcggatacaattataatagtatttatatttgggagttaagatgataatgatgaagaatcaggaagcaatttatggagtggagttaaagt

SEQ ID NO: 24853 - DNA, 389 bp, Gossypium hirsutum
  Clone ID: LIB3147-027-Q1-K1-H7
cccacgcgtccgctctcttcttttttccttttttgaatggtgttgttgcagacatgggcgttgaactcatgatgagttgcaggaacggtgacagcttcgcagccaaaatggaagaaaacgccgtcaaagaagccgcgtccgggctcgaaagtgttgagaaactcatcagattactttctcaactcaacagcagcagcaaagtaacagtaataatcaagagaaataccaggcttcctctatctcaacaacatctaattccctggatttggaaatggactgcaaagctgaggctgatgccgccgtttcaaggttcaagagagttatctctcttctggatcgaaccaggaccggacatgctcgtttcagacgagcccttgttcaacccaatc

SEQ ID NO: 24854 - DNA, 280 bp, Gossypium hirsutum
  Clone ID: LIB3147-027-Q1-K1-H8
agggccgacccacgcgtacgaggacgcgtccgtccactcgtactttgactttttcgcccacggcgtacgcagagggtggcgggtattgacttgagctatcaaaaaggtgcaaagatcgttggcctgtttcttatgtctcgtgatggtgataagctaccagcggggcgtgcaatcgactgaggcaaggcgtggtcagtcactcagggataagcttcagggaggatgcgtgagtagccacaactggcccatggtgctcaatgacaaaggtacctcccgcggc

SEQ ID NO: 24855 - DNA, 379 bp, Gossypium hirsutum
  Clone ID: LIB3147-027-Q1-K1-H9
cccacgcgtccgaattggtaaccatttagggttttaggcattgtcaagcttgatgccgatttcaagatgcctgaacccaagcccgatcaccgcaaaggaatggccttgaactgtgaagaagctccgttggacaccgacatcaagaatgccggcaacgtcgtgctcttgaacactaaaaacctccctttggtcggccaggtgggtatgggggccgatctcgtcaggctggaaggtaatgcaatgtgctcccctggcttttcttgggaattcagccttgcaggttacgtacatagtcaacggcagtggtcgtctccaagtggtgggcgtcgacggcaaaagggtcctggaaaccattgtgaaagccggcaatctgttgatt

SEQ ID NO: 24856 - DNA, 336 bp, Gossypium hirsutum
  unsure (1)..(336): unsure at all n locations; Clone ID: LIB3147-028-Q1-K1-A1
cggacgcgtgggcaagctcaagttcatcgacacctcatcaaaatttgggcatggacgtttgcagactacacaagaaaacaggaattctatggtcggctcaaggcataaatcttgcaaattgtcaggaatttccgtctatcgtatggttaggttttggtattctctgagnctttagtttatgttgattctctattatgttttgaaatgcattggttggattaattttgttttatcaactctntttgaatgtgtggataactggggttttgcaccagttagaaaaccaattatacccaatgttttactttttaacagagttttccttttgatttgatt

SEQ ID NO: 24857 - DNA, 368 bp, Gossypium hirsutum
  Clone ID: LIB3147-028-Q1-K1-A12
tcgcccacgcgtccgcttgctggattcctcatctccctaacccaagtttccagcaccactcagcgtgtgctccctttatcactcaatttcatcatctgcgcattgtttggggtcacttttcgctatgcaattaggagggacttggacaattttcagctcaagaccggcacatatgcagctttcggttttgtgaaaggccttgctacattgggaggagggacttcctctggaactgcatcctgtaagctatttgtctcatgctgttgatggtgcagtttatgtatcccacaatcatcttcgcttttttatttgctgctgatgccttggatttttgcattaagatgaggattttaagttctttttctatg

SEQ ID NO: 24858 - DNA, 128 bp, Gossypium hirsutum
  unsure (1)..(128): unsure at all n locations; Clone ID: LIB3147-028-Q1-K1-A2
gcccattttttatatataaaacttaatttcccctgagattttcttgttagtttggattattacagaggataatcagttctgtgattaattatatanatttatgcaatcagcatattctgttttgaacc

SEQ ID NO: 24859 - DNA, 490 bp, Gossypium hirsutum
  unsure (1)..(490): unsure at all n locations; Clone ID: LIB3147-028-Q1-K1-A3
cccacgcgtccgaaaaaatccaaccttggaaatgaatggaagaagccatttgctggttctggccatgccaaaggcattgtccttgaaaagataggtattgaagctaagcagccgaactctgctattaggaagtgtgctagagttcaattgatcaagaatgggaagaagattgcggcattcgtcccaaatgatggttgcttaaactacattgaagagaatgatgaggtgttgattgccggatttggacgaaagggtcatgctgtgggtgatattcctggtgttaggttcaaggttgtgaaggtatcgggtgtttcactgttggcactcttcaaagagaagaaagagaagcctagatcataaattttgagagaggtctctcatcgtgttctgttagttctatttataacaaactatagagatttttattgctatgtagctatttggtcaaccttgtcactntatcttaatattttgtgcttttgtactgatg

SEQ ID NO: 24860 - DNA, 467 bp, Gossypium hirsutum
  unsure (1)..(467): unsure at all n locations; Clone ID: LIB3147-028-Q1-K1-A4
ggggtatctccagcactatggtgtcgacattggtcgcaagaaaaaaacagcagccaagaaagaaggagaggaaggtgaaactggcactgangaggtgaagaagagcaaccatgtcttgaggaagatggagaaacgtcaacagaatcgcaagctagatccacatatcgaggatcaattcgcaagtggtcgtttgttggcttgtatctcttcaaggcctggtcagtgtggccgtgctgatgggtatatcttggaaggcaaagagctggaattctacatgaagaagatccagagaaagaaggggaagggagctgcctaaaaattttgttatgtgagcttttatatatcatgatagaatctcctctttgctacttnttatctttttacaggacattcaagatngtattagtttttgaactttttagtttgaatgtcaactagtgnggttgtgtgtaatggtgaacaatata

SEQ ID NO: 24861 - DNA, 325 bp, Gossypium hirsutum
  Clone ID: LIB3147-028-Q1-K1-A7
gggcgggccacgcgtccgcccacgcgtccgcccacgcgtccggaagagttcatgatcctcttcattgatggaaaagctcgcctatatgtttcttagatcgtacattatatagtccccattcagtccttgtataactatgaccctcatatgttcagattcatctgtgtatgctttcataagatagggaaaaaaatctcaatactttttcttcctgtaattgagaaaacctatgatgtggccatgaaaattgaaaatggaacacaattacagttttttgtctaaaaaaatagatgattattttgcctgttataaacattaaaatata

SEQ ID NO: 24862 - DNA, 121 bp, Gossypium hirsutum
  Clone ID: LIB3147-028-Q1-K1-B2
aaaatctgccaatggacttattggtcagctaataaaaatgagttttttgtttgtcttctctattgtagtatcaaacttcaaaacatgttttaatggatctttgcttaattgctttattttc

SEQ ID NO: 24863 - DNA, 420 bp, Gossypium hirsutum
  Clone ID: LIB3147-028-Q1-K1-B4
aaaatccctaatttcccccgctgctactgctagggtttctttctcttctctctcgcaactcagcaggtttctttggagaaaaaaagaaatgtctcgagtttacgtgggtaaccttgacccacgagtttcggagcgagatcttgaagacgagtttcgtgtctttggagttattcgaagtgtgtgggttgctagaaggccaccaggttacgctttcattgactttgatgatcacagagacgccgaggatgcaattcgtgaattagatggcaagaatggctggagagttgagctttctcataattctaaaggcagaggaagacgtggaggcggaggctgaagtggatgtgggtcgggacggtcgggtggttctgaattgaagggctactaatgtggtgagggttggtattttgctcgagaatg

SEQ ID NO: 24864 - DNA, 159 bp, Gossypium hirsutum
  Clone ID: LIB3147-028-Q1-K1-B6
atgttgacggagtttggcaaaaaaaaaaaaaaaattttaaaaaaaaaaaaaaaaaaaatgtcgggggatttaaaaaatccaagcttccaaactcttacattctacataataaacttttctataggggcccctccattttaaataacccaccctttcttt

SEQ ID NO: 24865 - DNA, 71 bp, Gossypium hirsutum
  Clone ID: LIB3147-028-Q1-K1-C1
taatttggctagtatttcttgtataaaatgtcgaaaaccttgtggtgtatatgcatctggcgcttggactg

SEQ ID NO: 24866 - DNA, 459 bp, Gossypium hirsutum
  unsure (1)..(459): unsure at all n locations; Clone ID: LIB3147-028-Q1-K1-C11
cccacgcgtccgccagagttcaccgtgccacaatgttattatgctaagcaaccacctgcttggcatcaaggctatttctcgaagtttacagtggatgcgttgttctatatattttacagcatgccaaaagacgaagcccaattatatgctgcaaatgaactttataatagaggctggttttaccacaaggagttccgattctggttcatgagggtccccaatgtggagccactagttaagacaaacacatacgagagaggttcataccactattttgatcccaactcatttgaaataatccgcaaggataattttgttgtccattacgagttgttggaaaagagaccgtcgctacctcaacattaatattcttccccctcatttacacttgtaagcacaagcatgtaattcattccttataacatcagttngccagcgttggtgtttttgcaaatttaa

SEQ ID NO: 24867 - DNA, 311 bp, Gossypium hirsutum
  unsure (1)..(311): unsure at all n locations; Clone ID: LIB3147-028-Q1-K1-C12
gttgtttatgccttgaaaaggcaaggcaggactctctatggttttggaggttaagcttaggacactattgtattttaggcattgcagtattatgcttattatggtagaatcatggatcttggctatagatccactgcgttaatgtaattgcttcagttcgttgctgatgttactgtgattcttaatatttgaaatgctctcaaaggatttgtatcananaaaaaaaaaaaaaaaaaaaaaaaaaaaaaaataataaaattaaaaaataaataaaaataaataaaaaaaaaaaaaataaataaatttataag

SEQ ID NO: 24868 - DNA, 493 bp, Gossypium hirsutum
  Clone ID: LIB3147-028-Q1-K1-C6
ggagaatgctgcaaatgaagccgaggagaccgagcctgaaaataacgagatgacattggacggggatgataagattctcgaggagaagacgaaagctttcgatgccctcaagactgaacgaaggaaagttgatgtcaaccagttcgagtccatgcaacaactttcgaacaagaagagcaatgatgacatctgtatcaaactgggatctgaaaaggacaagcgcaaggatgctgataaagaagaaaaagccaaaaagtctgtgagcatcaatgagttcctgaagccagctgaaggggagaagtactatggacctgggcgtggacgaggccgtggccgtggtcccagaggtggatatggaggcaacacagccagcaatgtgcaagctccctcaattgcagatcctggacacttcccctcattgggtggcaagtgatgtcccccaccacattctcccgaatgggtttcacttggaatccattggggtttattctat

SEQ ID NO: 24869 - DNA, 76 bp, Gossypium hirsutum
  Clone ID: LIB3147-028-Q1-K1-D1
cggacgcgagggcggacgcgtgggcggacgcgtgggcggacgcgtgggcggacgcgtgggcggggaaacaactggg

SEQ ID NO: 24870 - DNA, 416 bp, Gossypium hirsutum
  Clone ID: LIB3147-028-Q1-K1-D10
cggacgcgtgggctcgatttctctctctccccatttccgagaaaatagtacaaagaaaagagaatggccgatcagcttaccgacgaacagatctctgagttcaaggaggcctttagcctcttcgacaaggatggcgatgggtgcattactaccaaggagctgggaaccgtgatgcgatcacttgggcagaacccaactgaggcagaacttcaagatatgataaacgaagttgacgccgatggaaatgggaccattgatttcccggaattccttaacctgatggcaagaaagatgaaagataccgactcagaagaggaacttaaagaagcattcaaggtgttcgacaaggaccagaatggtttcatatctgctgccgagctccgtcatgtcatgacaaattttggtgaaaagcctac

SEQ ID NO: 24871 - DNA, 394 bp, Gossypium hirsutum
  unsure (1)..(394): unsure at all n locations; Clone ID: LIB3147-028-Q1-K1-D11
gttactaccaaacatctaagattatgccagccggaattgttgccgggatcagttttcttatgactgggttttacttgtacaaattagctaccggtggcaaccatattccagccaaggccgaatgacgatgttgagcatgttgacttttaccaattttaacagatctgacaagatcattgaagctcagatggttgtagtagaaaacttttaagtgtatcacgtatgctgtactctaccctgatttgtgtatgaaaagggaaaaagacaaaaagttgtgttatttgtgaaagaaaccctggtttgtgatcaaaattgtgtttgtgtctatgcnaatttctcatattgaagattaaatttctttttgttcttggaatgacttaaattcccttgagag

SEQ ID NO: 24872 - DNA, 108 bp, Gossypium hirsutum
  Clone ID: LIB3147-028-Q1-K1-D2
aacaaaaaaaaaaaaaaaaaaaaaaaaaaaaaaaaaaaaaaaaaaaacgggcggccggggaaaaggaaccaagcggacggaccccaccaagcaacaccaaaccccgcc

SEQ ID NO: 24873 - DNA, 283 bp, Gossypium hirsutum
  unsure (1)..(283): unsure at all n locations; Clone ID: LIB3147-028-Q1-K1-D5
tgataattaacgacgtgatgcatttgagatgagaaggatgtgttttctttcttgtacctacctgtgcttttcagaatctttgtggtcctggtaaaatggatggccatggagaaactccacgctgagttagttgaacagtttagtagcgtttgcattacatcagagttagaagataccttacatccgaggactggcccggtcctgaatccaaagggaaaccatggtacggtctgcttatgttgtngagaaaatatcctgaacactttgacattaacacaagatc

SEQ ID NO: 24874 - DNA, 458 bp, Gossypium hirsutum
  Clone ID: LIB3147-028-Q1-K1-D7
cccacgcgtccggaaaaacattgtataattttctttgttagttttcagagatggcgaaagggtgcttctctaaagatattttgatcatgtttatggctgttgtactctccgtcgccaccattgtatcagctcaggacagtgcaatggcgcctgcaccgtcaatggacactggatctgccttctcaatgccggttactggtgttaccgttactttgtctcttattatttcccttcttgctcttttgaagtcagtgagttacataatttgagtggttggttgtgtattgtattgtaatatatgggatttatttctattatattattatcattatattttttttgtatcaataatttcttaatttgaattaataattataataaggttttggaattttctgcatatggtatctctaggtttacaggttgctgcgccctggtaaacccttttaatgcctctt

SEQ ID NO: 24875 - DNA, 475 bp, Gossypium hirsutum
  Clone ID: LIB3147-028-Q1-K1-D8
cccacgcgtccgcccacgcgtccgaaaagcagtacggaaagctcttgaaggacttcaacaaaggtttggagaacaacaaggagatcgaaaagctgaaggccgatgtcgaaaagtttgcatcctcatttgacatgccgggtttcaagatgtccgaaatgaagtacaagaattagatcttatagatatttatggttttattcatgcttattgctgttattatcggcatatgtgtcatctggaaatttgcctctgctgatttccaaggagttgatgttagaaaaaaaaaatggaaaagaaaatgaagtaaaggcttccatctatggtatgtttttttaaagttttttaagcccattacttgtgagagcttccataaaaaccatgtaacaattttatatattgtttttgttgctggaaagtttagggttttaattaccaataaacgagatattggggtttaaaaaaaataaattctatt

SEQ ID NO: 24876 - DNA, 284 bp, Gossypium hirsutum
  Clone ID: LIB3147-028-Q1-K1-E1
ccgatccggtcgccacgctcgacactggagatgctgaaggcaacccgtaggatccgaccgtatctacgagggctccgatgagcctttggtctatcaaaggtaacgtcaggagtcatcattcgtctcgactgcgttaacgactccttggcagcgccatcgtcacacgaaagttagggcatgcttacacaaatggcttggcctggattaggagatatatccactcgaggttttctcttctaccaatttagagaatataaaaatttgggagcttgggaatgcacaag

SEQ ID NO: 24877 - DNA, 471 bp, Gossypium hirsutum
  Clone ID: LIB3147-028-Q1-K1-E10
ttctccttcactcccctcttatctatatatctccttttcttcttcttcttcctctcctcacgaaggaaatcacaatttagcttctaactttgcctctttttttttcttttcatctgcaaatctggtcctttttttctgatgctggagagtttgggtattagatttaaattagtttgaagggctttcgagttctgggttttccattttggggtaacacccaggttagtcaaattgtggacatcacggctatacacagagtttaccggcctcttcttattcatgcccgatctgtacgacgtaagagttgtgtgatcgagaggaaccctgcgccgcacggcgggcgtggagctttgccttctgaaggcggtagtccttccgatctcctcttccttgctggcggcggtgttgtcttttagagtttcagtagttggtataggtagcttttagtatacaaaaaaaaaataaaaaggg

SEQ ID NO: 24878 - DNA, 367 bp, Gossypium hirsutum
  Clone ID: LIB3147-028-Q1-K1-E11
cccacgcgtccgcgttaattcaatttaaataatttaattttatttaatttttcaagtgaaggaagttgtgctcaccgttcactactttaaaaaaaagtgtgaattggaacagattgatcaaggtcaactgggagaagatttagttaatccttttttggaatgtaaggggttttaacaatcccctcaaatacattagggttatgaatagaatgaaggagttgagagttgatatagtttgtttgattgaaactagagtgaatgaaaataatgtgacaactattggaaaagtggtttcagggttggaggggcattaacaactacaatgatgctgagatgtataggaggaagatgagcaaagatcttgagc

SEQ ID NO: 24879 - DNA, 403 bp, Gossypium hirsutum
  unsure (1)..(403): unsure at all n locations; Clone ID: LIB3147-028-Q1-K1-E12
cccacgcgtccgctccattggaatcttatgccgatataggaggtttggatgctcaaatacaggagattaaagaggcagttgagctccctctgactcatcctgaactgtatgaagacatcggtatcaaacctccaaaaggagttatcttgtatggagaacctggcactggcaagaccttgcttgcaaaggcggtggctaattctacatcagcaactttcttacgtgttgttggcagtgaattgattcagaagtacttgggagatggtcccaagttagttagggaactcttcanagttgctgatgacctttccccttcaatcgtcttcattgatgaaattgatgcagttggtactaagaggtatgatgcccattctggtgtgaacgtgaaattcagaggaccatg

SEQ ID NO: 24880 - DNA, 140 bp, Gossypium hirsutum
  Clone ID: LIB3147-028-Q1-K1-E2
ttttgtcatcttcatgaagatgcttctaatcacccctactaccagtgtatgcactgttccagagacagtgcaagagtgaatcgcttaatactcatggctgatgcatatttgttagatggatcctatttgtggttataatg

SEQ ID NO: 24881 - DNA, 438 bp, Gossypium hirsutum
  Clone ID: LIB3147-028-Q1-K1-E5
gttcagatgagaagctcctgtcagtcttccgtgaaggagtgaagtacggtgctggaattgggggcggtgtctatgacaggcactctcccagaataccatcaaccgaagagattgctgacagaattaacaagatgcttgccgtgctcgagaccaacatcttgtgggttaaccctgactgtgggctcaagactcgcatgttcgctgaggtgaaaccagccctgagcaacatggttgctgctgtcaagctgttccccacccaactcgccagctccaagtgataggctccccagatattggatatccgaatcccataccattccatagagattaaaaagaaaattggcataaaaagttctcctatcctaatatttgaataactcttgttgtgagaaatatttgtacatccccttggcgtcctttgattttcctattttgggt

SEQ ID NO: 24882 - DNA, 449 bp, Gossypium hirsutum
  unsure (1)..(449): unsure at all n locations; Clone ID: LIB3147-028-Q1-K1-E6
cgattacaataactcctaacttcccggttgacactgggaatgggttatccgctggagctattgctggtattgtgatcggttcatgtgtgattctcatcttgctcttgatcatcctccgactgatgggttacttggggggcaaacacgatgaatacagtgaacttcatggtctagaacttcagactggctatttcagtttaagacaaataaaggctgcaacaaataattttgattctgcaaataagatcggcgaaggaggatttggaccagtttacaagggtatactgccagatggtagagtagttgcagtcaagcaactatcttctaagtcaaagcagggaaatcgtgaatttgtgactgagatanggatgatttctggattgcaacaccctaatcttgtgaagctttatggctgttgtattgaaggaaataattgttgctaatttatg

SEQ ID NO: 24883 - DNA, 449 bp, Gossypium hirsutum
  Clone ID: LIB3147-028-Q1-K1-E7
aaagcgaatgcaaggtcctctccataagcggcatgggtggtctggggaagaccactctggccaagaaaatatataggcaaagccatgttgttggtcatttcaagcactaggcttgggcatacgtttctcaaaactgtcataaaagaaaagtatgggaagacattttatctgattttaacctcttaagtgaagttgacaagaagatgaacgttgaaaaattagcatagaagttatctaatttcttggaggaaaataagtgtttggtggtactcgatgatttttggaacaccgagtcttgggatagcttaaaaccagcattttcagcatgggatacgagaagcaagacattactcacctttttgaacacatagatattttcacatgctgacagtcaaggtttcctatatgagtcgcagtatctaaactaccatccaaactgggaactattt

SEQ ID NO: 24884 - DNA, 494 bp, Gossypium hirsutum
  Clone ID: LIB3147-028-Q1-K1-E8
agaaactgtgcaagtggctagttcaactcctgatggctcttgactatttgcatgtgaatcagattcttcatcgtgatgtcaagtgttcaaacatcttcttgacaaaagaccaagacattcgtctcggtgattttggactcgctaaaattttgacttccgatgatctcacatcctctgttgttgggactccgagctatatgtgtcctgagcttctggctgacataccctatggttctaagtcagatatctggtcattaggatgctgtatatatgaaatgacttctctcaagcctgcatttaaagcgtttgatatgttggcactgataaacaagatcaataaatcaatagttgctccacttccaacgaaatattctggggcctttcgtggtcttgttaaaagcatgccgcacaagaattctgaactcatgccaagtgctgatgaactgctcagacacccggaccttcagccatatgttcttaaggctcaaaataaa

SEQ ID NO: 24885 - DNA, 339 bp, Gossypium hirsutum
  Clone ID: LIB3147-028-Q1-K1-E9
ttcttgttcaagtggtgggatcatgtcgaaaaagggacccttaaggaagtaagtgacatgggaaccattcataagctgtgatttaagattttagaagcaaaaaggacatgaaacaaagtttgtcaatgggtacttccagaaagaaaaaaaaaaaaggttttaattccaataaattgcaggtttgaaatagttcttagacatgctggatgcttgcttttgagaatccaactatgccaaatgcctcaaatgttgaaaaatcaaatgttcttactgtctcgcctgcttaattttttttgcttatgttctttaaataattaaattggacctttgttcggaatt

SEQ ID NO: 24886 - DNA, 497 bp, Gossypium hirsutum
  unsure (1)..(497): unsure at all n locations; Clone ID: LIB3147-028-Q1-K1-F10
cccacgcgtccggctatttcaaccattgtagcccagtcaaaggagaaacagcgcaaatttactgagaccattgaactccagattggtctgaaaaactatgatccccaaaaagacaagcgtttcagtgggtctgtgaagcttccacatattcctcgccccaaaatgaagatttgcatgcttggagatgctcaacatgttgaagaggcagagaagataggtttggattatatggatgtggaagcattgaagaaactaaacaagaataagaagttggtgaagaagcttgccaagaagtatcatgcctttttggcttctgaatctgtcatcaagcaaatccctcgtcttttgggtcctggtctcaacaaagcaggtaaattcccaacccttgtcacttcaccaagaatcactagaagtcgaggtgaatgagacanaggcaatggttaagttccaacttgaaaaggttctatgcatgggagttgctgtgggaaatgtgcaat

SEQ ID NO: 24887 - DNA, 486 bp, Gossypium hirsutum
  Clone ID: LIB3147-028-Q1-K1-F11
taatctcttaaacctgttgatctttgcaaaaaaaaaaaaaaacaaaaacaaatggcaggtgcaaggggggaaatgatcaacggtgggaattattcgccgagaattgctggacgtccgatcccaaggaggggtcaagtgaaaattgctatcttaatggggattgcccattcttttgcttctattttctctgcaagtagtcgcaggcaatctgcatctcacttgtcctaggttgtttaatttctcccaaaaagtaagagaactgggagggtaaacgttttccgtcctagggaagatgtgagttgttttttttgccatgttcatatcaagtttggtcagagcttgtattatttgtttttcagattaatgaatttccagttcctttttttcttacagtttcagtgatttttttgttgaatttcatcctctaagaccttgaacttgaaaaaagggatttttaagtttaaaaaggtaaaataatttcattct

SEQ ID NO: 24888 - DNA, 366 bp, Gossypium hirsutum
  Clone ID: LIB3147-028-Q1-K1-F12
gtgatgtcggaaagggttgtgctgctgccttgaatcaagccggtgctcgtgtcattgggactgagattgatcccatctgtgcccttcatgctctcatggaaggacttcaggttttgaccctagaagatgtttcctccgaggctgatatcttcgtcaccacaaccggtaacaaggacattatcatggttgatcacatgaggaagatgaataacaatgcctttgtttgcaacattggtcactttgacaattaaatcgatatgctctgtcttgagacctatcctggtgtttaaccgcatcatctttaagtctgatatctgattggttgggtctttcttgaaacctaaactcgcattcattttttggctt

SEQ ID NO: 24889 - DNA, 418 bp, Gossypium hirsutum
  Clone ID: LIB3147-028-Q1-K1-F5
tttatctttttatcttttctttcttttttttctcctcgttttatttttttggggggttaccattgaactgcagagtggtctgaaaaactatgatccccaaaaagacaagcgtttcagtgggtctgtgaagcttccacatattcctcgccccaaaatgaagatttgcatgcttggagatgctcaacatgttgaagaggcagagaagataggtttggattatatggatgtggaagcattgaagaaactaaacaagaataagaagttggtgaagaagcttgccaagaagtatcattgcctttttggcttctgaatctgtcatcaagcaaatccctcgtcttttgggtcctggtctcaacaaagcatgtaaattcccaacccttgtcactcaccaggaatcactaaagtcgaaggtgaatga

SEQ ID NO: 24890 - DNA, 487 bp, Gossypium hirsutum
  Clone ID: LIB3147-028-Q1-K1-F8
ctctccaagaataccatcgaccgaagagatcgccgataggatcaacaagatgcttgcggtgctcgagaccaacatggggtgggttaaccctgactgtggactcaagactcgcaagtatgcagaggtgaaaccggcactcaacaacatggttgctgccgctaagttgctccgaacccaacttgctagtgccaagtgaaagagggctttatgaaagaatggaaatgtccatgaatgattaagaaaaatctctcaattgtgtcaattacttagttttcttgatgaaatatttgttagcaaataatatggccttcaaggccaattgattttctcaaagtacttcgtatccaaatacatgaaaaaaggtacaaaaattcaattatcctcattaaatacatatctgtatctgatattttagacatcatgattttattggaaaaatgcctatgattcaattagattaggaataaataaaaataaaaaagggcgg

SEQ ID NO: 24891 - DNA, 205 bp, Gossypium hirsutum
  Clone ID: LIB3147-028-Q1-K1-F9
tccacgcgtccgaaccctaccttaccaatcaggattcaacatgaagggaggttaatccaggggggatactaacggctcgaggctcgccgtgaacaagatatctatcgcctaatctggaaagatatcggcgaaggcgtttaacgatccaaacaagccaaagaggcctgttagtgccttattttttttcatggaggagttccgtgag

SEQ ID NO: 24892 - DNA, 305 bp, Gossypium hirsutum
  Clone ID: LIB3147-028-Q1-K1-G10
ttgccgttgagtcgtacgtcgttgatgtaccgtcgggtaatactaaagaagatacatgcacgtttgttgatatgattgtaagttgtaaccttcgatctttggctcaaatggccgcaaattcggctaaaaaagaaaaatattcatcatccccataatcattcaacaaaaagaaaacatatttctcttagtttcaacatataatcatacatacagacatacatacatacatacatatatatgaagaaattttggcttggatgatgacaattaatttttatttcatttccctatgcaattattgagta

SEQ ID NO: 24893 - DNA, 481 bp, Gossypium hirsutum
  Clone ID: LIB3147-028-Q1-K1-G12
cccacgcgtccgagctaacataacctcattgatagaaaagcttagtaaaatccccgggatggacaaaaaatggagctcactttccctgtaatcgacttctccaaactcaatggtgaggagagagcagccgccatggaaatgatcaaagatgcctgtgagaattggggtttctttgagttggtgaaccatggaatatctcatgagctgatggacactgtggagaggctgacaaaggagcactacagaaagtgcatggagcaaaggttcaaagaaatggtggccagtaagggtcttgaggctgttcaatctgagatcaatgacatggattgtgaaagcaccttctttttgcgccacttgcctgaatctaacattgtctgaaattcctgatctcgaagaagattacagaaaggtgatgaacgaatttgcagtggagttggagaagcttgcagagcaacttttggatctgttgtgtgagaatctg

SEQ ID NO: 24894 - DNA, 114 bp, Gossypium hirsutum
  Clone ID: LIB3147-028-Q1-K1-G4
cccgggtcggcccgcccgtccgcaaaaaaaaaataaaaaaaaaaaacaatactcaatatatttaaaaaaaaaaataaaaatagggggggtaattaaaaagtgaggagctacaag

SEQ ID NO: 24895 - DNA, 477 bp, Gossypium hirsutum
  Clone ID: LIB3147-028-Q1-K1-G7
tgatggaggaactgttaccttataggatcatggacacggtggtaactctcaggatactggggaggaagttgatcccgatgagctttcatacgaggaactccttgcactcgctgaagtagttggaaccgagagcaggggcctttcagctgattcaattgccttcttgccttcactgatattcaaggcaggaaatagtcaaactggaaccaatgattcgtgcgtcatttgccgtgtagactacgaggatggtgactccttaacagcactttcttgcaaacattcatatcatcccgagtgcataaacaattggttgaaaataaacaaggtctgccctgtttgtaaagccgaggtcttgatctaatggcaacttgactgcttggttttaatatgcaaaatgtgtcttctcttttggatgggaaagaaaataatttggtatcagttttcttaagtacttttggtgtgaaccaactttggaat

SEQ ID NO: 24896 - DNA, 390 bp, Gossypium hirsutum
  Clone ID: LIB3147-028-Q1-K1-H1
ctcaagcgctccggcaagattgagcttcctccatggaccgatattgacaagggtggtaaattggaggagctttcaccgtattgaccctgattggtactatataagagctgcttccatggcaaggaaaatctacttgaggggaggtcttggtgttggtgccttcaggaggatatatggaggagccatgaggaacggtagccacccacgccatttctgcaagagcagcgggtctattgctcgtcatattctccagcaattgcagaatgtgtacattgtcgattttgatactaaacgtgggaggaaaatcacattgaaaggccaacgggatctcgaacaagttgttggaaggatttgaatttgccctttgagaaatttcattatatggatttg

SEQ ID NO: 24897 - DNA, 300 bp, Gossypium hirsutum
  Clone ID: LIB3147-028-Q1-K1-H2
cttcggtgcactttctgaacttgtggttgctttttcacgcgagggacctaccaaggaatatgtgcgagataaaatgatggacaaggccttggacatctggaacatgatttctgaaggatgttacctatatgtgtgtggcgatgccaagggcatggctaaagacgtgcatttaaccctactcactattttgcatgagcagggttgtctatacagctcatatggctgtaagcatggtgaaaaatctgattcgaccggcaggtatctgcttgatgtatggttactgactacaccatgaatatg

SEQ ID NO: 24898 - DNA, 374 bp, Gossypium hirsutum
  Clone ID: LIB3147-028-Q1-K1-H3
gggaaaacaagccatgcccatgattctctcaactcctcgtcaggctgaaccatcgcgtcttgggggaggccagggcaggaagggggtgcactcaaaggaagaaaactgcaactttctgctcgaggcacagatgaaaagacaacggggccagtctgcagagtggacgggtattgcataggaaggaaaacttgagccggaggcgtctgagggttggtttaggaacatcaggctggggtccaaccttggcttctgccgggaagaccaagagaaagaacccgtaggatgaaaaacgctggctagaacagaataaacggagacagaaagagaacaaacgctcccgaagacgtcgccaaatttcaataaaacaaggcttt

SEQ ID NO: 24899 - DNA, 245 bp, Gossypium hirsutum
  unsure (1)..(245): unsure at all n locations; Clone ID: LIB3147-028-Q1-K1-H4
ngcagagtactgactcgtcaggagatgcaatgatggatcacccggcagttgataacgatgggggcgacaaaaataagatcatcggttgcatgtacctcatggcagcagtcctagttctatcaagcagtggtgtattgcatgcggcaactttgggtgattttccggctccgatgtccttatgtgcaataacattcgttatgtggactgggtataacttcatatagtgcagttgctcaaaaatcatt

SEQ ID NO: 24900 - DNA, 92 bp, Gossypium hirsutum
  Clone ID: LIB3147-029-Q1-K1-A1
aaaaaaaaaaaaaaaaaaaaaaaaaaaaaaaaaattaaaaataaaaaaaaaaaaaaaaaaaaaaaaggaaaaaaaaaaaggttctagatcgc

SEQ ID NO: 24901 - DNA, 459 bp, Gossypium hirsutum
  Clone ID: LIB3147-029-Q1-K1-A12
cccacgcgtccgggcataattagcgatgttaggtgaagttgatcttcattaataaactgatttgaggatggaaacgtctttagccaatcctttaaattcaataattgaaaaatacccaaagaagaagaagctctcaatagggaatagtcctccacccaatggtggtagagccaccaagaaagtgcaattcagggaaaaagatggggtgatgaaggtggaaattctaagatgcatcaaactgagaagcctttttcttttagggacaagctgatggatgcaaatatgggcaatgaaaccgtagagaaggatgttattgagattatggaggtggataatgacattagaagttctctgcttagacttaaaattgaactcgattgttgtttgggttgagcttttgacaaagatttttagcttcaaccccattctctctctatattttaattattgttaaattat

SEQ ID NO: 24902 - DNA, 419 bp, Gossypium hirsutum
  unsure (1)..(419): unsure at all n locations; Clone ID: LIB3147-029-Q1-K1-A2
ggcgttgctccatttcatttactgggatgccttgccagacatggaagagctcatgggttcaacttgtaaatgggcttctacgcttgtagctcagcatctgcttgccgctgctgaccgttatgcgcttgagagaatgagattgctttgtgaggctaaactttgtgagggtgttacaataaacacagttgcaactacattagccttggcagaacagcacaactgtttgcatttgaaaggtgtatgcttaaaattcattgcattgccagagaatttaaaagctgtgatgcaaacagatggatttgagtatttgagggaagctgcccgggtgttctacctgaactgctgcatatgtngcgaaaatcggggagcattcttgtatttctttgggatatcngaaaagaagggatcgtggatgggtc

SEQ ID NO: 24903 - DNA, 365 bp, Gossypium hirsutum
  unsure (1)..(365): unsure at all n locations; Clone ID: LIB3147-029-Q1-K1-A3
ggaaggtggtggggttccatgggagatgcagctcttacttggatgctattggagttcatatgcagcactggctgggaaatcagaaagcctctaagatgtctctcttcaaaacattcagacgaatatctatagctctgctcttttggttcagtataattaagatgaaactggtaccaaataatgaattattactatcttgattcacacacacacaaaaaggaagcccaatccaattccaggctcactctggtcctgttgacttgaaagattgttattggaatctctatctctgagctgataaaataaatgaaagtgtatgctctatgcttgttaaaaaaaaaattntgcaatctgaattgctactt

SEQ ID NO: 24904 - DNA, 402 bp, Gossypium hirsutum
  unsure (1)..(402): unsure at all n locations; Clone ID: LIB3147-029-Q1-K1-A5
tccaccccgccccacgcgtgcggccacgcgtccaggccgatctccgcgcttttctttcctaatccagaacatgattcaccgcgttagatgaccgatccatcggccaattcttaacctccctcaaaacccctcacccttactctatactcatctgctttgacgccacccaactccacaaaaaaaccggactccacctccgggagctccaccatgaggatgcactcacccactcttcggtcatcaccaaccacatcaactccaacaccaagctgttgtctggcgacatcgagttcggggaatctcaatcttgctttcaccaaataaagcgaaagactacgtctctcacattcgcctcgacggnccaaccgcaaaatcgttgaaagatgagtcggaacagatgga

SEQ ID NO: 24905 - DNA, 283 bp, Gossypium hirsutum
  Clone ID: LIB3147-029-Q1-K1-A6
cccacgcgtccggtgttttctgcgagttagcctttaatcaattttgactagtcttacctagttcttgatttacaaacgtaagtttttgtggatctattttgggacattcccaaatgattatgggcatttttcatgcatgacataacatgattaagaacagaatgagataggtgttttcctttaatccattactaaatatctatctaaaataaaaatgtcataaattaaaacgagactgctataaatcaatagcattgctaaaaaaaaataaaagctctcatac

SEQ ID NO: 24906 - DNA, 448 bp, Gossypium hirsutum
  Clone ID: LIB3147-029-Q1-K1-A7
cccacgcgtccgggaagaagccgttcgatctgttgaaatgcctggacttttatggggagcatcaaaattggttgcggtcggatatgggattaagaagctccagatcatgcttacaatagttgacgatcttgtttctgttgatacccttatcgaagaacacttgacagtcgagcctcgcaatgaatatattcagagttgtgacatcgttgcattcaacaatttagacaaggacgacccggtttttcttcttcttcttcaagaaatgttgaagcgtaagccgattttccgccatgttttaacctttttggtcgttgctttacccttattattagttttattttgcaatctgaattgctacttgatttgctttagatttgagaattagatgtatgggtaaagaataacttcttgtttttgctgaaatggtggtattgtggtattaatgctc

SEQ ID NO: 24907 - DNA, 455 bp, Gossypium hirsutum
  Clone ID: LIB3147-029-Q1-K1-A8
ggagtaacttcgtatgatatcggaaccggtttcgggcattttgcgattgcgacagccgatgtgtacaaaatggtcgaggacattcgtgcgaaaggcggtaatattactagagagcctggtccggttaaaggcggatcgacggtcattgcttttgttaaagatcctgatggttatgtttttgaactcattcaaagagattccattcttgatccactctgtcaagtaatgcttcgtgtcggggatttggatcgcgctgtcaaattctacgaaaaggcactcgggatgaagctactgaagaaggttgataggcctgaatacaagtactccattgccatgatggggtacgcggaagaacacgagactaccgttctcgagttgacttacaattacggagtgactgaatataccaagggaaatgcatatgcacaggttgctattagtaccgatgatgttac

SEQ ID NO: 24908 - DNA, 402 bp, Gossypium hirsutum
  Clone ID: LIB3147-029-Q1-K1-B1
cgcatttctttcaatctgtatctgtcttttatcatcatctgagattgtccagacagcacaacaaaggagacgacattgtttactattacccatggtgaagactaattaagccattcccacagatcttgaatattagtattaatgacccatgataggcttagatttttccatgtttttgttattgtaggacattgtttgaaaacatggttgctatcttctttcgcatttcaacactgaagacaagagctatccgaagccattcttcttattttgagattttttagagtagtaataaagttccaggaaatatgccaaatagtgatggcaattttttatgggaaaatgtaaattccatagctgtctgtaggaattttttggtgcagtctgtattaaataatcact

SEQ ID NO: 24909 - DNA, 456 bp, Gossypium hirsutum
  Clone ID: LIB3147-029-Q1-K1-B10
cccacgcgtccgaaaaaccgatttgttaaccgtgttgtttcctcgatgtttaacaccgtttcaagcgaagagattgctatcttagggttcgcctttaagaaggataccggtgacactagggagacccctgctatcgatgtatgcaaaggactcttgggagacaaagctcgattgagcatatatgacccgcaggtgaccgaagaccaggtccaacgggatctttccatgaacaagtttgactgggaccatcctcttcacttgcaacccatgagtcccacgactgtcaagcaagtcagctgtgtgtgggatgcttatgaggcaaccaaagatgcccatggaatttgcattctgaccgagtgggacgaattcaagaaacttgacttcaagaggatatacgacaacatgcaaaagccggcttttgttttcgatggaaggaacatcgtgaacgcggatgag

SEQ ID NO: 24910 - DNA, 439 bp, Gossypium hirsutum
  Clone ID: LIB3147-029-Q1-K1-B11
ggacccccacgcgtgcgcccagactgtggtctcaagactcgcaagtatgtttaggttaagccagccctgaacaacatggttgcgggggccaagctgctccggacgcaaggtgcgagtgccaagtgagaggcatatctgaggtcggacatcatcctttatatcgaagatggtccagaggaaatttgtcttaaatcatttgaataactgtgtgttggaagtatttgttaggcgtatcatatgcccctcttttaggccaattgttttcctttttcttttttggttatttaccctctaaatttttgtattttcgggaatatatgaattgccttcaattactttgaaaggcacgaaatttggtagtgtatcttttatgagcctaatgaaaatgtcagtactggctgtggctgtggactgactatattagcttctttctctaaaa

SEQ ID NO: 24911 - DNA, 327 bp, Gossypium hirsutum
  unsure (1)..(327): unsure at all n locations; Clone ID: LIB3147-029-Q1-K1-B2
cccacgcgtccgcccacgcgtccgcacaaactcgacattttcaagatccaaggcaaagataaacgcggccacaagattcttcgcattaccggaaagtccttccccgctcggtttttgagcgttgatgttttgaaagagtatttagatgagtatatatttccaaggctttcaaagaagccgttttcggtgttgtacatgcataccggagttcaaaggaccgacaactttccgggaatctcagccctccgatcaatctatgatgctattccggtcaccgtcaaagataatctccaatccgtttattttctgcaccctggcctncagtct

SEQ ID NO: 24912 - DNA, 433 bp, Gossypium hirsutum
  unsure (1)..(433): unsure at all n locations; Clone ID: LIB3147-029-Q1-K1-B3
gtcaaaccacgcatcggatgaagtgtatcttggacagcgaacacccaactggaccactgatgcaggtccgctacaagcttcggatgctttcaataggagacttgctgaaatcgaaggggtaatcttaaagatgaacatcgacaagaaactgaagaaccggatcggtcccgttaatgttccttataatttgctccatcccaccggtgaaattggaatttctggtaagggaattccaaatagcatctcaatataatttaagtaaaagatgaataaggaataatttgcatgaaataaatgttggtgcagcacatcaaaagtattgttgtccatacttttgtgtaattttctcgaatgatagtgttattccaagtttgatgtaattgtgcgatgttattattatgaatannatcaaaatatcatgatggggtgggtg

SEQ ID NO: 24913 - DNA, 328 bp, Gossypium hirsutum
  Clone ID: LIB3147-029-Q1-K1-B4
gaaaaaaacagcaagcaagattgtttttttgtttttcccctcgatttattttatttttggcctataaaaggccctttgaaatctgtaaaagggacggagggtattaacagagaaagaggcaaagaaatcgaaaagaaattctttttaagcattgaggcaacatgtgctgcacatccaactgccgatgtttttattaactttgcatcatatcgaagtgctgctgcttcgtccatgtctgctctgaaacaacctaccattcgagttgttgctataattgctgaaggtgttcctgaatcagacaccaaacagttgattgcatatgcacgtt

SEQ ID NO: 24914 - DNA, 361 bp, Gossypium hirsutum
  Clone ID: LIB3147-029-Q1-K1-B5
agcacatgttgtggaggagtatcttccttaccataacgagaccatctccggcgttcctgacaggcttcccgccatgggtattgacacccctggagtcgctgccctcctaggagctcacagtgtcatcagaactcactgtgtgatgctgagccatcgcttgtacccagatgttgaccatgacctcatccctgaccatgttgcacacatactccataaatgcgctgatcagatcccagaccccatggccgtccagtatgtgataaacgacgcgtggtcacccttggttttgtataacagctactactggaacatactggacaacatggctttgttgattgttgatcaccaactgtcgtacgac

SEQ ID NO: 24915 - DNA, 437 bp, Gossypium hirsutum
  Clone ID: LIB3147-029-Q1-K1-B6
accacgcgtccgcccacgcgtccgcccatgcgtttgattctgttgagaacgccaagaagtacgagcccaagtacaggctgatcaggaatggactcgataccaaggtagaaaaatcgaggaaacaaatgagagaaaggaagaacagggctaagaagatccgtggagtaaagaagaccaaggccagtgaagcagcaaagaagaagtgagagctaaaaggcaaaactcgtgcttatcacagagccaatgcttttcaacattgttttttagggatcttgaatcttttgttttggaaaccagattttcggtgttgttatctgatgcttagttatattattacgatctgatttttcttattttgagaattctttcatggcagattttgaaatatcccatgttctgccattgatattgtcaggcagtacttgctatatcattct

SEQ ID NO: 24916 - DNA, 493 bp, Gossypium hirsutum
  Clone ID: LIB3147-029-Q1-K1-B7
ggtaacaggtggtgaaattgcttcaacctttgacttacccagagtctgttaagcttggacattgcaagcttattgaagaaattatgattggtgaggacaagttgatccacttttccggtgttgaaatgggtcaggcttgtactattgtgttgagaggggcaagccatcatgtgctggatgaagctgaaaggtctctgcatgatgccttgtgcgtgctgtctcatacagtcaatgatactagggtattgctcggaggtggatggcctgagatggtaatggcaaaggaagtggatgaatctgcacggaagactcctgggaagaagtctcatgctatagaagctatctcgcgtgcgcttttgaccatcccaacaattattgctgacaatgctggtctagacagtgcacacttagtagctaagcttcgtgcagagcaccacaaggagggatgcattgcagggattgatgtcatctctggatctgtaggagatatggc

SEQ ID NO: 24917 - DNA, 485 bp, Gossypium hirsutum
  Clone ID: LIB3147-029-Q1-K1-B8
cccacgcgtccgcccacgcgtccgcccacgcgttcgagaaaaatggagctgttaattattcgctgttgatccaaggttacgatagtatgttgcctcctgaaagagttaaagccaagatgaaacttcaacttgctgaagcagctgaaaaggatccaacaacaggccctggttgggaacggttcgagtttgacaaagatgcccctgttgacgatgatgaaattgaagttgctgaagatgatgcatcattagtgaagcatattggtcagagctttcggttttctgccatagagaaaaggagggaggagcaactgaaagctgctcatgatgaggccatttttggcacatcaacagcttctctttctgttacagcagatagtgaaccagaagaggaaaatcttaagaaggatagcaacgataatgctgttgctactggcctcttaagtgagaaggtgatagcaaaagcaccaggttcgtggcgagatcgg

SEQ ID NO: 24918 - DNA, 418 bp, Gossypium hirsutum
  unsure (1)..(418): unsure at all n locations; Clone ID: LIB3147-029-Q1-K1-C1
cccacgcgtccgcccacgcgtccgcccacgcgtccggggatgacaaggaatacatccctgatcccgaagacaagaagcctgagggttatgatgacattccaaaagaaattccagatcctgatgctaagaagcctgaagattgggatgatgaagaagatggtgaatggataccttcaactattcccaatcctgaatacaagggcccatggaatccaaagaaaatcaagaaccccaactacaagggcaagtggaaggcaccaatgattgacaaccctgatttcaaggatgatccggatctctatgttttccccagcttgaagtatgttggtattgagttgtggcaggtgaaatcgggaacaatgtttgataacatcttantcgctgatgatgtagagtatgcccaagaaactaggctgaa

SEQ ID NO: 24919 - DNA, 482 bp, Gossypium hirsutum
  Clone ID: LIB3147-029-Q1-K1-C10
cccgggcttggttcagtcagccagcacgaaaggctagaagaagaatttcaaggcataagaaggctgtgaggatctttccaaggccaactgctggaccccttcgccctattgtccatggccagactttgaagtataacatgaagttgagagctggaaagggtttcacccttgaagagcttaaggctgctggtatttcaaagaaacttgcaccgaccattggtatcgctgttgatcaccgccgtaagaacaaatcacttgaaggtcttcaagccaatgttcagaggcttaagacctacaaggccaaacttgttgtcttcccaaggcgtgctcgcaagttcaaggctggtgattcaactgccgaagagctcgcaactgcaacccaagtccaaggaccatacatgcctatttctcgtgagaagccttccgttgagctcgtgaaggtcaccgaggacatgaaatcattcaaggcatacaacaagctt

SEQ ID NO: 24920 - DNA, 383 bp, Gossypium hirsutum
  Clone ID: LIB3147-029-Q1-K1-C11
caacgaaatgccctcagcgtaatcgaagctcccaccggtaacgaagaagatgacgaccttgagtgggggaacatgcagtggaacggatcagacttggcatcggatgacactcaaaagtcccataggtcgagacataagtcgcataaatcgacggggtcttctcacaaaactacgagcaggtctctttcctgtgactcacagtctaagagttctgtttcgacaccccagggatccacgaaagttgacctcagcaaactagagatggctgctttatggagatattggcgacacttcaatcttgtggatgccattcccaatccgtcgaaagaacaactagttgatattgttcaaaggcatttcatgtcacagcaaatggatgagct

SEQ ID NO: 24921 - DNA, 458 bp, Gossypium hirsutum
  Clone ID: LIB3147-029-Q1-K1-C12
ctgagtttaagactggtgctgagaggaaggaagctgccgagagcactttgttggcttacaagtctgctcaggatattgctcttgctgagcttgctcctactcacccaattaggctgggacttgctcttaacttctctgttttctactatgaaatcctcaactcacctgatcgtgcctgcaatcttgcaaaacaggcttttgatgaggctatttctgagttggatactttgggtgaggaatcttacaaagatagtacattgatcatgcaacttctccgggacaacctgaccctttggacatctgacatcacggatgaggctggggatgagatcaaggaagcttcaaagcacgagtcaggcgagggacagcagtgataagttcataaaaattgttctctgtaccttatatttgcaggtttacagtacatagatgcaatgtgagttatcgtagtgggtttt

SEQ ID NO: 24922 - DNA, 204 bp, Gossypium hirsutum
  Clone ID: LIB3147-029-Q1-K1-C2
gccctttagaaaaacacaatttggattacagaacatgaataaaaaagaaaagaaaaagtccaaactattctctgaatattttattcatatagattacttacaggtccaccttgtaaccaaagaatgattggccatggctttgaaggctgttcaactctgtaaggacttctgtaaagccaccaaaacatatgtgcttctatttat

SEQ ID NO: 24923 - DNA, 406 bp, Gossypium hirsutum
  Clone ID: LIB3147-029-Q1-K1-C3
cccacgcgtccgcccacgcgtccgcccacgcgttcgcccacgcgtccgggaagctggagtctgatctcaagagtctttcagatgcttacaatagtcttgaacagaccaatatccacctagaaaaagaggcgaaaactttgaagagtggagggacatcaacatctcccgatatcgaggcaataaaagctgaagctagggaagaagcccagaaggaaagcgaagcagagctgaatgatttactcgtgtgcctcggacaagagcagagcaaggtggaaaagttgagtgcaaggttatctgaattaggcgaggatgtagacaaactgctcgaaggtattggagacgatatggcgcttcctgaagatgaagacgaagaagattgatggaagctggtgtagtactactagta

SEQ ID NO: 24924 - DNA, 354 bp, Gossypium hirsutum
  unsure (1)..(354): unsure at all n locations; Clone ID: LIB3147-029-Q1-K1-C4
gtcagatcatcctacaaggcaggagaattctacatcaaatctatgatagaatctgatcgttctgctgctgcttcatagttccttttctcttcattccctatgttattctttttctttggctatcattaacttgccttctgatactacacagtttggctaataaattggtttggaggctgacagccaatgattcggtactccaattgttgcagtatattggcaccaatttctaattgagatttgtattgtacttgttgatgttgtaattgtacgtaagctacacttttggtgctttatgaaatattatgatcaaggtttaggtcttaattggtaaatanaaganncnnaattaac

SEQ ID NO: 24925 - DNA, 159 bp, Gossypium hirsutum
  Clone ID: LIB3147-029-Q1-K1-C5
ggacgaccacgcgtacggtacgtcacgcgttcgttctgacgtttggatttgcgatccaagcgcaggattctccgggtgagagtccttcagacgcttacaccacatttgctcactccaattttcacctagaatcagaggctgcgagtttttcaagtgcat

SEQ ID NO: 24926 - DNA, 409 bp, Gossypium hirsutum
  Clone ID: LIB3147-029-Q1-K1-C6
aacccttacaagtcttacccattgagttacatggacaatttattttcattcataaaccagtgtcccaactcaaatgttcaaaagtagactacaaaacaagcagaatctttttgtagcacaattgaaaataaattcaaacaaacagtaaaaagggtttcaatgtccacttcccatttgtagatcaagctccaaaccatctgctaatggcttatgattcctcagtttcgtttggaggaagacgcataactgtcttgaagaaggtcatcataaggatccctgcggccggggacttggctaatctgaggatcccaacggagctgagcattgtggcgctcaaatgtccaaaacccataaggccgcagtggataactccacatctccttggtttttgcgcatcgatccttcatag

SEQ ID NO: 24927 - DNA, 350 bp, Gossypium hirsutum
  Clone ID: LIB3147-029-Q1-K1-C9
ggcgagactggaaaagtataccgagcaaattttcacgaccgagacggtaggactgttcttatattgcgaccgggaaaacagaacactacatccttagacaatcagctccgtcatttggtgtatatgattgagaatgctatattaaaccttccagagggtcaagaacagatggtatggttgatagatttcaccggctggagcttgagcacgagtgttccgatcaagtccgctcgcgacaccattaacgtgttacaaaaccactatcccgaaaggttggcgatggcggttctatacaatccgccaagaattttcgaagcattttggaagattgttaaatatttcctcgatgc

SEQ ID NO: 24928 - DNA, 417 bp, Gossypium hirsutum
  unsure (1)..(417): unsure at all n locations; Clone ID: LIB3147-029-Q1-K1-D1
cccacgcgtccgtgctgcgatgacatgcagagctgttgtataggtctctttttcccctgctatttgtttggaaagaatgcagaatttttgggttcgggtactctagtcggatcctgcatcacccatttcattctttgggcccttgtcaacactctctgctgcgtcttaactcaaggcttctatttggctttacctggatttggatgctttatctcttgttatgcttgtggctatcggagggcacttcgctccagatacaatttgcaggaagcaccttgtggggactttgctactcactttttcttgccatctttgtgccatttgtcaagagtacagggagattcgtgaaagggcagaggaccctanacccctgatctaatctgctgtcgtactgcacagacgtcagacaatggatca

SEQ ID NO: 24929 - DNA, 478 bp, Gossypium hirsutum
  unsure (1)..(478): unsure at all n locations; Clone ID: LIB3147-029-Q1-K1-D10
ccgggccgagcccacgccgtccgcaaaagagtaagaganaaatgagtgatagtaaatagcattaagtcttgcggatagtcttttaccttgctcaagtgaataggggggccctccgtgttaataacccaactcaattcttagaaaatatattatattaccttcactgataatagttaaaaacattgcccgtatgttattatttcaatttcctgagtggtctgaggatttaacggattggaatcgagaaatgcatgttaaatgcacttataatggtgttcaattatccgaaaccgaatttccaaaaaactggttaacagacggtattcagataaagatcctatttcctttttgcctgaaaccttggcacagatttaaactacaaccctctcataaagatccaatgaaaaaaaagaaaggtcaaaagaatgatttttgctttttaacagtttggggaatggaaactgaactacctttcggc

SEQ ID NO: 24930 - DNA, 444 bp, Gossypium hirsutum
  unsure (1)..(444): unsure at all n locations; Clone ID: LIB3147-029-Q1-K1-D11
cttaacacaaaggtgccagaactacctacaacatgtcaggcaggaaggaaacagtgttggatttggctaagtttgttgacaaaggtgttcaggtcaaactcaccggtggtagacaagtcacagggaccctaaaaggatacgaccagctactgaatcttgtcctggatgaagctgtagagtttcttcgagaccaggatgatccgttgaagactactgatcagactaggcgtcttggcttgatagtttgtaggggcacagcagtcatgctggtgtcacctaccgatggcacagatgagattgccaatcctttcatccagccagatggagcctgatctgatccgttttcaaaatatggcatttcctttgctctactacttatatattctcttaacattttcaagtctgtatttctatgagcatgtngntatctcttttgaagctacc

SEQ ID NO: 24931 - DNA, 363 bp, Gossypium hirsutum
  Clone ID: LIB3147-029-Q1-K1-D2
aaatcatccaagatttcaggacgcaattcttaagtgccctgaacagagccggggtgatcaactctccatctaaaggaatgttcatagattcgtgctatgcccactgtcaagtaggaaagcagatacaatggtcaagcgatagttctccggtagtgagtaacatgaaaattgccaaggctgttggagactggtattatgagcggagccccatcaaaaagcttgactgcccttatccttgcaaccctacctgcccaaaagttgactctgattcataaatctatacatataattatggactgcagtttatttattagatggatattagtcaattgttcatgtctaattatccatctatgaatctct

SEQ ID NO: 24932 - DNA, 235 bp, Gossypium hirsutum
  Clone ID: LIB3147-029-Q1-K1-D3
accacacgtacgaccacacgtccgggaagcctgttgaggttatgggtatgctggtgacaaccggttggtcaccaggagggatgatcaagacattctccacacatttgaaggagacaatgcagatcctctgcaacaggtagcggcatatgtattgaagcaacacaaggacaagctccacggttgtgctcttgttgtcacatcgaactacttgagagaatctaggagcacatacttg

SEQ ID NO: 24933 - DNA, 407 bp, Gossypium hirsutum
  Clone ID: LIB3147-029-Q1-K1-D4
cccacgcgtccgcccacgcgtccgagggtggaccgcgtgtcatgcgtcctgttgatcctatgacaggtcgtgttttaaatgaagagaaaccagttgctggcaaccaagaaaaaagtggcaatgatgaggctgttgatgagtcaaactctgcatgaaaattttatattatccccaggagtcctcactctgcggtataagttggggaaaatgaaaaggtggatcatattggatgattgtaagtttttgtctgaaaaataacatttgccatttgcagaaactgccagcttatttccagtggcctggtcctgggtacaagatgagtttaattaaatgtgatctaatgacaaactattttggattttgaattcactttacaatactaaaccaaacatgttgatattattgct

SEQ ID NO: 24934 - DNA, 483 bp, Gossypium hirsutum
  Clone ID: LIB3147-029-Q1-K1-D5
tccagggacgacgccacgcgtccgcccacgcgtccgcccacgcgtccggccattcaatttgagaatcctggcccacgggtattggagggcttcactgttggatttcatccgcgatcatgggaaattgttcacaatggtctgactcagttgggttttgaaaaatctcaccctgattttagtttcagcactgaacagcctcatgttaccctttatttgactgccattgcatcccaatccaacctcgtaaaaaaacctggagtcgaggtgtttccagaaaacggactggaggtcaagttatcagggactgctgcaactgggaatccacctacaacattatcaccatcaactttgcttttagattggagatgtgtaaaggcccgtgataccccgtatgaagttaagatcactatcccagtggaaggttatgaatcaatcgagtttgttctaacgaagatgtgtgactctgcacaaaatcaggaagaa

SEQ ID NO: 24935 - DNA, 287 bp, Gossypium hirsutum
  Clone ID: LIB3147-029-Q1-K1-D6
agcacatccaagttggtaactacaaaattctcttgaaaactaacggagcatactgaactagagcggtaatacgagaagcagcaccttgcaggtataaacaacatcaaacatgttgaatcgtatgataaaatacatagagtttgatgcaatcatcatagcaagctttgtatttactttttgtttttgcaaaatgatcttggttgttttttataacaatcgtatgtaaatatgatggcgctacaattgttatatttcgatattgaaattaaacctgagtgttaagtgtc

SEQ ID NO: 24936 - DNA, 518 bp, Gossypium hirsutum
  unsure (1)..(518): unsure at all n locations; Clone ID: LIB3147-029-Q1-K1-D7
gggacgcgccacgcgtccgaaacacttctccagtgaccaaaaaagcttcattttttcttctatcgaaaaccccatggctgctcttaagctagtttgtgctctagtgttgtgcatgttggtggttgagcccattgccacaaccaccataacatgcggcgatgtgacaagcacagtggccggttgcttatcatacttgcagaacggagggaacatgccgaatgcttgctgcaacgggatccggtccctgaacaacatggctcgaaccacccctgaccggcaaaccgtgtgtgggtgcttgcaagctgccgctaaggctgtcaaaattaaaggcaacttggctgagaccctcccagacaaatgtagtgtcaacatcccttacaagatcagcactttcactaactgcaaaaatgtgaagtgagatggatgaacagagggttttgcaacagcttgcaggagataaaatatttgtttaanaagaagaggaggaagattgaatctggtttttgggatggaatttt

SEQ ID NO: 24937 - DNA, 427 bp, Gossypium hirsutum
  Clone ID: LIB3147-029-Q1-K1-D8
ggttgaactcaatgggagactcaacatgtgtggtttgattagtcctcgtttcgatgtcggggtcagagagatcgagggttggaccgctaggctacttccttccagacagtttgggtatattgtgcttaccacatctgctggcatcatggaccacgaagaagctagaagaaagaatgttggtggaaaagtacttggtttcttctattgaggcaaatttcttagatttttcatttttgtttgaagtttctcttcatctagaacctctgttggtaccgatttcaattcatatttaggggatcacgaggttttggttcgcttgcctttttgtcatctgatagctagaagttggctcgttaaggtttctgtaccctgttttttcacaattttataactgtgcatattatcctttttcttttgctcaaacaaa

SEQ ID NO: 24938 - DNA, 404 bp, Gossypium hirsutum
  Clone ID: LIB3147-029-Q1-K1-D9
tactacaaatgctacaacattgtggaaaaccatttcaagaccaactgaaatccccatggcgaatgcaacagtttggaaagcgattcccaagtccaccgaaatcccttcaactcatcccaatagatcggagaagctacggaaatgtacttccctaagggttgccactacgtttactcgagtttgtctatgtgcaccaatctcttcctacaacgaggtatttcgtgccgatgttccccctagaagaagcaacacttaccctaggtcaaaggcctttcccctggcgcaagaaagggtaataacaagcgcgagacttagcacggaaggaagaagagttttccgtggtaaatcattgacggacgatgtattgatgaggaagattgttgtggaagaagaagcaatgatgc

SEQ ID NO: 24939 - DNA, 491 bp, Gossypium hirsutum
  unsure (1)..(491): unsure at all n locations; Clone ID: LIB3147-029-Q1-K1-E1
atgccgatgtcataaccattgagaactcacgttcagatgataagctcctgtcagtcttccgtgaaggagtgaagtatggtgctggaattggacccggtgtctatgacatccactctcccagaataccatcaaccgaagagattgctgacagaattaacaagatgcttgccgtgctcgagaccaacatcttgtgggttaaccctgactgtgggctcaagactcgcaagtacgctgaggtgaaaccagccctgagcaacatggttgctgctgccaagctgctccgcacccaactcgccagcgccaagtgatcccacgcgtccgaatggtaaaggtttcttttaccttaaccaatagtcaattctcatctatttatacaatatttgtcatgttagtaaaaaagaaggcttctcgcctttccaatcccataaatatgtaccctacanatccagtgaataattgggatgaaaaataagtaaattatattttggttc

SEQ ID NO: 24940 - DNA, 149 bp, Gossypium hirsutum
  Clone ID: LIB3147-029-Q1-K1-E10
cccacgcgtccggtttggaatttgaatggtgtagtgctaataacagatcttaataaccttttaagttgcgtttgatttctttaagcttgaacctctccttgttttatgtcattaattttgaattttatgatatgatattggagttcttt

SEQ ID NO: 24941 - DNA, 452 bp, Gossypium hirsutum
  Clone ID: LIB3147-029-Q1-K1-E11
cttcaccagtttgtgacatggatgcttcagccttatgctgctgttcgcccacagatagatgatatgataggtcatgtagacaagttgatctcaaagttttcacagtgataccatataggggagtgaagattagagcattccaaccattaatgcatacaagttaagtccattgaaatacttccggaagtgaacagcgtttatcaaagcaatagcagttctttagtaatgttacatggtttggacttagctgtcttagttgtgtcgataactctatgacgtcatgttctgtaatttattgaagtccagatttctacattcatgattcgatttgatagaaaaaccctaataatttgtgttatccatttagtttaatgtttcagatatcccagtttttctgagtgtttcaagctattagtcatttagttctgcaatatcgagtgaatatccgatat

SEQ ID NO: 24942 - DNA, 346 bp, Gossypium hirsutum
  unsure (1)..(346): unsure at all n locations; Clone ID: LIB3147-029-Q1-K1-E12
caaaactgatcttgtggacaaaaggcaagtctcagttgaggaagccgaagccaaggctcgtgacctcaacgtaatgtttattgaaactagtgccaatgctggcttcaatatcaaggctctttttcggaagatcgcagccgctttacctggaatggaaacactttcttcaacanaacaagaagacatggtcgacgtcaatcttaagtctacanacgcanattcatctcagtcgcagcaagaagcttgaggatgtgcctgctgaggatacatacatacattacactcactcacacacatcatttgatccgaggtatgtatggttttctcaacatttagtgttttctgt

SEQ ID NO: 24943 - DNA, 422 bp, Gossypium hirsutum
  unsure (1)..(422): unsure at all n locations; Clone ID: LIB3147-029-Q1-K1-E2
tggagatatggaccagaatacgcgtgatgtcatcatgcgggaattccgttctggttcttcccgtgttctcatcactaccgatctgttagcccgtggtattgacgtgcagcaagtctcccttgtcataaactatgatctgcccactcaaccagaaaactacctccaccgaatcggacgaagtggaaggttcgggagaaaaggtgttgccataaactttgtgactgtagatgatgaaagaatgctgtttgatatccagaagttctacaatgttgtcatcgaggagctgccatcgaatgtcgcggatctcctttgatgagattacgttttctgaaggttgtcagaggcgagcgctntcattgttngaaatgtcaantaaagtgtgctctttttttcttttttgttntccctttttagcattttaa

SEQ ID NO: 24944 - DNA, 483 bp, Gossypium hirsutum
  unsure (1)..(483): unsure at all n locations; Clone ID: LIB3147-029-Q1-K1-E3
cttttctattgatttgctgtctgtgtttgtatttgtgtgtttctctcaaaaaaaaaactttacaatcgaaaatcaataggcttttatagccgaatgtaaaataaataaataaataaatgaaaatacaattcttctttttttgtctttgctgcttttgtctgttctcctttgcaggtacgagtacgggactgtgcgttggcccttggctcgaggtgtacagggtggtgctggcgtgtgtacggtgggtgcgttgcgccaggaggatgctagggttgctggttgcggcgcatgggaaggaaccctaaggttctaaaatttctgggccatttgaggtgttcatatttgggctgtanggctactggtttttttgtaatgggactaaagtattagtaatggggtcatgcaattgggcttatgctatgtaattggactttaagtatttaagggactgtaataatttaataattaattaattaattaata

SEQ ID NO: 24945 - DNA, 408 bp, Gossypium hirsutum
  unsure (1)..(408): unsure at all n locations; Clone ID: LIB3147-029-Q1-K1-E4
cccacgcgtccgcccacgcgttcggctcaagcttttagagattgtcaccactattcccaccatcggatttaatgtggaaactgtcgaatataagaacatcagtttcactgtctgggatgttggtggtcaggacaagattcgtcctttgtggaggcattacttccaaaatacacagggtctcatcttcgtggttgacagcaatgacagagaccgtgttgttgaggccagggatgaattgcatagaatgttgaatgaagatgaactgcgagatgctgtgttgcttgtttttgcaaacaagcaggatcttccaaatgcaatgaatgctgctgaaataactgacaagcttggcctncattctcttcgacagcgtcactggtatatccagagtacgtgtgcaacatctggtga

SEQ ID NO: 24946 - DNA, 457 bp, Gossypium hirsutum
  Clone ID: LIB3147-029-Q1-K1-E5
ggaatggtgatccatgtgctcctactgattgggatgcttgggaaggagttacatgtcatactaacaagaatggaactggccttgtcattactcaaatagaacttggaagtcaaggcctgaagggttatatcagtgagcagattagtctcctgtcaaacttgattaatctgaacttgagtactaattctttggatggcactctaccaattgggcttggactaaaatcccttgcacgactggatttatccgataatcaattctctggttccataccggaaagtttaacatcttcaaatctgcagcttgtgaggcttaacaataacttattggaagggagagttccggaagaactttactctgttggtgtgcacggagggactattgatctttctggtaacaaaggcttgtgtggagttccccctttaccggattgtccccttttttgggagaatggtcg

SEQ ID NO: 24947 - DNA, 469 bp, Gossypium hirsutum
  Clone ID: LIB3147-029-Q1-K1-E6
cccacgcgtacgcataggctgcgccagataagtttggtatgaccagccagcaagccggacgatattttaactgccgcggagaaatacattgaagagaatggcacagatgcatttgagaagctcattcatagggctgacaagtccaggagtagtacttatggccacatatatgatgatgatggctacaggcattgatatccttacagcaacccggctatattttgttgctcttgagaagaactcttgaacgctagtttaaagcgtgtaaattatcttaattggcttgctagtgcaagtttctaaacacttttgtcaaactcagcacgactctttataagaaatacaaagattccaatcatataagaaaaggcaaaaagattatcatgagttgaaacagcacgattgccttatcaattattaaatgtaagacaatcagctcatgacttcaaattatgtcagttcgcaatca

SEQ ID NO: 24948 - DNA, 448 bp, Gossypium hirsutum
  Clone ID: LIB3147-029-Q1-K1-E7
cccacgcgtccgcgaacctgtattatgttgatggaatgtcttagctttttgttaaggaatatggatatggtttctgtttctgctttaatctcagaagatgttagggggcaagcaaagttaattgctgaggaatggaaaccaaagttggatgctcttgacatggatgctagtaatggtaattcattggaagctcatgcattcctgcaacttcttgccacttttggtattgcttctgacttcaatgaggaagaactggcaaggctgataccaatggtctctcgtcgtcgtcaaacagctgatctctgccggtcccttggtttgtctgaaaaaatgccaggtgtaattgaagttctggcgaataatggaaggcagattgatgcggataatctggctcttgcatttgatcttacagtgcagttcttgcctgtacctttactgaaggcctact

SEQ ID NO: 24949 - DNA, 331 bp, Gossypium hirsutum
  Clone ID: LIB3147-029-Q1-K1-E8
ctctttctttcttgttcctgtttcctgtttttttattgaaaaatcagggtttccgtctgcggtggtgagaatcaagggcgtggacttacctgaaaataatgttgaggagctccgacggagagacttttgaggtggacgaagcggtggcattcgattcacatacgatctagcacatgatcgaggacgattgcgccgacaacgagatccctcttcgaaacgtcaccagcaagatcttgctcaaggtacttgagtactgcaagaagcatgtccatgctgctgtcgacaaggaaaaaactcctgatgacgaactcacggtgtgggatgctgattt

SEQ ID NO: 24950 - DNA, 381 bp, Gossypium hirsutum
  Clone ID: LIB3147-029-Q1-K1-E9
cccacgcgtccgcccacgcgtccgcatcaagaagctacagatcatgcttaccatagtggatgatcggggtggggttgatactcttatagaggagtacctcacgacagagccacgcaacgaatacattcaaagctgtgacattgttgcattcaacaagatttagaggactcagtttttttctacagcagttgagagtgccattggccatgttatcaccttttgccccttgctttcccctcgaatatatatatttttgcttgaaccgtgctttgctagcgcttctgctctatagtgagcatagatgaaaaggattttcaagtatttaaggatgttctatgttttttatttacttaaagcttgcccaaagtagttttagtgaca

SEQ ID NO: 24951 - DNA, 312 bp, Gossypium hirsutum
  Clone ID: LIB3147-029-Q1-K1-F1
ctgcctatattaaataagcattaagatccatattagcctattgtaatagctggtaggcacttttgactgaaaattcgctaaaatgttctcctcgccagacttgaaaatcatcatgttcatcttctgccaaaggaatttgcaaaatcttctgtgttgtgtccgcttgaaaggaattatcattgattctatttgtaacaactcccgatacccaccgatcattctaaatagatatttgatctcccctactgactcgccaacataggtcatcttgcagtaacccttttgctgtccaaacgctcttccaagtaagtg

SEQ ID NO: 24952 - DNA, 412 bp, Gossypium hirsutum
  Clone ID: LIB3147-029-Q1-K1-F10
aacaaaccactcccatattaaacattgttggtgaaacaatgacgtcttcagctctgacaggtaagcttgaggcagatgtagagattaaggcttctcctgagcagttccatgaaatgtttgcccacaaaccgcaccatgtgcaccatacttgctatgacaagattcaaggatgcgatttacatgaaggtgaatgggggaaagtcggtaccattgtccattggagttatgtgcatgatggaaaggctaaaaaggcaaaggaagtagtggaagcagtagaccctgataagaatttggtcactttcagagtgatcgaaggagatctaatggaagagtataagagctttgtaatcacgattcaagtttcgcccaagagcgagggtagtggcagcgtaatgcactggactttggaata

SEQ ID NO: 24953 - DNA, 111 bp, Gossypium hirsutum
  Clone ID: LIB3147-029-Q1-K1-F11
gggtccacgccacgcgtccgcggacgcgtgggcggacgcttttgcggacgcgtttgttctgggttattatttttgttatattatggaacgggatttgctgatttctataac

SEQ ID NO: 24954 - DNA, 462 bp, Gossypium hirsutum
  Clone ID: LIB3147-029-Q1-K1-F12
cccacgcgtccgccggaaaatacgtgtgcttcatcaataagtggttcttgtgtaatagacaatgagaatgacttggggcttatgataagacaactggaaactgctatgctaggcatcgattcaggtgatcttgaccttcatgcaatagcagcttctggcagagccactaaagtttccgtagaagcggagaggtggaaatacatgaaagagatgatcgccagaggggacctgaaagaactgctttgtacttgtgccaaagctatagaaagtaacgatatgtatatgactgactgtttgattgcgcaattacgtcaaatggtgtcagtttcgggtgaaccaatgcaacgactaggagcctacttgttggaagggcttgttgcacggttggcttcttcaggaagttctatttacaaagccctaagatgcaaagagcctgccagtcctgaactgctttcatacatg

SEQ ID NO: 24955 - DNA, 370 bp, Gossypium hirsutum
  unsure (1)..(370): unsure at all n locations; Clone ID: LIB3147-029-Q1-K1-F2
gcaggagcgttttggggaacaagagtgatggagatagtgtagaagcacgactctggtggtctcgtttggaagagaattaagctcacttccacccgcaaagccaacgccaagaagcgtctccatcgcgtttggcagaatgaagctgttttgagagcatgcgcagaaccacctccttcgaaagcaacggatgtagctggtggtggtggtgagaaaggtgtggaacaatcaacttaatggacaattaaggaagacactacataagcctgaaaggaagaaattggtgactctntgggggttaatggtgcaaaacttttacaatctgagatttgaaatttagttgtatggtatcattgaccacctttttttttta

SEQ ID NO: 24956 - DNA, 292 bp, Gossypium hirsutum
  unsure (1)..(292): unsure at all n locations; Clone ID: LIB3147-029-Q1-K1-F3
ggttaccnnncttccgaagggagctggtcaccagcgttataaaaatagctcacattgagaatacgccaactcaggtgaagggcgaatactcggcaaaggtgcgttgactatctttatacaagcttagcagatgcctatggtgacatcggattgaagcatcgggatgagctgaaccccatcaggtgcctcaaaatcttctgatttgcctaatggtccctcgaaataagcttacttcgcgttaagtttagctgctattggctcgtatcgctgatcatccatttttgttcaagct

SEQ ID NO: 24957 - DNA, 318 bp, Gossypium hirsutum
  unsure (1)..(318): unsure at all n locations; Clone ID: LIB3147-029-Q1-K1-F4
tctcgcttctagcttccctgggaaagctgttggcgtttcacttggtggcaaagctgatccagctgaatctgctgaagctaagtctcctgctgcggacgatgacgatgatgacttggatctgtttggcgatgaaacggaggaggataagaaggcagcagaggaaagagaagcagctaaaaagtctgctaagaagaaagagagtggaaaatcttcagtactgatggatgttaaaccatgggatgacgagaccgacatgaagaagttggaagaagccgctcgatctgttgaaatgcctggactnttatggggagcatcaaa

SEQ ID NO: 24958 - DNA, 495 bp, Gossypium hirsutum
  Clone ID: LIB3147-029-Q1-K1-F5
cccgtatctacccgatggaaggtttgatctcgaatcatacgatgacttgatgcacatgcaaattgaaaacggtgcagaagctgtaattgttggtggcacaaccggtgagggccagctgatgagctgggacgaacacataatgcttattggtcattacagtcaactgttttggtggatcaattaaggtaatcggaaacactggcagcaactcatccagggaagcgattcatgccactgaacaaggttttgctgttggaatgcatgctgctcttcacatcaatccatattacggcaaaacatctatggatggcctgatttatcacttcgatagtgtgctgccaatgggacctaccatcatatacaatgtaccatcgcgaactggccaagacattcccccacgtgtcatatacaacgtatcacatagtcccaacttggctggtattaaagaatgtattggaaatgaccgaattgagcagtacacaggtgatggaattg

SEQ ID NO: 24959 - DNA, 171 bp, Gossypium hirsutum
  Clone ID: LIB3147-029-Q1-K1-F7
tcgctcttgcgcgtgccagctaccttatatctgttatgttatgtctgctagcactaatatattggctggcgttttacactctctcacttgtacaagcagggacgtcccccaagctaataacgcttgacctgatacactttagtctgttaactacacaggtatcacaagcca

SEQ ID NO: 24960 - DNA, 451 bp, Gossypium hirsutum
  unsure (1)..(451): unsure at all n locations; Clone ID: LIB3147-029-Q1-K1-F8
cttgttgtttcacttttttttttaaaaaataaatataaaaaccccattaaggcttgaactcttcttcagccaaaatgggtatttctcgtgattcaatgcacaagaggcgtgccactggtggcaaaaagaaggcttggaggaagaagagaaagtatgagcttggaaggcaacctgctaacacaaagctgtcaagcaacaagacagtcaggaggattagggttcgtggtgggaatgtgaagtggcgcgctttgaggctcgacaccggaaactactcatggggaagtgaggctgtgactcgtaagccaggattttggatgtggtgtacaatgcatccaacaatgagctggttcgcactcatactctggtgaagagtgctattngtcaagtagatgctgctccattcaagcagtggtatctccagcactatggcattgacattggtcgcaagaag

SEQ ID NO: 24961 - DNA, 446 bp, Gossypium hirsutum
  Clone ID: LIB3147-029-Q1-K1-F9
cccacgcgtccggaaacataagcggcataagagttttaaggaaaatgcagatcttcgtgaaaaccgtaactgggaagaccataaccctagaggttgaatccagcgacactatcgacaatgttaaggctaagatccaggacaaggaaggtatcccgccggaccagcagaggttgatcttcgccggaaagcagcttgaggatggtcgtacacttgccgactacaatatccagaaagaatcaacattgcatctggttctgaggcttcgtggtggcattatcgagccatctttgatggcattggctaggaaatacaaccaggacaagatgatctgccgcaagtgctatgctcgtctacacccccgtgctgtgaactgcaggaaaaagaagtgtgggcatagcaatcagctgaggccaaagaagaagatcaagtagattggatatcttgat

SEQ ID NO: 24962 - DNA, 319 bp, Gossypium hirsutum
  Clone ID: LIB3147-029-Q1-K1-G1
aagccaacaacttcctttggccatttaagctcatggcaccattgggtggtctgaagaagaagaggaaccatgatgtcgaaggtggagatgccggcaaccgcgagaattacatcaacgaattaattaggagaatgaattaaaaaaccaaacttgggttttgttttaaaaaactagtggttgatgtcttttttggtttattttgtaagggattctgatgttaatattctgttggaagttggaatcacttttttgttatcggagacgcgaatatttttgctttgtgttgccagtgatatactttgtgactgagagctttctc

SEQ ID NO: 24963 - DNA, 458 bp, Gossypium hirsutum
  unsure (1)..(458): unsure at all n locations; Clone ID: LIB3147-029-Q1-K1-G10
atctacgcaaagtggacttgaaactatacaagagttaccaacaactctctgatgccttgagcaaggtgtgcagctccttcactattggtaactgtgggtctcatggaatgaaagatttcatgaatgagagcaaattgatagaccttttgaatggttctgagtatgttcctacttatgaagacaaagatggagattggatgcttgttggagatgttccatgggagatgtttgttgattcgtgcaaacgcttacgaattatgaaaggatctgaggcaattggacttgcaccaagagcagtagagaagtgcaagaacagaagctaaggtaggtttagaaacaacaatcccaattaaaatcaagccagatcaaaatcagattgtatgtgaaaccagttgaatcgagaaccgaggtctgaagaagaagaaatattaataaaangtagtagggatatattttga

SEQ ID NO: 24964 - DNA, 456 bp, Gossypium hirsutum
  Clone ID: LIB3147-029-Q1-K1-G11
aaaagccaaaacccagaaagctgactcatcgcattcctctgaaaatgacaccaagttcccagcttggtcggctcggttcctccttcgtctgttgccatcaccatccacgccaaacccggcgccaaatcttcctccatcaccgatttcagcgacgactctgtaggggtccagattgatgcgcctgccaaagatggtgaagctaacgctgcacttcttgattatatcagctcggttttaggggtgaaaagaaggcaagtttcaataggttcaggctctaaatcaagagataaggtggtagttgttggggatatcactctacagagtgtatttgatgctttgaacaaagcgtccaagtgctagcgatggagagacaccttttgaagtgctagttattgtaagatggttagttcaagccagggatgatacttggttgcttcctggattcaacatgagaat

SEQ ID NO: 24965 - DNA, 461 bp, Gossypium hirsutum
  unsure (1)..(461): unsure at all n locations; Clone ID: LIB3147-029-Q1-K1-G12
cgtcgacgaaactgaagcaagaaccttctcaaaggtttttggctgggagactgatgatgttgcagagatggccgtgaagatttcacagtgggcgaaagcttctggaacatacaagaggactactgttattactcagggtgcagatccagtaattgttgccgaggatgggaaagtgaagcagttccctgttattttgttacccaaggaaaagcttgttgatacaaatggtgcaggtgatgcctttgttggaggctttctttcacaattggttcaagggaagtccattgaggattgcgtaagagctggttgctatgcatccaacgttatcatccaaaggtctggctgcacatacccagaaaagcctgaatttaaataaagctagtccactttcctgatctcctctccgctgttgttttcaagtttctgattgttaagaaccctcttgctagcnattgatcttt

SEQ ID NO: 24966 - DNA, 347 bp, Gossypium hirsutum
  Clone ID: LIB3147-029-Q1-K1-G2
ctgccctcaaccccgaccatgttccacacatactccatatatgccctgatcagatcccagaccccaaggccgtccagtatgtgagaaacgaccgtgggacacccatggttttggataacaactactacaggaacatactggacaacaagggtttgttgattgtggatcaccaactggcgtacgacaaaaggaccagaccttatgtgaagaaaatggccaagagccaagactatttcttcaaggagttctcaagggccattactctcctctctgagaacaatcctctcactggtagcaagggtgagatcaggaagcaatgcaatcttgcaaacaagcttcactaaaat

SEQ ID NO: 24967 - DNA, 361 bp, Gossypium hirsutum
  Clone ID: LIB3147-029-Q1-K1-G3
cccacgcgtccggctgctttgagagaggggttgcctcttagaaagtcggagcacgccttctacttgaaatgggctgtccactccttcagaatcaccaactgtggtgtacaggacactacccagatccacactcatatgtgctactccaacttcaatgacatcatccactcaattatcgacatggatgctgatgtgataaccatcgagaactcacgttcagatgaaaagctcctttctgtattccgtgaaggagtgaagtatggtgctggaatcggccctggtgtctatgacatccactctcccagaataccatcaaccgaagagattgctgaccgaattaacaagatgcttgctgtgcttg

SEQ ID NO: 24968 - DNA, 479 bp, Gossypium hirsutum
  Clone ID: LIB3147-029-Q1-K1-G4
cccacgcgtccggtgcagatccgtcaatatcaatgcacgagctgcagccacatgatcagttcgtgatatttgcatctgatgggctttgggagcacctaagtaaccaagaagctgtcaatatagttcaaaatcatccacggagtggaagtgcaaagcggctcgtaaaaaccgcactacaagaagcagcaaagaagagagaaatgagatattccgacttgaagaagattgaccgcggtgtccgccggcatttccacgacgatatcacagtaatcgtggtgtttctcgactcaaacctcatgagcagggctagctcagcaaagggccctaatctatccattagagggggcggagttaacttccctccgaatatactagccccgtgtgccacgccaaccgaacccggcggcacttgatcatatatatatctatgtccctcgggtttttttttctttggtggatcattttcttatgtgaatacc

SEQ ID NO: 24969 - DNA, 462 bp, Gossypium hirsutum
  Clone ID: LIB3147-029-Q1-K1-G5
ccttaagcccccatatcccattttcggttctttgtaatcgactgaagaccaggccacctcccaccgttctcagccgaacagcagcccctttcaactacgattttgacagaacaggtgggggcgacggcggacgcgagatgcaggtaaggtttccctcgccttttcctttttttttattttttatacattcttatatatatatacatgattaaataaaaaggaaatagatagaaacaaatcaaagaaacagaatgaaaaagagaaaagaagaaaacaccttctcttcaaattttttattgattcttccaaatttttttcaatcgtttttttctccccccttttacagtatattcggctttagccgaaagaaaagaagaaaaaacataaaagaaaatcccctcccttttacaattcttggcttctggcttatatagccaaatacctcttggatactattttttt

SEQ ID NO: 24970 - DNA, 226 bp, Gossypium hirsutum
  Clone ID: LIB3147-029-Q1-K1-G6
cattttttcttccaagagatgagagatgagagatgtttcctgttgtaatgattacccttttgtgcatgactctgcattttaattgctgctgctgctcccattgtttactcttctttactatttctagggaaaaaaacagttatatagatgctcaaccatgaacgcgaaaattgcagctgaaccaaatttcctccaaatcgacaatattgaatcgactatttttggc

SEQ ID NO: 24971 - DNA, 125 bp, Gossypium hirsutum
  Clone ID: LIB3147-029-Q1-K1-G7
agccgaaggaactgtaacatgcattttcaagtcttaaacttggataaagtgaaacattagttaggggaatatatgtaaaccatagtcgactgtgaaattaatctgtctgcaatttttgctctttt

SEQ ID NO: 24972 - DNA, 345 bp, Gossypium hirsutum
  Clone ID: LIB3147-029-Q1-K1-G8
gccacgcgtccggagcaactgccacattcccaattcaggttgtgtcacggctagagcaaatcaggagtataggcatctattggccctctgtgagcagcttcttaaccaagaagctgtgcatctacagcagaatcatccacggagcggaagtgccaagcggcgcacatcatgcgctctacgcgaatctgcgagcaagagagaaaagagatattccgacttgaagaagattgaccgcggtgtgcaccggcatgttcaccacgatatcacagtaatcgcggtggttctcgactcaaacctcatgagcatggatagctcagactagggccctaatctatgcattagagg

SEQ ID NO: 24973 - DNA, 325 bp, Gossypium hirsutum
  unsure (1)..(325): unsure at all n locations; Clone ID: LIB3147-029-Q1-K1-G9
cccacgcgtccgcccacgcgtccgcccacgcgttcgtgacatggctgggcctgtcttgaatgatgagaagcatgtggcaactggatttggcatctcaactttggtggaatgggttctgaagaactcttcttcttaaatgaaagcttggaacatgctctgtcgtgacggtggcagaccgaaaaaggagaacaacctgttcgaggttgttgggttctgtaagatctgtctcatgaataagaagcttgttgttggaatactgctctgttttcctttgctttttgtagcttgttcctacaatgttataactacataaagctnttttacc

SEQ ID NO: 24974 - DNA, 378 bp, Gossypium hirsutum
  Clone ID: LIB3147-029-Q1-K1-H1
cccacgcgtccggaagaatgggagcttgccaaaaagcaggagcttgaagctgcaaagaagaagaaagtcgagaaccgcaagttgattttcaatagggctaagcaatacgcaaaggagtatgaggctcaggagaaagagttgattcgattgaagcgcgaggcgaagttgaaaggaggattctatgtggatccggaagctaagcttttgtttatcgttcgaatccgtggtatcaatgctatgcacccgaggacgaaaaaagattttgcagctcttgcgattgagacagattttcaatggtgttttccttaaagtaaacaaggcaacaatgaacatgcttcacctggttgaaccttacgttacatacggataccctaatct

SEQ ID NO: 24975 - DNA, 356 bp, Gossypium hirsutum
  Clone ID: LIB3147-029-Q1-K1-H2
cccacgcgtccggaaaaagtaacatttcccaaaccaaactagggttagggttatccctaatccgcataaagttttttttacacgctctattcttgctacttaattatcaaatatgggcgcaccaacagactcagccctcgatctcgatgaacagatctcgcagctcatgcaatgtaagccactttcggagcagcaggtcagagcattatgcgacaaggcaaaggaaatattaatggaagaaagcaatgtccagcctgtaaaagcccctgttacaatttgtggtgatattcatgggcagtttcatgatcttcaagaactttttcgaattggggggaaagtgtccggatacaaactac

SEQ ID NO: 24976 - DNA, 383 bp, Gossypium hirsutum
  Clone ID: LIB3147-029-Q1-K1-H3
agtcaactctccaccttgtccttcgtttgcgcggcgggatgcaaatcttcgttaagacgcttaccggaaagacgatcactctcgaggtcgagagctctgacacgatcgacaacgtgaaagccaaaatccaagacaaggaaggcatcccgccagaccagcaacgtctcatcttcgccggaaagcaactcgaggacgggcggactttagccgattacaatatccagaaggaatcgactcttcatctggttctacgtcttcgaggtgggatgcagatcttcgtcaagactttgaccggtaagaccattactttagaagtggagagctcggatacgattgataacgtgaaagcgaagattcaggacaaagaaggaattcaccagatc

SEQ ID NO: 24977 - DNA, 494 bp, Gossypium hirsutum
  Clone ID: LIB3147-029-Q1-K1-H4
gttctagaaatggaatcatctgttctgaattacttgaagtttgaaatgactgccccaacagctaaatgtttcttaagacggtttgttcgtgctgctcaagggatcaatgaggttccatcaatgcaattagagtgcatggccaactacattgctgaactgtctctccttgagtacagtatgctttgctaccctccatcactcattgctgcatccgcaattttccttgctaaatttatacttcttccatcaaagaaaccttggaattctaccttgcagcattacacactgtataagccctccgatctatttgagtgtgttaaggaccttcatagactatgcttgaacaacaacaattctactttgcctgcaatcagggagaaatacagtcagcataagtataaatgtgttgcaaagaagtattgccctccttcaataccttcagatttcttccacaactgaagaaggcattggacaccatcagcaacagcacaact

SEQ ID NO: 24978 - DNA, 342 bp, Gossypium hirsutum
  unsure (1)..(342): unsure at all n locations; Clone ID: LIB3147-029-Q1-K1-H5
gggacgacgccacgcgtacgtcgtaaaataccttgttcatgggcaccttaagatttgagccttgaagcaaacgatttaagggatgggtagctgtctgaagatcctaatctgtgactcgatccccaacgagcatgccaggtgacgcaacatgtattgtttaacagacataacttgggacactcttgctaggcagaaagctgcttttggtccgacgtaatacagcgcacttcattctacatactgtaccagactgttactctgggtatacttcatatgagcacacatctnctgttagtgattactatgaccgcagtgatgcttacttcttaagtggccagctta

SEQ ID NO: 24979 - DNA, 402 bp, Gossypium hirsutum
  unsure (1)..(402): unsure at all n locations; Clone ID: LIB3147-029-Q1-K1-H6
cccacgcgtccgcccacgcgtccgattatttgttgcaaagattattatctttaggaaaagaagttttgatgcaaagatcgaaggttgaaaagcaaagaagcaagttaggagaagaagaacaagctgctgttcttttaatggctctttcttatggctctgtttatgcttagtgttttcttacttttattctaatttaaaaatatatatttagaacagacataataggatctttaatgggtatctaaccattttgaaatgtaaatctttggtaaattagaagctgtctttttaatggctactattgtggtaattggaggtggttggagaagaaggcttggacggaaggaagtggaataagaatganggtttattctaattttccttgaataacttggattgggt

SEQ ID NO: 24980 - DNA, 460 bp, Gossypium hirsutum
  Clone ID: LIB3147-029-Q1-K1-H9
gcggatcagtccaaggacaaggaagcttgaactattttctcgcatgcataatactcatgcaggatggatatcgcttgggaatcagttaaatggggttagactggttgatgaaggcctaagagcaaggtacaaggctgcctacccacatgtagaagtacaacctctctctcctcccaaagcttctgccatggaactagactctacttctgctagaagtccctttgcaacagagtcaagatcacaatttgcggatccagctgctcccgatgctggccatgctcccgaagagagggcaatggctgtagatactgatatgaccacctgaaaacctgacctaccttggttaattcccagatactagttcaagggccgatgtaccattacttaatagttcttttgtttcttttgtaatgattctactgtatcagtcccattttactgtttttagttaatttttgac

SEQ ID NO: 24981 - DNA, 63 bp, Gossypium hirsutum
  Clone ID: LIB3147-031-Q1-K1-A10
gaattatcagatattgttactgttttgagttgtttgagcaatgattttgttttttgaaaagaa

SEQ ID NO: 24982 - DNA, 391 bp, Gossypium hirsutum
  Clone ID: LIB3147-031-Q1-K1-A12
cttgactaagattagtaactccgagaatgatgctaagccagtccatgattgggagagtcttgcttccacttaccgccctcaatatcacaatcaagctttaagggatctcttttctcattacatggaagcttggaaatcatggtattcggaagttgctggcaaaaccccaataaaacaaatctcctaaagcttttgatccaatgacacaccacttgctatctccggttgactgcatcttcggaagcattcttttcttaaaattgatctattttcactattttctcctttaaaaaaaaattgttcctttctttgagatagagatttgacctcttgctagatgcattttctctttgcaccaatttgagtggcaacacacttgtacactaattca

SEQ ID NO: 24983 - DNA, 455 bp, Gossypium hirsutum
  Clone ID: LIB3147-031-Q1-K1-A2
ctggtccccacaagtccagggaatgcttgccattgatccttattttgcgaaaccgattgaagtatgctctcacctatagagaagtcattgctattctcatgcagaggcatgttatggttgatgggaaggttaggacggataagacctatccagctggtttcatggatgttgtgtccattcctaaaacaaatgaggacttccgtctactttatgacaccaaagggcgatttcgtctccatgccatcagtggcgatgaaaccaagttcaagctttgcaaggttcgatctgtccagtttggccagaaaggtattccatacttgaatacatacgatggtcgtactatccgttaccctgatcctttgatcaaggctaatgacaccatcaagctagaccttgaaagcaacaaaattgttgatttcatcaagtttgatgttgggaatgttgtcatggtcact

SEQ ID NO: 24984 - DNA, 329 bp, Gossypium hirsutum
  Clone ID: LIB3147-031-Q1-K1-A3
ctggtccccacaagtccatggtatgcttgctttttatccttattttgcgaaaccgattgagggaggctctcacctatagagaagtcattgctattctcatgcaaaggcatgttatggttgatgggaaggttaagacagataaaacctatccagctggtttcatggatgttgtgtccattcctaaaacaaatgatgacttccgtctactttatgacaccaatgggcgatttcgtctccatgcgatcagtggctatgaaaccaatttcaaactctgcaagggtcgatgcttccaatttgggcaaaaaggtatttcataactgaatacatac

SEQ ID NO: 24985 - DNA, 214 bp, Gossypium hirsutum
  Clone ID: LIB3147-031-Q1-K1-A5
agaacacaaggcgagtcagttggctaactccttaggtaccccaggctctactttttatacctacggccagtaaattgcatggaggtgacaccatataacagctgcgcactcgcatgctctcttaccttaactacgctcatctctagcgcgcgcccctatttataaagctggtacacattccccttccaaaaccgggcatcaaattcgatatgcc

SEQ ID NO: 24986 - DNA, 324 bp, Gossypium hirsutum
  Clone ID: LIB3147-031-Q1-K1-A6
cggtcttgatttacagcgcttgactaagaagtacttgaagaagcacaatgttcgggactggattttagtgactgcttgcaacaaggatcggacggtgtgcgagctccgatactttaacattgcggataatgagggtgaggaggaagagtgaagaccggttcagctttttctctattcatcacccctttgtttgatttatttgttatgaggaacctattttatcaatctcaggtgtcgaatctttggacttgatttggttgttttctgaaccctagtctgatttcaatgaaattttggttgctcatagtaaaacattatgttttc

SEQ ID NO: 24987 - DNA, 433 bp, Gossypium hirsutum
  Clone ID: LIB3147-031-Q1-K1-A7
gagaagtcgaaacatcatattgcactacattcagcaagcaagaagcagcaaagggtagttagggaattaaatttgagggaggaggatgagatggataatttggaaaaagtgttggggaaggaggaggtgaaggaaagaacagaagaacataaaggaagagcaggaaaggagagaagcggtgtaagttcactttctagtctcttcaggtgacacattctcttttccaacagcacaagtcgtgtaccaaagttgtgataaaagtgatagatagaggagaggttggtaattggatatggtgggattacaaatttcttaacaaaaatttgacagtttagtggttaatgtgctttatatcaattaaacattagcgtgttttgtattggtaacgttctttctattctgatgatgaatattactcgacccaatttcaaac

SEQ ID NO: 24988 - DNA, 456 bp, Gossypium hirsutum
  Clone ID: LIB3147-031-Q1-K1-A8
cccacgcgtccgcccacgcgtccggaaaacgccatagtccttaaagaaggattggagaaaacagggcgttttaacatcgtgtcaaaggacaatggggttccactggtggccttctccctcaaagacaacaagcgccatgacgagttcgagatatcggagatgttgcgtcgcttcggttggatcgtgccagcctacaccatgccagccgatgcacagcacatcactgtgctccgtgttgtgatcagggaggacttctcccgcaccttagccgagcgtctcgtcattgacatccaaaaagtgctccatgagctcgataccccccccccggccccgcttccctttttccttttaatttttagtttttgtttctcgccatgtttgttttccccatttttttcaagcttcagcatgttgaggaaactagcttaaagactaccaatgaatgcatttgaatcg

SEQ ID NO: 24989 - DNA, 281 bp, Gossypium hirsutum
  Clone ID: LIB3147-031-Q1-K1-A9
gcgatacctacaggccattcgcttttatgtttacgtacggctcaacttgattctgcgcacgaaaacaaagtgtaagagatgaacaaaatataaagtaccacatttcaaaattacacattaagtttgatctaatgtgcaatgtaatgcaaactttgatttgatgcacttatatacatgaaaggtttatatacaacaaaaaaagaccaaaagctgcatccaaagatctatgggacaatatataagtgagaaaatggcaacgcggaggccgttttataacatcc

SEQ ID NO: 24990 - DNA, 443 bp, Gossypium hirsutum
  unsure (1)..(443): unsure at all n locations; Clone ID: LIB3147-031-Q1-K1-B1
cccacgcgtccgcggacgcgtgggttggtccagtaccagctaggtgtttctcttgggctcatatggccgatgttccccaagtgcctacactcagcatcccggaggtgaaactgagctcctcctccggcggccggaacatgccggtgatcggaatgggcacggcggccgatccatttgatgaaactgctttgaaagaggcgattctggaggctatcagtgtcggttaccgtcacttcgacgctgcatcgctttacaaatcggagaagccattgggagaagctatagcagaagcgattaagttcggttttatcgcatctcgcgatgaacttttcatcacttccaagctatggtgcactgatgctcatcccgatcttgttcttcccgctctcaaaaattctctcaggatgcttcagttggaatactnggacctttatctcattcac

SEQ ID NO: 24991 - DNA, 291 bp, Gossypium hirsutum
  Clone ID: LIB3147-031-Q1-K1-B10
cccacgcgtccgctttgatttggcaaacattgaagtcaataatgtaattgcagaaggctgggcagtttctcagatgctttctcagttatttgatgtggttgttgaggcagatgatgtaccagatgagcagaaagctagaatttgcaagagtttggctgaagcatataagcgtttatttgatggtgcggatgagtatttgcagctgctgtatatggccatcaacacaatgcgagctttgtctaacatgccttaagaattctctttttgtaacttatcgtgaaatgcccattg

SEQ ID NO: 24992 - DNA, 440 bp, Gossypium hirsutum
  Clone ID: LIB3147-031-Q1-K1-B2
ggagtcgtccgcatgataagcagtacgatacaattctttgtttgagtgtgacaaagtggattcacctgaactggggtgatgatggcttgattactgcgttcgcaaagatttggagacttttacgtccgggtggcgtttttgtattggaacctcaaccttggtcatcatatgaaaggaaccgcacagtctctgagacaacaagaagtaattttcgagatatcaagtaccgacctgatttttttagggaaatgcttctagacaagatcggattcagaagggttgaagttgtaacttcagatctgtcgggaactagaaccggtttcaatagaccgatctttgcatactacaaatgaccaattttgatagttcgattttgttgaaggggtaccgagactaacttggacgtgatttttgcctgttaccacacatggatttacata

SEQ ID NO: 24993 - DNA, 380 bp, Gossypium hirsutum
  unsure (1)..(380): unsure at all n locations; Clone ID: LIB3147-031-Q1-K1-B3
cgaagacggagcagccggtgctaggagtcccatactatgcagggccacggatggatggataccaacaggggaggataccagccaacgccatatacggcgatccaaagggaattccgattcagcaaaccatgtatcgggatactcccgctcctttcaattgcccttactgtggtaattccggtctcaccctcgtcagatctaagcctagtttggcagcagtggttggatgcatgatgccctttatgctnggaatctgcttncttagcccttcatggactgtctttgcataaatatcattattgcccanactgcaatgagaagattgctgatttgagaaatcagatccctgtctggtggtggattggcccagtggatgcaaa

SEQ ID NO: 24994 - DNA, 444 bp, Gossypium hirsutum
  Clone ID: LIB3147-031-Q1-K1-B4
caagctcaggccttgagcatgagttggatggtcacaactggtgcagcggctccacttgtaacggaccttccactatacctagctgtggatgaaagtggtgagggaagaagaaaccaaccaacctgcgagaaatggtcaaatgatggcacagatagacacgcagctaaactggtggatgaagatgtcggagctgacatgcaatttcttctatcaaaggctctttgcgtggtgccaatttcactgcccaccgcactttaccacacgctatatcacaatacctcctctgatgctaagcctgatacaaatcctgcttcatatactcctctcttgacgcatagagggaaagaaaacggtgtatcatacggtggatgagactgtggacaaagacggaagcacttaccttgtgtattggcgtggcatggatttttgcatttggtgttatgt

SEQ ID NO: 24995 - DNA, 313 bp, Gossypium hirsutum
  Clone ID: LIB3147-031-Q1-K1-B5
ggcgatgtctagatgcagggcaagtgctgattgagagcgcatgctcggtggaccgagtcgaggaaacactgaatacattgttgcctatgcaccccaagatccgttacttccggttcaatccagtggatgaacgttgtgacatgaagctggacgagactgatccagcagtttggcagaagttggaagctgctacaaaagattacattgaaaataattcggaatactttaatatagcatgtgaaacactggttcaagcctctgctaatagggatactgagaaataaaaaaacacttgatcttaaaataaaacaaa

SEQ ID NO: 24996 - DNA, 389 bp, Gossypium hirsutum
  Clone ID: LIB3147-031-Q1-K1-B6
tccacgcgtccgaccacgcgtacgcccacttttacgtactggagtagccttgaggatttaatgaatagccttatccaggaagggaacataaagctagccgatatactctctagaatgattaacggaggggcagcagctagtggaaacaagaaagggaagaaacaagcaactggtgctagctaaattacttttcgattacgaaaaaaaaaagctttagatagtgatattgcgggaatacgacgaacttgagtttcatttgcaggaagctcatatcctgatttgtacttcgatgcttgcagtaccctggatttttcagggtcacatataatctttgcgtctagaggtttaaactttaaacaactcaattgtaacgagaaaaggaaagatag

SEQ ID NO: 24997 - DNA, 249 bp, Gossypium hirsutum
  Clone ID: LIB3147-031-Q1-K1-B7
ttttgaatggaccgagcaaaaatgggctattacagtaggtttagaatgtgaggttgcatttctttcaaaataatttggtggcagcagcctatcaagtgataaaaagaaattaattaaattaaatttttttcttggcccaattaaaaaaaaaaaaaaaaaaaaaaaaaaaaaaataaaaaaaaaaaaacaaaaaaaaaaaaaaaaaaaaaaaaaaaaaaaaaaaaaaacacaaaaaaacaagaaaaacaa

SEQ ID NO: 24998 - DNA, 457 bp, Gossypium hirsutum
  unsure (1)..(457): unsure at all n locations; Clone ID: LIB3147-031-Q1-K1-C1
tgctttcattgctgcatcagactctgtccatcgatgcacggagctgcattagggtcttgagaggaaattcagcagtgtgcaaagatcctgatcctatttcccccagcatcaaacgttgcagatcgcgtttccttcaaacgcaatggcaaagataattcaggtgcagatacttgtgtgatgcttgatttatcaaaatgtgtattgttttagatgaatctgataatgttctggttgaagattgaatggttttggtggccttctgttgtttaaagggcgacaagaaaatgctttctttaaaatcatttctaggaaatgggagagaaaaaaaaagaagggaaaataaggtttttgtttttcccctttgtttattctgtacttttgaaactatatatattctgttttctcacctcanaaagcaccttgtgaatgttatatagacccagtagtatgtagtagt

SEQ ID NO: 24999 - DNA, 287 bp, Gossypium hirsutum
  Clone ID: LIB3147-031-Q1-K1-C11
aaacaaggaaaaaaaacccccttattttagtttgttcatttttttcctagccttgttagttcatgtttgttagggtgtaatcaaaatcctcttctgtacagagcatctgcactcaaaagaagggaagcaacactcgaagaggtagaaatagtaaaaacatgcatatatggtattgtagggggaagacatctatagagggaatcttaaatctcagttcaaagttgtaccttgatcatgatctactgttatgagatagagaattcactattaaaaggcatcagaatttc

SEQ ID NO: 25000 - DNA, 462 bp, Gossypium hirsutum
  Clone ID: LIB3147-031-Q1-K1-C12
gattccgttgcccggaagtcctcttccagccatctttcatcgggatggaagctggtggaatccatgaaactacctacaactctatcatgaagtgtgatgtggatatcaggaaggatctctacggtaacattgtgctcagtgggggttcaaccatgttccctggtattgcagaccgcatgagcaaggagatcactgcacttgctccaagcagcatgaagattaaggtcgttgcaccaccagagagaaagtacagtgtctggattggaggatctatcttggcatcactcagcaccttccagcagatgtggatttccaagggtgagtatgatgaatccggtccatccattgtccacaggaagtgcttctaagttttgtaattgcttttgatggtgatctacattttgcatttaggtggctttttttgtgtgcggtgtcaagtgaactcccaagtcttgtttatgt

SEQ ID NO: 25001 - DNA, 457 bp, Gossypium hirsutum
  Clone ID: LIB3147-031-Q1-K1-C2
gattatttggggtaatcattcatcaactcaatatcctgatgtcaatcacgcaactgttatgactccatctggagaaaagccggttcgcgagcttgttaaggatgatgcatggttgaatggagaattcataaccactgtccaacaacgtggtgctgcaatcatcaaagctaggaaactctcaagtgcactatctgctgctagtgctgcttgtgatcacattcgtgattgggtccttggaactcccgagggcacatgggtttccatgggggtttactctgatggttcatacaatgcaccagctggggtcatctattccttccctgtaacttgtaagaatggagaatggacaattgtccaagggctggcaattgatgaattctcgaggaagaagttggacttgaccggagtggagctgaccgaggagaaggaattggcatactcgtgcctctcatgaatg

SEQ ID NO: 25002 - DNA, 406 bp, Gossypium hirsutum
  Clone ID: LIB3147-031-Q1-K1-C3
aaacggtcctgcaccttcattttctttcaatctggttctcttggtctcctctcctccgatgcttgacgatcaaaatctggaagccctcctactaggtaatggctaactcctctcttcagcgcttcttttgctagagcatgagcataaaaattttctatgttgggtatgaaatggaactttatctcttgaaattttcctttcttatgttgaatatctctgatgatcgcaccgatgctcgatttgtctatctctgtgttttggtattttttaattacctgctttgaatctcccacaatttccagtttgtttaaacccattaataaccctaacttgactgcttgtaaccctgcatgcgcttctgctgcaaatggatttgcaatttcggagtggatggtcgtttttgatg

SEQ ID NO: 25003 - DNA, 368 bp, Gossypium hirsutum
  Clone ID: LIB3147-031-Q1-K1-C4
aattattatttgttttattaaagttttgattgtttgttaattcattaagtgaattagtacactcaattcatgacaaaaaaaaaaaaaaaaaaaaaaaaaaaaaaaaaaaaaaaaaaaaaaaaaaaaaaaaaaaaaaaaaaaaaaaaaaaaaaaaaaaaaaaaaaaaaaaaaaaaaaaaaaaaaaaaaaaggggggggccgtttaaaaaaaacaaagttaacgaacccgggattgcaaagtaaaaactttttaatagggccaccaaaaaaaaattcactggccgggttttaaaaacgccggaacgggaaaaaccctggggtaaccaaattaaatcgctttgaaaaaaatccccttttcccaagttgggt

SEQ ID NO: 25004 - DNA, 452 bp, Gossypium hirsutum
  Clone ID: LIB3147-031-Q1-K1-C5
ccggtctatattaagcatcgacccacgcgtacgcccacacgtccgcccactcgtccgaaacatttatgagagaagaagggagaggaacacaggggagggagaggggaaggggttctcaacctgcgggccggtcaccggccgatcgtcggccactgtctgtcgccggcgccagccacagcgcacggtggccggagaaggtactggggcggtggagcatagagtgggtgaacggtgggtggctgaatgttagaggattcgccgtcacaagctaggattagggtttaggtattttttgtttctgattgggggtattgggcttagtgtttagttgggctaacggttttgtattgggtttgggtaatgggtaggtttagtgtgggttcaaaatcgctgagatttaatgtattgggctgagtaatttatggtggcccaaaattggcctttaacacatg

SEQ ID NO: 25005 - DNA, 424 bp, Gossypium hirsutum
  Clone ID: LIB3147-031-Q1-K1-C6
tgctttcactggtgaagttagtgcggagattcttgtcaatttgagcatcccttgggttattattggtcattctgagaggagacttatttcgatggagtcaaatgagttcgttgcggataaggttgcttatgcactttctcaaggcttgaaggtgatagcttgtattggggaaacacttgagcaacgtgaagcaggatctactgtggcggttgttgctgaacaaactaaagctattgctgcaaaaatatcagactggactaatgtcgttttggcatatgagcctgtgtgggctattggaaccgggaaggttgctactccatgctcaagctcaggaagtacattttgagttgaggaaatggcttcaggctaatgttagtcccgaagttgctgaatcaacccggattatttatggagggtccgtcac

SEQ ID NO: 25006 - DNA, 449 bp, Gossypium hirsutum
  Clone ID: LIB3147-031-Q1-K1-C7
cccacgcgtccgatcgagctgatgaagcatttagtatgcggtgaggttgtcgacattcgagatatcatcaatgtgagaaacttggatggaagaactgctttgcatatggccgtaactgagaatgttcagtctagtctggtggaactactcatgtccgtgccatctattgacctgaatgtttgtgatgttgatggcttgaccccgttagatctcctcaagagaaggcctaaatctgcatcttcggaaattttaatcaaagaactaattgcagctggaggaatctctaattgtcaagacaatgtagcaaggagtgctcttgtttctcatctgaaggagcacggtgtaggtgctagtcctggaacatcattcagagtccctgatgcagagatatttttgtacaccggtttggagaatacatacgatgcacgttgtgataaagaaagcgtgga

SEQ ID NO: 25007 - DNA, 285 bp, Gossypium hirsutum
  Clone ID: LIB3147-031-Q1-K1-C8
cccacgcgtccgcccactcgtccgaaatatttcttaaaaaagaaagaagaagaagaaagcggggaaggaagaagatgggtcttccatgcactatggctctttggtttcagcttctacttttgatgtgtggcagtgggatacatggtgtgaagaatctgagggacacacaaggggatgctcaactcgttatagaggtgttggataaatagtctattgtttatcatacaccacatgctgtggctgaagattcatcgagacaagttgcttagcaactggtggacatat

SEQ ID NO: 25008 - DNA, 381 bp, Gossypium hirsutum
  Clone ID: LIB3147-031-Q1-K1-C9
gagaaagttaacacccttccggcttttctttctaacgatgacatgctcattctctgtggagtgtacaatcaagccactgttggaccaatgaataccggccgtgctggaatgttcaacatgagggaaaggtacaaagagaattcatgaaatgctgttgaagggaaatcaaaggaggaagcaatggcggattatattaccaaagtaaaacaactgttttaagcatctggaagttcttgatgtgtgtgcgtatggccaataaaaatggtgttaatacaagcccttgtttgtactagtggttatcatgactatgatataaaatatgtactctttatctattgctatatgttatttataaaagaaactccttgttttacttttatt

SEQ ID NO: 25009 - DNA, 453 bp, Gossypium hirsutum
  Clone ID: LIB3147-031-Q1-K1-D1
cccacgcgtccgcccacgcgtccgatcgacaagaaatgcccattcaccggcactgtttccatcaggggtcgcattttagccggtacttgccatagtgccaagatgataaggacaatcattgttcgacggaattacctacattatatcaagaaataccaaaggtacgagaagagacattcaaatatccctgcacatatttctccatgcttccgtgtgaaggaaggagatcatgtcattatcgggcaatgcaggccgttgtcaaagactgtgaggttcaatgttttgaaagtgattcctgctggatcttctggtggagggaagaaagcttttactggaatgtaaggtgtaactgttttcaatcatagttcgggttgtaggaacataaggagaagacattaaaatccctgaactgcctctagatatgaagaacctgggactattagatgtttttat

SEQ ID NO: 25010 - DNA, 374 bp, Gossypium hirsutum
  unsure (1)..(374): unsure at all n locations; Clone ID: LIB3147-031-Q1-K1-D10
cggacgcgtgggcgcaagttctatggagattcggccgtacgaaagaagccgctcggggtgacatggaggccgtgagtggaaaatccctcgtgaaaacccgattccctggctgcagtactagcgtgttctagaaacctctaggtttttggtattctcaagttgttgggcctttttgggccattttggcaatgggctactgtgacttggaccagggattaagttgggggattttgggtgtaatgggactttgggttaaggtctaggtcaatagattttgggtttcaattttgagtctcggggttgaatgtaaaatttgatatttaattgggccaaaactgggcttgttgtaattggactttggacccttntatttt

SEQ ID NO: 25011 - DNA, 441 bp, Gossypium hirsutum
  unsure (1)..(441): unsure at all n locations; Clone ID: LIB3147-031-Q1-K1-D11
aagcatttagtgatactattgatttgtttgttgaaaggtacaaagggcaaaatatatctgttgttgcaggtatagaagcaaggggattcatatttggtccacctattgcattggctattggtgccaagtttgttcctatgaggaagcccaataagttgcctggggaggttatctcggaggagtattctttagagtatggaaaagacaaaatggagatgcatgtcggtgccgtgcaagctggagaacgtgctttgataatagatgatctcgttgccaccggtggaaccttgtctgctgcgattaggctacttgagcgagtcggcgtgcatattgtggagtgcgcttgtgttatcgaattatcaggtttaaagggtcgggaacggttaggagatacaccgctgtttgntcttgtaaactcggcttgatatcacnaagtgtgtg

SEQ ID NO: 25012 - DNA, 446 bp, Gossypium hirsutum
  Clone ID: LIB3147-031-Q1-K1-D12
gccttacaaactcgatatactggaatgctcatacatttgcactcaccgagtccgggaagctttatgcatttggtgcgggagacaaaggtcagctaggcatagagttagctaacaatcagacagaaagaggaaaccccgagcgggttgatatcgatctcaattaggaatccaatggcttctcctcccatttgcatacaccatgggtgattcattagattctggacaatcacgcattgcatgtggtgttttaagtttccctgtttattttgtaaatagaaacaagcaaaaaatgaaattgtgaagattttaagtttaggagtagcaaagggccttaagttggtctgatttcctaagaaaaaatggttagcacataggccttaagttgttaatagctgaaacatctctgttcaggttcattgattacttatgttaaaaattgcattctt

SEQ ID NO: 25013 - DNA, 453 bp, Gossypium hirsutum
  Clone ID: LIB3147-031-Q1-K1-D2
cccacgcgtccgttagtttctcatcgagacaaccttcatcattaggcattttgtctcagatttctgaaatcgaaaatgaaaaccttggggctaatagctttgatggtggcaaacctgaataccaatgtggttcttggaatgaatctgcacaattgactgagaagcacaagttgtttaccaataaccagaatggagatattggaagtggtgttcatgtattaccgcgccatttgagtctgccaaaaacttcgaacgagatggctgtcatggagaagtatctacagttccaagattcagtcccttgtaagattagagctaagcgtggttgtgctactcatcctcgaagcattgcagaaagggtgagaagaactcgtatcagtgaacggatgagaaaacttcaaaagcttgttccaaacatggacaagcaaacaaacacagcagacatgttggatt

SEQ ID NO: 25014 - DNA, 422 bp, Gossypium hirsutum
  Clone ID: LIB3147-031-Q1-K1-D3
gcgagggccgccctttttttttttttttttttttgtatattttggccttttcatgcactttgttgaatgcaagtttccatcgttgagctctaaaaaaaaaaaaaaaaaaaaaaaaaaaaaaaaaaaaaaaaaaaaaaaaaaaaaaaaaaaaaaaaaaaaaaaaaaaaaaaaaaaaaaaaaaaaaaaaaaaaaaaaaaaaagggggggccgttttaaagaatcaaagctaaccaacggggtcttgcaaagaaataggttttttataggggccccaaaattaaatccactggccggggtttaaaaacgttgtaactggaaaaaccctggggttaccaaatttaatggctttgaaaaaaatcccctttttgacagttggtttaataaaaaaaaggcccaaacaaattgcctttccaaacatttgc

SEQ ID NO: 25015 - DNA, 457 bp, Gossypium hirsutum
  Clone ID: LIB3147-031-Q1-K1-D4
cattgttgctctttctggtggccacactctgggaaggtgccacaaggagaggtccgggtttgagggaccatggactaccaaccctctcatctttgacaactcttacttcaaggagcttttgtcgggagagaaggaaggccttcttcagctaccaactgacaaagttctcctgtcagatcctgttttccgtccattggttgaaaaatatgctgccgatgaggatgccttctttgctgactacaccgaagctcacctgaagctctctgagctaggatttgctgatgcataagctgatggttgcggaatagaatgaagccaacaacatttgcctccacaaaatgaatgtattgggttttgtcgtctcttagtagtttataggcagttgttgcttgatgaatatgggtatttgcagttttattttgttgaacatgttgaattgagtttgtgggagatttcg

SEQ ID NO: 25016 - DNA, 331 bp, Gossypium hirsutum
  Clone ID: LIB3147-031-Q1-K1-D6
gtcattattggtcaatgctggccattgtctttaaccgtgaggttcaatgttttgaaagtgattcccgccggatcttccggcggtgggaagaaagccttcactggaatgtaagctgcgagtgttattctgtgtttttgtctggggtcgtaggagcctatgtttcactgctagatttctcttgttattgttcttctttccatttactttttatgtttggatgctgacatctggaattttgaagatatcacttgaatatgcttgaatttttgcattactagatattcccattttcagatgctgaatctattatttaattatgatattatggatg

SEQ ID NO: 25017 - DNA, 333 bp, Gossypium hirsutum
  Clone ID: LIB3147-031-Q1-K1-D7
cggaagagccatcgattatatgtattaatattctgtgcctccgactgagcacagaggatgagatccaatttacagaaaatcaaagagtcaagagctgggcatatatgatacttaccgatgagattgttatgagaggaaaacgtttcatattttaaaaaaactagcaatctttttggcatctaactgtggtgaagaaatctagatctcagttctatttatagccatttgggagtatggttgctcaattctgtcaatataaaagaattgttgcattaatagatattcccattttcagataataaatttatgatgatataatgattttatggttgt

SEQ ID NO: 25018 - DNA, 465 bp, Gossypium hirsutum
  Clone ID: LIB3147-031-Q1-K1-D9
acgacggttcatggcgaacacaaggtatggtgttttgggtggtggagctaactctgtgaatcatggctacaccaagggagatgggcttggtgctgaaattgttggtacctttgttcttgtttacactgtgttctcagccactgacgccaagcgcagtgccagagactctcacgtccctattttggcaccattgccaattgggttcgcagtgttcttggtacacttagccaccatcccaatcacaggaactggtattaacccagctcgtagccttggtgcggccatcattttcaacaaggacaagggctgggatgaccattggattttctgggtgggtccattcattggtgcagcactagcagcactttaccacgttgttgtgatcagagccattcctttcaaatcaaaatgatctacatcaatggtcatgatcatatgatttcaagaaagtgaaagttccactca

SEQ ID NO: 25019 - DNA, 449 bp, Gossypium hirsutum
  Clone ID: LIB3147-031-Q1-K1-E1
atttggaactttcttggtcgtgttggtgggggttacttctcagagattatagtgagggatgatgcttatccaaggccagtatctatggctgttgctcagcttgttatggctgttggccatgttttctttgctatgggatggcctggggccatgtacattggtactttattaatagggcttggctatggtgctcattgggcaattgtcccagctgctgcctctgagttgtttggcttgaaaaagtttggggctctgtacaatttcctcacgctggcaaatcctgcaggttcacttgtcttctcaggtgtaattgctagcagtatttacgaccatgaagcagagaagcaagctcatcaacatcatatccagctgcagatgtcaggcttacttttctcagggttgtatggtcaggatgaagtgctcaagtgtgaaagttctgtatgcttctt

SEQ ID NO: 25020 - DNA, 446 bp, Gossypium hirsutum
  Clone ID: LIB3147-031-Q1-K1-E11
gagagtttaaaacgggattaagggttttaatttgtgaatcatggaggaaacgccttgggtggcgtggtcttttccgaccttgtctgaacccaaatgggttccacgacgtttgggttgccggagaccccccaccgacgaccgaatacgcgtcaaggtctttggaagcgatgggacgaagccagggagtggttgagcctcgagcgttgaatgcgctgaccatgcacgtggggagcggcgcatactgctgctaggtttattttttctatttctgctttttttttcttttttgggttatgggcttgtaaaattttgggctagggtagtgtttggtttgattcgggctagttggtattaaggcccgtataaaattgtgcttttacaatattttatgtacttatgttaaaaagttacattttagtacttacattatcgttttgtttgaagtg

SEQ ID NO: 25021 - DNA, 166 bp, Gossypium hirsutum
  Clone ID: LIB3147-031-Q1-K1-E12
ggccgacccacgcgtcgcgtccacacataactatcgtttagaatttaacttttatacggttcgttcctttattgggatacggtatcattagcacctgtgattgcctcccttcccaaaacaagtcccttttgaacttatttaagatatcaagacttttgtttaaaaa

SEQ ID NO: 25022 - DNA, 444 bp, Gossypium hirsutum
  Clone ID: LIB3147-031-Q1-K1-E2
gccaaaggatccgatggcaaactcaagactttcttctgcaatgatcaatctcgatcatctgtagcatctgatgttaataaacaaatttatgggaacttggttccagtactggagggcgaaaaattatccctcagagtcttggtggatcattcgatcgttgaaagctttgctcaaggtggaaggacagtcatcacatctcgggtttatccgacgaaagcaatctatggagctgctaagctgttcttattcaacaatgctactgaagccagtgtcagtgcctcacttatgatctggcaaatgaactctgctttcattcgaccttatccaaacgattaggagtcccaataggaccgaatagaagttaatccaaaagtcaccattgattaattaattattgtacctcctgctattcaaaagaaaatgaaatttcttgttttttgtact

SEQ ID NO: 25023 - DNA, 455 bp, Gossypium hirsutum
  Clone ID: LIB3147-031-Q1-K1-E3
cggacgcgtgggcggacgcgtgggcggacgcttgggcggacgcgtgggttgcacttttaactctaagccaagaaagcaagtcactagggttttaagagaagatcaaaaatggcatcaaaaagatcagcttccatggccctctttttggcactcaacattctcttcttttccctggtcagtgcttgtggttcttgctattcacccacccctaaaccaaagccaaagccaaaccccaaccccaaccccacccccactccatcttcacaaggcaaatgccctagagatgcccttaaattaggtgtatgtgctaatgtgcttggcttagtcaagcccgtcattggttcacccccagtgatgccatgctgttcccttcttgatggcctcgtcgatctcgaagctgctgtttgcctttgcaccgctatcaaagctaacatcttatgcatcaaccttaacat

SEQ ID NO: 25024 - DNA, 460 bp, Gossypium hirsutum
  Clone ID: LIB3147-031-Q1-K1-E4
cccacgcgtccggatttggagagaatcaggcccagggctatccttgacatcattaaatcaggtgaggattttcgaatttccactacaaccaaaatgcctgagcagggaacctgtgaacgatgtggttatatttctagccagaaatggtgcaaagcttgtgtcttgctggaggggctgaatcgaggtttaccaaagcttggcattggtcgtaatcaaggcctaaatagtgatggtaagaaagatagaaaaagagatagcagaacgccaagtattgagagcaagcaatgtggaagtttggaattctgatccagagttttagattgcttatggaattatcaaattgttgtttgattggccacccaagatctcatatcttctctttttagagcttccaaatgaatagttaggcaaacaaaagcagttaatcgcactgtttgagctattagaactaatcatggaa

SEQ ID NO: 25025 - DNA, 390 bp, Gossypium hirsutum
  Clone ID: LIB3147-031-Q1-K1-E5
gctaatcttgggattggccttcggtgtccgttcctataccaaaacaccagcttcatcttaagcattgacactccccaagagataatttgaacaatcttcacaataagattatgctagcttaaatttgtttggaattttcacatactgcagggtggtaaatggttggatatttttattcaaacatttgctccaatgcagttgaacaaactcagattcgcctccgattgtgataatttgataattgtctttcccagttgataaaagtaaaatatcgaccgacactgtacttacgatgttcaataaagggacagaacatgttgtgacatggtattgcaaatacacaatgaagcgtgcacttatcgcactaaaaactgcataggggggggcctt

SEQ ID NO: 25026 - DNA, 449 bp, Gossypium hirsutum
  Clone ID: LIB3147-031-Q1-K1-E6
cacctctgtctatgtccccaccacaaccacctccatcggcaccgtcgttgccacaactggaaccatcagatcattcaccacaacttccggcgttgacggggctgatgctggtgccgcctccggttccgcttttcaaacatccatcatggtcgccagacattttccgggacgaagcatggcttagaaggaaaggaaacagcaagaaaaggagaagcaagagcgtaacagatgaagaccttgatgaactcaaggcttgtattgagttgggattcgggtttgattcccctgaggtggatccacgtttgtccgatacttttcctgctttgggtctttattatgctgttaataagagctacaacgacgccatctccaagccttccacctcccctccttcagttgtatcggattgtgatagtattcattcccctattggcagcccccacgccatt

SEQ ID NO: 25027 - DNA, 125 bp, Gossypium hirsutum
  Clone ID: LIB3147-031-Q1-K1-E7
ggaattgatcagccacggctgcgggggcatgatttattgtggagcatgtggaaaatatacgaatgagttattaccacacactgatattttggtgaaaacttttcctggataacacatgcaaagtt

SEQ ID NO: 25028 - DNA, 457 bp, Gossypium hirsutum
  Clone ID: LIB3147-031-Q1-K1-E8
cccacgcgtccgatcaaatgaagagagcaaatcacttcacaaacaggagtctttaaaggccttgcggaacaaaatcaacaatgacattgtcaccgtgcaaaagaaggcaaggactatcaaggcacagctcgaagaaatggaccgtgccaatgcaactaacaagcgcctctcagggtgcaaagaaggcacgttagattacaggactaggattgcagtaaccaatgggttgcgcaataagttgaaggagctgatgatggatttccaaggtttgaggcagaagatgatgaccgagtataaggaaacagtagggagaaggtattttacagtgactggcgaaaaccccgatgaggaaatcatcgagaagataatatcagatgggaatggaggggaggggttcttaacaagggcgatacaagaacatggtcgagggaaagtgctggagacggtggttgagatt

SEQ ID NO: 25029 - DNA, 461 bp, Gossypium hirsutum
  Clone ID: LIB3147-031-Q1-K1-E9
cccacgcgtccgctttttgattaatataatttaaaaaggagtagtgacagatcttagtacagtttaaaaagggcaagtagacacggtgtcctggcgaatcaaaggaggggaatgccctgaacaatcaatgtatctgcaaggacctgattagcagcctgcgatggatgaacactgtcccaaaacacatactgggaggcattgggacaagttcccagtgtatgcggattgcataagaattcagttgtctctacagtccctgtgccacagcagcctctcgttgcttctacgaaaccatagtttgaaggggtattaacaacatcaagaagggccttgtaaatgtcaaaaaccacaatcttgagatcagggtgttgcttctggagattggttgctgctgcgttgagctttttgttgaattgctgagcgtcggaatttgaacctgctcacacatcccttctcatggt

SEQ ID NO: 25030 - DNA, 248 bp, Gossypium hirsutum
  unsure (1)..(248): unsure at all n locations; Clone ID: LIB3147-031-Q1-K1-F1
ggtcgaccccaccctcccnnataaaaacatttaatattattaaaaaaaatttttttttttaatctaataaaacaaatttgaggcggcatttttaaattgaggaacatgttaaaaatataacacttgttttataaccacacacttatattttgtgggtggccctttctaaaatacacaaactttatttccctctctttatacacaatctatattttttttttggacacccaaaaactatatcaattgcc

SEQ ID NO: 25031 - DNA, 465 bp, Gossypium hirsutum
  Clone ID: LIB3147-031-Q1-K1-F10
cgagacgattcagaagacaagccgagtcactaaaaatgttgaaaagactcagcgagactcggaaaaacttttaccgaggaataagacaaaggccatggggcaaatgggcagctgagattagagaccctcaaaaaggcgtccgagtttggctcggtacccataacacagccgaagaagcggctcgagcctacgatgaagccgccaagcgtatccgtggtgataaagccaagctcaacttccctcaaacgcccaccaaaaatcaagcagcttcaccagctcttactcagcttcctcctgctaagaaaaggtgcatcgttcccgagttaactcaaccgagtttccagactgactcaccaccttatcctatgggtcttgggtctggaagaagtgaagattataagccgattgaagtggtggagagtgagttggagttgaaaagacaaatctggagcctggaatcatttt

SEQ ID NO: 25032 - DNA, 465 bp, Gossypium hirsutum
  Clone ID: LIB3147-031-Q1-K1-F11
gctcatgttcatggcgagttcgcttcgctttaaacctcaaagggatttcgtatgagtacaaagctgtgaatctttcaaaaggagagcagtttacaccagagtttgagaaattgaaccctctgcattttgttcctgttcttgatgatggtgatgttgtcgtgtctgattcatatgcaatcttgttgtatttggaagaaaaataccctcaaatagctctcttaccagctgatccccagcttaaagctctgaatcttcaggttgccagcatagtcacctctagcatacagcctcttcatatgctgtcaaacttgaaatatcttgtgcaaaaagttggtccacaagaatcacttttgtttgctcaaactaatgtggaaaaaggtttcaatgctctcgagaagttgcttgaagacattaacggcaaatatgcaagcggagacgaagtatacatggctgatgtatttatgg

SEQ ID NO: 25033 - DNA, 408 bp, Gossypium hirsutum
  Clone ID: LIB3147-031-Q1-K1-F2
agttgtagggtattagtcattagccatttaaagccactctaaactgtgtactcgcttgatttgtcccttcaccatattataacatccggttgagtcctgctcaccaatggagtagacaggactgccttggcttgatccctttctagtaagttctagattacctcgtagtttcataaaaatgagtctttgttaattagatctgctacttttgaatggttgatatttatgtcttgattctttactcttccatcagtaggggtaggtagccaagaatcattttaggggcacgtttggttgagaggaatagaatagagctgtaatgtaatagagttgtaatggaatagagctctaatagaatagatctgtaatgaataattcagttgtttggttgaatggaatggaatagag

SEQ ID NO: 25034 - DNA, 348 bp, Gossypium hirsutum
  Clone ID: LIB3147-031-Q1-K1-F3
ggttattcaattacttaccgcaagtgtaatctatcgatatgcaattatgaatgtgttggaaatgttcttttttgcactatcttgcaaccaaaacatttgagactgtttatggttgttatttgtttgatatgaacatgctatggattcaaaatgtgatatcggagtggttgatgtctacaaccccgaaattcaaagagtttccaaaagggttcagaatttttgcatatgtttgagaaactttgaaggagttgagtacgatatctattttttgttctgcttaaaaaaaacacgattcaataagaggaataaaacccagctgtaattgtatataaacagaaatggaataaa

SEQ ID NO: 25035 - DNA, 349 bp, Gossypium hirsutum
  Clone ID: LIB3147-031-Q1-K1-F4
atttctctctttaatgaatctcaaaatcgatttttaaggccaaaaagacacaagggttactgggtaaattaatcttcagcgaatatgttggtttatcaggatcttcttacaggtgatgagctcctctcggactctttcccatacaaagaaatcgagaatggaatgttatgggaagtcgagggaaagtgggttgttcaaggagctgtcaatgtagatattggggctaacccttctgcagaaggcggcgatgatgatgaaggtgttgacgatcaagccgtcaagggtgtggacatcgtcgacacttttagacttcaggagcgacctgcgtttgacaagaagcagtttgtga

SEQ ID NO: 25036 - DNA, 445 bp, Gossypium hirsutum
  unsure (1)..(445): unsure at all n locations; Clone ID: LIB3147-031-Q1-K1-F5
cccgttcgtgaatcttaagaaagaatacaaaggaatttactggcaagaagagttgatcccgttcttccagtctgttacccttcctaaggactgcacctcggttcagaaatgctacatcgaaatctccaagcaggtcaaggcaaaactaggcaaggtagatgactacttcaacaagctggctgatgctatggtgacctggatcgaagcatgggatgagctgaatccatctggtgcaaaatccgccgagctgtccaatggtgcttcgaagtaggcttgttcagtaagcagctaacatattgtttagcagccctaggcttgtttggggatcaccgacacttgccaaagctccattgcttggagtgcttattttgcangttggaggaggatggacacattgttattttatcatattattactgagtttagaacaataaaaaaatggatg

SEQ ID NO: 25037 - DNA, 79 bp, Gossypium hirsutum
  Clone ID: LIB3147-031-Q1-K1-F6
aaaaaaaaaaaaaaaaaaaaaaaaaaaaatttataaaaaaaaaaaaaaaaaaaaaaaaaaagggaaaaaaaaaaaaaaa

SEQ ID NO: 25038 - DNA, 317 bp, Gossypium hirsutum
  Clone ID: LIB3147-031-Q1-K1-F7
gaaaactttgactggaaaaactataacaatggatgtggatagcacttatacagggcgcttggctaaggtctcctctaagtaggagagcctacgtcataatttgtggcagtgggggcctgcgttcgcgcggcccctgttcaatttcagttagttttttttcagttgataactctcaataagattatcagatgccgtagcttataaaattatgatcttcagttaataagaaaaaatcaaaaatggaaaaaattaacttgttatcaagtgtttcattacttaaaaaagatacaatgtttacaagggagattaattaagtt

SEQ ID NO: 25039 - DNA, 427 bp, Gossypium hirsutum
  unsure (1)..(427): unsure at all n locations; Clone ID: LIB3147-031-Q1-K1-F8
cccacgcgtccgcccacgcgtccgaaaaccctcagttcagcaaccggggagcactcattcgacaagtccgccatgggtaaggttcatggatctttagctcgtgccggtaaggtgagaggtcaaacacctaaagtggctaagcaagacaagaagaagaagccccgtggccgcgcttacaagaggatgcaatacaaccgtcgtttcgtcaccgcagtggtcggattcggcaaaaagaggggacctaactcatctgagaagtaagaactatgcaatttaaaaaagttattgtttgaagcttttatggatttaatctgtatttttccctgtttttttgtaatgttttatgatacttatttttatccactggtagtaaggatcaagttgaactngaagttttgttatctaaatattatgtgattttgatatt

SEQ ID NO: 25040 - DNA, 421 bp, Gossypium hirsutum
  Clone ID: LIB3147-031-Q1-K1-F9
atcctctaattctaaagctaagagttttaagttaacgaagcatttgggtcgtttcgaagtaatggaaacttcaggaaaagtaaagaagggagccggaggaaggaaaggtggtggcccgaagaagaagcccgtttcaaggtctgtcaaagctggtctccagttccctgttggtaggatcggccgttatttgaagaaaggaaggtattcgcagcgggtcggaaccggagccccggtttacttggctgctgttcttgagtacttggccgctgaggttctggaattggctgggaacgctgcacgtgacaacaagaaaaacaggatcatcccaaggcacgttctactcgccgtgaggaacgacgaagaattagggaagcttctcgccggcgtaaccatcgctcacggtggtgtgttgccgaacatc

SEQ ID NO: 25041 - DNA, 446 bp, Gossypium hirsutum
  Clone ID: LIB3147-031-Q1-K1-G1
gaaaactttgactggaaaaactattacattgttttttgagagctcagatacaattgataacgggaaggccaagattcaggacaaggagggtatcccacctgaccagcagaggttgatttttgctggaaagcaactcgaggatgggaggacgcttgcggattatagcatccaaaaggagtcaaccctgcacttggttctgcgccttcgaggagggatgcagatattcgttaagaccttgactggtaaaaccataacactggatgtcgagagctcggacaccattgacaatgttaaagcgaagattcaggacaaggagggaattcctccagaccagcataggttgatttttgctggaaagcagcttgaggatgggaggacactcgcggactataacatccattatgagtccaccctgcacttggttttgcgacttcgaggagggatgc

SEQ ID NO: 25042 - DNA, 463 bp, Gossypium hirsutum
  Clone ID: LIB3147-031-Q1-K1-G10
gggcgtattgtgtcgatttttttgagtaatatacctggaaatacccgttgattcggtattaacgccttttcgaacacaactggtacattccaaaataatcgttactcggacatctttactcttggccatgaacctcctttgagtttttaattcacccaacttttctattttccgatcaaaagcgaagaagaaaggaatgaaaaaaaaaagaaataaaagttgctaactcaaaaccaaatcttgaaagattttgttgcaatcaatatagtaaatcaatatagatttatagtaatagtaaataataagaataagaataagtaatacaacgatttcgaactctatttagaatcaaaccaccgtacggtattttctttaagtatcttgtaggatactgttgttccagccacatttctcttttcgctctactagtaatttaattggagcttgaacccgagtttcggtg

SEQ ID NO: 25043 - DNA, 463 bp, Gossypium hirsutum
  Clone ID: LIB3147-031-Q1-K1-G11
ggaagaagaagaagaggaagaggaagaggaagagcagattgaagaagaggagttggaggatggaatccaatctgtcgatagcctttcaagtacccccactggagttgagactcctgatgtcattgaccttcgtaaacagcagagaaaggagcctgagaggcctctctatcaagtgcttgaagaaaaagaagagaggattgcccctgggactttacttggcacaactcacacatatgtagttaacactggcacccaagacaagtcggcagccaaaagggttgatcttctgaagggtcaaaaatctgacagggtggaagtcagtttacagccagaggagttggaagttatggacaatgtgttgcctgcaaagtatgaagaaactagggaggaagagaagctacgcagtcagcgtgaggactttaatgatatggtggctgagaatgagaaaaaaagaagcgaaaga

SEQ ID NO: 25044 - DNA, 434 bp, Gossypium hirsutum
  Clone ID: LIB3147-031-Q1-K1-G12
gttggtccaacgaaacgtggtgtttttggaatgtcgacgttctatttcttttcgggcggaatcgcattgctctcgggcatagcgtacatttttccttcatggcgtgcgctttacgttgcctcgtctgtcccctctatcctttttcttgtcctggtggtccctttcatctctgagtccccacgttggtatcttgttcgtgggaaaatgaatgaagccatgaaaattatgcgcaccatagctaatgccaacggacatcaccttcctgatgaggtcatccttgcactggatgatgaatctaatgatgccttaaatggtaatcaaatttgggaagcagccacagttgataaagaagccatcaatggttccattgtaaatgtaatccgatcaccaaatactctaattctactattcttagcagtgggaatcaactttac

SEQ ID NO: 25045 - DNA, 407 bp, Gossypium hirsutum
  Clone ID: LIB3147-031-Q1-K1-G2
catagaatttatcaacgttgccatgtctatagaccctgaatcaaagatgatcaaaaaggatcaaggacgcatcgagaaatggattcttagaaaggcctttgacgatgaagagcgtccatatttgccaaagcacatcctctaccgacaaaaagaacaatttagcgatggcgttggttatagttggatcgatggtcttaaggcgcatgctgccaaaaatgttactgataagatgatgcttaatgcttcttacatatttcctcacaacacgccaacgacaaaagaagcatattactacaggatgatattcgagagattcttccctcagaactcggctagattgacagtccctggaggagctagcgtggcatgcagcactgctaaagctgttgagtgggatgttgtctgga

SEQ ID NO: 25046 - DNA, 369 bp, Gossypium hirsutum
  Clone ID: LIB3147-031-Q1-K1-G3
cccacgcgtccggatctccagtctacaataggggaaactaccaatgtggatatgcatcgagggttggaattgcggtctccaatcatcattaaggtgcttagaggcatgtgcttcatgaacaataagattttcaggaaacacctcagagaattttatcctttgcttacaaaacttgtctgttgtgaccagttgggtgttcgcggagcactgggtgatcttttcaggatacaattgaaagctctcctaccatgagttatgatgtctatttttgagctgtttttggaggattggggtttcatcattgttgcaagattccatcggatcatgaccatgttgtgttattgcttaccgggcgagaaaaaagaaatt

SEQ ID NO: 25047 - DNA, 457 bp, Gossypium hirsutum
  Clone ID: LIB3147-031-Q1-K1-G4
cccacgcgtccgcaggtgacatttcaggtcttggtccattcgaattggacgcattgcaggattgggagtacaagttcatgagcaagtacgtgaaggttggaaccatcaagaagacaacagttccagtaaccgaaggggatgccagtggtgaagcctcaggagctgcagaaactgatactaagccaactgaagatggtccatcacaaactccagttactgggtcagaggaaaaatcttctcctgcagatactaaggaggagtaacatgttcgagctttagctgtttctgtttcgaacaggtgatcactctttgtactggacatgccggaagagacagcattgtgttgttcgaatgaatgtgaatcgtcttctatatataaactcaagttagtgcagatactgtttctagcaaaacttgcctcaatatttagttccatcaaaaaaataaatgttaaaaa

SEQ ID NO: 25048 - DNA, 456 bp, Gossypium hirsutum
  Clone ID: LIB3147-031-Q1-K1-G5
gccacgcgtccgcccacgcgtacgcgtgactttatatcagcctcattcctggaatagtggagagacgatattctttcctagagaggaaagaacaatggctaaaccagatgaattcaatcctccacaacgtgtccctgattggccgaggcaaatgcacggtcatgtcagtactacactaatgccactgttctctcatgcagcatcatcaagattctcattctcagctacccctccttcaaccgccactgccattcttccatccaaacctcaaaacacaacagcagtccacagtctatgttttgctgcctcaaccagtaacaccatcaacacccctcaacatagtcgggcgtaagttcaattgtaccacaacgacggcgattacaataataatttaaatattgattcaatatacattaagacatggtagtttctgacttggtccgtgaactaaaaaga

SEQ ID NO: 25049 - DNA, 232 bp, Gossypium hirsutum
  Clone ID: LIB3147-031-Q1-K1-G6
cccactcgttcgaccactcgtccgcttttctttctcttttgcattcttgattctacagagataggtgtagtgttactttttgtttttgtcatatacgcatttaccttgtaaatgaattggattcgcctttcttatttatggattatgaaaaactagaatttgtgtgtgactgtatataatagaaaaaaagtaataaaagcgccattattcccaaaaatgggggcggacgata

SEQ ID NO: 25050 - DNA, 410 bp, Gossypium hirsutum
  Clone ID: LIB3147-031-Q1-K1-G7
cccactcgtccgcctaacctcacctcactttttttattcttactcattcactcctacacgggagaaaaaccctttaattttaagaaggatattttggttttatactgagaaatccaacttcttttgtatctttatctttttggtacttcaattatcaaatgagagaaatgcacgatcaaaaaaaaaaataacatacaactaagtgaaaaaccagacacgagagaaaactccaaaaatgggtgttctggatcatgtttcatatctgttcgactgttctcacagttccaagcacaagacacgtaagcagttgcagacggtggaaatcaaggtgaaaattgactgcgaatgatgcgaacggatagtgaaaaaatcactggaagggatgaaaggggtgacacaagtggacgtgg

SEQ ID NO: 25051 - DNA, 253 bp, Gossypium hirsutum
  Clone ID: LIB3147-031-Q1-K1-G8
gcaataaggtacattagctaaataaacagctgtttcatcaagttgaaaaacatcaattggggaaaaaaatacttccgagatagaagccatagcttaggtttatataattggtaatagaatttgtaagaaaaataagttatagaagtcctctaaacgtagaaataacggagcatttcacataacaaatagcagacaacatcttatttcatatgcatattagtccaaaccaacacacttgacattctcatcatac

SEQ ID NO: 25052 - DNA, 455 bp, Gossypium hirsutum
  Clone ID: LIB3147-031-Q1-K1-H1
aagaggaaaaaagtaaaagaaccctaccgacgatgttccggcaagcgtcacgcctcttggctcgaactaccaccccatggaggagaagtcgagcattttcgtcagatctaccagccacacccgctcaagattcgaacttcatcgaatcatggtccaaagtcatacccaacatagaccctcccaagacaccatcttctttcatgacccctcgccccgccaccccttctgctatcccttctaaactcactgttaactttgttcttccttatgcatctgagctctccgctaaagaggttgacatggtaatagttccagcaacaactggacagatgggtgttttgcctggtcatgtccctacaattgctgaactgaaacctgggatcttgtcggtgcatgaaggaaatgatgtcacaaaatatttccttagcagtggttttgctcttattcatgccaac

SEQ ID NO: 25053 - DNA, 249 bp, Gossypium hirsutum
  Clone ID: LIB3147-031-Q1-K1-H10
aggggttcttgaaaaatatcgtatggatagctttgatttggattttgatacgggaatgtagttaatggattgttctcccaaaaaaaaaaaaaaaaaaaaaaaaaaaaaaaaaaaaaaaaaaaaaaaaaaaaaaaaaaaaaaaaaaaaaaaaaaacaaaaaaaaaaaaaagcttggggctttctttttacaaaatcaaattttacatgctcccgcataaaaagttataaatttttattagggaaaacaaa

SEQ ID NO: 25054 - DNA, 289 bp, Gossypium hirsutum
  Clone ID: LIB3147-031-Q1-K1-H11
cttgatctacgaggaaactcgtggtgttctcaagatcttccttgaaaacgttatacgtgatgccgtaacctatacggagcacgctaggcgtaagactgttaccgctatggatgtcgtttatgctctcaagagacaaggaaggactctttacggtttcggtggttgattttggattttagggtttctattttgtaacagtttcttgtaggcttttttttcttggattttctctttagtttaatgtattttcgtttcgaattacgatgaatttctctgaaaatctcgtttc

SEQ ID NO: 25055 - DNA, 443 bp, Gossypium hirsutum
  Clone ID: LIB3147-031-Q1-K1-H2
cccacgcgtccgcttttcctctcctcccccaaaagccctagtcagagccgcatcttcttcttagcctcagaaatggcgaagtcaaagaaccacactgcccacaaccaatcttacaaggctcacaagaatggcatcaagaaacccaagaggcaccgccacacttccaccaaagggatggatcccaagttcttgaggaaccagaggtatgcaaggaagcacaacaagaagagcggtgagtctgccactgaagaagagtaaatttttaatggcaaaagatctagctttgattagtgttttctaattgttgtttttcccccgatggaattgagtgttcgtttactataatcaccttagttgaaatgttattttgggattggtgaatctcattttcaaaagagatttgaagctgtgagcttattaatattaagaacatgttttgagct

SEQ ID NO: 25056 - DNA, 249 bp, Gossypium hirsutum
  Clone ID: LIB3147-031-Q1-K1-H3
agcgaagcgaggaaaatggtgagctaactgacagtgagaaggactatgatttgctgcctaaggtggttgaattctcagaagagaatggccatggaagtgaagagaaacccaagttagagctgccatcagaacaacccaaggagcccaaaaatgagaattccctggaggttaatgatgactcaaaggatgaatctcttcgagatgagggtgccaaagtggagaatgtgaacggagaattgaaggaagatg

SEQ ID NO: 25057 - DNA, 440 bp, Gossypium hirsutum
  Clone ID: LIB3147-031-Q1-K1-H4
cccacgcgtccgcccacgcgtccgtggatatttaaggagctgcaggatatgggaaacatggacttccgttttgctgaggaagaacctcaggatgattatgctgcagagcttgcagaaaatttgcttgtttatccaccagaacatgttatctatggagactatgtctttgagttctgggatgaggaaatgataagaaagattcttggttacttcactcccaaaaacatgagagttgatgtagtatcaaaattcttcaaatcacaagatgtccagttggagccctggtttgaatcacattattctgaggaagaaatttcttcatctttgatggaattatgggaagatcccccagatattgatgtttcactgcatctgcctttgaaaaatgagttcattccatgtgatttctccattcgagctgacacttgcgaaatcaattc

SEQ ID NO: 25058 - DNA, 413 bp, Gossypium hirsutum
  Clone ID: LIB3147-031-Q1-K1-H5
agcttacctacgatcagatctctgaattctttgacgcctttacactgctcgacacggacggagatggttgcattactaccaaggagcttgtaactgttatgcgatcacttcggccgaacccctctgaggcagaactgcaagacctgattcatgaagccgttgctgttggaaatgagaccattgattatactcatttccttaacctgatggcaacacaaatgaaggatacagactctgaggaggagcttaaacaggcattcagggcgttagacaatgatcagaatagcttcatatctgtagccgagatgctccatgtcatgacatacgttgcgcaaaagcttacatatgaggaagtcgacgatatgatccgagatgctgatgtcgatggtgatgggcacatcaactacgaggag

SEQ ID NO: 25059 - DNA, 447 bp, Gossypium hirsutum
  Clone ID: LIB3147-031-Q1-K1-H6
cccacgcgtccgcccacgcgtccgcccactcgtccgcccaaatagaagaaatctcaagctgctgggttttggccatccaccacaccttccacttcttcttcccaacttttatggcccaaccaacattgattgctgctatttgtgttcttactctgtcccatgtagttcaagcaacaacctttaccatagtaaacaaatgcgattatgtggtatgccctggaattctctcaaacgctggtgttccaacacttgctacaacaggtttcaccctccaaagaggtgaaaccaaaaccattaccgcccccacatcatggggcggtcgcttttggggtagaacgcattgctcgcacgattccgacggaaaattctcatgtctcacctgtgattgtggctccgggaagcttgaatgttctgggaatggggctgctccgcctgccactttggctg

SEQ ID NO: 25060 - DNA, 455 bp, Gossypium hirsutum
  Clone ID: LIB3147-031-Q1-K1-H7
agatcttcgttcaaccacgcctaataaccgctcggatttttctcagacgtgaaaaaaatggggctgtctttcaccaagctattcagccggctatttgccaaaaaggagatgcgcatactgatggttgggcttgatgctgctggtaaaaccaccattctttacaagctgaagttgggagagattgtcactactattcccaccatcggtttcaatgttgagaccgttgaatacaagaacatcagcttcactgtttgggatgttggcggccaggacaagatccgaccattgtggagacactatttccaaaacacgcaaggacttattttcgtggttgatagcaatgatcgtgaccgtgtggttgaagctagagatgagttgcacaggatgttgaatgaggatgagttgagggatgctgtgctgctagtatttgcaaacaagcaagatcttgcaaatgc

SEQ ID NO: 25061 - DNA, 457 bp, Gossypium hirsutum
  Clone ID: LIB3147-031-Q1-K1-H8
aacggctacgccgagttcaccgaaccaaaggtcgtgagcgcaaatgcaaaattcgaagtggagtttgctaaagatgggctggtgcacataaggagttgtaccaacaacaagtacttgaagcgaactcataatccttatatcaccgaaaaaccaaatgaggagtattggattactgtaaccgccgataagccggaagaagaccaatccaaggagtcatgcacattgttcaagcctatcttggaagaccctgtatataaaaattttcgatttgtccatgttcaatctggatgctatttatgcttatggccattggctaaatcggaactcggtcgtggcgtgctggcaaacaacaatcatgttgatgctaatcgcgatgatatcttcaaagttattgattgggagtcgttggtgattctgcctcggtacgttgctttcaaaggaaacaatgatatgttcc

SEQ ID NO: 25062 - DNA, 417 bp, Gossypium hirsutum
  Clone ID: LIB3147-031-Q1-K1-H9
cccacgcgtccgcccacgcgtccgaaacaagggaaagaggtaatgtatgacttggaagacaaaattaatcaagctgtctttcctggtcttcaaggtggaccacataatcacaccatagctggtttagcagttgcattgaagcaggtcagaacacccgagtacaaggcttaccaagagcaagttctcagtaattgctcgaaattttctcagaggttgctggagaacggctatgaactagtatctggtgggactgagaaccatttagtcttggtcaatttgcgaaacaagggtattgatggctcaagagttgagaaggtattggaatcagttcatattgcagccaataaaaacactgttccaggggatgtgtctgctatggttcctggtggtatccgcatgggaaccccagctctcaca

SEQ ID NO: 25063 - DNA, 462 bp, Gossypium hirsutum
  Clone ID: LIB3147-032-Q1-K1-A1
cttccaccgtacgaccctgattggtactatataagagctgcttccatggcaaggaaaatctacttgaggggaggtcttggtgttggtgctttcaggaggatatatggaggagccaagaggaacggtagccgcccacgccatttctgcaagagcagtgggtctattgctcgtcatattctccagcaattgcagaatgtgaacatcgtcgatcttgataccgaaggtggtaggaaaatcacatcgaatggccaacgggatctcgatcaagttgctggaaggattgcagttaccctctgagaaatttcactatatggattgagttaagaaaaattagtttgtttgcaagattactgttttatgagatggtgttaaaatcagttctggttgtgtccatgtctggtatcttccattctatatctagaatttttgttttcaagttcattatggtttttttggtgacta

SEQ ID NO: 25064 - DNA, 464 bp, Gossypium hirsutum
  Clone ID: LIB3147-032-Q1-K1-A10
cccacgcgtccgctgcgagtgatgttgatgataataatactgaaccgaggatggatcgaaagactgtggttcattccgatgaatccgacggccagggaggtgctgcagattatgatgatggcgaagaagaattggacttagaagaatcttatgatgaagaggaagaggaagaggaagaagaaattgatgaagggggggtagagaaagtagggaaaacagtgttgcaaaggaatttggatgaaattggagaagatttgaaggaagccgtggtgagtgatgtgaattggagttgtacggatgaggaagaagtggatgtggagattaatgataataatgataatcatgttgaagagaaggatgaaaaggaaaaggagaatgagccatttgctgtgccaactgctggtgcattctatatgcatgatgatcgctttcgagagagagcttaaatgatgtatatgatgatt

SEQ ID NO: 25065 - DNA, 407 bp, Gossypium hirsutum
  Clone ID: LIB3147-032-Q1-K1-A11
cctgcaaacacaaagggatggggcaacaagacagtcaggaggattagggtccgaggtggaaatgtgaagtggcgtgccttgaggcttgacacaggaaactactcctggggaagtgaggctgtgactcgtaagaccagaattttggatgtggtgtacaatgcgtctaacaatgagttggttcgtacacaaactctggtgaagagtgctattgttcaagtcgatgctgctccattcaagcaatggtatctccagcactatggtgttgacattggccgcaagaagaaagcagcagcagcagccaagaaagaaggagaagaaagtgaaactgccactgaagaagtgaagaagagcaaccatgtcttgaggaagctggagaaacggcagcagaatcgcacacttgactccca

SEQ ID NO: 25066 - DNA, 460 bp, Gossypium hirsutum
  Clone ID: LIB3147-032-Q1-K1-A12
cctaaaggtaacaaagctggcgatatactactacggtggctggcatacagatgactttgtttctttcatcaacgagaaatgtgggaccagtcgtgatgcaaaagggcagttaacttcaatggctggtattttgtcaagtttggatgcattagtgaaggagtttgtggctgcttctgccgacgagaagaaagcagtcttctccaagattgaagaggaagttgagaagctcaagggttctaccgcgaggcatggaaagatatacttgaaagctgctaaaagctgtttagagaaaggtgctgactaccccaacaaggaaattgagcggctgcagcgcatgcttgacaagtcactaagcccagcaaaagctgatgaattcacgatcaagaagaacattctatcaacatttgcatcttcttagatcaatgtatttcacctcgtctagtgctgcggtgggttcaag

SEQ ID NO: 25067 - DNA, 396 bp, Gossypium hirsutum
  Clone ID: LIB3147-032-Q1-K1-A2
acgcgtacgaaaatcttcatctgcgaattcgtacgttgttgatgatttatttggaggaatgcccgtctcacaaaatgcaaataacgatgatgattttggatccttcgtctcttccaccaagcaaaagggttctgccagtgacttgctgggtgattttagtggcgtggcggcgaaattgaagagttctagcaagagtggagcgtgggattcggtgaataatgaggctggtgttgatgatttgatacccgggttcggtgcaagcagcccttcagttaataggactaatgttaagacaaccaagtcatccagatcatcagaggaaccttttgttgtattagactctgattttggctcagaatataatttctcagaaacgcccatggatccactgggaga

SEQ ID NO: 25068 - DNA, 284 bp, Gossypium hirsutum
  unsure (1)..(284): unsure at all n locations; Clone ID: LIB3147-032-Q1-K1-A3
ggcagccttggtggtgaagtctgtgactgatggactgagaacatgggaggatgtgtgggagaaatatccccatcacacttctggctcagcagatgattgagccagtagaaattggaaggacacatttgttgacgtaataacaaaaagtatccaccagttggagtttcttaaagtcctcttaatgatttggatggagattacggtattgaacattttgtattcaaagaatctgttgatgttgtttctgaaattgcttattacatatcagttacgatnccnnnnna

SEQ ID NO: 25069 - DNA, 267 bp, Gossypium hirsutum
  Clone ID: LIB3147-032-Q1-K1-A4
taaccggcatcgaggtagctcgaaggcgggtgaaaggatcaggcctgactacgagaactcgggatctcaaatcttttgaaaacgtataccgagctgttacctatcggaacacctggcgtaaactgtaccgtatgatgtgttatgctctcaagagacaggaaggacttttatggttcgtggtgatttggttttaggtctttttgtgaaatctttctgcactgcttgtgagttttcttgttggataatgatttcgttcatgaaattcct

SEQ ID NO: 25070 - DNA, 454 bp, Gossypium hirsutum
  Clone ID: LIB3147-032-Q1-K1-A5
gtgccttgcaggcggacttgcacttgcttcgcttgctgactccactcttggccgcaaagacatgctcttattctcatgtctcatgatgtctttttcttcaatcttcaccgttttttcacccaatatttggatctattctgtcctgagattcattaacgggtttggccgcgcaactgttggaacttgtgccctcgtgttatcaaccgagctagtaggaaaacggtggcgcggccaggtcggcgttgttggtttcttttgttttactttagggtttctttcattgccggtaatggcatacgtaaatagaggttcttcatggagaacactgtatctgtggatttcggttccaacaattttgtactgtatattagttcatttcttagttcatgagtccccaagatggctgttcgtccgaggacgcaaagaagaagcagtgttaacactcaagagcatg

SEQ ID NO: 25071 - DNA, 269 bp, Gossypium hirsutum
  Clone ID: LIB3147-032-Q1-K1-A6
gcagatgatgctaccggtggaaggagtacgactgcgtaccctcagccatctgcttcgcctctttatgcctgataacagaatcaaggtcctgaaccaaagttgcttacctaccaagtatagtgggtgaatcgtctccagaacttgggcattcagtttttccatatatgccttttggctgtacagttattatatgaagctaatgtactcaaaagttggaatgaatgtgcaatgccgtattttgattttgagattacaaagcgtttgtttca

SEQ ID NO: 25072 - DNA, 400 bp, Gossypium hirsutum
  Clone ID: LIB3147-032-Q1-K1-A7
ccgaggctacgacccacgcgttcgcccatccgagacttgtcacccctcatcaccactttacaacaacagctctcctcggactccgttttggatgcccctttccctctttgtcaaccagcaacaccatcgccctcgaaacccgacaaggaaaacgccaccgccgccctcagcttagaagactgcacatcagcaacttgttccttgaaagaagatgatgatgataaagagcaagtcataagacatttgcttgaagcctctgatgatgagctggggattccaaatagagaagatggcgatggagatggtagcggtggtggtggtgatgttggctttgaagatattgagttggaacaagggttcaacaatggcggaaatgggtttgcattgagtgatgggttat

SEQ ID NO: 25073 - DNA, 446 bp, Gossypium hirsutum
  Clone ID: LIB3147-032-Q1-K1-A8
ctcttcagacttcttttcggtggcaagaagcaaccaaaagtagagaagaatccggaggttgctgagacatcaaacaatcaatcaaccagtggagaaaaggctgaagaagaagaagaagaagaagagaaagaaggaaccgctgctgctcctcgcagaaggaggcgtgacacttaaaacagaggtgaatggtgataatctgtttttagtatgggaaaatttttgggctttagaagtggtcttcatagctgaaacattcatggtacctggtgatttttgtttttttttagttttacttgatgaaacattattagattgtattaattgaagagtgtaaacagagacaatttttcatgtcatgtgcctcaaaagcaaaaaccaagtagagggagttgaagtttatggtatgatggtgttgaagcccccaaccttaatggatatgctggaac

SEQ ID NO: 25074 - DNA, 459 bp, Gossypium hirsutum
  Clone ID: LIB3147-032-Q1-K1-B10
cttgaagccgatgttgttctcgtctctgctggtagatctccattcactgccggacttggcttggacaagataggagtggaaactgataagataggacggattttagtcaatgacagattcgctacaaatgtggccggtgtttatgccattggagatgtaattccagggcctatgctagcccacaaagcagaagaagatggtgttgcttgtgtcgagtttatagctggtaagcatggtcatgttgattatgacaaggtccctggagttgtctacactcatcctgaggttgcatctgtcgggaagaccgaggagcaggttaaggcacttggtgttgattaccgtgttgggaagttccctttcttggcaaatagccgagccaaggctattgatgatgctgaaggaatagttaagatattggctgacaaggagacagacaaaattcttggagtccatattatg

SEQ ID NO: 25075 - DNA, 464 bp, Gossypium hirsutum
  unsure (1)..(464): unsure at all n locations; Clone ID: LIB3147-032-Q1-K1-B11
ctgcttctttctcatctccttatcttttttttttcttcattttctcctttcttcagcttcagctttttttttgttctattataatggctgtggctatggcttctgctgctaattgtggtgtatacttttcaagcaacactaacaagcttaattttcctgtttttgatttcaaaaaccattcttggtctgctgcctttgtcaccacaccacccaacattcttgagaaaagaagtgttagattgtcattttcaatgatggggatcattccacgagcaacatcatcagccacagctgtggagagtgatggaagtttccaggacactgatacagttccaacccccaaagttataattgaccaagactctgatccagatgccaccgtagtggaaataacctttggcgatcggcttggagctcttttggatactatgaatgcactaaaaaatctggngttgaatgtttct

SEQ ID NO: 25076 - DNA, 462 bp, Gossypium hirsutum
  Clone ID: LIB3147-032-Q1-K1-B12
cttttgaaaaaaaaaataatggttgtgcaggttctttgtggacgacataccaatcagagtgttcaaaaactgcaaagatttgggagtgaggttcccattcaaccaaccaatgaagatatactccagcttatggaacgccgatgactgggccacaaggggtggtctcgaaaagaccgactggtccaaagccccattcattgccacatacaagagcttccacatcgacggctgcgagtcgtcggtggaagccaagttctgcgccacacagggcaagcggtggtgggaccaaaaggcattccaggacctcgacgcctatcagtggcgcagattgcgttgggtccgcaaaaagttcaccatttacaactattgcagcgatagggtgaggtaccccacgatgtcgcccgagtgcaagagagacagagacgcttgattcatttgcatcaccgagtccaagttcccccc

SEQ ID NO: 25077 - DNA, 451 bp, Gossypium hirsutum
  unsure (1)..(451): unsure at all n locations; Clone ID: LIB3147-032-Q1-K1-B2
cccacgcgtncgcaaaaatcgtcatcgttccacccgacgccgaacttcaacgtggcaagatttatttcctaataccactcccttcaacacccgataaaacccgttccaaaacttcctcaacaaccaagaagaaaaaaagagacaggcttgacaccaccaccaacaacaacggcggcggcgccagtagcaacggccgcaaccgccagcataatcacagccgaagcatgagcaacgccaacaagaacaacaacacaatttcaatgtcgaatcttttgatatcggatcagtatttaagtgagatactttcagagaaactatcaacgcaaagggatcgaagaagaggccgagttggggtgtggagaccacacttagagagcatctccgaatctccaaacgatggatgatcatcatccacgtcactctgttatattactactactactattttcta

SEQ ID NO: 25078 - DNA, 151 bp, Gossypium hirsutum
  unsure (1)..(151): unsure at all n locations; Clone ID: LIB3147-032-Q1-K1-B3
gttntgttaaagggttgaaatcaatttttctttatatttttttgttacctttacttttttattctttttagcccccaaagaatctctctaatttgttggacccttgagtataagtttccactgttatgtatatctttatttctcagttctt

SEQ ID NO: 25079 - DNA, 471 bp, Gossypium hirsutum
  unsure (1)..(471): unsure at all n locations; Clone ID: LIB3147-032-Q1-K1-B4
acgaggttaagcctgcatgctctttcacccaaaaagaaatcgagtatctgacaaaccgcattcagaatggtggtacagaagtcgttgaggcaaaggctggtgctgggtctgcaacattatcgatggcatatgctgcggttcaatttgccgatgcatgtcttcggggcttaagaggtgatgctgacattgttcgatgtgcatttgtggcttctcatgtgactgaattgcccttcttcgcatccaaggtaagactcggtcgttgcggagttgaggaaatataccctcttggcccactaaatgagtatgagagggttggcttggagaaggcaaagaaagaactagaaactagcattgagaaaggggttgcctttgtcaagaaatgaataggtactccaatacccncaaatctaccttttctctgataaccaaagtttgtaagaataaggggtaactctcctcttttgttctaca

SEQ ID NO: 25080 - DNA, 441 bp, Gossypium hirsutum
  Clone ID: LIB3147-032-Q1-K1-B5
caaccttctcggaactcccaaacggcaggctcaagtgcgttgaaacaggccacgagatggtcgtcaaagacaaggattcctatgctcacagcaaacgttgtcgtttaggccttatcgactttgctttgtctcactctaagccccctctcaacatgttcaaacaagaccctctttcccgttcgaagttgatttgtaaactaactggtgataacgtcaacaagtctgaggaacatatttggaagcatatcaatgggaaacggtttctcaataaattagagcaaaaggaaatggagaaggagttgaatgatgaaaccatgtgcgaggaaggtgagaagaagccaaagaaagtaaaaaataagaagaagatgaaggaaaaggaaaaggcagttgaagaaattatctctgaagttagagattcagctgaaaatgaaagtgagtctg

SEQ ID NO: 25081 - DNA, 430 bp, Gossypium hirsutum
  unsure (1)..(430): unsure at all n locations; Clone ID: LIB3147-032-Q1-K1-B6
gcgagcgccgccctttttttttttttttttttttttnnnnnattttttttttttttttggggttggtttttttttttttgggggtgcaaagttaaactattttttatttaatgttaaagttgttttttacatttggaaaaaacctatagtgtttttaattaaccccctaattaacaaaaaaaaaattaccgaaatcgtttccaaaatatacagcatttatttaaatttaaagggggggaaaaaaactttaaacaatactttaaaaagttacaaaagatctaagattgatattaaaaattaaacaaaacttttttaaaaaatgttttttggttatttaaaaaactgaagggggggaaaaacctttttaataacctaaaaagcagggggggacaaataaaggaggggaaatgttaccaatgttttaattttt

SEQ ID NO: 25082 - DNA, 337 bp, Gossypium hirsutum
  Clone ID: LIB3147-032-Q1-K1-B7
atacctctctcctttcactatatctttctcaaccccgtttaaacaccccaggagatggtttttaaagacatggcttcccatgcacacaactatcgatcatcttaaagcctaatcgactttgcttagtcttactctaaaccccctcttaacactattaaacacaaccctctttccagttcaaatttgactagtaaaccaactggagataacgtcaacaaattacctgaacatatatacaagcatatcaatggaaaactgttactcaataaattataccaaaatttaatatataatgagtttaatgatgaaaccattttctacgaatgttataaaaatc

SEQ ID NO: 25083 - DNA, 448 bp, Gossypium hirsutum
  Clone ID: LIB3147-032-Q1-K1-B8
ggagtccactaaaatctcacctctctttctcatttgcatgcttttcatttcctccgccactcccattcttggttgtggttcatgtggcactggcaaagcaccaccaaagccccctaaaggccccattacaatccctcccattgttaatcccccaatcaacctccctcccattctaaatccccctgtgacagtccctccggtgacggtggttcctcccataattactaagccaccaagtgggaaaccttgcccgtcggccacttgccccattgacacattgaaattgggtgcatgtgtggatctgcttggagggttggttcacattggccttggtgacccacttgtgaatgcatgttgtccagtccttgcagggcttgttaagctggaagctgctgtttgcttgtgcaccactctgaagctaaaggttctcaaccttaacatttatgtg

SEQ ID NO: 25084 - DNA, 461 bp, Gossypium hirsutum
  unsure (1)..(461): unsure at all n locations; Clone ID: LIB3147-032-Q1-K1-B9
gattgccgatatgccgtctacgactttgattttgttacttctgagaattgtcaaaagagcaagattttcttcattgcatggtgcccttcatcctctcgaatccgtgcaaagatgctttatgccacatcaaaagacaggcttagaagggaactggacggtatccattacgagattcaggctactgaccctacagagatggatcttgaagtggtgagggatcgtgctcattgaacagtttgcagttttagctgttccatttgaagagattacccaactctgcgttactccttccttcataaagctaggtgcaggatcattttcgcatacaagttagtgtatatttagtccttgaataaccagaatctggtaaaaagctgatctgaagctctaggctaaaagtaactntgttgccatgaattcagattctttaccattcacatatatnnggccaattgcatgtc

SEQ ID NO: 25085 - DNA, 431 bp, Gossypium hirsutum
  Clone ID: LIB3147-032-Q1-K1-C1
cggacgcgtgggcggacgcgtgggttgaaaggttccgtcttcagaatgaagcacttaaagatttagattcagcactttcctttgagcaggataatcctgatataatctttgagttgggagctcattatgcagagcagtggaatttgaatgctgctttgcgttttgcgaagaagtacattgatataaccggtggttctgtaatgaagggttggagattgcttgctctaattttgtcggctcaacagcgtttcacagaggctgaggtggtcactgatgctgcattggatgagactggcaaatgggagcaaggaccactgctcaggctgaaagcaaaattgaaggtctcccagtcacgacccatggaagctattgaaacttactgttacctccttgctttggttcaggcccaaagaaaatcatctggtcctatg

SEQ ID NO: 25086 - DNA, 466 bp, Gossypium hirsutum
  Clone ID: LIB3147-032-Q1-K1-C10
cccacgcgtccgcaatttgggtgaaatgaaatttcatcttttgtttgaaaacttttgacgtaaaaaaagctcaagtttttgcttgaaatcgttggcaaacgcagacagtttttactcttcactggctttatcctcaatttctgtgtctccaaagttccacaggtctatcaagtaaaatgtctgaatctgagcaaacccaaacccaaacccaaaatccagaccccaaaacacccgagcccaaggttcgagcagttggtgtcactgagtatagctggtgcagagccgtgcccggtggcactggcatcactgtcttgtccctcctcctctctaatgtccccgatatctcatttcttgaagcactcctttgcaggctccaagtttctcatcccatcctccgttccagggtccgctttgatgcttcctgcaacactttttacttcgtaatgccttctaacccccatgttca

SEQ ID NO: 25087 - DNA, 459 bp, Gossypium hirsutum
  Clone ID: LIB3147-032-Q1-K1-C11
gatacaccagtacaatgtaagttactatggagacagttcaaatcagagactgaatatacagttactcaagctatttcagcacaggaggcatacaagcgaagtaacaactggttacctcctccatgggcaattgtggcaatggttgtccttggatttaatgaatttatgcttcttctaaggaatcctctctatctcatgtttctatttgttgcatttttactctcaaaagctatgtgggtacagatggatgtcccagggcagtttcaacatggcactctggctgggctaatctctatttcatcaaggtttcttcctactgtcatgaatcttctaaagcggcttgctgaagaggcccaaggccatcgaaccccagagtcccccaggcaacaggaatcatcagtagcttttcagagctttaggaatcaaagtcagctaaatccaacaagctcgattgcacag

SEQ ID NO: 25088 - DNA, 300 bp, Gossypium hirsutum
  unsure (1)..(300): unsure at all n locations; Clone ID: LIB3147-032-Q1-K1-C12
anagaaattattctttgagtgtattatggcncagacaacatccaacaagtttggggtgtgaactgtcaagcccagaaaattctcggaaaattctagtacttgccgttttgaagcagtggaggagaaacttaatgagttgctggattctgaggggggacatttttcatggtcaatctgttctctgtaatgggtggttcctgggtcccaactcccaagcaggtcgcttaaatttagtgtttctgcttgtatgtttttattagaagaggcagtttgcattgtgtcttttacaagtaataaata

SEQ ID NO: 25089 - DNA, 446 bp, Gossypium hirsutum
  unsure (1)..(446): unsure at all n locations; Clone ID: LIB3147-032-Q1-K1-C2
cccacgcgtncgcccacgcgtncgcccacgcgttcggggacgcgtgggtcgcccacgcgtccgcttcgccattgccagcgatcggagactcggagttcaactccaaactatcgccaccgatttccagaggatttataaagtccacgatcggctcttcctcggtctctccggcctcgccaccgatgctcaaaccttgtatcaaaggcttgtctttcggcacaagctgtatcagctaagagaagaaagagacatgaaacctgagacttttgctaaccttgtttctgcgattctttacgagaaaaggtttggtccatacttctgccaacctgtaattgctggattaggagatgaagacaagcccttcatttgcaccatggattccatcggagccaaggagcttgcgaaagattttggtgtagctggcactgcctcggagtctctctatg

SEQ ID NO: 25090 - DNA, 133 bp, Gossypium hirsutum
  Clone ID: LIB3147-032-Q1-K1-C3
gaaagatactggggaggataaaattggttaatttttgatcaatggcatgatgatgaagggctttgttttataaaatatgtaacattttcagcatatgtattagaataaagttactggtaatatattttcagtt

SEQ ID NO: 25091 - DNA, 457 bp, Gossypium hirsutum
  unsure (1)..(457): unsure at all n locations; Clone ID: LIB3147-032-Q1-K1-C4
catattcgccactttcatgttggcttctatgttgggaacctcccttgcatctcgtttgatggctcgatcatcacctagggtagaaagctacatgcaaatcgtttttgtgatttcctcagcctctctcacgcttccgattataaccaatttcttggtagcaccttcgaaagtgaaaggcgaaagcatctcattcgcaggttgtcttcaacttcttggtttctgtacttttgaggcttgcgtagggatattctggccatcaattatgaaaatgagatcccaatacatcccggaggaggctcggagcaccatcatgaactttttccgcattcctctcaacatcttcgtctgcattgtgctatacaatgtcgacgcattccccatcnaccgtatgtttggtatgtgctcgattttcctccttgttgcatccatcttgcaaagacggctgatgggcatttca

SEQ ID NO: 25092 - DNA, 464 bp, Gossypium hirsutum
  unsure (1)..(464): unsure at all n locations; Clone ID: LIB3147-032-Q1-K1-C5
ccacgcgtccggtgcaaaactactgctttatggtagaaatgtcgnggttccgggatatgagcaaggaaattttattggtccgacaattttaactggtgtcacagctgacatggaatgctataaggaggaaatcttcggcccagttcttgtttgcatgaaggctgacagcttggaagacgctttaaacattgttaacagaaacaaatatggtaatggtgcttctatatttactacatccggtgctgtagcgaggaaattccagacagaggttgaggccgggcaggttggcatcaatatccccataccagttcccttgccatttttctcatttactggcaataaagcatctttcgcaggcgaccttaacttttacggcaaggctggagttaactttttcacccagattaaaacagttactcaacaatggaaggatttacctagcggcagcagagtttccctagcga

SEQ ID NO: 25093 - DNA, 279 bp, Gossypium hirsutum
  unsure (1)..(279): unsure at all n locations; Clone ID: LIB3147-032-Q1-K1-C6
tcggatattggggcgttgaatgaatctaagnncactaaacggaaagaaaccttgcagttcaatggcataccatctatctgcaatggatgtataccctgagagcaattgaaatgctttggtnntctgcagtgcattgataccctctctgatataatctggtttaaatgtaaaataccttttaacctttgttgaaagcccttgacattcatatnaaaaaaaaaaaggattggttaacaatgcagcaacctctggtaataaaatttgctattcatcttttta

SEQ ID NO: 25094 - DNA, 458 bp, Gossypium hirsutum
  Clone ID: LIB3147-032-Q1-K1-C7
ccggtgaaaccaaagaaactacagagtctagtgaggcttcagcttaagcacccaaagaggaagttaagagggaagaagaagcaaaaccagctgaagtggaggagaaagttgaaacagaagctgatccagcagagaagactgagtaaataataaagcttttgtgatgaaaatgcgggtgtcaatggaagtgtgtttcaaatggctacagtttgataagtttgcatgtcaagtcaactagttttcttctatgtaggtcaataaggatgtagtaatgtggctgatggaggcccaccgatagtagtcctgcaatgtggctaggttaacatgcatttgcatatgtcaaagagtgacatacttcaagttccattgtgggggaatttttatgggtcatctgttatctgtaaagggatgggtttcttgggtcccaaaccacctttctttgcttatgtttattgttt

SEQ ID NO: 25095 - DNA, 458 bp, Gossypium hirsutum
  Clone ID: LIB3147-032-Q1-K1-C8
cggacgcgtgggcccgtccgttcggcccgactggggttccaacctcggagctcaccatctccggcaacctcctctactcccccttttgaggctcgtatcgtacggatgaagtagaaaaaagaaattaagaaaaaaaaaacatcatcaacaaggagaagcatattcactctctttctctccctttcgttttcatagttctgtgtcaagtgcttgtctttgagccaaaaaaaaaaaaaagctaactcagaagaaggcacgagggccaccagctttctttacttaactactacctatttcttacaactgttgcctgcaatccttccaaaaacccaacttctccttcactcccctcttatatatatatctccttttcttcttcttcttcctctcctcaccaaagaaatcacaatttagcttctaactttgccttttttttttcttttcatctgcaaatctgg

SEQ ID NO: 25096 - DNA, 440 bp, Gossypium hirsutum
  unsure (1)..(440): unsure at all n locations; Clone ID: LIB3147-032-Q1-K1-D1
tctcatattcctgcaaattccctttttttcccctcccacccaagcctaaaaaatcatggcgacagctcanatcagcaaaaagcgaaagttcgtcgctgatggagttttcttcgcggaactcaacgaggtattgaccagggaactggctgaggatggatactctggagtcgaagtcagagttactcctatgcgtaccgagatcatcatcagagccacccgcacccaaaacgttctcggtgaaaaaggtaggaggattagggagcttacctcagtggttcagaagcgattcaagttcccagaaaacagcgtcgagctttacgctgagaaggtcaacaacagaggcctttgcgctattgcccaggccgagtctcttcgctacaagctactcggaggtcttgccgttcgcagggcctgctatggtgtactgagattcatcatgg

SEQ ID NO: 25097 - DNA, 447 bp, Gossypium hirsutum
  unsure (1)..(447): unsure at all n locations; Clone ID: LIB3147-032-Q1-K1-D10
cccgcagatcaacatgtctaattaccattttacgacgtttttatccaaggtggatcgtaaatttaggttgccacatcacttataaatcaggagccttttcttccttgaaatcaaaataaataggagacacaggcttggaagggaactaagctagaggtagagagaaagaagggagttgccaaaatgtcgtcgttcttgcagtcatttctggatcccaagaaaagctggttggcagctctgcacatgaaatccctttccaagcgcctccgcaaatacggccttcgctatgacgatttatacgaccgttactatgatttggatatcaaggaggcgttgaatcggctgccccgtgagatcgtcaatgcccgcaaccaacgccttaagcgttcgatggacctctctatgaagcacgagtatcttcccgaaaaccttcagcanatgcaaaca

SEQ ID NO: 25098 - DNA, 460 bp, Gossypium hirsutum
  Clone ID: LIB3147-032-Q1-K1-D11
cggacgcgtgggttttcctgcttctgcttcccaaaaaccaagtcacacccgggcttgttgggctctctctttcctacgctttatcactgaccggtacgcaaatttttgcatcccgttggtactgcagcttatggaactatatgatttcggttgaaaggataaaacaattcatgcacatacctgaagaacctccagcgattatagaagacaacaggcccccatcttcatggccttctaagggtaggattgaattgcaagaactgaagataagatatcgctcgaatgctccttcagttctcaaaggaatcacttgcactttccaagaagggaacagagtaggagttgttggacggaccggaagtggaaaaactacgctcataagcgccttgtttcgcctagtagagcctgcaagtgggaaaattcttatagatggacttgatatatgctctatgggactgaa

SEQ ID NO: 25099 - DNA, 466 bp, Gossypium hirsutum
  unsure (1)..(466): unsure at all n locations; Clone ID: LIB3147-032-Q1-K1-D12
cccacgcgtccgcacagtcatagttgtttttcttgattcgaatctcgtgagcagagccagctcagcaaaaggcccttcattatccctgagaggaggtggaatcaaactgcctgcaaaaaccaaggctccctgttaatggggttggccacatatgctgttgtactgtacctaccaagtgcgggatccttttctgaacttccatgatgccagcagttattataaggcaatagagaagtttataagccgttgagctggaaaggaaagaagcaggaaaatagaggtgcaaaggtgacagaagaaagattcttttctgtaggactatcatcgttagcattcatttcgtatatttgctggcattttggagtgtttttgggtttgtaaattatgttttacatcccctaaaatcaatcaaaattcctgtaatcgttgtttgcatgtngacatgaatggacactagtggaacaat

SEQ ID NO: 25100 - DNA, 443 bp, Gossypium hirsutum
  Clone ID: LIB3147-032-Q1-K1-D2
ctttctcatcttgtgatttgagcttcgtgtttgtgtggggttaagcaattcgccaagatgcagaacgaagagggtcaaaacatggatctttacatccccagaaaatgttcggccactaataggctgatcacctcgaaggatcatgcttctgttcagattaatgttgggcatttggatgagcttggcagatacactggaactttctccacttttgctctttgtggttttgtccgtgcccagggtgatgctgacagtgcacttgacaggctttggcagaagaagaaagctgaagtccgacagcagtagtgggagttggattgctttttactacttgcttggtctctgaattttggagggaaaatgtgttttttttttaaatcagtgacctttaagttctatcttggtttttttaaaatggattatgttgaatttgatctgaaaaa

SEQ ID NO: 25101 - DNA, 473 bp, Gossypium hirsutum
  Clone ID: LIB3147-032-Q1-K1-D3
cccaaacctaccaagctttacagaggtgttaggctacgtcactggggaaaatgggtcgctgagattcggctacctaagaaccggactcgcctttggttaggcacttttgaaacagccgagcaagcagccttggcttatgacaaagcagcctataaacttagaggtgactcagcgagactcaacttccctaaccttcgccaccaaggttcccacattggtgaatacaagcctttgcattcctccgttgatgccaagcttcaagccatttgtgaaagcttggaacaagaccaaaagcaagggaacaagaaaaaaacatcaaaggaaatgaagaaggacaaggttcaagtggcaacgcctgaacctgaggaaaagacagttaagttggagaactcctcttcatcttcgtctccggttgtgtcggagaacgaggtgtcagcagaatcttcacctttaccagatcttacattctcgaa

SEQ ID NO: 25102 - DNA, 358 bp, Gossypium hirsutum
  Clone ID: LIB3147-032-Q1-K1-D4
attagtagtaattctctgagtgttattttgttcagacaacatccaacaagtttgaagtggcaactgtcaagcccagaaaattctcggaaaattctagtacttgccgttttgaagcagtggaggagaaacttaatgagttgctggattctgaggggggacatttttcatggtcaatctgttctctgtaatgggtggttcctgggtcccaactcccaagcaggtcgcttaaatttagtgtttctgcttgtatgtttttattagaagaggcagtttgcatgttgtcttttacaagtaataataataaatcatagtgcatttgttttaaaaaaaagtttattttttaaaatatttaaaaata

SEQ ID NO: 25103 - DNA, 463 bp, Gossypium hirsutum
  Clone ID: LIB3147-032-Q1-K1-D5
cgctcgcttctctctttcgtcgttctcctcgtaataatcgctcatatttctcgcagacgtgaagaatggggctgtctttcacaaagctgttcagccggctttttgccaagaaggagatgcgtatattgatggttggacttgatgctgctggtaaaaccaccattctttacaagctcaagttgggagagattgtcaccacaattccaaccattggtttcaatgtggaaactgtggaatacaagaacatcagctttactgtctgggatgttggtggccaggacaagattcgtccattgtggaggcattacttccaaaacacacaaggactcatttttgtggttgatagcaatgatcgtgatcgtgtggtcgaagccagggatgagttgcacaggatgttgaacgaggatgagttgagggatgctgtgctactggtatttgcaaacaagcaagatcttccaaatgc

SEQ ID NO: 25104 - DNA, 462 bp, Gossypium hirsutum
  Clone ID: LIB3147-032-Q1-K1-D6
cccacgcgtccgctaacgagatctctgtttcagcggaagaggaattcaacatcgagaagctccagttggtggaggcagagaagaagaagatcaggcaagagtacgagaaaaaggagaagcaagttgaagttcgaaagaagattgagtattcgatgcagcttaatgcatctaggattaaggtccttcaagctcaagatgatgtggttaatgaaatgaaagagtcggcagccaaggaacttctgaacgtgagccgtgatcaccatgtgtacaaaacgcttttgaaagatgtaattgttcagagtttggtcaggctgaaagagcctgctatcttactgcgctgtcgcaaagatgatgtgcccttggtggagtctgtcctggattcagcaaaagaagaatatgcttccaaagtgaatgttcatccaccagagatattcattgacaatgtccatcttcctcctgcac

SEQ ID NO: 25105 - DNA, 317 bp, Gossypium hirsutum
  Clone ID: LIB3147-032-Q1-K1-D7
agaagatgatgagatgaattgttttagttttctagatatccactctcaccaatggcttattaatccttaatgtttatagatttttagatgcaatttgcttgttttttttttctttataattttatgcaacgttttaagtcattttgtcggatttaaaaaaaaaaaaggtgttgtaaatatgatttgggtcacacattattcatatgagagaatattgaaatcgcacaaaagcttatccaaagaatgagctttacataaaaaaaaaaataaaaaaccaaataataaatttaaaaaaaaagaagatcattttatataat

SEQ ID NO: 25106 - DNA, 447 bp, Gossypium hirsutum
  unsure (1)..(447): unsure at all n locations; Clone ID: LIB3147-032-Q1-K1-D8
cgacaatgcagtccgccgtttttaaaaatatggtggagagcctttcagtgcccacatttcgagtggggtatcctgtgactacggacgcgcttgatgccttgtatgagaaggtgaaaccaaagggtgtgacaatgactgctttgttagccaaagctgccgcaatggcacttgcgcagcaccctgttgtgaattcaagctgtaaagatggcaagagttttacttacaatagtaacatcaacattgcagtagctgttgctatcaatggtggcttgattacccctgttcttcaagatgcagataagttggatttgtatctactgtctcaaaaatggaaagaattggtggagaaagcccgggcaaagcagcttcagcctcaagagtataattcggngacattcactctgtccaatctgggcatgtttggagtggacaggtttgatgccattc

SEQ ID NO: 25107 - DNA, 367 bp, Gossypium hirsutum
  Clone ID: LIB3147-032-Q1-K1-D9
agatgcagtcctgaaaatcgtgaagatgcctgagtctgaaagactcaagatagctacagcaacaaggagaagagctactagattttcggagcaaagattttacaatgatctcaaagccgcaatccgaccaattatatgcggttcttcctagttataggattgcattagaagatcacactgacatagaaaacaatagttatacttgttcttgtttattgggttcttcaccctttcgatccagtcattagaaaaagcttagtttagatttgtcaacaaaatagatatactcttaattttgatttgaaaacatactcttaattttgatttgaaaacatacttgaaggaattgaggatcatgtttggttca

SEQ ID NO: 25108 - DNA, 468 bp, Gossypium hirsutum
  Clone ID: LIB3147-032-Q1-K1-E1
gaagaattctccagggtcatgagtcaacatatggtacatttttcaactgatcccaatgctgatagattaaaccggttgaaaggggaaatgagccaggtacgtagtgtaatgattgacaacattgaaaaagtattggagagaggcgaccggttggagttgctggttgaaaaggcaagcacaatgcaggggaattcacttcgattcaaaaagcaatctcgtcgttacaagaatgccatgtggtggagttattgcaagatcacggtgacattgatactgctgctttcgctgatcatcgcttatattctgttcgcatttgttttttgatggactcttttttttgtcgtcctggttgatgtaacaaggcagtggcttttcctgatttgtcccatctttttatttttcacatatatacatacacatctatttgtaacatatttttaaaaccagttgatgaatccataaacaaac

SEQ ID NO: 25109 - DNA, 419 bp, Gossypium hirsutum
  Clone ID: LIB3147-032-Q1-K1-E11
cccacgcgtccggaggcaaaacaggccttttctttactggatccgaatgcgcaccgacaacacggttaggtacaatgctaagcgtaggcactggcgccgtaccaagctagggttctaagttcgatgggcttatttgtttccagtattttctttaagttttctaagtttattttcggacttattttatttgggatttaatattgggaaccatcgagaatctttgtattagggattttgatgagattgttagtggcttcgttttagtttgattttatattatctcatcttaatgtgagtgcatggtattgaactttcctttggtaattgctttaatttaccttatatgttaaacaattctcacctgcatgatagctatgtgcttgagggtggctttatcaaatttattactttattttaac

SEQ ID NO: 25110 - DNA, 442 bp, Gossypium hirsutum
  Clone ID: LIB3147-032-Q1-K1-E12
ccagaaaccgggtccgggaactgagcgttatttcgggttgttgtatcctaacgggacaaacatatacgggatcgatttgactgggaagactccggattcgtgtttcgagccgttgccgaggccagataataacgagccgtataaggggaagatttggtgcgtggcggctaaaggtgttaacgagactgcgcttagttcagcattgtcatacgcgtgttcgcaggggaataagacttgtgacccgattcaacccggaaagaaatgcttcaaaccggattcattgttttggcacgcgagctacgcgtttagttcttattggtcacaatacaggaagactggcgccacctgttattttaacggcttggctactcagacggctaaagatccaagttttggtcactgtaagtttccaagtgttactctttgatgaatacccaatcac

SEQ ID NO: 25111 - DNA, 432 bp, Gossypium hirsutum
  Clone ID: LIB3147-032-Q1-K1-E2
ttgagagatgctgacacaggcgatgttttcaatgtagaagttagaaggccggagcttccagagggatcccaagattcagtgaaagataaagggttggtggtgagagattgggcacctcagctggagatattagcccaccctgccattggtgggtttgtaagccactgtgggtggaattcatgcatggaaagcatcaccatgggagtaccaataggggcttggcctgtgcattcagatcaaccaagaaacgcagtactaatcacaaagttgctcaaactcggcattaccatcaaggactgggcacgtcgagatgaagtagtgacagcagcggtagttgaagatgctgtgaaacgtttgatggcttcaaaggaaggagatgagataaggaagagagcggcagaagtaagtggtgcggtgcgccaatcggtggct

SEQ ID NO: 25112 - DNA, 458 bp, Gossypium hirsutum
  Clone ID: LIB3147-032-Q1-K1-E3
aactgaacctgtcaggacatacctcgttttcctttcgattttcacttcgatccccgatgtttggagtattggtcaaatttttcctatcgtccccattcatcgtttggatcaaaagccagaagtgaaggctattttgtcggatttaacttgcgatagtgatgggaagatcgataagttcattggaggtgaagccaacctgcctttacacaagccgggtaatggccagtactatttatggatgttcttgggcggggcttatcaagaagctctcggcggtgtccacaacctattcggcagtccgagtgttgttactgtcttgcaaagcgacggtccacatagcttcgcaataacacatgcaatgtccggcccatcatgcgcggatgtccttcgagtcatgcaacacgaacccaaactcatgttcgaaaaccttaagcaccgtgccgaagaattttgcggca

SEQ ID NO: 25113 - DNA, 415 bp, Gossypium hirsutum
  Clone ID: LIB3147-032-Q1-K1-E4
ggagcattgagagaaaaaagaataaactcttcatcttcgcttcttccaagtccaccgccggccggtctatcaattgaggctaccagatcttcattttatggataataagaaacccggcaatgacggaactgccgacgaagtgacacgggagtcactcattgctatctcttactcgttaccggacaaagttgctgctgcctccaaactctcatccgataattcaaaccgtgaaaagctgttcgaaagaaaaggttccgatggggacgaaaaatacaggtccgaattgatctcgatatcatattccaagtcacccgaaggtaagggcttgccgtctacgttgaattgacctaagcattagaagtgctgttgttcactgtgtttgttgtaagttgtacattttggatttgatcaaact

SEQ ID NO: 25114 - DNA, 460 bp, Gossypium hirsutum
  unsure (1)..(460): unsure at all n locations; Clone ID: LIB3147-032-Q1-K1-E5
aaccctgccaacaccaatgcattgatcctgaaggaatttgcaccttcaatccctgcaaagaacattacctgtttgacaaggttggatcataacagggcactaggtcaaatctcagagaaactaaatgtccaagtttctgatgttaagaatgtgattatttggggtaatcattcatcaactcaatatcctgatgtcaatcacgcaactgttatgactccatctggagaaaagccggttcgcgagcttgttaaggatgatgcatggttgaatggagaattcataaccactgtccaacaacgtggtgctgcaatcatcaaagctaggaaactctcaagtgcactatctgctgctagtgctgcttgtgatcacattcgtgattgggtccttggaactcccgagggcacatgggtttccatgggggtttactctgatggttcatacaatgcaccagcntgggtca

SEQ ID NO: 25115 - DNA, 462 bp, Gossypium hirsutum
  Clone ID: LIB3147-032-Q1-K1-E6
aagagttgatgtctcttaagacatattacgagtgttaaggacgtgagccttttttgtcagactcagtcattaatggtgtagtgtggtggagtgaaagaggttttagaagaggaggttagctaaagaagaaagcacctacaccatgacaaaggtagctttggttttcaagtgctccctcttattaatgacctgctgttttctagtgcaagacaaggcagatgcagggattccagtgacaaccctttcacccccagaaggaaacacaactttccttgatggcaccacatggtgtgtggcactggcaggtgtctcccagattgacttgcagaatgcattagactgggcatgtggactgggaatgtctgattgtggtgcaatccaggagggaggaaaatgttatgagcctgacacactcctttctcatgcttcttatgcctttcataattactaccaacagaatgg

SEQ ID NO: 25116 - DNA, 430 bp, Gossypium hirsutum
  Clone ID: LIB3147-032-Q1-K1-E8
cccacgcgtgcggtctaggaagttggtttgagaggactgaccagcaagaggtacatgaggatcgtgctgagatggctgagagggagacaaatgatcaggcttgtatgcaaccatgtggggccttcactaaaccaagcataactcacactagagctgtacataatacctcaacttctacagctagtacttctgtcgatacttctagttcaagattggattgaggtcttgaaggaggactctaggctttatgctgcgagtagggtaacggatattggacctgaccatagtccaaacgattataagacgggagatgggactgatggtaaatccaatggggatacgagtacgagtacagagactgaacctgctaccgtggaggatattggcgaggaactttactatgtggaaacgtatctagaaatgagttgat

SEQ ID NO: 25117 - DNA, 465 bp, Gossypium hirsutum
  Clone ID: LIB3147-032-Q1-K1-E9
cttctgaagatctttttgactcatcgattagatgcctacctggaatttcaggctgcaaattctaccttaatgaaaagctatggtcttgttcacgaagattgtataacaaagatgaggttgatgtcattggttgatcttggctcttatgaatctggacaaattccatatgccctcatcaaggatactcttaggatcaacgatgatgaggtggaattgtggattgttaaggctataactgctaagttaatcgactgtaaaatggatcagatgaaccaggttgtgattgtaagccgctgtactgagcgcatttttggacagcatcagtggcattctcttcggttgaaactagcaacatggaggggtaatgttgctagcctcatcagcaccatccaagctaacaaggctgtggaagaaggctcacaagctatgcaagggatggcaattcggtagagctattatttataa

SEQ ID NO: 25118 - DNA, 351 bp, Gossypium hirsutum
  unsure (1)..(351): unsure at all n locations; Clone ID: LIB3147-032-Q1-K1-F1
gcgttaaggctaaagaaggagaagcttgtcaagattaggaagcccatttctaaggaggagggcaaccgcaatcaagtcggcaggcaaagcatggtatcaaactatgatctcagacagtgattacaccgagttcgagaacttctcaaaatggttgggcgtatctcagtaatttagttcttccttaagaaattatggcagacaatcatttttatcagttttgttttaatgtttttgacatgttatatgttgatggccttttggaatagtttcatttatcttgaagacaaggattaaatagttttcttccattctccttttatgataattttgagatgttggttgtgtgccgna

SEQ ID NO: 25119 - DNA, 206 bp, Gossypium hirsutum
  unsure (1)..(206): unsure at all n locations; Clone ID: LIB3147-032-Q1-K1-F10
naaaaaaataaatatcttcaataaaattttttgtattaaaaaaacaaaaacaaaacaaaaggacccgtaacattaaaaactgggggggggcgtcctttttaaacgaaccatactaacttgcgcgtgcatgcaacactgtattttttatttatagaaatctaaatttaactcagtgcccctaattttacaacttattgagaagaaaa

SEQ ID NO: 25120 - DNA, 459 bp, Gossypium hirsutum
  unsure (1)..(459): unsure at all n locations; Clone ID: LIB3147-032-Q1-K1-F11
ggaattcgggtcgacnacgcgtccgcccacgcgtccggattgacaggcgatctttgtaaggagcttgagaaggaacccaagttcttgaagaatggtgatgctggtatgattaagatgattcctaccaagcccatggttgtggagaccttctctgagtacccacccctgggtcgttttgctgtgagggacatgcgtcagaccgtggctgtgggtgttatcaagagtgtcgagaagaaggacccaaccggtgccaaggtcaccaagtctgctgctaagaagaagtgaagaggccaaaaggttttagccgtgaagcagattgagtgttttatctttggttatatgtggtttgaagtttttgcctgttttatgtaggatttttaaaagttgagatgctttggtttgccaaggcgtcttagtcaagttttgtgtctgatcttgcggaactatactttgtttttt

SEQ ID NO: 25121 - DNA, 427 bp, Gossypium hirsutum
  Clone ID: LIB3147-032-Q1-K1-F12
cccacgcgtccgcccacgcgtccgcccttgcgttcgcccacgcgtccgcccacgcgtccgaaaaggtgtcgtcgtcggggaggaagatcacccttaagagctcggacggcgaatcattcgaggttgatgaagcggtggcgttggagtcgcagacgattaagcatatgatcgaggacgattgcgctgataacgggataccgttgcctaatgttacgagcaagatcttagcgaaggtgatcgagtactgcaagaaacacgtcgaggctcctaagacagacgatcgatccgccgatgacgagctcaagagttgggacgctgactttgtcaaggtcgatcaagccactctctttgatctcattctggcagcgaactatttgaacatcaaaggtttgctggatctcacttgccaaactggtgctgacatgat

SEQ ID NO: 25122 - DNA, 405 bp, Gossypium hirsutum
  unsure (1)..(405): unsure at all n locations; Clone ID: LIB3147-032-Q1-K1-F2
cttaacttggcctgaggcaagctgacgatggactatcatttcgatatgatcacctcaaaagttggtgaaccattggggagtctaatgagttgtgctggaaagttgggattttctaattgaacttgtagcagttaactttaaggtacagtatggttctcactacttatcttttccttgtattcgnggttgcgagaaactaaatttcagatgctaatcccggtgggaatgtagttaaacaatatttgctntattttgtaatgtgtttagacttggccgtagtctaaaaggcataagaagataggagtggatgctgtgagtaattagaacatttttgcatgtaatttgcaatagatcaatagtatactttgattgaagaaagtaaatacttcgttttatttggntttt

SEQ ID NO: 25123 - DNA, 463 bp, Gossypium hirsutum
  Clone ID: LIB3147-032-Q1-K1-F3
cggacgcgtgggcggacgcgtgggaaatgtgaaaatggagtgcgtgttcggcttcgtaggcaatggctttgccgtagtggcggcggacacatcggcggttcacagcatcctcgtccacaaatccaacgaagacaagatcatggtcctcgattctcacaaactcatcgccgccagcggtgaatccggtgacagagtgcaattcacggagtatatacagaaaaacgtggccttgtatcagtttcgcaatggtattcctttgacaactgccgccgctgccaatttcactcgcggtgagcttgccactgcattaaggaagaacccatacttcgtgaacattcttcttgctggctacgacaaagagacaggcccctcactttactacattgactacatcgctacacttcacaaagttgataagggagcattcgggtacggatcctatttttctctctctatgatggac

SEQ ID NO: 25124 - DNA, 456 bp, Gossypium hirsutum
  unsure (1)..(456): unsure at all n locations; Clone ID: LIB3147-032-Q1-K1-F4
cccacgcgttcgtgtacagttgtatatttctacccccgggtttcaaaagatgtagtcctgcaacggaacagccttggagttgaatggcgttaacaatactatattcatgcaaggtcttcccgggttaaactatattgttgcagaaaccgatgcagctaaccctcagaaagatcctagggtgcccggaaaacaacagacagttatctcattcaccaagaaaacgaccccttccattaacattgctgcaggtgatggattcccctctaaagtgttcttcaatggcgaggagtgtgcactcccttcaatgctgccaacaaacagcggtaatcgaaagggctcaacgactgtaatctcgatcttgatagcagttcttgtgttcatgctggttcaacagtagctacaaatgtgccattactttgtggttgtgttggtcttttctgcangttcttctctttt

SEQ ID NO: 25125 - DNA, 463 bp, Gossypium hirsutum
  Clone ID: LIB3147-032-Q1-K1-F5
cgccactcgccaccaggaaggggaaatcaaatcctatatcccccttgtaaaacactttgctttcgatctgagaatttgccaagagaaatcaaatcctatatcttcaatttctgatagaaaattcacgccacgaggcataggtcattgacaaatttgcaagtacttgaatttgtgtgaaggaaagatgcaaaatcaggatggagcggtagctgatagggaaaaggaatctgctgtatccattcccatttctgaagttgatgactgggcaaacttcgcagatgatgatatcatgcagcaacaatctgccattaatgctgaggaggccaagaaaattccatttgttggtgacaaggaaccactctctatgttggcagctgaatatgaatcaggaagtcctatattgctagaaaaaataaaggtgcttgatcagcaatatgctgccattagaagaacgcgaggagat

SEQ ID NO: 25126 - DNA, 401 bp, Gossypium hirsutum
  Clone ID: LIB3147-032-Q1-K1-F6
cccacgcgttcggtagtgagcatgatgtcaagggaaagggctctcccgttgacggcatggctcagcctggtgcattgatcacacttccacctctaagggcagttgctaggccagagatacagaggaactccgtacctacagcaaatctagatgaggaagaatgggttactgtttatggattttctcctgctgatacaaatttagttttgcgagagtttgaaaagtgtggtgtgatattgaaacatgttcctgggccaagagatgctaactggatccacattctttattcgaaacgatccgaggctcaacgggctcttggcaggaatggaatgcaaattaatggagtaccaatggttggtgtgaagccagtggatcaaatgcaacgcgaggcattaaatgaa

SEQ ID NO: 25127 - DNA, 465 bp, Gossypium hirsutum
  Clone ID: LIB3147-032-Q1-K1-F7
cccacgcgtccggccctcaaagtccaattcgctaacaatggcagccgccgccgcccgtcctctggtttcggtgcaaaccatagagtccgatatggctaccgacgctacacctactgttcctctcgctgatgtcatgaaagcctcgatccgaccagacattgtcatcttcgtccacgataacatttccaagaacagccgccagccttacgctgtctccaagcgtgctggtcaccagacctcagctgaatcgtggggaactgggcgtgccgtctcccgtatcccgcgtgttcctggtggtggtactcaccgtgctggccaaggtgcttttgggaacatgtgtcgtggaggccgtatgtttgctcctactaagatctggcgccgttggcaccggaagatcaatgttaaccagaagaggtacgccgttgcctcggcaatcgccgcttctgctgttccttcactcgtgat

SEQ ID NO: 25128 - DNA, 461 bp, Gossypium hirsutum
  Clone ID: LIB3147-032-Q1-K1-G1
acgcccacgcgtacgatttactttttctccacacttgctctaaagcacccatctcttttcttcttcgctcttttgtctctcaaatgtccattaaccacttccagtaattcaaacaaaacaatccaacgacaaaacaaactccttctatggaaccaacccaaacccccccttcttcaaagcttcacaacccttcctcaatttcccttgaaaactccccctggacctctcacttctacccctccatgttcctatcctccatccacgctccccgccacttcaaccttaaccatgacgacgacgaagaactcgacgaccaaacctccactctcaacaccctaaaccctaaaccaaatccccctgaaaaccaccagctaggccatgaaacggaacccatgtttgaaaagcccttaacccccagcgatgttggcaagctgaacaggcttgttatccccaaacaacat

SEQ ID NO: 25129 - DNA, 81 bp, Gossypium hirsutum
  unsure (1)..(81): unsure at all n locations; Clone ID: LIB3147-032-Q1-K1-G10
attcacacatcagaagcaaactgttggctttatacgaagatttggtcttttggttgaatgcatgtgattattattaatntt

SEQ ID NO: 25130 - DNA, 462 bp, Gossypium hirsutum
  unsure (1)..(462): unsure at all n locations; Clone ID: LIB3147-032-Q1-K1-G11
cccacgcgtccgaaaactcattacatattcggctttctttctatatcccttgtctgtttatatttgagagcttgaattatggctttgaggaactttggcttcgattctccactctttacaatcctggaagacatgctggacatcccggaggaacaagagaagtcccgaaacaacccatctcgagcctatgttcgagatgcaaaggccatggctgccactccagctgacgtgatagagtacccaacatcttacgtcttcatcgtggacatgcccggcataaatcacggcgagatcaaagtgcaggttgaaaacgagaatgtgcttgtggtgagcggggagcgaaagcgtgagaaaatcaactacgagaataagtttgaagcaactgtangtggaagaagtgtgtgcaagagctcgatgaaattttacacttttggtgactatgtaatcactgaagatgaaatc

SEQ ID NO: 25131 - DNA, 427 bp, Gossypium hirsutum
  Clone ID: LIB3147-032-Q1-K1-G12
atgggaagctcactgcagtttactgctatgatagaggaaagggatgtttctggcggaaaagtcaagggaaaaggaactggcaccgttctcattgtaactctcgttgctgagaagtcagaccttagcattaatgctgcaatgctccaggagggactagctaggttggagaaaaggaagagatgggaatccaaggatagaaaatcggtgattgacaacttagagaactttcagaaggaggcaaaaactggtaggcgtggaatttggcaatatggagatgtggattcggatgatgatgaggatcttcctacacttgcagcagctgctgctaagaagacgggggctggtcgccgatagatttattaatattaatcacttgaaagtaaactccttcactttgggagttatgattaccccaaatgagtacttt

SEQ ID NO: 25132 - DNA, 340 bp, Gossypium hirsutum
  unsure (1)..(340): unsure at all n locations; Clone ID: LIB3147-032-Q1-K1-G2
cggaattnnccgggctcgaccccacgccccgtccgggaccgaattaaagggagctatnntgatagaagtctgtaactttaaggggtttctggcatnntgaataattacgtgatgactgagaanntaggaaagaaaggtaaagaatnntggatnnctgtatctngnnatttggccccctacaaaaggatgganntagttcaaatttccttactttagttaccaacannntttaatanannttcaagccaacntnncgtatgtatttctttngnncttgagaaannacaaaacannnatgtaactannattaatggccaatnnntccgttcaatttcttctt

SEQ ID NO: 25133 - DNA, 417 bp, Gossypium hirsutum
  Clone ID: LIB3147-032-Q1-K1-G3
cggctcactcgcgtgctaaagtcgtgggtatcacgatcaacgattaccaagtgaaccgcgcccggatgcacaacaagaaagccgggctagattctctttgcgaagttgtttgcgggaacttcctggagatgccgtttcaagacaacagcttcgacggcgcctactccatcgaagcaacatgccacgcgccgaaactggaagatgtctacgccgaggttttccgggtattgaaacccggatctctctacgtgtcttacgagtgggtcacaactgaaaagtaccgagcagataaccccgagcacgtggaggttattcaaggtatcgaaagaggcgatgctttgcctggcctcaggagctactccgatattgccgaggctgcaaaaaaagtaagatttgagattgtgaaagaagaagatc

SEQ ID NO: 25134 - DNA, 450 bp, Gossypium hirsutum
  Clone ID: LIB3147-032-Q1-K1-G4
ggtgttcgtacgatggaaggctttcgtttgaacactcgtgtcgggatccaatacttaggggcttggttaaccggttcgggttcggtcccgctttataacctaatggaagatgctgcgacagccgagatcagtagggttcaaatctggcagtggttgaaatatggtgttgaattagacggtgatggacttggggttcgagtgaaccatgtgttcgggcgagtggttgaagaagaaatggctcggatcgaacgtgaggtcggaaaagagaagtttaagaaaggaatgtataaagaagcatgcaagatttttactcgccaatgcactgcttcaactttggatgagtttttgacacttgatgcttataattacattgtcattcatcatccaaaggatgtttcttctaagctttgatgaagctttcatgaaatcttaaactatggggtttgagtg

SEQ ID NO: 25135 - DNA, 460 bp, Gossypium hirsutum
  Clone ID: LIB3147-032-Q1-K1-G5
ctcttggcaacactccaccttgtcagatcaagattgtatcaactggtcctaatccagagtgggatgaaagttttgcatggacttttgagagtcctccaaaaggccagaagctgcacatatcttgcaagaacaagagcaaaatggggaagagttcctttggaaaagttacaatccaaattgatcgagttgtaatgcttggatcggtagctggtgagtacacgttattgccccaaagtaaaagtgggccatcacggaatttggaaatcgaattccagtggtctaacaagtgaagaaggtgagagagataattatcattattattattattactattattatttttcccggaaatttgatgattgatcaagtagggaacatacgttttggtttttccaattttatatcataatattacagtgtacatagtcttccggtgattttgacgtgtgtagaaatgttt

SEQ ID NO: 25136 - DNA, 311 bp, Gossypium hirsutum
  Clone ID: LIB3147-032-Q1-K1-G6
cccacgcgtccgcccacgcgttcgattgcctgtctgaggactctgtacattgccatggagtgagactaaaatctacctcaagtagcttccttcatttgctcatcagtcagtaagcataactgagaagatcaaaagcttcggtatctgagaagatcacttcaagtaaaatgggtttgactgctacagtttaggatggtaggaagcttttaggttaactctaaaagacttttgacacttgcgaagggttgcaaatctggtttttaccactggttgttctcttaagatgattaatgccatgtagcctgcataat

SEQ ID NO: 25137 - DNA, 413 bp, Gossypium hirsutum
  Clone ID: LIB3147-032-Q1-K1-G7
gcggggacaacagattactagtatttcatttatcatgtcagtcatataatttagcatgtggagcttcactagactgctcagaccaaacactttttagtagtgaggaggaaggtaatggccaatgcactggcactggtgagttgaagctttcatggtttaactggttgcgaactagcttattttcaagcaatacatctttgaaaagaacatctatagaatatagtcagtcataggctctaattgttcttctaatttttgacctgtaattttctaggattctagcatggtaaaggtggcacataatactgtgccccagctgtagagattgtttgtgctcgagcccaaaatcaattagaaaaattggacatcattatgctctgaaagatcagagccacttgtagagaaaacaatac

SEQ ID NO: 25138 - DNA, 510 bp, Gossypium hirsutum
  unsure (1)..(510): unsure at all n locations; Clone ID: LIB3147-032-Q1-K1-G9
ggaannacccgggctcgaccccacgcccgtccggcaagaaaccctaagttaattcaagcacccatatttgttgtagtaaaagccaccctagccannctctccaacgagagtgagatctaagaaaaggaatcccttttccttattcggaggctnnngtcctcagttcctttcattggactttgatatcnaaccggatcaaggcattggatgtcatcgatcgagtggacacacttcgaagtttgtaactaaatgttgaattgagattcataggccttttactttgcttgtgtaaagtgtccatctgctgcatttttcggtgttgggtgctaaattggtttgcagttggcaatatttttggtgagtttacgaagcagatgctgagtgatcatgatacaagctgttatttttcttacatgtgaaaaagtgtagggtaatgaatgtatttattcaaaggggaatttaaactgattttctagcctatagntctctctttaagtctatatgtacaga

SEQ ID NO: 25139 - DNA, 453 bp, Gossypium hirsutum
  unsure (1)..(453): unsure at all n locations; Clone ID: LIB3147-032-Q1-K1-H1
aaaacaatttcttattaagtatatcatttctctaacactcgctaaaacgccttggttccccttcccggcccctcccttggttttatgcttctccatttcgaatcccttttaagctcccacagccctaatctctttatttcctttttgtttttctgcacttatttgaattggtaatcgtttcattaaattgggttatcgatgagagcaccaaacatggcaacgatcacagaatcattggagaggtccttacagaacttttctttgaaccatgaaagaagcaacgaaggtggggctgaagaagggataatagggaggtcttccacatcaggtgacaacaacaaccttccaaacaccgtttctgacactagctnggagctcaactctcatctctctcttccttaccattgggaacaatgcctngatctcaagacaggggagatttactacataaac

SEQ ID NO: 25140 - DNA, 358 bp, Gossypium hirsutum
  Clone ID: LIB3147-032-Q1-K1-H10
ggcgaatttgcaaagtatagagaaacgttcgtacggagaaaatcgctcgtgaaagccgtgattgcagcactggtgtgttctggaaacccctagtgctttcggctgctgagattccccttttgggttctttcgagtttgggcctttttgcaaatcgggcttaaggatattggtctttgggcctctgtatatgtttgggctattcgggcattggaccagatctgtttttttatttttggggctagtataagtttagtgtttattaaaggttgtaaatagactatttggactttatttgggtttatttggctgactatttacttattgcgagtgaaaaaataaaataaagggccgggcccc

SEQ ID NO: 25141 - DNA, 349 bp, Gossypium hirsutum
  unsure (1)..(349): unsure at all n locations; Clone ID: LIB3147-032-Q1-K1-H12
tcctttcaaaataaaaaaaacattttttttttttttaaaaacaaaaacaannnnanncgtggaaaggtgcaattacaaattaagtcatccaactaaaatacacaacaatttcctcatccattctcaaataaattattaaataaatgccctccttttaaaataattaaaattctttccctctataaaaaaccttatatttcttcttttttttcccctaaaataaaattcttccctccctttttaccctcattttaattgaaaaaccccccgtttcccccttctaaatattttttaaaaaaaatcccttttctccaattgcctttttaaaaaaatttcccccccctatttc

SEQ ID NO: 25142 - DNA, 429 bp, Gossypium hirsutum
  Clone ID: LIB3147-032-Q1-K1-H3
cgcgtgggcccacgcgtccgcccctctggatatgtttcttcaagagagaatcaaggttggaggcaaggctggtgcacttggtgaaaccgtagccctcactcgcgagaagagcaaaattaccgtcacttccgatggcgacttctctaagaggtatctgaagtacttaacaaaaaaatacttgaagaaacacaatgtacgggattggctccgagtaattgcttccaacaaagatcaaactgtttacgagttaaggtacttcaacattgctgagaacgagggagaggaagaagattgatttcttgggtgaacaaccagttttaatgctagctgatttgccaccttttttttttgtttgattgttggggctttagacaaccaggtttataaaaacttttgttatttactgaaacatgagactttgcaatggct

SEQ ID NO: 25143 - DNA, 284 bp, Gossypium hirsutum
  Clone ID: LIB3147-032-Q1-K1-H4
ctcatgtgtcatcgttttgtttttgactggtttcctggccaccattcttatgcgagtcgtgaagaatgatttcatcaagtatgcacatgatgaggaatcggcagatgaccaggaggagtctgggtggaagtatattcatggtgatgtgttcagataccccaagcacaagtccttgtttgccgccgcccttggttctggcacccaactcttcactcttacaagtttcatttttatccttgctctagttggggtcttttatccatataaccgaagagcttttttta

SEQ ID NO: 25144 - DNA, 287 bp, Gossypium hirsutum
  Clone ID: LIB3147-032-Q1-K1-H5
cgacccacgcgtacgcccggaggtcattggagcttgtatgaatcactctttgaatttgcgtgtgttgttttctttctgattccaactgatttgatgattttgtttaaaactaggagaaattttccatggttttgatttgatctctaggatatggttttgcaaattgatattgagttagacaatctgttgtattagaaagtccctactctatatatgaaatttattataaaaaaaaaaaaaaaaaaaagacagaatggaaaaaaaaaaaaaaaaaaaaaagggcgccc

SEQ ID NO: 25145 - DNA, 446 bp, Gossypium hirsutum
  Clone ID: LIB3147-032-Q1-K1-H7
ctgcaattgcatacgcactctctctagatacagaaaaaacaggggaagatgactgaggcagtgataaggaaagaagccaggaatggcgagtgtgaaagacatgccaattctccaagatgggcctcctccgggtgggttcgcccccgtcagatacgcccgtcggatacccaacaagggcccaagtgctatggctatctttctagctgcttttggtgccttctcttatggaatgtaccaagtcggccaagggaacaagatccgcagggcactcaaggaagaaaagtttgctgcacgtagagcagtattgcctgttcttcaagctgaagaagatgaaagatttgtcaaagagtggaagaagtatctcgagtatgagggcgaagtgatgaaagatgtccctggtttgaaaagaggcgaaaatgtatacaattctgggagatggatgcccc

SEQ ID NO: 25146 - DNA, 441 bp, Gossypium hirsutum
  unsure (1)..(441): unsure at all n locations; Clone ID: LIB3147-033-Q1-K1-A1
agaagtcaggaagctctccacanagcttctaccgaaaatgccgaagcaaattcatgagagcaaggacttccttctcactgccagaaggaaagatgcacgctctgtaaaaatcaagaagagcaaagactttgtcaagttcaaagttcgctgctcaaagtacttgtatacacactgtgtgtccgatgctgagaaggctgataagttgaagcagtctcttcctccaggtttgagtgtccaggacctgtgaaaatagggccgcttcgagtttatcatccaattactaggtgaaagctagattttgactttgcttttatcatatttcatgcctttcaaactcaaaatttactggaatggatttgtattctggttatttttatggatatgagtaaggtcgagttactgtttaatggttaatgaatgtgttttgcttttggttgtcct

SEQ ID NO: 25147 - DNA, 425 bp, Gossypium hirsutum
  Clone ID: LIB3147-033-Q1-K1-A11
cccacgcgtccgtcgaagaatggttcatccatcacaaagttgatgtaatcttttctggtcaggtccatgcttacgaaagatcctatcgaatctcaaatataaggtacaatgtatcaagtggtgaacgtttccctgtaccggacgaatcagctcctgtttacatcactgttggagatggtggaaatcaagaaggtttagcaggaaagtttagagatccccaaccggattattcagcattccgagaagccagttacggccattcgacactggagatcatgaacagaacacatgcacactatcactggaaccgaaatgatgatgggaaaaaagtggcaattgactcatttgtattgaacaatcagtactggtcaagtaacgtgcgagaaaggaaactaaagaggcattatttgaatgggatgaggatg

SEQ ID NO: 25148 - DNA, 450 bp, Gossypium hirsutum
  Clone ID: LIB3147-033-Q1-K1-A12
cccacgcgtccgcccacgcgtccgggagaggcaaagaagcaagcaggtttgtttgttgatgtgggttttggttgctgcctttttctcccacaatagggtcattgcagtgacctccactggccttggtgagcagaaaaactactatccagctcctgaccctcatgctggaactcccccttcaggttcacatggcacaccaccatcttcaggaggtggatcacctccctctcatggaaccccgtcacatggaggtggttaccacccttcaccaacaccatcaacgccttcgggtggaaattgtggaactcccccacatgacccttcaactccatcaacaccatcacacactcctgctcatggtactccaccatcatctggaagtggtagtcccccatcgtatggaagaggcagtcccccatcgtatggaggaggcagtcccccatcgtatgg

SEQ ID NO: 25149 - DNA, 344 bp, Gossypium hirsutum
  Clone ID: LIB3147-033-Q1-K1-A2
cggacgcgtgggacctgaagaaaggaaaatccaagtctctctctctctaaccatgagtcgcttcggtctgggcagaaatcagcgaacattccgtccaaaaaaaagtgcaccttcaggaagtaagggtgcacagcttaaaaagcacatcgatgccaccttaggcagtggaaacttaagggaagcagttagactacctcctggggaggatttaaatgaatggctcgcagtcaatactgtggatttcttcaatcaggtgaatctgctctatggtaccctcactgagttttgtactcctgagaattgccccacaatgactgccggaactaagtatgaatatagaatgg

SEQ ID NO: 25150 - DNA, 439 bp, Gossypium hirsutum
  unsure (1)..(439): unsure at all n locations; Clone ID: LIB3147-033-Q1-K1-A3
ggcaaagagtataatgtccgtgtggcttctaggtactttaaagggcctgagcttctgggggatttacaagactatgactattccttggacatgtggagccttggttgcatgtttgctggaatgatattccggaaggaaccattcttctatggccatgacaaccatgatcaattagttaaaattgccaaggtcctaggtactgatgagttaaatgcttatctcaacaaataccatttggagcttgatcctcaacttgatgctcaagttggaaggcacagccgcaaaccctggtccaaatttattaatgcagataatcagcatcttgtttctcccgaggctattgattttcttgagtaagtgcttcggtacgaccatcaggacaggctaactgctagagaggctntggcccatccttactttgcacaagtcagggcagcag

SEQ ID NO: 25151 - DNA, 362 bp, Gossypium hirsutum
  unsure (1)..(362): unsure at all n locations; Clone ID: LIB3147-033-Q1-K1-A4
actcagtcaggggacctccccttgcagaccttgtacagtagtatgggtgatgacgtttatgcttggggtttcattcccaaaaccaagtatgttactgttaaattccataacccaggtgttcaagaggatcccacctgtggtccattgttggatgcggttgctattaaggagcttgtccgtcccagagctaccagatataatctggtgaagaacagtggctttgaagagggtcctcatcgcctagtcaactccaccaatggtgtcttgcttccccctcggcaagaggatttcacatccncacttccgggctggatcattgaatcactaaaagccgtaaattcatcgatgcaaagactttaacg

SEQ ID NO: 25152 - DNA, 290 bp, Gossypium hirsutum
  unsure (1)..(290): unsure at all n locations; Clone ID: LIB3147-033-Q1-K1-A5
ngcncnccancgngccgggccggcgcaaagccgggaaagcaaaanccggggggcgccaaaggccgcgacgaggcccgcagagaaaaaaccaccggaagagaaaaaagccgagaaggcaccagccgagaaaaagcccagagccgagaagaagcagcccaaggaagccggcgacaagaggaagaagcggccaaagaagagcgacgaaacccacacgagcaacaacaanaaggggcgggagcaagngcacccngagagcgggaaggggagcacggccaaggggacgcggaaca

SEQ ID NO: 25153 - DNA, 247 bp, Gossypium hirsutum
  Clone ID: LIB3147-033-Q1-K1-A6
agcttgcccttttttggttgtaaccatagagtcagtttgttaaggggttttttgcgtttaacagtaattgtttgacaaaactggcataattctattcctttgagtcatgagaattgaggagacgagcatgagatacagagccattctcattgctctctaagtattcatttcttttattgatgagttcatttgatttcaataatgattaacttattgtagtattttgtcatttagtgagacgaaatgg

SEQ ID NO: 25154 - DNA, 288 bp, Gossypium hirsutum
  Clone ID: LIB3147-033-Q1-K1-A7
cccaccaccaccaaagagccacaagcctacccacaaaagcccaccctcgggcctgaacagccaggcacttgccccagagagcactgaaactaggcgtttgtgctgatttgttgggctcagtgcgcgttgttggaccgcgaggaccaaatggctgctctctcatttcgggtttgggtgatctcgatgctgctgttgcctttgcactgtattaaagctaatgtgtggggggtaacctaaacgtcctgttcatttctttgctcctcaattctgcgaaaagaaatgcctgct

SEQ ID NO: 25155 - DNA, 243 bp, Gossypium hirsutum
  unsure (1)..(243): unsure at all n locations; Clone ID: LIB3147-033-Q1-K1-A8
ctnnnggagcaggcagaggannnnataaaagaaaggcctatggaaccnggagcagccatgctaggagcaatgtagccgggtctcgagttcataataatgttgaagtaggtgaacgaatagcaaagaaacttattagtctagagccagagaaagcaggttatatgtgttgttgtcaaacatatacgccgctgctagcaagtttgatgaagctgaaaaagtgagggagctaatgaaggggaaaaa

SEQ ID NO: 25156 - DNA, 433 bp, Gossypium hirsutum
  Clone ID: LIB3147-033-Q1-K1-A9
cccgcgcgttcgaatttttaattttcttttttcatggcaatcctaaaccttgtctccgttgcggttattgaggcgccataaccgtcaccaaacgctacagctggattctcagtaggagtttctaccgtcgacattggctgctttatgatcgttatcccttacttgcttttttcaagcattaaattgaaggactggcatgagtctcctctctgtgtggctatcttttatatatatatatatgtatgaatgtatgtatttatgataccattctatcttatttaaatgcattgtaatgaattttattatctgaataaaatacttgcgttataagttatcttttttatactaaacccttcgagttcaactatgtagtttcaaactttaagagataactccctccctgtttctgttttctgttcatgtatgaatttat

SEQ ID NO: 25157 - DNA, 424 bp, Gossypium hirsutum
  Clone ID: LIB3147-033-Q1-K1-B1
ccaaattatgaaccgcaagatagtgagaagaaaaagatgagatctccctttagttgccgagcttcagtgtcgaagcaacagaagacttcacatgaatcaccttcaagaggctgcttgccaccatcgtcgaattcgaataattcaaacaatgttttacattgaaaggaaaggtggggttttcttttcgttggcattttgagtgcatcccaagcaacctccaaagaaaaaaaaaaggaaaagaaaggcattaatgtttgaagatttcttttggtgttgtgttcttgttcctttaggatgttgtcttgtttataacacaacaccaatgtgctttttaggtccttatttggagatgttgatttattcctttctgaaaaagcctaataaatgcaagtttctaaattaatgtattttattttatttttta

SEQ ID NO: 25158 - DNA, 442 bp, Gossypium hirsutum
  Clone ID: LIB3147-033-Q1-K1-B10
tggtagcctatacactgattgggatctccttccaccaaagaagatcaaggatcctgaggccaagaagcctgaagattgggatgacaaggaatacatccctgatcctgaagacaaaaagccagagggttatgatgacattccaaaagagattcctgatcccgatgctaagaagcctgaagattgggatgatgaagaagatggtgaatggacaccctcaacaattcccaacccggagtacaagggccaatggaagccaaagaaaatcaagaaccccaactacaagggcaagtggaaggcaccaatgattgacaacccagatttcaaggatgatccagatctctatgttttccccaccttgaagtatgtcggtattgaattgtggcaggtgaaatctggaacaatgtttgataacatcttagttgctgatgatgtagtgtatgcc

SEQ ID NO: 25159 - DNA, 441 bp, Gossypium hirsutum
  Clone ID: LIB3147-033-Q1-K1-B11
gtaaaattaggcggagtagatcttgaggattcagttagaaattcgaatgaagatgtgacgagtgataaggtagtggaagaccagggacaaaatgcatgtaaacgaccagaggcttgccgcatttccagtagtgccgaaatcaagcttatccgaattcagggtatcgaaccgaagttagagatacccttttcttgggtagcaaacaatttattaaacccggactattttcttcacgtctgtgtttgtgtcaaagttgcacaataaaatcccacatgaaggggatggatatgtgtggatatgtttctcctgttgcgacagggaagttagggtctcttctttttattcatttgacactgtgaatatgttgattgcatcaatgtcttacaaaaattgaaaagaaaaagccactgtgatacttagaagtaacactgagctaggata

SEQ ID NO: 25160 - DNA, 439 bp, Gossypium hirsutum
  Clone ID: LIB3147-033-Q1-K1-B12
cccacgcgtccgataaacccctacattccctccccccccatgttgcagcaaccacattggggaacgcaaacgagccgattctaaatgcatcatacatcaaagccggaccgttcagctatggatcgggacatatacaaccaaactttgctatggatccgggacttgtttatgacttatccactaaggattacctaaactttctatgcacattggggtacaacgacacactaatatcaacattctcgcaggacaactacaagtgccccggttcgctcaatcttgccaacttcaactacccttcaatcactatccctaaccttgttggatccattacagtgaccaggactgttaaaaatgtaggaacaccaggcacttacagagctcaagtgcagaaaccagtcggaatttcggttaaagggtaaagccgaaaaatttgaag

SEQ ID NO: 25161 - DNA, 328 bp, Gossypium hirsutum
  unsure (1)..(328): unsure at all n locations; Clone ID: LIB3147-033-Q1-K1-B2
cccacgcgtccgcccacgcgtccggnggtccgactggttcatggatattgatcccttctgggttactactggggggtcagggtggtttccaatttctcactacaatttcatttcatggcgatgcctcacaaatcaatctctgaaaactcaacttccataatattgtcttcacaatcatgtgccctactacagcttttcctcctcctcctcctcctcatttctcctctctttgctcgtcccatctgttcctcttcctctactacgagaaatttgcacccattttcgacttctttgacgtcgatcccagcagctcaaaaccccgggaaaa

SEQ ID NO: 25162 - DNA, 296 bp, Gossypium hirsutum
  Clone ID: LIB3147-033-Q1-K1-B4
cttcaaggtaagagtcgattgattcttcgaaaaccataaacgaaaccaaatatggcggagaaagcaatcgagtcggttcaatgctttggccggaagaagacggcggtagccgtaacacactgcaagagaggccgtggtttgatcaagatcaatggttgtcccattgagcttgtcgagcccgagatcctccgtttcaaggccgtcgagccaatccttctcctcggccgtcagcgttttgccggcgttgacatgaggatccgagtcaaaggtggaggtcacacttctcagatctacgc

SEQ ID NO: 25163 - DNA, 312 bp, Gossypium hirsutum
  Clone ID: LIB3147-033-Q1-K1-B6
cccacgcgtccgcccacgcgtccggctcatcctcgcgccaaggcttccgtcgatgccccgatctccgatcgcgacagagaggggcaccaactcggcgattccggcgaaaaaggtacgtgcttgtggggaaggtccgagattcgcgacggcgcgatgtgcgggattgacgcgcaaagtgcgggagcgaggggcgccgcattggcgaggccgttgcggcgctgaacttgctgctaacagcctagggtttctgcagtggtttctgctttgggctagtgggctagggttaggtgttgggccattctaggtttaatt

SEQ ID NO: 25164 - DNA, 254 bp, Gossypium hirsutum
  Clone ID: LIB3147-033-Q1-K1-B7
cggacgcgtgggcggacgcgtgggtttttagtcttaaaacttaaaccgggttccgattgtcttaataaaaatggcggtggtgattgatctttgatcatctttgatatatgatgaaataaaataaatatataaactaggaaaaaatttacctagtatatattttatagtttaaaaaaaaaacaaaggagaaaaacacaaacagaaaataaaaaacaacaaatgaaaaagatgataatgaaaacaagacaaaaggg

SEQ ID NO: 25165 - DNA, 254 bp, Gossypium hirsutum
  Clone ID: LIB3147-033-Q1-K1-B8
aaaaaatactttcagaagctctctccccttccagttcgttcggccagaggtccgaccgtcgaccaccgcgccggccaccggcggcggcgccgcatgcggtggtcggagagccgaaaattttagatccgacccttccaaagcccttaaaaccgaatctagccccaaaaatgccaaaatcttgacggagaggggccaaatctcaataaactcttcggcttccgaccgtctatcctcgaagacgggtacctcaatcg

SEQ ID NO: 25166 - DNA, 445 bp, Gossypium hirsutum
  Clone ID: LIB3147-033-Q1-K1-C1
caaccgtgtggagcctgattgtgaggtttacttgcatagaattggcagagcaggacgtgttggtcgcaagggagccgtgttcaacttactctgtggtgatatggaccaaatgataatatccaaaatcgaaaatcattttgacagcaaaatagcagaggttcctgactggaagaatgaggaagactttaaaactgctctccggtcagccggtttattatgaacggaaaccttctgtcaaagctatcttggtgaaatgctagagaagaggaacaaacagattgtgcttatagtatgctgtatactcgactatttgtgcccgattctgttggtttgattttgatttttggtagttgcaccatgttttaataagttgctgtatgagtatttgaacggaggaaaaaggcataaagtcatatgtggtctcaaattggatgcgaagtggggg

SEQ ID NO: 25167 - DNA, 373 bp, Gossypium hirsutum
  Clone ID: LIB3147-033-Q1-K1-C10
aaataaaaaaaaaaaaaataaaatttttatttattaaaaaaaaaaaaaaaaaaaagggaatgtgaaaaattaaaaaaaaaaaatataaaaacaaggattttcaatttataaaaatccggcttccttttccaggacctccccttccctcccttttttttcaactcccttatttttctttttttttccttctttttaatccttttccccttgtaaaaccttggcttttcttaataaatcttctttttaccaaatttttttttctgtcattactttactttttaaaaagtttgcacctttcttattatctcccaatttttccccctttatttacatttttccccctttccttttataattgctatatcaccccctg

SEQ ID NO: 25168 - DNA, 433 bp, Gossypium hirsutum
  unsure (1)..(433): unsure at all n locations; Clone ID: LIB3147-033-Q1-K1-C11
cccacgcgtccgcggacgcgtgggctccgtatgtagccagccgtttcacacactcaagaggagagagagctcgtaaatcatggcggaacagaccgaaaaagcttttttgaagcaacccaaagtgtttttgagctcgaagaaaggtgggaaagggaagagaccaggaaagggtgggaatcgcttctggaaaagcattggattgggcttcaagactccccgtgaagctattgaaggaacctacatcgataagaaatgcccgttcactggcatggtttcaatccggggtcgtatcttagccggtacttgccatagtgccaagatggtcaggacaatcattgttcgacggaactaccttcattatatcaagaaataccaaaagtacgagaagcgccattcaaacatccctgcacatatntcaccatgcttccgtgtg

SEQ ID NO: 25169 - DNA, 445 bp, Gossypium hirsutum
  Clone ID: LIB3147-033-Q1-K1-C12
accatggaggagaatctcagaagacagctttttggtttgcctccacgttaccgtgattcagtccgggcaataactccgggcctgcctctgttcctctacaactactccacccaccaactccatggtgtttttgaggctgcaagctttggtggaacaaacattgacccaactgcctgggaggacaagaaatgccctggcgaatctcgattccctgctcaggttcgcgttattacaaggaaaatctgcgagccacttgaagaagattcatttaggccaattctccatcactacgatggtccaaaattccgccttgaactcaacatcccagaggcgctttccctgttggatatatttgctgatcaacaagattcttgtatttcttaagcaacaagatgcttgagcaaaacttaaacactaggcatatcgatacaaatacagatacaca

SEQ ID NO: 25170 - DNA, 348 bp, Gossypium hirsutum
  Clone ID: LIB3147-033-Q1-K1-C2
cccacgcgtccggggttttctattccctccccactccaacactttaaaaactaattaggtgccgactgctccgttctttgtagcaaagcaaagtttgcgaagcatggccgtcgggaagaacaagaggatttccaagggaaagaagggaggaaagaagaaggcagcggatccttttgctaagaaggattggtacgatatcaaggctccttcagttttcactaccagaaatgtgggaaaaactctcgtcacccgtactcagggtaccaagattgcttctgaaagactcaaacaccgtgtgtttgaggtttccctggctgatcttcaagggggtgatgaggatcatgctta

SEQ ID NO: 25171 - DNA, 320 bp, Gossypium hirsutum
  Clone ID: LIB3147-033-Q1-K1-C3
aagaacttgaacgccaagaagcagatgatgaaaatagcgaggtgggggactttgatcctgtcgatggtacaagccacaggagattgtcttggcctccatcagttaaaaagaatggtctgtaaatgtaagtatttgcttgctctggtttgtttcctctctagtaagtattgtctttaatccatagtagtattgtttgcctgaaaattgagcaataaataacagtgagtctgcatattatctttctttgttttcttctttccccaaacatattatttatccactcagtgttcttatttgaaatcaatgctatgtttgaagtc

SEQ ID NO: 25172 - DNA, 298 bp, Gossypium hirsutum
  Clone ID: LIB3147-033-Q1-K1-C4
ggtaccgctccctttcctttctctctttctttttccttcacaataaaatgctttgaacagatcgattggaatattatcatgatttcctttttttattataaatggaagtgggattcatttcgtttgagaatgagcttttttttctttaataattaaactcttgattctgtttttgttcatcagatttgtgaaattaaggataatatttggttcatctataaaagttgtagctttcgaatgctactgatctctctatgttttgctatgtccataaattgctcgatttcataaatcccta

SEQ ID NO: 25173 - DNA, 205 bp, Gossypium hirsutum
  unsure (1)..(205): unsure at all n locations; Clone ID: LIB3147-033-Q1-K1-C5
cccacgcgnccgcnccngtttacccaagtccncccgnngngaagcccccggcagnggggaccccnngnccaccaccaccaccngngccananccaccacccccggcacagcaaacaggccccanngacacccncaagccaggcgcangngnngangngnnagggggcnnagngcacanaggnancggcagcagcgccaaggacac

SEQ ID NO: 25174 - DNA, 255 bp, Gossypium hirsutum
  unsure (1)..(255): unsure at all n locations; Clone ID: LIB3147-033-Q1-K1-C6
cccacgcgtccgcttgtcctttaaacgtttcaatttcatgatctanaaaatgggatttggggctttaagaagtatcgttcgaccactatgtcggactctcctatcccaggcttcccctgcttctggaactatgtcgactctcccctcttatttgtgcccaaaaccctgtttgaattcccttttgtgtgggtctatttaccgccaatctccatggatcgcgatgtccaatcagttgcatagcttaactgatactcg

SEQ ID NO: 25175 - DNA, 369 bp, Gossypium hirsutum
  unsure (1)..(369): unsure at all n locations; Clone ID: LIB3147-033-Q1-K1-C7
cgcaagggaagatgggacgtgtcattggaagaaaaggggtttccatctggtcaattaaggagtcttgcaatgcggaaattcattttgggggtgccaagggcccaccggacaaggtattcatcttagggcccgtgaggcaagtgaggaaagcggcagccatgctgaggggaagaatgatggattgatatttgatgtcttgtagggctttcctctcaaaaactaaaactgaaaactgttatcagaatgatctttaaactccttacaccgtttgtgttttgccttatcttcctatattttgtacagccgtcactgtttttacccattgngttagaactgctttgatctgatggctgaaaatacttgggacaa

SEQ ID NO: 25176 - DNA, 288 bp, Gossypium hirsutum
  Clone ID: LIB3147-033-Q1-K1-C8
aatgaaaccatccgcgatctgttatcaaataatcgatcatcaggctcagatccaacacgtcctgaaaattcagtttccggaaagcaatacacaattaaacatgatgcaaacggtaatacatatgtcagtgacttgaccatcgttgatgttagcagcatatcagagatttcctcacttttacggcaggctgctcaaagcaggtctgtgggaaggacgcaaatgaatgagcaatcatcaagaagtcacatggtcttcacattaaggatatcgggaaataaagagagcact

SEQ ID NO: 25177 - DNA, 389 bp, Gossypium hirsutum
  Clone ID: LIB3147-033-Q1-K1-C9
cccacgcgtccgcccacgcgtccgtaaatgttgcgatgaagacgatgaagatccaaattctgatttggcctctgatgatgatgatgccacgtatgttggtcaagaagaagaaagcagtgatgatgaaggattgctgtatcttccagatttggaaaaggcaagaggaaactaagtaagaaatcctaactaaccattcaaaagttgaaggtactaagcttttcttggtagctatcctatttcatgtggaattatatatgtgtaatttgtacttgaaagtgaggttaaccgcggattaagagcgctaaataatagtgagtatgctcaactttttccttatattttggatggttatagtctcatatagatttctaaatttatgtcgggtactt

SEQ ID NO: 25178 - DNA, 411 bp, Gossypium hirsutum
  unsure (1)..(411): unsure at all n locations; Clone ID: LIB3147-033-Q1-K1-D1
cctagagatggnggcaangaagncggaagtcaccnggattcgngatatgcttanaggagatgatgcatatgagttgcaggttaaacttttgaagcaagttccagaagagtatccttacaaggatgatgagtaacatgccttacttacctctattaatggccttgcgcacttgccgatgttctatttccattgtttttctgtttctgaagaacattaatatacgttttgtatgtcatcttgaccacaatgtatcttccattttcatttagggtttatatgatctatactccgaagttattaatgttattaatcctgcacatcagtagtgatggcaaatggggggattggattggatttggtatggaccctattggtcaagtattctaaggttgagcattttgatggttgaat

SEQ ID NO: 25179 - DNA, 445 bp, Gossypium hirsutum
  Clone ID: LIB3147-033-Q1-K1-D10
gttcacatcatcagctggaactattgatgttgcagaacaacaaaagccctgttatgatgaaacctgttggagcgatcttgaattcatccaggccaaaaaaatgactggttggatgtattttgtctccaagacgatggcagagcaagcagcctggaaattctttaaagaaaataacattgattttgtcagcataataccacctttggtggtcggtccatttattatgcaatcaatgccgccaagcctcatagctgcactttctcctatcaccgggaacgaagctcattattcgatcataaaacaaggccaattcattcatttggatgacttgtgcagagctcatatctttctattcgagaatacaaaagcggaaggtcgctacatttgcgcctctcaccatgctaccattatcgatcttgcgaaatgctcaatgaaaaataccctg

SEQ ID NO: 25180 - DNA, 412 bp, Gossypium hirsutum
  Clone ID: LIB3147-033-Q1-K1-D11
gttctagatcgcgagcgccaccctttattttttttttttttttatattttttttttttttgtttttttttaactttttttttttttttttttttttttttccaaaaaaacccccacttctttattcaatacccccccaacacattttaaaatttttaaaatacaacaccctacatttatttttaatccataccacaacccaatgttaaaaggcccccccccattttaaaaataccaaaaaaacggacccaaaaacaattttttctcaaccaaacccaatcacaaacttaaaaaaagaaaaatcccccactcaacccatccactgaaataccccccctctcaagaaaaaaacccaaacccactcaaaaaaaaccgaactctacatttaacccctaaaaaccataaatccaacc

SEQ ID NO: 25181 - DNA, 435 bp, Gossypium hirsutum
  unsure (1)..(435): unsure at all n locations; Clone ID: LIB3147-033-Q1-K1-D12
cccacgcgtccgcccacgcgtccttttaatttcaaaacccatattttacgggtttgtcaagtgagaaaaatgctgagaatagatggtctctgcaaaaagatgggctacaaggacaccaagttactgatgctttacgggctctgatagccaatggcgttgaagcggggactatctagtgtgggcgtccaaaggaacagaagttctggatctcgtttgcgtatcgtgattctttttttcttctcaattctgatgctcattgctttgagttcattacaagatttccttgattaaataaatgtattatatcttttatgatcaagatttacttgattaagaaaatgcattgtatgttttattaccttgcatatgtattatttattntaagttttattctaaaattttatttttacttaaaaattctaacttttttatttt

SEQ ID NO: 25182 - DNA, 423 bp, Gossypium hirsutum
  Clone ID: LIB3147-033-Q1-K1-D2
cgatcaaatttatcttttctggtttcgctatggcatcgaagcgaatcttgaaggaattgaaggatttacaaaaggatcctccaacatcttgcagtgctggtcctgttgctgaagacatgtttcattggcaggcaactatcatgggtccaccagacagtccgtatgctgggggtgttttccaagtgaccattcattttcctccagactatccttttaagccacccaaggtggcatttagaacaaaggtattccaccctaatattaacagcaatggaagcatttgcctagacatcttgaaagagcagtggagtcctgcactaactatttccaaagtattgctatcaatatgttcattgctgaccgatccaaaatccggatgatcccatggtgccggagattgcacacatgtacaagacagacagg

SEQ ID NO: 25183 - DNA, 412 bp, Gossypium hirsutum
  Clone ID: LIB3147-033-Q1-K1-D3
cctagagatggtggcaatgaagtcggaagtcacctggattcgtgatatgcttagaggagatgatgcatatgagttgcaggttaaacttttgaagcaagttccagaagagtatccttacaaggatgatgagtaacatgccttacttacctctattaatggccttgcgcacttgccgatgttctatttccattgtttttctgtttctgaagaacattaatatacgttttgtatgtcatcttgaccacaatgtatcttccattttcatttagggtttatatgatctatactccgaagttattaatgttattaatcctgcacatcagtagtgatggcaaatgggtggattggattggattttggtatggaccctttgggtcaggtattctaagtttgagcattttgatgttgaatt

SEQ ID NO: 25184 - DNA, 333 bp, Gossypium hirsutum
  Clone ID: LIB3147-033-Q1-K1-D4
tctcattgttcaatcaacaggtcatgcagtacacatctttatcaatggacagctttcaggttctgcctttggaacgagggaaaataggagattcacattcaccgggaaggtcaatctgcgtgcaggaacaaacaaaattgcgctgctgagtgttgctgttggattaccgaacgtaggtggccacttcgagacatggaacaccggaatcctaggtccagttgcattgcatggacttgaccaaggaaaacgggacctatcatggcaaaagtggacataccaggtcggactcaaaggagaggccatgaatcttgactcaccgaatggtatttcgtc

SEQ ID NO: 25185 - DNA, 303 bp, Gossypium hirsutum
  unsure (1)..(303): unsure at all n locations; Clone ID: LIB3147-033-Q1-K1-D5
gngaaancnaactggaaagggaccagcngngcataaagatacgnngggcgccccactgggcccttggaggcattatgatgacaaagctgctgaggtagggcagggattctggaattgtccatgcgttcctatgagagaaaggaaagaatgtcactgcatgctctttctcactcctgataatgattttgctggccaagatcagtccatcacactggaagagatcaaggaaacaacaacgaacatgtagttcaagacattcataacttggatttcccaatccccaaagaaataccaggagaaaat

SEQ ID NO: 25186 - DNA, 224 bp, Gossypium hirsutum
  unsure (1)..(224): unsure at all n locations; Clone ID: LIB3147-033-Q1-K1-D6
atcgtgtgtttttgcttattctattgcgttnncttcggctcttctaagcgttgttctgggctatatggactgcaatagatttgacgagtagttcggctgagtttctagtgttccattgctgagaagaatttagactggttgaacccatgcatgtgactataaaaacaatggtcacgaatataaagtcatctatatgtaattgaggccaatttgagcgggagttg

SEQ ID NO: 25187 - DNA, 315 bp, Gossypium hirsutum
  Clone ID: LIB3147-033-Q1-K1-D7
ggaaacgcatcgaaaagttagggttttcgctccttacgattatcgagggggtccttttgaattgaagtatgggaaagaggaaatcaagagcaaagcctgctcctaagaagcggatggataagcttgacactgtgttcagctgccccttttgtaaccatggaaccagtgttgagtgccgccttgatatgaagaacttgattggcgaagcctcttgcagaatatgccaggaaagctttagcactgttataacagctttgactgaaccaatagacatatacagtgaatggattgatgaatgtgaacgtgttaacaacc

SEQ ID NO: 25188 - DNA, 300 bp, Gossypium hirsutum
  Clone ID: LIB3147-033-Q1-K1-D8
cccacgcgtccgcccacgcgtccgggaagcatcatttgtacggcgagcacgactgctagctgcggtagtgaaagggacactgattataacatgtcgaagcatgcggtgattggattgatgagatcggcaagcaaacaacttggagagcatgggattagggtgaacagtgtcgccgttcattgtgggaaccccattactctatcattacctggggacggaggcggaagtggagcagttgtttgagccctacgcacggttgaaaggggtggtgctgaaagcgaagcatgttgctgatgctgt

SEQ ID NO: 25189 - DNA, 414 bp, Gossypium hirsutum
  Clone ID: LIB3147-033-Q1-K1-D9
agaacagcaaaagaagcaaagcattggcatgtatcaaggttcatgagttgcgacagaaatcaaaaaccgagcttttagctcagttgaaagatctcaaagctgaacttgctcttcttcgcgttgctaaagttaccggtggtgcacctaacaagctttctaagataaaggtggtgaggctgtccattgctcaagttctgactgtaatctcacagaagcagaagtctgcattgagggaggcatacaagaataagaaattcttgcctcttgatctccgtcccaagaagacccgagccatccgcagaaagcttaccaagcaccaggcatctttgaagaccgaaagggagaaaaagaaagaaatgtactttccaatgaggaagtatgccattaaggtgtagggcaagatctcacattcta

SEQ ID NO: 25190 - DNA, 291 bp, Gossypium hirsutum
  unsure (1)..(291): unsure at all n locations; Clone ID: LIB3147-033-Q1-K1-E1
cccacgcgtccgggaaaatggcaagggcattgncaccaatgcctatttcctcatctggggcacccggtacagctgagtttccaagtggaggaaagccagggagagggcgaggcagtgcttaccagattaagcatcataaaggaatggacatagataatttaggtgagttggccggcacttctattggaacaaattttatgccgcatgtcatcactgtcaatcccggcgaggatgtaacaatgaagggtgatatcgtttctcaacaaggaccacgagccatttgcatcctat

SEQ ID NO: 25191 - DNA, 436 bp, Gossypium hirsutum
  Clone ID: LIB3147-033-Q1-K1-E10
aaaccaacagatccgttgttgaatttcaatgttgtttgttacaggaaatggctggtggaacagctccccctagaggaagtgcagcagcagccgcaagcatgcgtaggcggagaaccacaagtggtgcagcctcaggaggggctgctgggaccatgcttcaattttacacggatgatgcaccaggtctcaagatctcgccgaatgttgtgcttgtcatgagcatcggtttcattgcttttgttgccgttctacatgttatgggcaagctgtattttgttcgtagagaggcttgaaaggaatttgtcggccagaaaaagaaaatatcaacaggatttatttaggagtctgagttgcaaagcaaaactgtttctttttattattaaaaacaagtctattgtcaaaagtgcaattttgtttacattgttctacttgtttg

SEQ ID NO: 25192 - DNA, 392 bp, Gossypium hirsutum
  unsure (1)..(392): unsure at all n locations; Clone ID: LIB3147-033-Q1-K1-E11
attgagtgtgacattttggttttttgcttttcttctctctatccccacattgtttattctgctagttatttcattaaattcattcctttactgctcacccgttggaacgagttaacgaattgtatgcaatgttgacctttgaagacaccctatgattttttacatttagacaacagaataggtggaatcttatatgaatgtattttttgaacaatggctcccctttctagatttaaatttatatctttataaagactccggctnaaaaaaatacaaagaaaaagggacctgtaactgatttattagttaataaaaagataatttgatctgtttataaagaattcttaatatttaaaacactaagttttggggccttttttaatctaataaaa

SEQ ID NO: 25193 - DNA, 450 bp, Gossypium hirsutum
  unsure (1)..(450): unsure at all n locations; Clone ID: LIB3147-033-Q1-K1-E12
cggacgcgtgggtgaaggccggaatcatgttccaaaggcaatgaaaatgaagcggtcggggtcacatgtcggagctgccgaaaagaactcccagtaccagtatcagtatcagtacccttggtccatcaaactcgatagatcatcggtttcacttatagacagtgagtgcggttccaccagtacggtattgacaaacaccaactactgcagatcccatttcgggtacgatgtaagagtatgaaataacaccaaatggaatctcgaaaataaattcgctcgattcaactgagggaaagtaatcaggagccaaaaaatgacttctatgactaatgtagaaggtttactgtgaacaatgacctgcgaaaattgcagggactagtgatgtagtaacattgtgtcaatagaaattctctgtttgatttattttctgatgattangttttttattta

SEQ ID NO: 25194 - DNA, 272 bp, Gossypium hirsutum
  unsure (1)..(272): unsure at all n locations; Clone ID: LIB3147-033-Q1-K1-E2
acccacgcggccgcccacgcgnccgccnanccnggcacaccatgagncncanagcnnggccgcggggccnggcctancgacgggaaccacaacnaaggggaaaccggagaggcaccgaagggggacagggggaaccacccacaanacnnagaagacaacgcacccgnggcgnnccagacagcaacggggagggggacgacgccggngaagaaacaccaacccncagcccangacggnngcgngggcgacgggaaaccaaccaagaacgacac

SEQ ID NO: 25195 - DNA, 342 bp, Gossypium hirsutum
  unsure (1)..(342): unsure at all n locations; Clone ID: LIB3147-033-Q1-K1-E4
cccacgcgtccgctttgctgtttggtttgtggttggcaacgtctggatctttggtgggcactcatctgccagtgaggctcctaacttgtacaggttatgtatagtttttcttacaattagttgtatcggatatgcaataccctttattctatgtgccacgatctgctgttgcctgccttgtattatttctgtccttggatttagagaggatctatcacatgcaagaggggccacacctgaatccatcgaggctttgccaacttacaagttcaaggtgaagaaaaatagaaatagtgatggtaaggatgtcaactcangcgccagtgagggtggggttgtggc

SEQ ID NO: 25196 - DNA, 336 bp, Gossypium hirsutum
  Clone ID: LIB3147-033-Q1-K1-E5
agacaactgagatggcaaacaaggatctcgacagatactacaacgcacttgacaaagcacttatgcgcttccattctatgaaaatggaggaaataaacaaaattataagagaattgtggcagcaaacatacagaggacaagatatagattatattagcattcattcggattctgaaggtgctggaactcgttcttacagctacaaggttcttatgcaaaccggtgatgctgagcttgaaatgagagggcgatgtagtgcaggtcaaaaagttcttgcttctctaatcatacggttggctttagccgagacattttgcctcaactggggaatcttag

SEQ ID NO: 25197 - DNA, 317 bp, Gossypium hirsutum
  Clone ID: LIB3147-033-Q1-K1-E8
cccgtgttatcttgaccaacttcaatggcttttcatccaccacccgttatgccaatgccatgggcttcatggttgacgagcctgaagcaggctgtgctgagatgatgaagatgtatcaggaggatgaggaggatgtctagtgtgttggtttggatttatttgcatatgaaatatgatgttgtctgctatttgttatgtgaattgctccgttatttctacggttagaggacttctataacttatttttcttacaaattctattaccaattatataaacctaagctatggcttctatctcggaaagttttttttggggt

SEQ ID NO: 25198 - DNA, 444 bp, Gossypium hirsutum
  unsure (1)..(444): unsure at all n locations; Clone ID: LIB3147-033-Q1-K1-E9
ctcgaagaacaaaagaaaatgggaaaaggttctggaagctttggaaagagaaggaacaagactcacacgctctgcgttcgatgtggtcgccgaagcttccatctacagaagagccgttgcggtgcttgtggctaccctgccagtcgcatccgaaaatataactggagtgtgaaggctattagaagaaagaccaccgggactggccgcatgaggtacctccgacgtgttccccgaaggttcaagactggctttagagaaggtactcaagcaactccaaggaagaagggagctgttgctgcttcatgagttaatttgtgatgttttgttttgttcagagagattcctgaatttagaaacaataggttttgggtctctttcaactgtgtgttactttttcatttttcacctaatgtctacaaacgggaagttntgttttatattatg

SEQ ID NO: 25199 - DNA, 429 bp, Gossypium hirsutum
  Clone ID: LIB3147-033-Q1-K1-F10
ctttccaccatgagatgctgaatattgcctatagcaggccttctcgagaaggattggattggtagtagcaaacctcctttcggaactcgtgagttgctgttgcagaaattgcatcttttcctagacttccaagcaagttaaactataaaaagaaagaatgtgaaaagaacaagtagaaaatggtttcagaagcttgactgctggtttttctccggtttcggtccatcatcgcagttcatgctgcttttgttgaagaaaatcagccgttgtggaaattaaccaaatgtgaggactattataggttctttccatttctatttttctttgaaagaaaagacattttaagttttttcatcttggctatgatcaagtgtcacacatgatacgaactacttgtgatattctattacaaagttttgctgttgaaaa

SEQ ID NO: 25200 - DNA, 362 bp, Gossypium hirsutum
  Clone ID: LIB3147-033-Q1-K1-F11
ctccatactgtaatttttatttttgagggcttgtttaagctctatagtttcttgtaaaaaggtttagttaaaaaaaaaaaaaaaaaaaaaaaaaaaaaaaaaaaaaaaaaaaaaaaaaaaaaaaaaaaaaaaaaaaaaaaaaaaaaaaaaaaaaaaaaaaaaaaaaaaaaaaaaaaaaaaaaaaaatctaaaataaataaaaaaaacaaaagtttatcgaaatacggctgctattcctaaagtatgcaaaactttatccaaataaaaacacccgaaatctactattattaaaaacccaggaataaaaaatagattgtgtcaacaaataaaaacctcctaaagaaaaaacactctaacacaat

SEQ ID NO: 25201 - DNA, 447 bp, Gossypium hirsutum
  unsure (1)..(447): unsure at all n locations; Clone ID: LIB3147-033-Q1-K1-F12
cccacgcgtccgcccacgcgtcctcggactcgtgggtggaatgatgtccaaccaaggagggggtgactttgacaggatgaggcatagaagccccagtcccatggcttcttcaaacattatgtcaaatgtttctggaactggattaagcaactggaatagtcttcctcaggagagactaagtggacctcctgggatgacaatggactggcaaggtgcaccggcaagccctagttcatacaatgtgaagagaattttgcgtcttgaaattcctgtcgatacatatccaaatttcaattttgttggacgactcctangccctagaagcaattctttgaagcgggtagaagctactactggttgccttgtatacatcagaggcaaaggatcaataaaggatccagacaaggaagagcagctcagaggtagatctggctatgagcacctcaa

SEQ ID NO: 25202 - DNA, 387 bp, Gossypium hirsutum
  Clone ID: LIB3147-033-Q1-K1-F2
tgtatctccagttctacattaacgataatggtgacaaagtttacaccactaagaaagaatcaccgttgggtatgcctactcagtctgctcatccagctcgattctcccctgatgacaaatattccagacaaagagttcttttgaagaaacgttttggcttattgccaacccagcagccacctcagaaatattgatagatcggatgtgttctttttgaagctttatgcagtgcctctggctgtaaaatgcagtttcctgtaagaacatatcaagtatatgaatgcattgcattggcatgttttcttcctggattattgtttgtatttatacatgtcgtgacttaaattttcttcaaagataatggtgcatacatgtgaacgtctttta

SEQ ID NO: 25203 - DNA, 448 bp, Gossypium hirsutum
  unsure (1)..(448): unsure at all n locations; Clone ID: LIB3147-033-Q1-K1-F4
cgaagatctctctcctttatttctgtagtgtatttttcgcggccaccaacaaccaccgannaaaatggcttcgaacgcggcggtgccgttctggcgtgcagcggggatgacatatatcacctactccaacatatgcgccaacctcgtcagaaactgcttgaaggaaccttataagactgaagcccttttttgtgagaaagtccattnctccatcnccaagtggactgatggaaagcctgaaaagcccaccatccgctcagattcgcctgaagaatgagttgtgtggttggtcatcaaagtcgccaattgggaaggactcgaggagtttaatttttgtttnatntgtaattcttgtacaatacctgttaacaaatttcagggttttagatgctgctgcattttcgtaanaatctctactttgcaaataatagactgaggtttcattgga

SEQ ID NO: 25204 - DNA, 231 bp, Gossypium hirsutum
  unsure (1)..(231): unsure at all n locations; Clone ID: LIB3147-033-Q1-K1-F5
gaaacgngaacnncacaangncnnnancanaaagcncnacaganaaaaccggggggaagaaangnnacaggaaccngangagaacgcngcnaagagaaaacgnacncgagaaacacnccgagnncnccaacaggcanncaggacannggacgaanngccannggaagcngaaacagnngagagggganacagnnngggnncngaacnaacaggccngccaaagaaccacgg

SEQ ID NO: 25205 - DNA, 243 bp, Gossypium hirsutum
  Clone ID: LIB3147-033-Q1-K1-F7
aaccgctacaccaaccgcatctccgccgtcaacatccactcccccgctggagcccctgaatcgtcaccagctccctctcccaccacttctcccccagctcctctcgctggctctcccgctggctctccccctaccgctgagtctcccacgaactccatcagcgagacaccaggcagctctcccacttctcctacgagtgcagccgcttggaacagagtcaccgtcgctggatctgccgttgca

SEQ ID NO: 25206 - DNA, 257 bp, Gossypium hirsutum
  Clone ID: LIB3147-033-Q1-K1-F8
cccacgcgtccgaaatatccagggccagagttgtacaacggtagcatcatgtcatgctgttgaatgattgcttcagacaatttggctccataaacttgacaagtgttaaaacttttttgtgttactttggaagcatttaaataaatttggatcctgggatacatccctcttgggaataggatcacaagtgttatgacaagcttgagtgcaaaaatattgactgttggataccatgatgttagcccctgagagtcttc

SEQ ID NO: 25207 - DNA, 258 bp, Gossypium hirsutum
  unsure (1)..(258): unsure at all n locations; Clone ID: LIB3147-033-Q1-K1-G1
cccacgcgtncgattgatctcatattttgctattttatgattcacaaaaaccaaagaaggtgatctttggatcaaatatggggatcatatgagtaatctttttcatgtgtttcagttatgacatatgtttgaagtttatntttggagtaagtttgttcctaagctttgatacttgatgatggtattaatcaattatggattgtctttgtagtggatggaagttatttttttatgatatgagtatttggagtaattttt

SEQ ID NO: 25208 - DNA, 426 bp, Gossypium hirsutum
  unsure (1)..(426): unsure at all n locations; Clone ID: LIB3147-033-Q1-K1-G10
cccacgcgtccgctcctgataactttgcttttgcaagagaatgcaaagatgttgaagtaggcggagtttatattggatcttgtactggtggtaaaactgaagattttcttgctgctgctaaagtctttctagcttcaggaaagaaggtcaaggttcctacattccttgtcccggctacacaaaaggtttggttggacttatatactctccctgtacccggatctggtgggaagacatgctcccagatatttgaagaagctggctgtgacacacccgcaagccctagctgtggtgcttgtttgggtggcccgaaagacacatatgcacgtatgaacgaagcaaaagtctgtgtctcaacaacaaaccggaacttccctggtcggatggngcacatagaacgccagatatatcttgctttttcgtata

SEQ ID NO: 25209 - DNA, 445 bp, Gossypium hirsutum
  Clone ID: LIB3147-033-Q1-K1-G11
cccacgcgtccgattgaaaaggacaaaatttttgaattgtccaatgctttgtacaagaatgatgggacaacaatggctggccttagggctattggttatgactttgactatgatgaataccacagttatgttcatggaagactcccttatgagaacttaagacaagatcctcaattaaggagtctattgcttagtttgcctgttagaaaaattatctttacaaatgcagacaaggaccatgctaaaaaagctcttaaaaaactgggattagaggactgttttgaagggattatttgctttgaaacccttaatcctatccataagaacacagtttctgatgatgaagatgacattgaattcttgggatcatctgtcacaagaaatgatagtcttaaaacccccgaaattttcgacataatcggccacttcgataacccgaaccccg

SEQ ID NO: 25210 - DNA, 431 bp, Gossypium hirsutum
  unsure (1)..(431): unsure at all n locations; Clone ID: LIB3147-033-Q1-K1-G12
cccacgcgtccgtaatttcattttatcatttatatccataagatgtcaagcagagggtccgtatcaatgcaatcagcaagtaattcaagaataactgatgatcagatcaatgatcttgtttctaagttacatcaacttcttcctgagattcgtaactcccactctgataaggtttcagcggcgaaagtgttacaagagacctgcaactacattagaagcttacacagagaggttgatgaccttagcgagagattatcagaactattagcgaccactgacaatgcccaagctgccgtaattcgtagtttgcttatgcaataatagatcacttaattaataaaaatgaaggttaatttttgtattacgacttttatggcttcactactttaattgtatanttttagagttttcttaatttgccttctttatat

SEQ ID NO: 25211 - DNA, 358 bp, Gossypium hirsutum
  unsure (1)..(358): unsure at all n locations; Clone ID: LIB3147-033-Q1-K1-G2
cattgcacaagtattgacggtgatatcccaaaaacagaaggctgctttgagggaagcttataagaacaagaagtttttgcctcttgatctccgtcccaagaagaccagagctattcgccgccgccttaccaagcaccagcaatctttgaaaaccgagcgggagaaaaagaaggagatgtactttccgatgaggaagtatgccattaaggtataagcttgaaatttgacttaggatggatacctttatgttagtttcaaagtgactactcgaggttattgttgaagttttgtgttgttgaattttcgttttcttcataacattccctattatgtttaagtntcttacaattctgaatta

SEQ ID NO: 25212 - DNA, 267 bp, Gossypium hirsutum
  unsure (1)..(267): unsure at all n locations; Clone ID: LIB3147-033-Q1-K1-G3
ctggggaggctcatcggctcatggaaagtagtgcacatatcgggaagatactacttgttccatgattgctggtaagggccttgtcttctagaggggaaatggtttgtattttatgataaaatgagacacttatgaatcatgtatatgaagtttattttgcctgatgtccttgtggcctaatttaatcttttaccaaaataaaaatcatgcaaaagtcaaaaactgataaannaaaaaaaaaaanananaannaanaaannnnnnntt

SEQ ID NO: 25213 - DNA, 342 bp, Gossypium hirsutum
  unsure (1)..(342): unsure at all n locations; Clone ID: LIB3147-033-Q1-K1-G4
cccacgcgtccggcaaaccatgcaancctggagctcattgcattactcttgataagctatatgttgcagagcagaagctttacaaggaagtaaaggaggaagaagttaccaaattggagcttgaaaagaaattgatgttgctccaaaagcaagatgaaaaccatgactggaccaagactcagaaaatcaaatcaagtgttgagaatctggagaatgacatgacacgcttgcaacattcaataagtacagcctgttcatctatattggagctcattgatgaggagctttacccacaactggttgcattaacttcagggtaagatctggttgctatgctacatg

SEQ ID NO: 25214 - DNA, 147 bp, Gossypium hirsutum
  unsure (1)..(147): unsure at all n locations; Clone ID: LIB3147-033-Q1-K1-G6
cccacgcgtccgtggagaggcagaagttgtggganggagaagcacggggggaggaagaggagtacgcggcccaaggaggtgaaggcggggaaatcttggacttctgcgcagaagtcctttttggagagtgagtcgattgggacaaga

SEQ ID NO: 25215 - DNA, 321 bp, Gossypium hirsutum
  Clone ID: LIB3147-033-Q1-K1-G9
cgtgcctttgttcactggtacgtgggtgagggtatggaagaaggagaattctcggaagctcgtgaggaccttgctgcacttgagaaggattatgaagaagtcggtgctgagtcaggcgagggtgatgaggaaggtgaagatgagtactaaataagtaatgtttgagtggagggcttgcattttgctacccaatgatttgtttccttttatcgtgtgtttttgcttattctattgtgtgaacttcgactcttctaagctttgttcaagactatatggactgcaatagatttgacgagtagttcggctaagtttctagtgttc

SEQ ID NO: 25216 - DNA, 330 bp, Gossypium hirsutum
  Clone ID: LIB3147-033-Q1-K1-H10
cccacgcgttcgcccacgcgtttttccacttttccgaaaaccttcatgatcaagaagaaggtggccaagaagatgaggcaaaacaggcccatcccttattggattcgtatgcgcacagataacaccatcaggtacaacgccaagcgacggcactggcgccgtaccaagctagggttctaagctcgatggggttctttagattaaagagtttaattttgttttttccaagtaattttgctgaattttatttatgtgggattaatattattaggaagagatattgatgaaattattggcagtatttgaattcatgattttggtttagcttac

SEQ ID NO: 25217 - DNA, 408 bp, Gossypium hirsutum
  unsure (1)..(408): unsure at all n locations; Clone ID: LIB3147-033-Q1-K1-H11
gaaaaaagggccgancacgcgtacggaaggattcttcggtgttggatttttattttatgacganggcatggagaaagggtgacggtcctatacagaagacactttgaaagtccacctatttgtctttattacacctttttccctctgtgggcatcttttcagtttaacattgaaattaaggagagaataaagaaaaacatatagtgcatttaggttcatgtgttattcatgatgatggtagttagtccttacaagatgtaaagcaattgggggaatcgcaccattttttctttccatttgataaccacaaatggctgcctttcttattttggattttgagtttggatcatattagaacaattttttgttattgtttctagaccgaaagctttgcttatcttttgtgcg

SEQ ID NO: 25218 - DNA, 70 bp, Gossypium hirsutum
  Clone ID: LIB3147-033-Q1-K1-H12
gacgtaaaagactcttcaaagggggcccctaccttcaattggccggccgttgtttaacaccgggggggac

SEQ ID NO: 25219 - DNA, 209 bp, Gossypium hirsutum
  unsure (1)..(209): unsure at all n locations; Clone ID: LIB3147-033-Q1-K1-H2
cccacgcgnccgcccacgcgnccgcggcggggggcncncccccgccgcccccancccgagagccgccccancccccgacgacaaggggggccgcnaagaagaccaagaagacccaggagagcannaacaacagangggcncncgggangaagaggggnaaanacacnnggggngacaaaacggggcnnaaancgcncagaaaccccaaa

SEQ ID NO: 25220 - DNA, 293 bp, Gossypium hirsutum
  Clone ID: LIB3147-034-Q1-K1-A1
tttgaaacaagccctgattatggacacttggcaagcaaaatgggatcagagtatcttgcaaaacttttatctcagcatttagagcttgttatcaggcagcgcataccaagcatcatttctatgattaataagacaattgatgagctcaacgcagagttggatcgcattggcaggccagttgcagctgatggaggggcccagttgtacatgattttagaactttgccgtgcatttgatcgtgttttcaaggagcacctggatggagggcgacctggcggtgataggatatatgg

SEQ ID NO: 25221 - DNA, 351 bp, Gossypium hirsutum
  unsure (1)..(351): unsure at all n locations; Clone ID: LIB3147-034-Q1-K1-A12
caggttttatatatggttgtgcctgcctactatactctgtttcgaaataataagattactgaatggtttgttgtggaaaaaaaaaaaaaaaaaaaaaaaaaaaaaaaaaaaaaaaaaaaaaaaaaaaaaaaaaaaaaaaaaaaaaaaaaaaaaaaaaaaaaaaaagnngaaaggtttaaaaaaaaaaaaagggaaaaaccttttgcatgggaagaaaaaatttttttttattgaaaattaaatggaattaattggaccaacttttaaaaatttaaaaacttggaaaattataaaaatttttaaaataaaaaaactgtggaggaaatgaaaaaaattgcccattgggcaaaa

SEQ ID NO: 25222 - DNA, 296 bp, Gossypium hirsutum
  Clone ID: LIB3147-034-Q1-K1-A2
cccacgcgtccgcttgagattagctactgtaggagtataatgccaagagattctccatattatcattgatactatcgaagggatgtataaattccatagctctctgcaaacatcattagtctcagcatgtatactattattactcggaccccaattagtccccgcaatagcttatcgacgcttcttactgaaaaatcgccgaacggcattactctacacacttggcaggcatcgggtcttgtcttcaccgaacggattcacataattctacctgccatatacgcgatatatggatt

SEQ ID NO: 25223 - DNA, 295 bp, Gossypium hirsutum
  Clone ID: LIB3147-034-Q1-K1-A4
caacgatatgctaaagtttttaaagaacgatacaaggagttaaatgattatgatcggataataaagaacattgaaagaggggaagccagaatctctagaaaagatgagatcaagaaagcaattggcaagaaattggatcgctacaagaatccatggctggaaatgaagatccagtatggtcaaaacaaagggaagctgtacaatgaagaatgtgatcggctcatgatatgtatggttcacaagcttggatatgggaattgggaggaattgaaggcagcattcagaatgtctcctt

SEQ ID NO: 25224 - DNA, 286 bp, Gossypium hirsutum
  unsure (1)..(286): unsure at all n locations; Clone ID: LIB3147-034-Q1-K1-A5
ccaaaacaagaaatatnggggatgttcgaaatttgtcaaagtcaattgctgttctagagggagaccttggagcaatacggtccattcgctacacatctgatggtaagtacatggccatggctgagcctgctgactctgtgcatgtgtatgacgtgaaaagtgggtacgagaatgagcaagacatcgatttctttggtgagatatccggcctatactttagtccggacacagagtctctctctattggtgtatgggatcgcacatatagcagccttcttgagtatgg

SEQ ID NO: 25225 - DNA, 288 bp, Gossypium hirsutum
  Clone ID: LIB3147-034-Q1-K1-A6
actacacgtcgtattagggaagttttcattttttcgaaaccgattgatgttctagggggagaccatctagcgaggcggtgcattcgttacacatttgattgaaagtacatagtcatgggctgatcacattgactcgtgtgcatgagcctgatgtggaatgtgcctactagtctgatcaatacaacgagttctttgccgagatatcctgcctatcctttatgccgtacacagagtctctgcttattggtgtatgttatcagtcatatggctcacttttcgagtatggtc

SEQ ID NO: 25226 - DNA, 258 bp, Gossypium hirsutum
  Clone ID: LIB3147-034-Q1-K1-A7
gtcacttgtagtttaaagaataatttgagtaaatttcgatttcctttgttgtattacctccatagctgcaaaaggaaagaaaaaggttttctcctagtttggggcagtttctacgttgtggcaaaattatatacataatctagtacaacttatgttgaagcagtacataaatcttgatgaatcccaaggttttgtggctttggagaatgctttggagaatggatttgatatgctccaaaatttgatgaaaatttataa

SEQ ID NO: 25227 - DNA, 290 bp, Gossypium hirsutum
  Clone ID: LIB3147-034-Q1-K1-A8
atagaaagcaatcccgtgcccagaaatcattctcaggaatcatctaaacctaaagttagagatgggctattcagtactttaaggttctggatcattcttctatgggtgttttctggattgggttttattttagtcatgttagcgatgtgttcaggttatacaagcaaggggtcatcaaaagggaaaagtaacaaaagcaggagaagatcttatacggggtttttaaaaaccagtgctcgtgatcggcaaggtcacaagtcagacgcatcattgtagcatcgcaagttgct

SEQ ID NO: 25228 - DNA, 438 bp, Gossypium hirsutum
  Clone ID: LIB3147-034-Q1-K1-A9
cgctgttgatcaccgccgtaagaacaaattttttgaaggtcttcaagccaatgttcagaggcttaagacctacaaggccaaacttgttgtcttcccaaggcgtgctcgcaagttcaaggctggtgattcacctgccgaggagctcgcaactgcaacccaagtccaaggaccatacatgcctatttctcgtgagaagccttccgttgagctcgtgaaggtcaccgacgacatgaaatcattcaaggcatacaacaagctccgtgttgaacgtacgaacaaacgtcatattggtgctaggttgaagaaggctgccgaggccgaaaaggaagacaagaagtaaggttacccttttggggacagtgttttgttatttggcttgctaaaaagaccttaaattttgtattcattttgtcaagtgaactgagacagctttagaaa

SEQ ID NO: 25229 - DNA, 454 bp, Gossypium hirsutum
  unsure (1)..(454): unsure at all n locations; Clone ID: LIB3147-034-Q1-K1-B10
gggagccgaaaagctgttgttgtccatgttttctacttattgaggaaagctttccgtaagggtcatgttaagcttgtgagggaactcgaaaagaaattcagtggcaaggatgtgattcttattgcaactcgaaggatattgaggcctccaaagaagggctcagctgttcagaggccacgcagccgtacactgactgccgtacacgaggcaatgctcgaagatgttgttttacctgctgagattgtcgggaagcgtactagatatagaatcgatggatcgaagataatgaaggtctttttggaccccaaagaacgaaacaacacagaatacaagctcgaaaccttttcagcagtttaccggaagctcgcanggaaagatgttgtgtttgagttcccagttacagaggcataaagaaagcctttttaaaagatatgacaccttctgtctggtcctt

SEQ ID NO: 25230 - DNA, 471 bp, Gossypium hirsutum
  unsure (1)..(471): unsure at all n locations; Clone ID: LIB3147-034-Q1-K1-B11
cggaanaacggggtgacgctgttggcaagcttagggttttctctaatggtgaccttgttatcacttgtgaatgcacccctggttgcaatgaagacaagttgactcctgctgcatttgagaagcattctggaagagagacggctagaaagtggaagaataatgtttgggtgatagttaatggggagaaggtttctttatcaaagactgcattgctgaaatactacaaccaagcgtctaaaaatgccaatggtactaacagatcccataatggaagagtttgtcaccgtgatgagtttgttcgctgtagcaggtgtaacaaggagagaagatttcgattgcggacaaaagaggaatgtcgaattcaccatgatgctttagcagatgtgaattggaaatgttcggatcttccatatgacagaataacttgtgatgatgaagaagaacgagcaagtcgcagggtatacaggggct

SEQ ID NO: 25231 - DNA, 447 bp, Gossypium hirsutum
  Clone ID: LIB3147-034-Q1-K1-B12
cccacgcgttcgcgcttgttataagccggtttctgatcggacttgtaccatagagattttgatggtgagatcgaatcttactggaagtttcactgaagagaacttggcttttcaaaagaagatactggagaggtctggtttagggcaaaagacgtatttgcctgaggcggtgttgcgtgtaccgacgaacccttgtatggcggaagcaaggaaagaagcggaggcagtgatgtttggtgccattgatgagctggtggagaagactggtgttaacgctaacgatatcggtatccttgtggtgaattgtagcttgtttaaccctacaccgccgctttccgccatgattgttaatagatataagcttagaagcaatattttgagctataatcttggtggaatgggttgcagtgctgagctgacttctattgaccttgctgctgatatttc

SEQ ID NO: 25232 - DNA, 259 bp, Gossypium hirsutum
  Clone ID: LIB3147-034-Q1-K1-B2
atttgttaatcttgttttttcctcgatgtttaacaccgtttcaaacaagaagattgctatcttaaggttcgcctttaataaagataccggtgacactatggagaccccctccatcgatgtatgcaaaggactcttgtgagacaaagcctagatgaacatatattacccgcaagtgaccatagaccatgtccaacaagatctttgcatgaacatgtttgactgtgaccattctcttaacttgcatcacatgaattccacg

SEQ ID NO: 25233 - DNA, 292 bp, Gossypium hirsutum
  Clone ID: LIB3147-034-Q1-K1-B3
atttccccacttccactctctcttgctgctcaatgtcaccctcgttggtaaagatcacgcgggtgctgctatttatgtcaatgattattcctcaaaaatcagttggggaatacgagcaatggtgcatagcagatgaacaaaccccagatgaagagtcgaaggtagccctggattgggcatgtggcgaaggtggtgcacattgcactaagattcacgtaaaccaggcttgttattttacaaacactatgacagaccatgctctctatgccttcaatgattacttccaaaggtt

SEQ ID NO: 25234 - DNA, 290 bp, Gossypium hirsutum
  Clone ID: LIB3147-034-Q1-K1-B4
gaacttgacaccaaaactggatgcggaaaagcaagagtccttcaagaaaaacattgagggagcaaccaagtttttgctttcaaaattgaaggaccttcaatttttcgtaggagagagcatgcatgatgatggatgcttggtgtttgcttactacaaggatggtgctgttgacccaacatttttgtactttgcatatgcattgaaggaggtcaagtgctgaggtttgaagcaaagaaaaaaaaagtggttgctgaagaatttagtcctttttattattgcttttgtctctt

SEQ ID NO: 25235 - DNA, 333 bp, Gossypium hirsutum
  Clone ID: LIB3147-034-Q1-K1-B6
ggaaggccgggccagacccacgcgtccggacacgcatactgccacccgtacattttgttttcatcaccgaaaaacataaaccagcagcaggcaagagaacaacaataaaagatcgcaggacctctattttgactactcatgacgagagcattgcttctatgatgtgatgcactgtaattatgctccacaaaaaaagatcaggtctgctgacctcaacggggagcaactctgcatacgcattgaagaaagtctagccctgaagataggactactataagattgaccacttgaactaaaattaatgaatatggatgaacgaagatagatatagat

SEQ ID NO: 25236 - DNA, 291 bp, Gossypium hirsutum
  Clone ID: LIB3147-034-Q1-K1-B7
agcaaccctgtcaattcaactgttcctatttcagctgaggtttttaagaaggcaaggacatatgatgagagaaagttgtttggcgtaaccacccttgatgtggttcgggctaagactttctatgctgggaaggctaaagtaaatgttgcagatgttaatgtccctgttgtcggtggtcatgctggaattaccattctcccgctattttctcaagccacaccaaaagccaatttacccgaagaggatatcaaggctctcacaaagaggacacaagatggaggcactgaagtt

SEQ ID NO: 25237 - DNA, 287 bp, Gossypium hirsutum
  Clone ID: LIB3147-034-Q1-K1-B8
cctgtttcatagctggaaaatgttatggattgtgtatgtccaaaaaggtttttctgttcggttcgtttacattatacacgcttcaaaattttgaagacattgataacgttatggattgtgtttggacaatcattttgaagtggggagaaggtgatgagaaaagctacgggttaaatgatggtgatgtaattattgattaaaattcaaaccccataattgtttttttgtccctaatccctttcattgaaggacaatgaaacatggatgcctaagttgttagcagcagc

SEQ ID NO: 25238 - DNA, 364 bp, Gossypium hirsutum
  Clone ID: LIB3147-034-Q1-K1-B9
gacccacgcgtgcggaagtttcctttctcgattttctatttattctaactttatgcagatcttcgttaagactgtaacgcgcaagacgatcactctcgaggtcgagagctccgatacgatcgacaacgtgaaggccaaaatccaagataaggaaggcatccctccagaccagcagcgtctgatcttcgccggaaaacagctcgaagacggccggaccttggccgattacaacatccaaaaggagtcaactctccacctcgtcctccgtctgcgcggtgggatgcaaatcttcgtgaaaaccttgactggcaagacaatcactctcgaggtcgagagctccgacacgatcgacaacgttaaagcg

SEQ ID NO: 25239 - DNA, 296 bp, Gossypium hirsutum
  Clone ID: LIB3147-034-Q1-K1-C1
tctgtgagagaccactaagtgatgttgtagacaacaaaaggggagatcctcggtcagaacaaggaaatcaaggattgagggagagaagcaaggaagaagaaccggttttgggagccaaggataatgaagcctaaggggaaacaaaatttgtacagagaaagggaagattttacgaaaatgcaacttttgatttatatatatatatatatgatatgtttcggttaggtaaaacactaaaatagttattgtagctagtaaactgttatgatgaacgtacgatggctgagcttgctgtg

SEQ ID NO: 25240 - DNA, 221 bp, Gossypium hirsutum
  Clone ID: LIB3147-034-Q1-K1-C10
acggaacattgtaacacacagaaaagcttgttcagatgtggtgtctatgttgtaccgtttagccaatgcattggaatttgttgtttatgtggttcggtattatggtttgggtagtcagattataaattccaagaatcatgaaagggctaatcataaatttgtgtcataaattcagcttggtttttgcctattaataatattccttgcaactgtgctacctg

SEQ ID NO: 25241 - DNA, 250 bp, Gossypium hirsutum
  unsure (1)..(250): unsure at all n locations; Clone ID: LIB3147-034-Q1-K1-C11
ctttgattatttattggtttctgactacatttgggatatgatcccttggtatgttatgcagaatcgtgtaattatttaatgttattcagatttttcatttttctgaaatcatttgtatttgactcatatttgtatggcatgaaagtatgatcctttgacatatatgagaggggattttcttttgtncaaaaaaaaaaaaaaaaaaaaaaaaaaaaaaaaaaaaaaaaaaaaaaaaaaaacggcccgccgc

SEQ ID NO: 25242 - DNA, 339 bp, Gossypium hirsutum
  Clone ID: LIB3147-034-Q1-K1-C12
gggcaggaagacgatatgtcaattgagttgtttttgtaagatgtaaagaagattgcttttgactacggattcaagttagagaaagaacagaccattgaaacaacgtatactacaaatcctcgatccatgatgcaaaaccattaccatgctgcattctggacaatgcgaaagaaaagaacaactacgacatagcatgcaagaagatgatatgcattcctctcttaaacatactctcaggttttattcctcatttggatattttttatatataagacttaatttcccctgagattttcttgttagtttggattattacaaaacataatcagttctttgggg

SEQ ID NO: 25243 - DNA, 288 bp, Gossypium hirsutum
  Clone ID: LIB3147-034-Q1-K1-C2
cctgtgagagaccactaagtagatgtaggaatcaacttaaggggagatcactcggtcagaacgaggaaatcaaggattgagggagagatgcgcggtcgatcaaccggttctaagctccatggatcgtgatgcctaatggtaaacataatttgtgcagaccaagggaaaatttactgaccatgcaacttcagacttatatatagatatatctgatatgttaccgatctgtaaaacactgaaatacttattcgttctactaaattgctataatgaacgtacgaccgctga

SEQ ID NO: 25244 - DNA, 295 bp, Gossypium hirsutum
  unsure (1)..(295): unsure at all n locations; Clone ID: LIB3147-034-Q1-K1-C3
gaaaaggccaggcttttgaaagatttgggggttgttcgagtcatagactacanaactgaagacatcaaaaccgttctgaaaaacgagtttcctaaaagagttgacattgtctacgaatctgttggtggtgacatgtttgatatgtgtttgaatgctntggctatccatggacgtctcattgtgataggaatgatctctcagtatcaaggggagcatgggtggaagccaaaaaattatcctggtcttgtcgagaagctcttaaccaaaagccaatctgtgggctggcttttccctg

SEQ ID NO: 25245 - DNA, 255 bp, Gossypium hirsutum
  Clone ID: LIB3147-034-Q1-K1-C4
gttctgggacatcaattcccggtctagagaaggaggagaaagaaggtgtgcccgtttctggaccgctgaagccagatcgattcgttccgcctcatcttaggccgggttttgttgggagagaggagaaacccgaacccaaggttttgcgtggaagagaacaggggttgaagcattttgggtcgtcggtattatggtgaagatggcggccaattggcggtacaagatcaaaagcctgatcaatggttgattccatcc

SEQ ID NO: 25246 - DNA, 288 bp, Gossypium hirsutum
  Clone ID: LIB3147-034-Q1-K1-C5
cccaccgtccgggttttagcagagctaaattatagaaaagaaggaagtaggtcggcatggggaagctcacggccgacttgatttgcaagtgtcctcacttattcaatgccctcaaagagcgagaattggatcttcgaggtaacaaaattgctgtaatcgaaaacttgggtgctaccgaggaccaattcgataccatagatttatctgacaatgagattgtgaagctggacaacttcccttatcttaaacgcttgggtactttacttataaacaacaaccgagttactc

SEQ ID NO: 25247 - DNA, 290 bp, Gossypium hirsutum
  Clone ID: LIB3147-034-Q1-K1-C6
gagaattgctggagctgatgttcccatgccttatgcagcaaatcttgagaggatggctgtgccacaggttgaagatattgtccgtgctgcaaagcgagcatgctacagagctgtaccattggctgctgctgcataattgaaccaatataggaactaaaggaatgcacgattgtttgtcctctcaactgttttgggaaggagccgtttcatttaataactgagacattgttggaaaggctggaaatttggcgacttcatttgtcatgtgaacataacctgttcaaccctgc

SEQ ID NO: 25248 - DNA, 289 bp, Gossypium hirsutum
  Clone ID: LIB3147-034-Q1-K1-C7
cacaaacccaaatctccaattgatctgttttatttctcagcaaagctagaaaaacaatggcgtaaggatatcgagactgcagagcaacatggaggggagttctcggccaaggactaccatgatccaccacctgctccattgattgatgctgaagagttaaccaaatggtcgttttacagggcagagattgccgagttcattgctacacttctcttcctgtatgtcactgtgttgaccgtgattggttacaaggtccaaaccgaccctgctaagaacactgttgaccccg

SEQ ID NO: 25249 - DNA, 291 bp, Gossypium hirsutum
  Clone ID: LIB3147-034-Q1-K1-C8
cccacgcgtccggagattttgaatattgttttcgccgccagggccaggaggcatgtactgcaattacccgccgcctatgctggtcaactgctccggctgccacacccctttgcagcttccgcaaggtgcccgatccatccgttgtgccatctgtaaagccgttaccaacatcgctgaccctcgatccctccctcccgagttccaatcacctgctccttccacccacgcgcttgcttctccctccccttacaatcatgctcctcccggggcacctccccacgcccacggtcg

SEQ ID NO: 25250 - DNA, 443 bp, Gossypium hirsutum
  Clone ID: LIB3147-034-Q1-K1-C9
cccacgcgtccgatcaatctttaggtttattgcattttatagatcatgaaatctttcctggcttttggtgcattcctctcacttctcctgtttgtagacaccattgcagcagctaggaaagatgctggagagtactggggagctgtaacgaaagatcagcctatgcctgaggcactccaagagcttgttcggattgaggctgccgttgtcagccccgatgagaaaaccaagtgccatacatcaggtaatattgagcttaaggaagagaagattattgttaatgaggagttcgaaccaaagccaaacgtttcagcttatggtgatgacgctaatctaaaaggagataaatcatcatcttttgctgaagattttgaaccgagacctaacgtttcggcttacgggggcgatgatgctggtcttaaagacaaaaaagatcattcact

SEQ ID NO: 25251 - DNA, 296 bp, Gossypium hirsutum
  Clone ID: LIB3147-034-Q1-K1-D1
acggttttgtataatggattgtggtaaattaccagatcctaagaccatacaaaggctgattttatttgttggatgagatgataggtgaggtgaagatgttgtacgtacagccacaaggcttgaatgaatattgctactgctaaaattttgggatggaagtgaggaagtggaaagacagtgttggcagagaagatgtaagcaatctgagaatgaatagaaattaagttcattagtaatgtgctttgtattgtatgtttcactttaatttgattccttgagtattttagagaagttat

SEQ ID NO: 25252 - DNA, 425 bp, Gossypium hirsutum
  Clone ID: LIB3147-034-Q1-K1-D10
caatcccagcgcttgaatgtggttccaacttttacattgcttggaatcatgaaagctaggcttgtgggtgctacaagaggtcatgcacttctcaagaaaaagagtgatgcccttactgtacaatttcgtcagattcttaagaagatagtatctacaaaagaatcaatgggagagattatgaaaacctcttcattttccctaactgaggccaagtatgttgctggtgagaacatcaagcatgttgtccttgagaatgttcaaaatgcttctcttaaagttcgatcccgacaagagaatgttgctggagtgaaacttcccaagtttgagtatttcactgaaggtgagaccaagaatgatcttgactggtttggccagaggtgggcaacaagtccaacagtgtcgtgctgcttatgtgaaaactattg

SEQ ID NO: 25253 - DNA, 379 bp, Gossypium hirsutum
  Clone ID: LIB3147-034-Q1-K1-D11
cccacgcgtccgacaacatactggaactttttaaccataagaaatgcaacatgagaaggagctttttacgttacgcttcaatagaatgaattcagtaagggtagagccccatggttgatcgaaggtcctatgccacttaaactcaaatctatcttaccttcaatccatctttgttcagccagctcataacaaaatgttagaccgggctgacacaaccaaattggttgaagaaaaggaaaccccagcgaccaagcactcccacccccaaaagtggagaccgaacaccgccaggttgtcgaggacacgtctgaagaggaagcgggcgcactctaagttgaccaccctacccactaatggactatgaggggggcaggcgaac

SEQ ID NO: 25254 - DNA, 378 bp, Gossypium hirsutum
  Clone ID: LIB3147-034-Q1-K1-D12
aaactccctcccgaaatctcagatctaatattttttaaaacctaccatctctttcgctatctgcctgtttccctttctctctatctgattcctatcgacaatggccgccgccgccacttcttcaccccgcgaggaaaatgtctacatggcgaaactcgccgagcaagccgaacgctacgaggaaatggttgagttcatggagaaagtctctgcctccgccgacaacgaggagctcaccgtcgaggaaaggaacctcctctccgtcgcttacaagaatgttatcggcgctcgccgtgcttcctggcgcatcatttcctccattgagcagaaagaagagagcccgggtaacgatgaccacgtcgctacgatccgtgatta

SEQ ID NO: 25255 - DNA, 296 bp, Gossypium hirsutum
  Clone ID: LIB3147-034-Q1-K1-D2
gctaagacccttccccagaacactaccaacgacgacaagctcattctctatggactctacaagcaagctactgttggaccagtgaacaccagccgtcctggaatgttcaacatgaaggaaaagtacaagtgggatgcatggaaggctgttgaagggaaatcgaaggaggaagcaatgaacgattatatcactaatgtaaaacagctgcaagaggctgctgctgcatcttcttgacgtgtgtgtgagaatagaaaatggtgtaattttcaagccctttgatacctatgggtttgaaa

SEQ ID NO: 25256 - DNA, 259 bp, Gossypium hirsutum
  Clone ID: LIB3147-034-Q1-K1-D3
ggaacatggaaaggttcagattacatcattgtatacaattcgtgtggaccaaaatggtgagaaagagggttcatatggatgaagaggaacactggaaaacctgagggtctctgtggtgtcaataaaatagcttcttaccctaccaatgacaagtgaagagctctaacctcagcatacggcttcaaccaaaatgtgttcaatcattttatctatgctgcagactcgcttgtattgataaaatttgatggcccttcttcgg

SEQ ID NO: 25257 - DNA, 214 bp, Gossypium hirsutum
  Clone ID: LIB3147-034-Q1-K1-D5
cccacgcgttcacccacacgtacggtcatgttatcgaccacacgtccacccacgcgttcgaggacgctttcgataaaaaaagaaaaaaaaaaaaaaaatatagcaaaaaaggattaaaaaaaaaaaagtcatggtcctaacccataaaaataaaaaaaacttcattcaccatactagttaaaaaaaaaatgtacttttgtagcttataaatttt

SEQ ID NO: 25258 - DNA, 292 bp, Gossypium hirsutum
  Clone ID: LIB3147-034-Q1-K1-D6
ttcctccaaatttgctgcaaaagcttggcacggattgcctagtcatgcaaaaccatcgttatggcatttcaccagagaagcttcaaaatactccaaatctgtccagattcttcaagatcttaacaacaagcacagataaaaataacaaggtatatgtctccactgcggaagcacatggctatcctgtcactgccttccagtggcatccagagaaaaatgcttttgaatggggcttgcctatgattccacacacagacgacgccattgaagtgacacaacatgttgcaaactt

SEQ ID NO: 25259 - DNA, 314 bp, Gossypium hirsutum
  Clone ID: LIB3147-034-Q1-K1-D7
aaaacccggcccgacccacgcgtccgttcatacaaacatgctgcaaaagcttttcttgtatggcctagccaagcaaaaccagcggggtggcatttcaccagaaaagcttccacatactccaaatctgtccagattcttcaagatcttaacaccaatcacacatacaaataacaaggtatatgtctccactgcgcaaacacatggctatactgtcactgtcttccagtgacatccatagaaaaatgcttttgaatgggacttgcctatgatcccacacacagacaacgccattgaagttacacaacatgttgcaa

SEQ ID NO: 25260 - DNA, 290 bp, Gossypium hirsutum
  Clone ID: LIB3147-034-Q1-K1-D8
caactttgttaagcttgtgacttgttatgttatacgaatggggttacagttcccgtgttgtggacttgatccgacacatgtctaaagcttaagtgagtgagtgattgtgctttgtgtatccaagctttagcaattttaatttagaagagatgttatgagagaataaacgaattgtacggagcatatttttgtgtgaagaagggttgtttcagttttattacccaagtacttgaatgtttcaagtttcattgcagttgtttctctactttaatgcatatgttgtgattatg

SEQ ID NO: 25261 - DNA, 443 bp, Gossypium hirsutum
  unsure (1)..(443): unsure at all n locations; Clone ID: LIB3147-034-Q1-K1-D9
ctacttctctactgaatgcatttattctcctaatgcatatcgngggtttgctcgtgaattcataaaagatttggagagaatcaggcccagggctatacttgacatcattaaatcaggtgaggattttcgaatttccactacaaccaaaatgcctgaccagggaacctgtgaacgatgtggttatatttctagccagaaatggtgcaaagcttgtgtcttgctggaggggctgaatcgaggtttaccaaagcttggcattggtcgtactcaaggcctaaacagtgatggtaagaaagatagaaaaagagatagcagaacaccaagtattgagagcaagcaatgtggaagtttggaattctgatccagagttttagattgcttatggaattatcaaattgttgtttgattggccacccaagctctcatatcttctctttttagag

SEQ ID NO: 25262 - DNA, 265 bp, Gossypium hirsutum
  Clone ID: LIB3147-034-Q1-K1-E1
cccacgcgtacgcccacgcgtccgtaaaaattatatttttaaccaaaagaccaaaaatcaagagctaagatcttatgcatcaaaccttaaccttccaaattcccttaacttgctcctcaacgttagctcaaagaatgttccttccaacttccaatgctaaatcttcactgttcccaatagcctttctagatcttacttatcgagtttggttatcgaaagttacagatacccactttttcttcaaaccactaatttttcatttgta

SEQ ID NO: 25263 - DNA, 435 bp, Gossypium hirsutum
  Clone ID: LIB3147-034-Q1-K1-E10
cggacgcgtgggctataaacaaagagaaatttggtgttaaacaatggcgtcctcggatctggttgggttgctcgagactgatgtcgagatcgatatttctcccgaaaagttccaccatatgtggtgccacaggccgcaccatgtccaccacactagctctgaaaaagttcacacaggtgattcacctggtcgtaaaatctcgacgaatggtgtgcttgtcatgagcatcggtttcattgcttttgatgccgatctacatgttatgggcaagctgtattttgttcgtagagaggcttgaaaagaatttgtcggccagaaaaagaaaatatcaacaggatttatttatgagtctgagttgcaaagcaaaactgtttctttttattattaaaaacaagtctattgtcaaaggtgcaattttgttacattgttctactt

SEQ ID NO: 25264 - DNA, 451 bp, Gossypium hirsutum
  Clone ID: LIB3147-034-Q1-K1-E11
cccacgcgtccgatccacttcccacccaatttcaactttccgacgagggaaaggtacttgctgagcgtgattcattcgatgatagtactagcgaaactacaacttcctctgttggaggaggattttccgaatctccaaacaaaaatataaataggcgaatagcaataggctctacccttgcagcagtgggacttttcatgtcatcgcgattagattttggtgtttctctgaaagacttatctgctgcagcagtgccttatgaagaggctctttcaaatggaaagccaactgttgtagaattctatgcagattggtgtgaagtatgccgggaattagctccggatatttacaaagtagaacaacaatacagggatcgtgtgaattttgtaatgctgaatgtcgacaacacgaaatggggacaaaaacttgacgagtttggcgtggagggtat

SEQ ID NO: 25265 - DNA, 181 bp, Gossypium hirsutum
  Clone ID: LIB3147-034-Q1-K1-E12
cccacgcgtccgcccacgcgtccgatgctgttgaggttgtgagctacccctctgtcttttcttccggtttatgtctttacactttcttgattctggtacaaagtataattgtggagactaattcaggcttgatgtgtttccttgattttcattattatcattattagtatagtcgttcatt

SEQ ID NO: 25266 - DNA, 298 bp, Gossypium hirsutum
  Clone ID: LIB3147-034-Q1-K1-E2
aaaacccttcccctcttctctttcttttcctctgtgagggtttcaaaaatctcttatcgcacagcaccggaccactgtggctccactgcgagcgacagtcggagccacgcaaagatcagattttggccttctttaaagcagatacgaaggcaaaccttcctagtccaaaaagattgaagaaaaaaaggactctcctccctttattagtctgatttcggagccggagaagaacttccgacgacgaaaccgcgggatggctcatgtgttagaagcgtgggaggcgacgacagacactggg

SEQ ID NO: 25267 - DNA, 321 bp, Gossypium hirsutum
  Clone ID: LIB3147-034-Q1-K1-E3
gaattcccgggaattatataaatatttttttattttttggggtcgagaccattgctttctctctccctcctttggctttgagtgtcggacactctcgttttgtagatccaccgtctctttaagtattcgggtacttaatggagccaaaatctaccactggatacaatattggacatgttgagagcttgactccgtccgatcctgaataagattaattatattttcgaggtcgggtcaaaattaatcctacccttcttttattttggtttaataggaattggaggaaagagagaaggtagtgaggaagatgtgggatgttta

SEQ ID NO: 25268 - DNA, 296 bp, Gossypium hirsutum
  Clone ID: LIB3147-034-Q1-K1-E4
cgcccacccccttcccccgaagcagcagtgatcaccggcaatgggtatcgatttggtcgccggcggcaagagcaagaagacaaagagaactgctccgaagtccgatgacatctacctcaagctcctcgtcaagctttacaggtttctagtaaggaggactgggagaaaattcaatgccgtgattttgaagcggcttttcatgagcaaagtcaacaaaccgccgttgtctctatccagattgattcaatacatgaagggcaaggaggataagatcgctgtggtagttgggacggtca

SEQ ID NO: 25269 - DNA, 244 bp, Gossypium hirsutum
  Clone ID: LIB3147-034-Q1-K1-E5
cccacgcgtccgcgtcgatctcgattctgttgtttgcctttgcaccgttttcaaggctagcatcttagccttaaacctaacctttccattttccttaacctgcttcctaaccgtttgctcaaagattgttccttccaccttccaaggctaagccttcactgttcccaatattctttcaagccttccttattgtgttgggatatgaaaagacacggttccccactttcacaacacaccaggggtt

SEQ ID NO: 25270 - DNA, 292 bp, Gossypium hirsutum
  Clone ID: LIB3147-034-Q1-K1-E6
cccacgcgtccgttctctacttaaggcatttttctctctccctatttgtaaagtttcacttgtattttggagtgaaatatatttgatagtgcccgaggacgtaggcaagatttgccgaacctcgttaaaattttggtgttctttactatttaatgttcatattttgtgagtgtgattgtagtgatttattgtgctattaaattacgatagagggatattctggctaggaaagacttggtacttaagtgatcctcgtgattcacctctctttcctgggaattgaacttagtgt

SEQ ID NO: 25271 - DNA, 149 bp, Gossypium hirsutum
  unsure (1)..(149): unsure at all n locations; Clone ID: LIB3147-034-Q1-K1-E7
cccacgcgtccgcccacgcgtccgtccactcttccgcccacgcgtncgtatggatatgctgcaagatatgaagcatatggatatgcacctnctccccaagatcctacatgtactatggggctatcctgatatggaaataccacagcagg

SEQ ID NO: 25272 - DNA, 290 bp, Gossypium hirsutum
  Clone ID: LIB3147-034-Q1-K1-E8
cgaggttctcaactttctcgggctatgtgctttgatgtgcatgggagtaacggcgggtgcttacatccttactatatttgctataaaatacagagaacgcgtccttggtttgatacttgtatccccgctttacagagcaccttcttggactgaatggttttataacaaggcgatgactaacttgttatatttttacggaatgtgtgaactgcttaaagaaattttagcttcaacgatactttactaaggaagctcggggtaatgcataagttcccgaatcagatattgct

SEQ ID NO: 25273 - DNA, 420 bp, Gossypium hirsutum
  Clone ID: LIB3147-034-Q1-K1-E9
ggcctgagagctctggttttggtgatgcatttgatttttctttgaagtctgggagtgagcatagggtgtttctgaatcgcctcaagaaggtatggaaggccatggaaggcctagtcgattccggtttagttcgagctatcggtgttagcaatttcggtgttcatcagatcaaagaattgcttaaattcgcaaaaatcgtacctgctgttaatcaggtggagttgcatcctttttggaggcaagatgagctggtgaagttctgccaaatgaagggtatccatgtatcggctcatacacctttgggagtacctacttcaagtcctggagtgtccgatagtggatcgggtggggaagatgaacccggaactcctcggatttcatttcggaagtctagatcagtacatggaccgatgctgaaat

SEQ ID NO: 25274 - DNA, 186 bp, Gossypium hirsutum
  Clone ID: LIB3147-034-Q1-K1-F1
acgggctgtgggaagaattgccttactagctgttgcatattaggagcaaagcttgctttatatgcttgcgaagaagtgaacatggagcgtgaataagatgtggctgaaaatgggaacacaggaccctcaggtggcttttttgacttactcctcttggagagtgggaagatcggatgcaaagagggc

SEQ ID NO: 25275 - DNA, 430 bp, Gossypium hirsutum
  Clone ID: LIB3147-034-Q1-K1-F10
cccacgcgtccgctgcttcgttaacaggcttttgatctacaatttccctgaagaactctttgccgatgcaagcatacttgcaatcgagcatgctgattttgatgggatagagcgtctggctttggtaacaggtggggaaattgcttcaacctttgacaacccagagtctgttaagcttggacattgcaagcttattgaagagattatgattggtgaggacaagttaattcacttttctggtgttgaaatgggtcaggcttgtactgttgtgttgagaggtgcaagccatcatgtgctggacgaagctgaaaggtctctgcatgatgccttgtgcgtactgtctcagacagttaatgacactagggtattgcttggaagtggatggcctgaaatggtaatggcaaaggaagtggatgagctagcacgcaag

SEQ ID NO: 25276 - DNA, 325 bp, Gossypium hirsutum
  Clone ID: LIB3147-034-Q1-K1-F11
cccacgcgtccgcccacgcgtccggttctttgatcattattatgagcttgagcatacatcgagaactgtagtaggaatttgatattttatctttggctaaagagtttcaagataacttgatgagaaacaaaagacatttgagtgttaaaaaaaaaaaaaaaaaaaaaaaaaaaaaaaaaaaaaaaaaaaaaaaaaaaaaaaaaaaaaaaaaaaaataaaaacaaaaaaaaaaaaataattataaaaataaaaaaagggggggctggggtgggggttttaaagattcaaatttttttttcgcgtgatttaaaatttttattttttt

SEQ ID NO: 25277 - DNA, 294 bp, Gossypium hirsutum
  Clone ID: LIB3147-034-Q1-K1-F2
ctctaatttactgccaatggcgccaaatattccattcccttctgccatttatggggctaggggctcaatcccctttattgttgattcaagtgcacctgtcgtgcctcaaattatgggctctacatcagcggttccaatagctcactctcaggcacaattcattatgaacatgagcaatgcagctgctggtttaaatggttcaggcccctcacggcctaattttgatctgaattccatattagcaatggaaggatgaaatacagatcccatgggtttaaggcagccattcatgcc

SEQ ID NO: 25278 - DNA, 136 bp, Gossypium hirsutum
  Clone ID: LIB3147-034-Q1-K1-F3
ctacttactacacgacgagattctgtttttttcatttgttgagggtcgaaaatttatatgagcgggctggtgagtgagtgattggggattgcgtatagaaaatatagactggtagaggacctatgtgtttttcatt

SEQ ID NO: 25279 - DNA, 295 bp, Gossypium hirsutum
  Clone ID: LIB3147-034-Q1-K1-F4
cttagagacaactatgcatatcttttacacgacgtggacacaggcacggttggagtcgttgatccttcaatagctatgcccattatcgatgctttgagtcggaaaaactggaacttgacttatatattgaatacccatcaccatcacgatcatactggtgggaatgcagagctgaaagcaaggtatggagcaaaggttatcggttcgggaatagacaaggataggattcctggaattgatattgttctaaatgatggggacaagtggatgtttgcaggtcatgaggtgcatgtca

SEQ ID NO: 25280 - DNA, 290 bp, Gossypium hirsutum
  Clone ID: LIB3147-034-Q1-K1-F5
cccacgcgtccggaaactccctggacaactcaagaaagctgaagaggccagtagcccggctccagccccagcagctgagccccatcacgaagaggagtcaaaggaaaagaagggaattttggagaaaatcaaggagaagcttcctggttaccactccaaatcagatgaagaaaaagaaaaggcttgagattcaagttcacataaaaatactgatgggattgtgtgtttcttaaattgttcaaaaattatctgcttttgtttttgaggttgtatttgttgtatatttcata

SEQ ID NO: 25281 - DNA, 291 bp, Gossypium hirsutum
  Clone ID: LIB3147-034-Q1-K1-F6
cccacgcgtccgcccacgcgtccggtaatgagtaagtctcccaacaagcacaaccgattatacatggaagctcgacccttggaggaaggtctggctgaagccattgatgaaggtcgtattggtccaagagatgatcccaaggttcgttcaaaaattttggctgaggagtatggatgggacaaagatcttgctaagaagatatggtgttttggccctgagaccacaggtcctaacatggtggttgatatgtgtaagggagttcagtacctgaacgaaattaaggattctgta

SEQ ID NO: 25282 - DNA, 86 bp, Gossypium hirsutum
  Clone ID: LIB3147-034-Q1-K1-F7
acccaacctagctaaacacgatcacatgtttctattgctaccgatactcacagcactattgacatatttactgaataatgggacga

SEQ ID NO: 25283 - DNA, 293 bp, Gossypium hirsutum
  Clone ID: LIB3147-034-Q1-K1-F8
gtacctggcatcaaagtagataagggtttgtttcctctacctggatcaaacaatgaatcgtggtgccaaggcttggatggattgtcatcaatatctgccgagtactacaaacaaggtgctcggtttgccaagtggagaacagtagttagcattccttgtggtccttctgctctggctgttaaggaagctgcatggggacttgcacgttatgctgccatttctcaggacaatggtcttgtgccaatagtggaacccgagattcttctggatggtgaccaccctattgagaggac

SEQ ID NO: 25284 - DNA, 463 bp, Gossypium hirsutum
  unsure (1)..(463): unsure at all n locations; Clone ID: LIB3147-034-Q1-K1-F9
cacgcgggcgcagacgacgtgagcatgactttgacttgcgtatttttcttgtgtgtcaagacagatgatattgctgcgtgcaacgtgtgatggatgcaacaacctccaaaatacctccaaggcaaggtattgatgaaaattgtgaagggaagtctcctcatatcttaagaaagttggttacaaccctgacaagatcccatttgtcccaatctctggatttgagggtgataacatgattgagaggtctaccaaccttgnnntgtacaagggtcccactctccttgaggctcttgaccagatcaatgagcccaagaggccttcagacaagccactccggctaccacttcaagatgtcttcaagattggtggcattggaactgtccctgttggtcgtgttgagactggtgtccttaagcctggtatggtagtgacctttggcccctctggtctgaccactgaaatt

SEQ ID NO: 25285 - DNA, 297 bp, Gossypium hirsutum
  Clone ID: LIB3147-034-Q1-K1-G1
ggggtattgaagttaagtctggacagcctattaaagcagatcctggtgctaactacgttatccatctttcccaggcttcacttggagagtccaagaacaaagcagaatccgttccactctatgtgaatgttgatgggaagaaacttattctgggaaccctttcccaccagagttgccctcaattatcttttgatttagtatttgacgaagagtttgagctctcccacaactggaaaaacgggagcgtatatttcctcggttacaaaactttcataccagaggaaggtgatgattttg

SEQ ID NO: 25286 - DNA, 264 bp, Gossypium hirsutum
  unsure (1)..(264): unsure at all n locations; Clone ID: LIB3147-034-Q1-K1-G11
accacgcgggcgaaaggaaaaaggaaaaaaaaaaaaaaaaattttaaatttttaaaaaaaaaaaaaaaaaaaggggaaantgtgaaaaaaaaaaagggaaaaaaaaaaaaaaaaaaaaaaaaaaaaaaaaagggaggggagaagaaaaaaaaaaaagggaaagaaaaaaaataaagagagaaaagatgaaaaaaagggggaaggaaaaaaaagaaagggaagaaaaataaaaaatatgaaaaaaaaaaaaataatgggaggagg

SEQ ID NO: 25287 - DNA, 436 bp, Gossypium hirsutum
  unsure (1)..(436): unsure at all n locations; Clone ID: LIB3147-034-Q1-K1-G12
acccacgcgtgcgnccgcttgttgtaccacaaacgtatccatttatcctttgccaatgagcaccaaaaggcgtggtgcggggatagctggccggaaaatgagtcagggggcattcaagaaggtccttgagaaacttgcagttgaaaattacaacttcagtaatccgattgatttgaggagtcattgggcaagacacggtaccaacaagtttgttactatcgtaggtttaatattggtggtaatgatagttgaactccatcaattatggtctgcttcacttgtatatattcccatggccatctttgttcgaaccttgtagtttttcatttgtgctcatgctttaagaacatcccgtttattccggtttaaagttgtggacgagtttttagttgttggattttgttccgatattcttctttcgccacccggaaagtgt

SEQ ID NO: 25288 - DNA, 304 bp, Gossypium hirsutum
  unsure (1)..(304): unsure at all n locations; Clone ID: LIB3147-034-Q1-K1-G2
cgtctggtttctctatcacaccatgaatgatgatgttttctttactctcctcaccgatattatttccggtttgcctctcaacacccatttgnttgtaagaatatcttggtctatttctcttaactgttaagctcgcggattgttctgtgctaaagatctgtagcttagagtcaagatctttgtttctggttagatgaagtattctcgagttgcgttggttaaaaaataaaacaaaaaagtggcgctcgttctacacgatgcaaaactacatcctctatcttctagaatacaaaaactttggtgc

SEQ ID NO: 25289 - DNA, 292 bp, Gossypium hirsutum
  unsure (1)..(292): unsure at all n locations; Clone ID: LIB3147-034-Q1-K1-G3
ccgtccgctccacgtcgtctcgctccacgtccgtccgtcccacgtctgtccgttgttttgtgagcagattngtgtgagccatcgaatttgatgtacctnntggtttggtggttttatttagtactttgcnnaactttagttgtatttttggcacccttatcatttgtggaaagaagactctgggagaatgaaatgaatttggaacctggttgtgaattgttggtggattgtgaatgtacgtacnaactctaaatttatttatnctcttttctattttctggctttggtttga

SEQ ID NO: 25290 - DNA, 297 bp, Gossypium hirsutum
  Clone ID: LIB3147-034-Q1-K1-G4
cttttaataagctgaccgacggcggtgcaacaactccggctggtctcgttgccgcctctctagctcacggatttgcgcttttcgtcgctgtatccgtcggcgctaacatctccggtggccatgtcaatcccgccgttacattcggtgctttcgttggcgggaacattactcttttacgtggtatcctttattggattgctcaactccttggctcaaccgtcgcttgcctgttacttaagttcgccactagtggcctgggagtaccagctttcggactatcatccggcgtgggagcaa

SEQ ID NO: 25291 - DNA, 179 bp, Gossypium hirsutum
  Clone ID: LIB3147-034-Q1-K1-G6
gttttctccttgagacaggcaaggtacctgacatcaagaatggttcaacttaaagatgcttccttgtactcattctcatcctctttatatttttcgatgctttcttcaagtaggatactaagaatttcctgtactattctttctgattccttataaaatagtttgctcattagaacctt

SEQ ID NO: 25292 - DNA, 294 bp, Gossypium hirsutum
  Clone ID: LIB3147-034-Q1-K1-H1
cccacgcgtccgcccacgcgtccgtaataatgctgcttacaacaaatctataatcgaaaacaattgggggatggaagtcatcggattctataattattggaacgattacctgaggcaaccggatacccaagtggtgatgttccgaaacaaaacttcggagcacgacactattgttgtttccttccgaggaacacaaccgtttagtgccgacgattggtgttcggacgccgatctgtcttggtacgaattccccaacattgggaagattcacagtggtttcttgaaagctttggg

SEQ ID NO: 25293 - DNA, 465 bp, Gossypium hirsutum
  unsure (1)..(465): unsure at all n locations; Clone ID: LIB3147-034-Q1-K1-H12
gggggggngcgaataatgcaaatttataacctaatttttcaattcttacaacngaacaaatcccttgtgtttggtggcctttagggtaaaatggtccaaaacaaatcaaaaaatacaatatttcccattgttttttgtcttctttgctgagtgtttgtatttgctaccgtgttcgccccttttgcaagtacaaaacgttctgtcgttctcgttcgggagtttacatacggtagcgctcttgactgcttaaatgctttaacgtaccttatctgtggaagcttaaatttttcctttcatctacttctattgatatggtttctacaaatttctttatcaattgttccctttcttctcatttctattattgattcaacccttcatttatggcatttgtttattgtaatattcctcttgcccatatatacttttttttgaactcatttacttcaaatttacatttattat

SEQ ID NO: 25294 - DNA, 298 bp, Gossypium hirsutum
  Clone ID: LIB3147-034-Q1-K1-H2
gttgactctgattcataactcctatacatataattatggcctccagtttatttattagatggatattaggccattgtttatgtctatttatccatctataaatctctcttgttgcttactttaacaaagaagcgtatgatcttggcaacacataaagtcgctagagcttgtatcattaccactagattgcacagccatttatatccatcagatgtttccctgacgccaatctgtcttgatacgaattccccaacattgggaagattcacagtggtttcttgaaagctttggggatgca

SEQ ID NO: 25295 - DNA, 295 bp, Gossypium hirsutum
  Clone ID: LIB3147-034-Q1-K1-H3
gaaatcccattttccctttatccgcactggtgaaaagaatagagaaaaattgcagtcgctgtttttgatcgtcataaagaaaaagcgccggggcgtgacctgagatcatcaaaacctaaacacggtcctttgatttccgaaatatgtggagaaggctacttacttcacagttcaaatctctggcagcacttccatgcggatccgcgtctaaaacggcgccgtttccattcaaatctcacatttctccttccccttctgcttccctcctcgttttccatttctccgccgagtcagc

SEQ ID NO: 25296 - DNA, 301 bp, Gossypium hirsutum
  Clone ID: LIB3147-034-Q1-K1-H4
ccgaaaatgaagctcttagaactccaaagccagtttgcagcctcaagaccactcctcaaacttcaatttagcgaagcaaagaagaacccgtggcgaatttgcaagagctgggcgtacggagaagaagaccccgggtgatgtggaggctgggcggaagggtctctcgtgtgagaccaactttctggtgcctctctagcttgttccagactcttctggaattcacaagaagctgaaacaattttgggtatgttgggcttcgggttttgggcttatttaggctaattttatttggattttggaa

SEQ ID NO: 25297 - DNA, 131 bp, Gossypium hirsutum
  Clone ID: LIB3147-034-Q1-K1-H5
cccacgcgtccgcccacgcgttcgtctacgtttccgatttgtttcgaggcttgagggatgggttcaatgtgtgttagggttcatttcggctatctctttttgtccacgtatattcctcccttgctcttcaa

SEQ ID NO: 25298 - DNA, 296 bp, Gossypium hirsutum
  Clone ID: LIB3147-034-Q1-K1-H6
cccacgcgtccgctttgctacaaggaaatttaacaaggcactgcgattcctgcttgagacttgaaaagatgcttgcaatcaatggcatgtgtgaagggaaagaatgttcttaggaaagaacctatgaggaaagatattggcgaggatgattcattttttgttaatgaaaagtttgcaagcaaattttacaaggtgaaggtaggaactgtggttgcacaaaaggaatcagaacctgaaaagcaggagacccgacaaagagtggaggaggacaggaagccgcatattgaagctgcaat

SEQ ID NO: 25299 - DNA, 281 bp, Gossypium hirsutum
  Clone ID: LIB3147-034-Q1-K1-H7
cccacgcgttcgtttcgctacaaggttatatatcaaggcactagaatctctgctggggaggggtaaatatgcaagcgatgtatggcttgcgtaatggtaaagaataatctttagaaacagcctgtgtggaatgataacgacgacgacagattcatctcttgttaaagaaaataaacgcagctaactttacaaggggaaggcgggaactgtgtccgcacttaaagaacatgatccttagtattcgccgaccggattaacactatttgattaccaaaagccgc

SEQ ID NO: 25300 - DNA, 210 bp, Gossypium hirsutum
  Clone ID: LIB3147-034-Q1-K1-H8
cccgtcgcgaatttgcgagagctgtgcgttcgggaaagaacaccccaggtgatgtgttggctgggctgaatgatctctcgtgtgagaccaactttctggcgcctctctcactgggtccatactctcttgggatgcacaagaagctgcaacacttttgggtctgttgagcttccggatatgggctgatgtcagctaatcttatatggattc

SEQ ID NO: 25301 - DNA, 285 bp, Gossypium hirsutum
  Clone ID: LIB3147-035-Q1-K1-A1
tcggttggttcttctccaatgtggaacttgggtgaattgtagtatttattgtagcatttggggatttgacgtagttcttaggtttgtggctagcaaatattcgtagttaatgcagtttatagtggttgtactttgcagggttaagataccttttttatatagatataaatgtttttccattctctttattattgatgcaggcaattggatcacattgggtttagagtttctgcctttgtactaaagagttgcttctatcgattaacgtaataaattcgattcgag

SEQ ID NO: 25302 - DNA, 293 bp, Gossypium hirsutum
  Clone ID: LIB3147-035-Q1-K1-A10
ggtttagggatctcgccatttttttgtattatcttataaatggcggatgataattggtgtgttggctttaaaactttgtactctgattccgcattttgtaaagtgctccaagcaaatggattgctttttttatttaatcattaaagaaatcctggcttaccgcagagcagcaagcctaaaaacaatccaaaaagagactctactaaatgttttgaaaaatgcctaagaaagcaataggatgaatggttattggtgttaaaaaaatcaattctctattttatcaacatacaatt

SEQ ID NO: 25303 - DNA, 388 bp, Gossypium hirsutum
  Clone ID: LIB3147-035-Q1-K1-A2
cttttcttctgcttctggtcaagccaatatcaaaagacttcccttttagctcacgactcctctcttgagtactataatgggtaaggagaaggttcacatcaacattgtggtcattggccatgtcgactccgggaagtctacaaccactggtcatttgatctacaagcttggtggtattgacaagcgtgtgattgagaggtttgagaaggaggctgctgagatgaacaaaaggtcatttaagtatgcatgggtgcttgacaagcttaaagccgaacgtgaacgtggtattactatcgatattgccctctggaaagttgagactaccaaatactactgcactgtcattgatgcccctggacaccgtgacttcatcaagaacatgattact

SEQ ID NO: 25304 - DNA, 229 bp, Gossypium hirsutum
  Clone ID: LIB3147-035-Q1-K1-A3
ataagtacatcatcataacatttgcattggtttacacaatgattgctaccgcatatgacccaaacaagtgatcactcaggaccattacatcccattgccatcggcttcattgctggtgccaacatattggccactggtccattatctggtggatccataaacccaaatagcttcttatgaccaataataacctagagcggacttcaactgcatatggatctactggatg

SEQ ID NO: 25305 - DNA, 327 bp, Gossypium hirsutum
  Clone ID: LIB3147-035-Q1-K1-A4
attttgaagagaaggagaacgaggatataagtataagaagaggacgacgaggaagaagaaaagagtgtaaattacgggatcaaaaaggtcacatgtggtctttgaaaacggagttctaagaaatctagtccacattctgctgataagcaatatccagtgacgcctaatactggtaggcctgcacaggcaaggaaagacttaaaacggtattcacttcctcctcttccaagggcttactcttttaaaactctatcatttgataaggctcctggtggtcaacttaaatatattcccaatggattgcccctgttctcttgcttatttgac

SEQ ID NO: 25306 - DNA, 282 bp, Gossypium hirsutum
  Clone ID: LIB3147-035-Q1-K1-A5
gttggttcttctccaatgtggaacttgggtgaattgtagtatttattgtagcatttggggatttgacgtagttcttaggtttgtggctagcaaatattcgtagttaatgcagtttatagtggttgtactttgtagggttaagataccttttttatatagatatagttttttttccatttcctttattattgatgcaggcaataggatcacattgggtttagagtttctgcctttgtactaaagagttgcttctatagattaacgtaatagattcgattcgag

SEQ ID NO: 25307 - DNA, 428 bp, Gossypium hirsutum
  Clone ID: LIB3147-035-Q1-K1-A6
cccacgcgtccgcatgattctcatggtgtgcatgacgatgatgagtgcacccaaggcagccaaagccgccatcacgtgcagcgacgtggtgaaccacttgatcccgtgcttgtcctacgtacaaaacggcggtacacccgctgctgcatgctgcagtggggtaaaagcactctacggcgaggttcagacctccccggaccgccaaaacgtgtgcaagtgcatcaaatcggcggtgaacggaattccgtacaccatcaataacctcaatctcgcagccggcctacctgctaaatgtggtctgcaactcccttacagcatcagcccctccactgactgcaacaaggtgcagtgaggttgatgatgatgatatggaaggagtggaagaaggttccagctcatctagataaagtagctagctaagggtaaat

SEQ ID NO: 25308 - DNA, 440 bp, Gossypium hirsutum
  Clone ID: LIB3147-035-Q1-K1-A7
cccacgcgtccgaaatttgcccccaaatatcccaagtgtacccaactctttcatttaccggcgtgggttctctgaaaactcaagcattccagtttctttctccttcattaatccaacaccaaattcaacccaaacgcaaaaatatccatggcagtaaaaaattcaacctctgctcatgccaaacgctctcggaaaaaagctgctgcttcatcttctttgatccccaaattcatgaaaaaccccataacaacaatggcgttggctttactcatcattgactccctcctcgtctacttcatcatcgtatacgtcccttatacgaagatagattgggacgctcacatgtctcacgtaagtgggtttcttggaggagaaaggtattataagaactcgaaaggagacactggaccgcttgtttacccagctggtttcctttatgt

SEQ ID NO: 25309 - DNA, 445 bp, Gossypium hirsutum
  Clone ID: LIB3147-035-Q1-K1-A8
gaaacgaaagggtactcaagggcttattgagattgagaatccaaatttggccaaacaaaagaatgtcaaagctaaagatgttgatatggggagaacaactgaactatcaaggcgtgaaagagaggaaatagaaaagcaaaaagcacatgaacgatatatgaagctgcaggaacaagggaaaactgaacaagcaagaaaagatttagagcgcttagccctgatacgacaacaaagggcagaagctgctaagaagagagaggaagagaaggctgcgagagaacagaagaaaactgaagctcgcaaataatccaggttgagaaaaatctgtgacagtttctctctttatcttctatattgacttctgcatctgtatacttgagctcttatcccataaaaaaaaagagtttggaatctgattgttggatattctaaaacataaatatat

SEQ ID NO: 25310 - DNA, 202 bp, Gossypium hirsutum
  Clone ID: LIB3147-035-Q1-K1-B1
cggaattccgggccacgacccacgcgtacgctcaccatttttagaacaaaaattccaaatttttcagatctctttcacttacagaaatgggccaagttaacacgatgacagcccatttattgtctcctcgcatggcccttctcacacttgactccaagcacgttattatagcttgaacacattaatctaacctctgatcatg

SEQ ID NO: 25311 - DNA, 464 bp, Gossypium hirsutum
  unsure (1)..(464): unsure at all n locations; Clone ID: LIB3147-035-Q1-K1-B12
cgggcgnccacgcgtgcgntggaaaacaaacacattgtcttgtttcatgatccatctacagttgagcgaantgaaggatcctaagattatgctttgccccatacctacaatacatgttttttcaagatatagttttatagtagtatatatggactgtaaatatgcatgttgggtttatgtgactttactagataacaacgtttagtagagcagcgtgaaaataaacatttgataagccatgttgattacaatatattgaaaatggagatagcccggtttacctatttgtttttttttttaaataaaactatattttttacttttttttttttaattttttacctacatattttattaatctattattaattatattttttatctatcttattattacttatttttttaataatttaattattttggggggggccccctctttttagggaataaatttttttttt

SEQ ID NO: 25312 - DNA, 348 bp, Gossypium hirsutum
  Clone ID: LIB3147-035-Q1-K1-B3
ttacaagaagaagaagcggtgcatgaagagagttggactagaaaaaggggccatgcaacgggatggtttgattgtttgtttttactaaaatttattgatgatttgtggttagatggttagattttgattttgataggagtcatgcgtgtgggatggatggtaagttttggtggaaaagaaacgaggtctctgcttgaagaataccaaacgggctctgattttggtgctggggattgtgttggagatgatataaatgcatctggtggaaccaagtttgatgcagttggtgttggcttacttagtctacttatcgaagatgtttacttgccaatggatcttattgactac

SEQ ID NO: 25313 - DNA, 439 bp, Gossypium hirsutum
  Clone ID: LIB3147-035-Q1-K1-B4
accagatggcacaatagatgtttcacaagataagcataagatggttgatgctgagccaattgatctttgcatggtgcttgaacgaaaccctggatacgagtcttccagagactcctggacaatggattaccaaatcgaattatgtttcacagaaacaaataaaagtgcagctagcaaatgtgatgatgatgttgagaaagttccttccaatcataagaacaccattgccaagcaaaatgaagcgaaaaagccagccaaagaagcaaggtctaaagctctaaatggacccattgggaagatcaaagctgaaaatgtgtctaggagcaagaaaccatctattgttagtaggtctgctattcagaaaagcaagttggagaaggaagaagagatgcgaaggaagatggaagagctacagatcgaacggcagaagagaattgcc

SEQ ID NO: 25314 - DNA, 437 bp, Gossypium hirsutum
  Clone ID: LIB3147-035-Q1-K1-B5
ttatttttctccctctcgataccagcttactttcatcagtatggcatctctccgaattggaattggtctgttccaagttattttcaaccatatattgtgacatcacatgggcctttccgcactaaatatgaaggggtaaattacattatgaacacattgctatcattacacatggtaatagctttcattgtggctgttatactcgacaacactgtacctggaagcaggcaagaacgcggggtttacgtatggtctgagtctgaagctgcaagaagggaaccagcaggcgtcaaagattacgagttgcctttccgggtcggtcggatcttcagatgggtaaaatgggttggtctttgacttgaacaccaacatcgcgaagagctggacgacaacgaccattagtaagacccattctctgtaatttatattgtagaaat

SEQ ID NO: 25315 - DNA, 432 bp, Gossypium hirsutum
  Clone ID: LIB3147-035-Q1-K1-B6
acgctatttttctccctctccataccagcttactttcatcagtatggcatctctccgaatgcgaattggtctgttccaagttattttcaaccatatattgtgacatcacatgggcctttccgcactaaatatgaaggggtaaattacattatgaacacattgctatcattacacatggtaatagctttcattgaggctgttatactcgacaacactgtacctggaagcaggcaataacgtggggtttacgtatggtctgagtctgaggctgcaagaagggaaccagcagtcgtcaaagattacgagttgcctttccgggtcggtcggatcttcagatgggtaaaatgggttggtctttgacttgaacaccaacatcgtgaagagctggacgacaacgaccattagtaagacccattctctgtaatttatatt

SEQ ID NO: 25316 - DNA, 362 bp, Gossypium hirsutum
  Clone ID: LIB3147-035-Q1-K1-B7
aaagaagccggggacaagaagaagaagcggagcaagaagagagttggactagaaaaaggagccatacaacgggatggtttgattgtttgtttttactaaaatttattgatgatttgtggttagatggttagattttgattttgataggagtttgcgtgtgggatggatggtaagttttggtggaaaagaaatgaggtctctgcttgaagaagaccaaatggggtctgaataaggtgatggggattgtgtgggagatgatatttcgccattggtgcagtccagttttgctgcatctggttttcaattaattaatcaaaaaaaagatgattttcactttctaaaaaaaaaaaaatatgactaaa

SEQ ID NO: 25317 - DNA, 454 bp, Gossypium hirsutum
  Clone ID: LIB3147-035-Q1-K1-B8
gaggtccgggccacgcgtacgggaacgccgacgactgggccacacggggtggtctcgaaaagaccgactggtccaaagccgcattcatagccgcatacaagagcttccacatagacgggtgcgagtcgtcggtggaagccaagttctgcgccacacagggaaagcggtggtgggaccaaaaggcattcgaggacctcgacgcctatcagtggcgcagactgcgttgggtccgcaacaagttcactatttacaactattgcagcgatagggtgaggtaccccacaatgtcgcccgagtgcaagagagacagagacgcttgagtcatttccatcaccagcgagtccaagttccccccttatattcttgactaccatatgagatccgtcattgtcctttagatttcaattgcttgttggccttcacttattgccacatcaatttcattatatgtaat

SEQ ID NO: 25318 - DNA, 561 bp, Gossypium hirsutum
  unsure (1)..(561): unsure at all n locations; Clone ID: LIB3147-035-Q1-K1-B9
accctnactaaaggggaaccaaacagctggagccttccaccgcnnggtggcggcccgcttcttagaacnttagtggatctctcccgggccttgcaggannnattctgtagtaagtgaggaaacannttgattnncgtagnntgaagaaagtggtntnnagaatangnntcaaaccanngtgaaacccaggggaananntttcaataagaagatctcggtatttgattgggtcacaacccaaaaaaaanntttgaaaattttantggatacgagagatattatganngtctattttnncatggaaaattacacggcactttcngatttggagtttcttaattctcaagttatttaaataatttaagtgacctgttgctttcaggaagaatagcttgtagctgaatttgtgatttntgttgcaaacatnggttannaaacttgttaatgagatgcntttgcgagttcttaatgatcttatgtgtgatttcaatattctggttttaaattgagttcaaattcaagtgaagtgaatttgctaaatatgcattatgttcatggata

SEQ ID NO: 25319 - DNA, 237 bp, Gossypium hirsutum
  Clone ID: LIB3147-035-Q1-K1-C1
gcgcccacgcgtacgaccacgcgtccttaaatttaaaaatttgaactaaaaataaggagccatgcaacattataattagactgttactttttactaaaatttattgatgatttgtcgtttgatcgatagattttgattttgatttgagtttgcctgtagcatattatattgagttttggtgaataataaatgatgtctataattttcctataactcatatgatctccattacctgat

SEQ ID NO: 25320 - DNA, 315 bp, Gossypium hirsutum
  unsure (1)..(315): unsure at all n locations; Clone ID: LIB3147-035-Q1-K1-C10
gccggccaacttntgtacgtacacagtgaagtgatttacagatcttgatacgcgtaatacagttaggtgagctttggagcatattcttgttttgagttnntagtggttgtagatannaagaaaaaatgtgctgaggagcatanccaaggttggtgtgtgaggaaagcagtggagagcaagggagcgagggatgtttgatttctttggggaagaaagaagatgagaagcctcaacctcaagaggaggtggtcgccacccagtttgagaaagtcaagatagaagaggaacataacgaagatgagaagaaacacagtc

SEQ ID NO: 25321 - DNA, 279 bp, Gossypium hirsutum
  Clone ID: LIB3147-035-Q1-K1-C12
ggcgacccagcgtgcgggcttgtttagtttgtattttgatatgtttgggttatataaaatggtaaaggtttctgttaccgttaccaatgtcaattctcatctatttatacaatatttgtcatgttagtaagaaagaaggcttctcgccttccaatccataaattatgtaccttacaaatcagtgaaataattggatgaaaaaataagttaatttaacaaaaaataataaggataacctgtatttaaaaaaggttctttttatttcaaaaaaacttaaaa

SEQ ID NO: 25322 - DNA, 344 bp, Gossypium hirsutum
  Clone ID: LIB3147-035-Q1-K1-C2
gacccaggcgtacgcgtacgccaacgtcttccacatacagcatttattgttccagtgcaaccaccaaccaagccgccagggtacccacctcccaaacctccagctcaaccttctactaagccaccaaccaaaccttcaactcaacccccgactaagccaccaactcagcccccgactaagccaccaaccatgcctgcatctcagcccccgacgatgccaccaacacacccaccatctaatacttcggccaagccacctaaatcgagccaggtggcagtgcatggcgttgtttattgcatgtcatgcatactcgccggagtcgacacccttttgggagctaaacc

SEQ ID NO: 25323 - DNA, 428 bp, Gossypium hirsutum
  Clone ID: LIB3147-035-Q1-K1-C3
cggggcacgcgcacgcgtacgcccacgcgtacggattaacaagtttttgattgtcttgatagagctgtgttgagggtgaggaagggtgaaaattcgctcttgaccattgcaccagagtacgcgttgaggtcatccgggtctaatcaggcattggctgtagggcctgtgaactctactgcaatctatgaaggaaacgtgctatcacttgtcaaggtaatgctattatgggatgccatctcccgaaagaaattcgaagcttctggtacaaagatggaagtaagcaacgtattattcatagcttgcaaatatgttagagcttctaagagatatgagaaggctgttaagcatattgattatgatactttcttcagtgaagaggagaaaaagcagtccacggcgttgaaggtagcttgcaatctgaacaatgc

SEQ ID NO: 25324 - DNA, 310 bp, Gossypium hirsutum
  Clone ID: LIB3147-035-Q1-K1-C4
caggcgaccacgatctccctcccttccgaatcaagaatgcttccattctaaaatactgcttcttttcagggaggagggggactttactcacataacagataaacgtcttcttgctgcttttcctaacttggtgataacagcaaatctacacacatatgttgagactgtgatttatttactgtctacatctgccatattaaataatgcactcgatccttatttcaaatgaaaattatatcatgttcaaaaattttttggctgtttgactgctatccactctagtaactgagtatacttactctatagatca

SEQ ID NO: 25325 - DNA, 428 bp, Gossypium hirsutum
  Clone ID: LIB3147-035-Q1-K1-C5
cccactcgttctcgtacgcatgtacagattcttgttatgagcctgtatcgtctattggggccgggaagggtgatactccacctcaaactattgaagtacattttgagttgaggaaatggcttcaggctaatgttagtcccgaagttgctgaatcaacccctattatctatggagggtccgtcactgctgctaactgcgaggaactatcatctcatcctgacacccatgaataattggatgctggagcttaacttaagccggagttcattgatatcataaaatcagctgaagtgaagaagaatgcctaacgttttcggatggaagctttgatagtacttacaatacctgctgcttgggaatggaaagtttaagatctgttccataataagagttttataaagaaaattaaatactaattttcaaggaat

SEQ ID NO: 25326 - DNA, 325 bp, Gossypium hirsutum
  Clone ID: LIB3147-035-Q1-K1-C6
tcgcgttatcattgctgttcaaatcacgactcttgcaataaaccatgaacccgctgcaatgcgaaacggggctgattagacaatcttctatacctacagtatttaacgataccaagatactgtatatactcattcctttagacacatctatatacaatgtgatatatatggtactatggattacatattctataacgccgacgatgcttttgataactgcaacatatatgctgttcctccgtttaatggccaaatcaatgccattactgctcagagtcggacgaatacaaaccacgacacaggcacatctattcataactactac

SEQ ID NO: 25327 - DNA, 425 bp, Gossypium hirsutum
  Clone ID: LIB3147-035-Q1-K1-C7
gaatacccctgaagttgttcgtgtttacattggctcttttaacgataaccaaattaacggagctgatgttgatcaattggggcaagacctttttgagaaagaacaagatgatcttctcaaggacttattagacattccaagaaaggcttgtgatcgtcggatcaatgaatttgtgaagcgtgctagagctgcaaaaattaatgcttatatagttagccatctcaagaaagagatgcctagtatgatgggcaaagctaaagctcaacaacggcttattgataatcttcaagatgaatttgccaaggtccaacgtgaataccatttgccgccgggtgatttcccgagtgttgagcactataaggaggtgttgaataattacaatatagataaatttgaaaaactgaaacccaaattggtacaagccg

SEQ ID NO: 25328 - DNA, 454 bp, Gossypium hirsutum
  Clone ID: LIB3147-035-Q1-K1-C8
gcttcttggtaaccaagatggttgtacttgcggcttcaattgtatgcaagtctggaaaagtgcttctctccaggcagttggtggacatgactcgcataagaattgaaggtcttcttgctgcttttcctaagttggtgggaacaggaaagcaacacacatatgttgagactgagaatgtgcgatatgtttatcaaccaatagaagctctttatttgcttcttgtaacaaacaaacagagcaacattcttgaagatttggagactttaagactgctctccaagctggtaactgagtattcttactctctagatgaggagggtattggcaagactgcttttgaactgatctttgcttttgatgaagtcatttgtcttgggcacaaggaaaatgtgactgtcacacaagttaagcaatactgtgaaatggagagtcatgaagagaagttgcacaagct

SEQ ID NO: 25329 - DNA, 434 bp, Gossypium hirsutum
  Clone ID: LIB3147-035-Q1-K1-D10
aaaattttctaatttctagcttgtttatttgtttatttgttcattttcattatatctatggttaggctctgcaccaaagcttgtaggcactagcggtggcgcttgagataggcgtcggcaattttgagtgctaggaatatcagattccggcggtgttttaactattaattttgactcttatttatactttgaagatttttttcaaccggaaaaggaagcaatcggtcgtcgccgtttccttattttatttttgctgttaaacaaattacgttaagaagagaagcaaaaaaaggaaaaagaaaatatccaaggagaaaaaaattattaaatccttccaaaagggaagtaaattgaacggatggaaactattacaaagcaatcacctcaaggttgcaataatatttgtccaacgccaccttcattaccaggcccag

SEQ ID NO: 25330 - DNA, 493 bp, Gossypium hirsutum
  unsure (1)..(493): unsure at all n locations; Clone ID: LIB3147-035-Q1-K1-D11
ccctcactaaaggggaaccaaacagctggagccctccaccgcnnggtggcggcccgcnntctagaaccctagtggatctctcccgggccctgcaggannattcaaacatgtgcggtgcctcaactnnntatgggataccgnnacatcttgattgtactcnngggatgagaannaccctttcacnnattcgttcaaactctatgccaagcattgttttgaaaagtatggcacttaataagaaggggaatncgtttctaatcnttttcgaatttttgacattcgactttaagacattaataaatcaattcggtaccaattttgggcgttatgagggtgctaatccttccttgtgcgtaaccgactcccanacctattttctcaaaattcgtagacctaaaatcattttcaagggtgatccgatcacacctcaataaaaggatcggtgggcaactccatttttttggtttttttttaaagtcgacaactaattttt

SEQ ID NO: 25331 - DNA, 334 bp, Gossypium hirsutum
  unsure (1)..(334): unsure at all n locations; Clone ID: LIB3147-035-Q1-K1-D12
ggaanaaaaggnggagctgcaccccgggggcggccgctcttaaactttttgatccccccggcttcaagaaatcccaaggtatgcatacttatcgattatttttagatattactgattgggattataaattcacaagaatttattttaattcttaatttaagaattttcttgaagacaaaccaattctcttaaaagtgggggtatttcataaaccacaatttatacctatttttataccctaccttaacccacctatgaatagtttctccttacattttgggaaatctcctcacccttttaacccgtacaaaaatctaaacaaacaatcgctttg

SEQ ID NO: 25332 - DNA, 436 bp, Gossypium hirsutum
  Clone ID: LIB3147-035-Q1-K1-D2
gaaatctttcacagttacatcctgccgtgtagcaacagatttgggacttgaagctgttggaaaaagttgcccgaatttgaagcagttatgcctcagtaaatgccctttcttatctgataaggggttgtcgtctttagccaaagcagccagttcactagagtgcttgcaactggaggagtgccacagaatcactcagtttgggtttttttgctcccttattaactgtggtgcaaagttgaaggttatttcttttgcgaactgtttaggcattaaggacctaaactcgggattgccacctctatccccttgagaatcccttagatctttgtccatccataactgccctggtttcggtgatgctagcttgtttgcgttggggaagttgtgccctcatctgcagcatgtggagttgtgtgggcttcatggaataacagat

SEQ ID NO: 25333 - DNA, 421 bp, Gossypium hirsutum
  unsure (1)..(421): unsure at all n locations; Clone ID: LIB3147-035-Q1-K1-D3
cggnttggaattcccgggcacgacgccacgccttctaatggaaccacaaagcttgttctctgggttttgctcaaactcaactaccccagggtatagaaagtcctcaaaatccattatcttcctcaccaccttctatttctattccttgtttcaatcaatccaaacatgaagtttgttttgaaatgcaataactcctatcttcacaaagagtcgaggtcagtaagaagattactgtgtaaaaacagtgtagaaaaagtaagtaatcttgtctctgagaaagaaggttcaaaatcatgggttaagcggaaaacgctagctgcttttgactctggtggaggctcgaatttcaggtcaattaaccaagcatgcgtcgaaagctttgtcaatggagatgttgtaattttgggcactaataaacatg

SEQ ID NO: 25334 - DNA, 380 bp, Gossypium hirsutum
  Clone ID: LIB3147-035-Q1-K1-D4
gccacgcgtccgaaggactgcacctcggttcaaaatgctacatcgaaatctggaagcggtcaggaaaactaggcaggtagatactacttaacaagctggctgatgctatggtacctgatcgaagcatgggatgagctgaatccatctggtgcaaaatccgcgagctgtccaatggtgcttcgaagtaggcttgttcagtaagcagctaacatattgtttagcatccctaggcttgtttggggatcaccgacacttgccaaaactccattgcttggagtgcttatttcgcaggttggaggatgatggacacattcgcatttcatcatatgattactgagtttagaacaataaaaaaatggatggctctatggctttttatg

SEQ ID NO: 25335 - DNA, 428 bp, Gossypium hirsutum
  Clone ID: LIB3147-035-Q1-K1-D5
aacatatctaacagaattttggctcttatgatgtgaattctgatcaccaactgaattgatgttgacttgcacgaattatatcattgttagcttcatttttaaaatttaattaatctaaagcattcatcaagttatgtagagtgatagattttaatttcactttatatttcattagatgctggtgaatttgaatactgatggtagttaaaatatctgctatatgaattcatatcactattaactgcaccaagtccactttcatcggatcttgtgtgacaacattttcattccaatttatagttgaagttgttagtgtattattggactgtcttaacgacatgaatgttatctgttgtccagaacttcttgattggttatgcaagcttgtcttttgttgtattcggctggtagattgggaaggagttggc

SEQ ID NO: 25336 - DNA, 179 bp, Gossypium hirsutum
  Clone ID: LIB3147-035-Q1-K1-D6
gtcctagatcgcgagctgacgatctatatgatgcaaactggcgtgcgcgcgcatgctagagactagctcctctatacctgctcctagatacaattcacttgccgtcggtgtacaacacattgatctgtaaaaccctgcactaccaaactgaaactgcatttgtcacatacacatactat

SEQ ID NO: 25337 - DNA, 412 bp, Gossypium hirsutum
  Clone ID: LIB3147-035-Q1-K1-D7
atcgaattcccaatgccttttggaagagttatgagtgcaaccgaaagctatattcacgggctagacgagaagaccagtgcatcgttgaaatttacggtgttgaaccctaagggacgcatttggacaatggtagctggaggaggtgcaagtgtcatctacgctgatacggttggagatcttggttttgcttctgagctcggaaattatgcagaatacagtggagcacccaacgaagaggaagtattgcagtatgccagagtagttattgattgtgcaaccgcagaccctgatggtcgcaaaagagccctcgtaattggcggaggaatagccaactttactgatgtcggtgctacatttaacggcattattcgagccttggaggagaaggaatcaaagcttaaagccgctcgga

SEQ ID NO: 25338 - DNA, 443 bp, Gossypium hirsutum
  Clone ID: LIB3147-035-Q1-K1-D8
ttgagacgtaaaagttagacaatggagcatacattcatcatgatcaagcctgatggcgtgcagaggggtttggttggtgaaatcattggcagatttgataagaaaggtttctatttgaagggtttgaaactcatcaccgtggatcaatcttttgctgagaagcactatgcatacctctctgcaaaacccttctttaatgggctcatagagtacattatctctggtcctgttgttgctatgatttgggagggtaagaatgttgttaccactggtcgcaagattattggagccacaaaccctgctgagtctgctcctggaacaatccgtggcgactttgcaattgacattggcaggaatgtgattcacggaagtgattcggttgagagtgctaagaaggaaattgcattgtggttcccagaaagccctgttaactggcagagcag

SEQ ID NO: 25339 - DNA, 391 bp, Gossypium hirsutum
  Clone ID: LIB3147-035-Q1-K1-E1
cccacgcgtccgctcttgggctcttgttacttaacctagggctgctctttatgggccttttctctctgttcttttgtccctttgctttacttctttttgcttccatgtcgcttagaggattcagtcggccaaatgctacatcaggcatggtcgtttctgatcagaccaaggatactttcttggagctgaataggaagaaagtctatcggcatgtgatctataggatcgatgagaagataagggaggttgtggttgagaaaactggtgcccctgctgagacctattatgacttcactacatctctgcctgagactgattgccgacatgccgtctacgactttgattttgttactcgtgagaattgtcaactgagcgagattttcttcattgc

SEQ ID NO: 25340 - DNA, 438 bp, Gossypium hirsutum
  Clone ID: LIB3147-035-Q1-K1-E10
cggacgcgtgggcaagttcataatgtctcttggtttaccggtggcggctacggtgaactgcgcggacaacactggggccaagaacctttacatcatttctgtcaaaggaatcaaagggcgtctcaacaggctcccatcggcttgcgtcggtgacatggtcatggccaccgtaaaaaaaggaaagcccgatttgaggaagaaggtgttgcccgccgtcatcgtccgacaacgcaaaccttggcgtagaaaggacggcgtctacatgtacttcgaagataatgctggtgtcattgtcaatcccaagggagaaatgaaaggatctgctatcactggtcccattggaaaagagtgtgctgacctgtggcctacaattgcaagtgctgccaatgctatagtttgaaaggtttccatggttttgattgctacttgtgatgttat

SEQ ID NO: 25341 - DNA, 434 bp, Gossypium hirsutum
  Clone ID: LIB3147-035-Q1-K1-E2
tctactgcaattgaattgttcactctattaattattgtctttaatgatatttattgtcctttcagtgatatattgctttgcttgctatgtatattcttctctgaagtaatgtcttctgttttctgcataccagaaaggatcttttaatgttcacttatgcttacctcagactcttgaggctataaagaggatatgtccaaaacgagctctattaatcggaatgacacatgagttcgatcaccacaaggataatgagtttcttatggaatggtctgagagggaaggaatccatatacaacttgcacgcgacggtttgagggttcccatagacctataatgagaagcctctcaaatgcaagtgctgagaagatagcatccatccaaagaagctctttaccaacccagtacatgtcaaacagagatacatggtgtgc

SEQ ID NO: 25342 - DNA, 174 bp, Gossypium hirsutum
  Clone ID: LIB3147-035-Q1-K1-E4
caaaaaaaatacacttataatactttttattcttatataaaaaaacaaatacgggagatcagtcttaccctactctcgactaactattgcttttaaatgatctgaaagatggaaatcgctttttataatgtataaaattctaatgaatattgcatacaaatatataacgtaatt

SEQ ID NO: 25343 - DNA, 439 bp, Gossypium hirsutum
  Clone ID: LIB3147-035-Q1-K1-E5
atttcccgatccattggcgatgtatatttgaagaaggccgagttcaacagggagcctttggatccgaagtttcgactccgcgaaccttttaaaaagccaatattgagtgcagacccgtctatatcagtgcacaagctgctaccacacgataaatttgcgatctttgcatccgatgggctctgggagcacttaaccaatcaagaagccgttgacatagttcaaaagcattcacgaaccggaagtgcaaggaggctcgtaaaaacagctctacaagaagcagcaaaaaagagagaaatgcgatattccgacttgaagaaaatagaccgtggcgtacgtcggcatttccacgatgacatcacggtaatcgtgctgttccttgactcgaacctcatcagcaaggctagctccgtgaagggtccgaacatatcggttagagggg

SEQ ID NO: 25344 - DNA, 395 bp, Gossypium hirsutum
  Clone ID: LIB3147-035-Q1-K1-E6
cggacgcgtggctcttacacttctatactctttagtcttatctctttcgcggctagggtttttcgttctactgcacctctcctaacttttttttttaaattattaaaagattggtttggtttcataatataaaaatctaatggaagttctgtaagagtaagggatttcgcggttattataaaagaaagattctaaggggtttggaagtggtcagtgtggatttttcattcaagaaaagaaatggctggcttgtacccttttgatttgttgggggatgacgacactggagaactatcattgctgatcgctgctcaacaaaaagctgtcgcatccactgctactgctgcttgcccaaagaagggcccagctaagtcttaagctaagactcatcctgc

SEQ ID NO: 25345 - DNA, 440 bp, Gossypium hirsutum
  Clone ID: LIB3147-035-Q1-K1-E7
gtgagttttgtttttattatagaaactccttggattagacggaactacgccaactaaccgtaaaccatcatctaaagggatcaatctaccttcaaaacatgcagcgtcgaagatcaataataagatcctcgttaagtctgaggctctgggatcgggaaatccatcaaagaactcgatcgttctcgatgtatccttgcttaaaggtggagctcccggtcggaccagaggtctgaatgttttcgccgtcgatccaaatccgttttcggattgcttaaatgggattcataaactaagctaacaaacgccaacactatttagttctgacatgatttttaaagctatctatttaaaactatgatacaaaagctctacttgtgttctaagatcattgcattagttggatatttcttttgcttgtttaaagagaaaaaaacaatgtt

SEQ ID NO: 25346 - DNA, 413 bp, Gossypium hirsutum
  Clone ID: LIB3147-035-Q1-K1-E8
ctttcttcaggaaactctgtatgtattatttttgtttttattttattttgttatgtttgatttcttctgaacctttttcgattagttattgctttgcttgatctgttgttggaaatcctttttgaatgtatttttttttttaatttgcaacgaattattcgtaatcttagttaattcagaggtaggtttagatgcgaagaataaaaattttggatctaggttaacatgttacggttcgttattgatatgactgttatttctttgaatttgaataaattgtcgtgattcttccatttcttctttttacttggaacttctttttgtagatagcaactgttcatttaaatagtatcgagtgtgtgcgtattaatttttactgattttgcgctggcattttcaaaatttcacgctga

SEQ ID NO: 25347 - DNA, 228 bp, Gossypium hirsutum
  Clone ID: LIB3147-035-Q1-K1-E9
actttttgattccccgggctgcaggaatttaaacgagagggtctcacttacaagatacgacgctcttttctctcaaaattacaaacaacctcacattgtttaaaatctttaaaacaattaaatataaatacggtcatgatacaatagcaatcatttatgatcttttcatattgttaacattcgactatgagacattaataaatccatgtcgcccctattttcttcgtt

SEQ ID NO: 25348 - DNA, 414 bp, Gossypium hirsutum
  Clone ID: LIB3147-035-Q1-K1-F1
ccatggtgtgcttcatcacgctattgtattcctggacatcctcatcgctgggcgcagaaatattatgttcctgtatgcttctgatgctaatgccattcgtcaagtaatagaacgggatatagcatatgttgatactgtgaattacactgcagactaccgtccagattggggttcaatgagcttgctaatagattttttgcgacccaatacatcagaaggatcttcatggtacagtctgcttaaaaaggctgggggcggctgcaatgaccttgtatacagtggccacatgtttgttgctgtgctgactgcaatggcatggacggaggcttatggagggtttagctcagctcttatatggctgcttgttatgcacagtgctcagcgtgaagtacgagagcgccaccattattctgt

SEQ ID NO: 25349 - DNA, 426 bp, Gossypium hirsutum
  Clone ID: LIB3147-035-Q1-K1-F10
gcttctcaatctgggttccaattcggaggcaatcaacttcctgttccttctggtggattcaattgcagttgaaggacacatggttggagtagtaggaaaggggattaaggtcgggtattttatctcggtgtttgttttcggtattcacatacagttgaagtgatgccaaagtgtgtgattaagaagtcatctcaataaagacgggtgaatgacacaccatcatggtaaaattgttcgaggagagagtgtctggtaaaaccgtttaaatacttattttacttctccatacggtaaataaaattctttcacagcatccttgttactggatgcaagggtgagtttatttttctttatatatatcatatacatatatgtttgtctttgttttcactgtagtgggtagttgtggtttctgatcataaagag

SEQ ID NO: 25350 - DNA, 228 bp, Gossypium hirsutum
  unsure (1)..(228): unsure at all n locations; Clone ID: LIB3147-035-Q1-K1-F12
gggagaaanacgcgtacgcgcgcttaagacgcgccccctctttgacttttttattttcctgccaacctggattccggggaaatgggttccttcttccctatcttgcacacttaagaaaacgcaatcatcctcacattttcagatcgaatcctacgatccaaattcacttgctaatctccctacagcaaattgtgtctattagccagtctcttccacctacattatcct

SEQ ID NO: 25351 - DNA, 435 bp, Gossypium hirsutum
  Clone ID: LIB3147-035-Q1-K1-F2
aagaaatccaagttgggtttcactgtctacccatcaccccaggtctccacatctgttggtgagccctacaacagtgtcctctcaactcactcccttttggagcacactgatgtggctgttcttcttgacaatgaggctatctatgacatttgcaggcgctctcttgacattgagcgacccacttacaccaatcttaaccgtcttgtctcccaggtgatctcctctttgactgcttcacttaggttcgatggtgccttgaacgtggatgtaacagaattccagaccaacttggtcccttacccaagaatacacttcatgctttcttcatacgctccagtcatctctgctgagaaggcttaccatgagcagctatcagttgctgaaatcaccaatagtgcctttgagccctcatctatgatggccaagtgtgatcct

SEQ ID NO: 25352 - DNA, 420 bp, Gossypium hirsutum
  Clone ID: LIB3147-035-Q1-K1-F3
ctccaattgttcatcccttcaaaaaaaaaaaaactaaaaatccagcagtgaggtgcagggaaacagaacacaaaatggcgacagttccaggacagttgatttgggaggtagtgaagaagaacaattgttttttggtgaaacaatttggaagaggaactgctggcgttcgattcatcaaagagcccaacaatctctacaatgtcaactcttacaaacactctggtttggcaaacaagaaaactgtcaccattcatcctgcaggcaaagaccagtctgtactcttagccacaaccaagtctaagaaacagaacaagccttcgagcttgctccataagtctgtcatgaaaaaggagttccctaggatggccaaggcagtcaaaaaccaggtgacagacaactactacaggccggatttaacaa

SEQ ID NO: 25353 - DNA, 402 bp, Gossypium hirsutum
  Clone ID: LIB3147-035-Q1-K1-F4
gcgctcgtttggtttcataatgcacttgtcatttgtccaaggttcgagggctgggggctgggagaagaagcggatggtcgaaaagaaagctatactcaaacaatttatccgagctaaatccctaccacagtaatgacttgataatccattgcttaaacctggatatattgcctatatttgttcagtttgactaagaaatttggaagttcggttccctacaattcatgcatgctgtcttatagattgaaaatgtacaaattttgttgaggaagtacttttttaatacggaagcgagcctgccattgctgttctaaatattgttaccgataaacttaattttggagcattgaacatgtggtttctgttaaatccaactggaaaagccaccattcatgttgaaaa

SEQ ID NO: 25354 - DNA, 375 bp, Gossypium hirsutum
  Clone ID: LIB3147-035-Q1-K1-F5
aaaaaaaaaaaaaaaaaaaaaaaaaaaaattataaaataaaaaaaaaaaaaaaaaaaaaaaggaaaaaaaaaaaaaaaaaaaaaaaaaaaaaaaaaaaaaaaaaaaaaaaaaaaaaaaaaaaaagggggggcctttttaaagtataaaattttatttccgcgtgtttgaaatttaattttttttttttagtgagcccaaaattatattcaatgggcagttttttaaaaacgttgaaattgaaaaaaccttggtttaacaaatttaattcgttttgaaaaaaatccctttttcgaaagttggtttaataaaaaaaaggcccaaccatttccctttctaaaaaatttgcacaccttaaatggaaaatggaaccccct

SEQ ID NO: 25355 - DNA, 430 bp, Gossypium hirsutum
  Clone ID: LIB3147-035-Q1-K1-F6
caagttggttactggaaagcttagagcaatgcttcagagatcagacgaacaagttaggagcttgaaaaaacagagcacgttcttgagtcaattggctgccaaaacaattcccaatgcgatccattgcttgtctatgcgtttgaccatagaatactatctccttcccttggagaagagaaagttccctagaagtgagaacttggaaaatccaaacctctaccattatgctctcttctctgataatgtcttggctgcatcagttgttgtcaactcaactatcatgaatgccaaggatccttcaaaacatgttttccatcttgttaccgataaacttaattttggagcaatgaacatgtggtttctgttaaatccccctggaaaggccaccattcatgttgaaaatgttgatgaattcaagtggcttaattca

SEQ ID NO: 25356 - DNA, 435 bp, Gossypium hirsutum
  Clone ID: LIB3147-035-Q1-K1-F7
atttttcctgaggataagagagacttgtcaatttggcctaaaatccccagcgaatacactgaagttacaagtgagtatgcaaggcaactgcgaggcctagcgagcaaaatactttcagcactatcaatttgcttgggattagaagaaggaaggctagagaaggaagttggtggcgtggaagagcttcttcttcaattgaaaatcaattactaccccaagtgtccacaaccagaactcgctctcggtgtcgaagctcacaccgatataagtgcactcactttcattctccacaacatggttcctggcctccaactcttttaccaaagcaagtgggtgaccgctaaatgtgttcccaactccatcatcatgcacattggagacaccatcgagatcctcagcaatggaaagttcaagagcattctccacaggggtctg

SEQ ID NO: 25357 - DNA, 217 bp, Gossypium hirsutum
  Clone ID: LIB3147-035-Q1-K1-F8
cccacgcgtccgcccacgcgtccggattataggcatcggggggggttaatgttcttattgttgattgttatgaatgtagtagtgcttgatcatcttcttgtacctggaatgatttatacatatggcgaatacaatgtttgtacttaaaaaaaaaaaaaaaaagaaaaaaaaaacaaaaaagacaacccaactaaataaaaaaatcagaaaaataaat

SEQ ID NO: 25358 - DNA, 328 bp, Gossypium hirsutum
  Clone ID: LIB3147-035-Q1-K1-G1
gaaccagtcaacgaaccttctcttgacaattgtttcatatcaacaagttatgatgctacaacacattttgaatcaactgtcagtgatgtacttaacatgtataccatgataactggaaaggttcttgacctcagtgtggatttgagtgctgctagtgctgcggaagaataattaccctgaagcatggtatttgccaatgtttgtgcttgtttaagcttcttaacagtgttgaatgttgctggtgggatttatgtctattacaccatgtttttttttactactcaagacactatatttaatgatttgatgatatttaaacgtttgttgg

SEQ ID NO: 25359 - DNA, 439 bp, Gossypium hirsutum
  Clone ID: LIB3147-035-Q1-K1-G10
gggagacccacgcgtacgagcagaattgcttcaaacaatgctaaactgttattttctcctgtcctcattgatatgatggtcctgagccttccattataagctaatctcgcggacaaatcaggttttagcctataaaaaaaaaaatgaactaacaaataaaaaaaaatacgaactagaccattaagaaaatttaatataaaacaaatcacccatacaaaaacaaaaatttccttctactacaacctaaggtctattccccaaaccactagtaaacacgcgcggaacatgggtgataatacaaatctttcggccatcttcaaaatatatactcctcaaatatcccaccaaatttctatacactcgaaaagcatttcacacttccatatgggaaaaacatgccatttattaacattattttattgcacagacaggccgattt

SEQ ID NO: 25360 - DNA, 197 bp, Gossypium hirsutum
  Clone ID: LIB3147-035-Q1-K1-G11
acttccacgcgggggccgcccctctaaaactttttgattccccgggctgcacgaattcacgtgtgatgatagtatttgattaaggcacatgaatggcaccctacgaagctttatagctcacattatttattttttcatgtaatatagagatatcaaagcctgctcaaattcagggattgtttgagacttcatcacac

SEQ ID NO: 25361 - DNA, 308 bp, Gossypium hirsutum
  Clone ID: LIB3147-035-Q1-K1-G12
accacgcggacgcggacgcgtgggctgtctcctttgtagctttattgtttattagacgaagcaaagcctccggcatggttctgtaatctgtcaaggaatgtcactaggctttaatgatcgctaacttcattgctttgatgtatagaatactagaatatatctatccattaaaatattgtaccttatgaaattaaaggcactgagattcacccttcatttcctatgactatattttaacctctaacaataaatctctaccaccatacacttaaacttctgaagtattacacattataatacattttcat

SEQ ID NO: 25362 - DNA, 430 bp, Gossypium hirsutum
  Clone ID: LIB3147-035-Q1-K1-G2
aaaatccacaaccttttgtacccttcccttttttccttcgtggtaaagtctattgctggtgataccaaactgcccaaatagaaattaccatggttgcacatactttaatattattcatgtagaagaaagaggctaaccattgtttctatgtgtggtttgcgtttatgtgcgagatggccaacccaacttcctgcaggatctgttttatgaatttgcaatctcgaaaaagatgttccatagtttcttctccaattgagcagactagacatgcagcatcgttcctgagtcttcgaagtttaaggatactgagcgtcggaagaaaattgttagcaactctccacagatgtatttttattttacttgggatcaagagattccaaaagcttgtaatataaaactttattttttgatttgggatgtaacataatcc

SEQ ID NO: 25363 - DNA, 472 bp, Gossypium hirsutum
  Clone ID: LIB3147-035-Q1-K1-G4
ttccggattggaggttcggcccacgcctacgcgagcgctctgatttcaaaagcaaaacggaatccttattcagagcagcaatggcggacactgtcatctctctcgataagctcaaagccttctggaactctcaagtccacgatgaagaaactgggctcacaatatgaaactgctgcgagccgccggtttatttgctggatcgattcttctaatgcgcaattacggtgatctcatggctatataaggaattgaggattgattaagaggttcggagtaagctcagttcggaaatggatgcatctgttactttaggaactatatacatggttaatgatgatattgaaacaactttagtaactttttgaagcatgatgctcatatatgcttctaaatgttttggaatttgaatgaaatgaacccacttctggatttattttgaatgaaatggatggctttcctaacgtacggaacg

SEQ ID NO: 25364 - DNA, 308 bp, Gossypium hirsutum
  Clone ID: LIB3147-035-Q1-K1-G5
atggttttcatctggtgctaggaatttgattaagcttattcttgatccaaaccttcttacgccgtataactattcctgaaattctacaagatgaatggttcaagaaagggtacaagccaccaaaatttgagcaagatgagaatgtaaatcttgataataatatcttatatttaacatggttatgatttaggtccttatttcgttgatatctttatatttaatctaatttttattatttattttcaaaaaaaaaagggatattacaaacttaaacaactaactggatttagaattaaatattaaataag

SEQ ID NO: 25365 - DNA, 224 bp, Gossypium hirsutum
  Clone ID: LIB3147-035-Q1-K1-G6
acggaagaactctggatcaatgttgggtgcctaaatttatgcctcatttgttgcttctacaatgcaatgtctttgcccttcacttctgtttctcttttattgatgatgatgatgaagctgaactcccttcaatgattcaataatatttatctttactggctgaaccttgatctttactggctgaaccttgatattgttaaactttacagttgaaaatgtgaatg

SEQ ID NO: 25366 - DNA, 357 bp, Gossypium hirsutum
  Clone ID: LIB3147-035-Q1-K1-G7
cccacgcgtccgcccactcgtccggtaggtttgaattagcattaataaagttgattcgggcaagggttgggttgtcggagaacatgctcaactcaacactggttgatgctgcacttgtcataacatcaaatctaccattcatctttaagcccacctagatgtccctggtctgttgatgtctctatccttatcttctctatactcttttattcaacaactatatgtactctcttttaattcaattactgctcgtcttgtataatagttccatatcttcgtttatcatcaatttttcgttttttctttttttttattccttctcttatttttagtttacttgtcatattctttttttta

SEQ ID NO: 25367 - DNA, 436 bp, Gossypium hirsutum
  Clone ID: LIB3147-035-Q1-K1-G8
acggtgatgtggatatcaggaaggatctctactgtaacattgtgctcagaggtggttcaaccatgttccctggtattgcagaccgtatgagcaaggagatcactgctcttgccccaagcagcatgaagatcaaggttgttgcaccaccagagagaaagtacagtgtctggatcggaggatctatcttggcatcactcatcaccttccagcagatgtggatttccacaggtgagtatgatgagtcgggtccatccattgaccacaggaagtgcttgtaaatttacaagtcattttatggtgaggtacatgttctggtaggtggcttttactgtcatgtgtcaagtgaactcaaggtcgggttgatgtgggaaatggattattgaaagagggttgtactttgatcttgatgtaatattagccattcattctgctgtga

SEQ ID NO: 25368 - DNA, 395 bp, Gossypium hirsutum
  Clone ID: LIB3147-035-Q1-K1-H1
ctcaatgacccgagtcctaagggctctgatcgtcccccgaaggagacaatattgctcgacggctgtgattttgagcattggctcgttgtggtggagccccctaaagaggatgctactagggatgaaattattgatagttatatcaaaaccctagctcaagtagtgggcagtgaagacgaagctagaatgaaaatttattcagtttctactcggcattattatgcctttggagcccttgtttctgaagagctctcgtacaagatcaaggaacttcctggagttcgttgggttcttccagattcttacttggacgtgaaaaaaaaagattatggaggtgaacctttcattaatgggcaagctgtgccttatgatcccaaataccatgaagaatgggt

SEQ ID NO: 25369 - DNA, 51 bp, Gossypium hirsutum
  unsure (1)..(51): unsure at all n locations; Clone ID: LIB3147-035-Q1-K1-H10
cccacgcgnccgcacgaggaagggcaaccatcaaaagaaacaccaagagac

SEQ ID NO: 25370 - DNA, 431 bp, Gossypium hirsutum
  Clone ID: LIB3147-035-Q1-K1-H2
cggacgcgtgggttcaggtttatcctaaatgctggacttcaattttggtctcattggagaacaaaggaatgtggaacttgaggtcgcaaacctggtcaaagcggtacttaggccaagaagtctatcttagagtctggaacgacgagaaaagcttgtatactgaaactgatattcctccaaatgcactattttgtggcaaggcagttcaatcttagaacaccattaatgtcgtcttggtgtaatctacatcagctaatttattttctgatttttttgttctttttttaggagggtgggactgtttaggaagggaaataagacttaaaaatatagtaaatttattgaggctagattttaaaaaaaaattatattaaatcacaataatgagtttcttttatttatcatgtataaaataatgtggtgcgtgccat

SEQ ID NO: 25371 - DNA, 349 bp, Gossypium hirsutum
  Clone ID: LIB3147-035-Q1-K1-H3
cagcatttgaagagggctcaattcctgactttccatccgatcatgttcccaattgcgctcctgtggatttaggtgcttctattcctccagatccttctacctctgaatgtccggtgaatgaggaactggccaaccttgcagttgcttctaatgcaggagttgatctttctggagatgttcctgacatgcctacagaagtgagtgctctagtatcaaatacttctcgagagtccaaacagtcttccactggtgatgacgttaatggcaatggctatgcaagaaagcagttcagagagcaggtgactactgcacatattggtgatgatcttgaggatgggacttgcaatga

SEQ ID NO: 25372 - DNA, 359 bp, Gossypium hirsutum
  Clone ID: LIB3147-035-Q1-K1-H4
atgggaagtgatagcgaagcgaatgatgcttgagaaagagggaaaatcgaagaagaagggtttcaaattttgagcacgcaagattctgttggtgtcaacatgaagaagcagctgacttaccattttccatggagaatgaggtcctttttaacgtttgtgctagatgtgttgtacttgatccgatttcccgtattaacttgtatgctgtataactaatatataaagatatatgccaatctgtcatgatgataaaaaaaagataaaataaaggacgaagaaagataacaaattgatatagccagtgactacttaacatattgctgataaaaaacaaaggggggggccgttctaaagattcc

SEQ ID NO: 25373 - DNA, 434 bp, Gossypium hirsutum
  Clone ID: LIB3147-035-Q1-K1-H5
cccacgcgtccgcccacgcgtccgcccactcgtccgctctcaatgacccgagtcctaatgactcgaatcgtcccccgaaggagacaatattgctcgacggctgtgattttgagcattggctcgttgtggtggagccccctaaagaggatgctactagggatgaaattattgatagttatatcaaaaccctacctcaagtagtgggcagggaacacaaacctagaaggaaaatatatccagcttacactcgcctttttaggcctgtagagcccttgtttctgaagagctctcgtacaaaatcaaggaacttcctggagttcgttgggttcttccagattcttacttggacgtgaaaaataaagattatggaggtgaacctttcattagtgggcaagctgcgccttatgatcccaagtaccatgaggaatgggtga

SEQ ID NO: 25374 - DNA, 443 bp, Gossypium hirsutum
  Clone ID: LIB3147-035-Q1-K1-H6
ctctcgccacccaaactattttggtgatattttacttacctggggatactttgtggcctctcttgccataattgaaggtgctgaatggcttgtactcatcgggccagtctttttgacattgctgctgctttttgttagcggcctaacaattctcgagaagtcaggagacaagaagtttggtaatgtggaagcatatagagtttacaagaaaagaactagccctcttattccactgccacgatcaatatatgggaacctgccgtattggttcaaagccgtttttctctttgaatttcctatctacaaccgttatttaaacagaaaccgtacgaagcaaggatagaacagacgttgagttgtgcttcgttatcttgggattcgcgaagtcatagaccaagttttgaaactttactggcacatttctgatggaggcaaataagatc

SEQ ID NO: 25375 - DNA, 321 bp, Gossypium hirsutum
  Clone ID: LIB3147-035-Q1-K1-H7
gtacatgcctcgcacgctttacaagaatgttctacttaactggatcacctttctctggagcatttccatcattgaaagtgctaaatgtctccgactcatcgagccagccttcttgacattgctgctgctttctgctagcagactacacaattctcgagatttcatgacacacgaagtttggttatgtggcatcttattgagttgacaagaaaagaacttgccctcttattccactggcacaatcaatatatgtgaacccgccgcattggttcaagacccactttaatctttgaatttcctatctacaaccgctatttaaac

SEQ ID NO: 25376 - DNA, 447 bp, Gossypium hirsutum
  Clone ID: LIB3147-035-Q1-K1-H8
atccatcaaaatcgacatctcttgttgtttacagtgcaagggcaatgtgttcaattgactttggaaaggcagtagatgaagatgatgaaagtcagttggtacatgaagcattgttgaagcttcaaggctctatcaccaataagaaattgaaatatttgttgatagatggtcgtcaaacagagtcaaaacatactagtagaaaaaataattttgagataattggttttagagacccagttttatttattggacacctttctaaaaattccatcttgatggtagacaaaccatggatggaagtagttaaatcttttgatactgccccagttcagagacatatatatgggacataacttccttgggacgaaaggatgttcatcacttgagtgccttgttaggagaagaaaaaaatgcagcatccaattaccccatttggagtcccacttt

SEQ ID NO: 25377 - DNA, 328 bp, Gossypium hirsutum
  unsure (1)..(328): unsure at all n locations; Clone ID: LIB3147-035-Q1-K1-H9
aaaggaacaacggcggncggcgggctcgggaaaggccctctacaacgtttgcatttttcgtgctgccagaattcgcggggctggtagtatttaatcgagcattggactggcaccctacgaagctttatagcttacattatttattgtttcatgtgatatagtgatatcaaagccagctcagattcggagattgctggagacttcatcacactatccaactatcacttaggtactcttgaacttaagtaattggggtatatggcatgtataggattatgggcattgtaatatatagtttggtaatgaatttggtcatgtgaaacgactt

SEQ ID NO: 25378 - DNA, 426 bp, Gossypium hirsutum
  Clone ID: LIB3147-036-Q1-K1-A1
gaagagttacgaatttaaccaggtgaaagtccaggccggatctgttgttcctctagatgttggtccagccacacagttggatatcatagcggagtttgagatagataacgaggcgttagagaaaacaacagggtccaatgtaacattcagctgcagcagcagcggtggaactgtagaacgtggggcattgggaccatttggtctgttggtgcttgcggatgacagcctcagtgaacagacacctgtatacttctacatcgccaaaggatccgatggcaaactcaagactttcttctgcaatgatcaatctcgatcatctgtagcatctgatgttaataaacaaatttatgggaacttggttccagtactggagggcgaaaaattatccctcagagtcttggtggatcattcgatcgttgaaagctt

SEQ ID NO: 25379 - DNA, 314 bp, Gossypium hirsutum
  Clone ID: LIB3147-036-Q1-K1-A10
acgctcctttgcgccgcattcgctatcaaagctccatttcaccggcgaccatgcctgcgcacaagacgggcatgatcaagaagaagttggccaagaagatgaggcagaataggcctatcccttactggatctcgatgcgcactgataacaccatcaggtacaatgcgaatcgtatgcattggagccgcaccaagctagggttctaagcaccatgagctaattagggttcaagcttttcttttttcccaagtttattggcagacattgtgatgtggggcttaatatatgaacctaccacggatgaaggatcctta

SEQ ID NO: 25380 - DNA, 476 bp, Gossypium hirsutum
  Clone ID: LIB3147-036-Q1-K1-A11
atttggatgctctccttgatatgtccactgatgagcttgtcaagctctttcctgcccgtgctcgcagaaggttccggaggggtctcaagagaaagcccatggctttaatcaagaaacttcgcaaggcgaaaagggaggctccaccaggtgagaagccagaaccagtcagaacccacctccgaaatatgatcatagtacccgaaatgattggtagcattatcggtgtgtacaatggcaagacattcaatcaggttgagatcaagcccgaaatgatcagccattaccttgctgagttctctatttcgtacaagccagttaagcacggtagacctggtatcggtgctactcattcttcgaggttcatccctctgaagtgaagccctttcatgctgcttggagcctcaatttggggtttactatttgagagttaaattttgtttgttgcactcttagtaatgaaaaattcacatcctttt

SEQ ID NO: 25381 - DNA, 328 bp, Gossypium hirsutum
  Clone ID: LIB3147-036-Q1-K1-A12
tcgacacacgcgtcagatggcgatgcttactatggtatgttcactgatgttctgggcaagctatctttgggccagcctatcagaaggttccggagggaactcaactactaagctacatcttacgctatgaacaaaactcttgcacgatggaaaagggaggcctcaactgctcagacgccataaatattcagaaccttgctccgaaatataaccattgaagcagaaactatagacagtataatcggtgtgtccaacgctgatactttcaatcacgttgatatcaatcgcgaaactattagtcgttatcttgcaaaccgatctatttaac

SEQ ID NO: 25382 - DNA, 370 bp, Gossypium hirsutum
  unsure (1)..(370): unsure at all n locations; Clone ID: LIB3147-036-Q1-K1-A2
cacgattgataatgttaaggccaagatccaggataaggaaggaatcccaccagaccagcagaggctgatttttgctgggaagcaacttgaagatgggaggacccttgcagattacaacatccagaaggaatccactttgcacctggtccttcgcctccgcggtggcttttaagtgtggtgccgaacacctgtccagttattgctgatgtgttaagtttgtatgtgtgtgggtcgtatgctaatgtgagctggccactaggctggggaagcttacgagtaaaaataattgcttttatcaacgcttttagttgttctttaggtttcaaggttctatggcattgaatanatatgtttttgcattttgcagtca

SEQ ID NO: 25383 - DNA, 448 bp, Gossypium hirsutum
  Clone ID: LIB3147-036-Q1-K1-A3
gcgcccacgcgtccggtttcctttttgcaaaagattactggccagaccatacaattacccactaccgcaactgttattgtacccgcacctgcaccaccaccaccaccttcaccgacacaaccgaccgtctccgttgttccaccagaggtccctattgctccaccatcgcatcaaacaccgtcattaacacaacaaaagcaacaagaacaacaacagacgcatatatctcaccatcaaccaccaccaccacaacagcagccacaagttgttcaacagcagcagcagcttcacaatatggaacttgtgaggcatcaacaacagcccattactacagaaatagtaatggcaatcccggaacaacaggtcccaccacaagagattagtgggagtgggagcttggtggagccagcctcgtctagatggcctaaagctgaagttcttacactta

SEQ ID NO: 25384 - DNA, 347 bp, Gossypium hirsutum
  Clone ID: LIB3147-036-Q1-K1-A4
gattttattatttcatcagtgaaagcaagatgtcttcctagagaaagtttggatgagcattttgtaatacacatggagggtgtaaatgttttggctgtcaattatggctctcccgggtcatgcccttatcctcggaatttgaaacttcctgcaaagtggtccttcagttcacatacagttttgaagaacagtggagcaggcacccagggctcctgtatttactgaagaaattcttggtggagagaatgctgaaggtgaagttgtgcagccggctgaaaggtctttttgggctaatactggatgtattgatcctctggactcatgtatgatgcatacacagcatgaca

SEQ ID NO: 25385 - DNA, 466 bp, Gossypium hirsutum
  Clone ID: LIB3147-036-Q1-K1-A5
cgacccacgcgtgcggagaatgagaatacgatctttcgatagaatttgcgtctgggtgttcgatatggaaatatagcaggtccttatcatggtggtgtatggaagatcagggtggaactcccagatgcttatccttataaatctccatcaattggctttataaacaagatctatcacccgaatgttgatgaaatgtaaggttctctgaatgttgaaatgctctatatttggcttttaaatgctccgctattgtttaatatgtctttgaactatgagtatcacgtctggtacagtttgtttggatgtcatcaatcacacttggagccctatgtgcgacctgaaaaatgtcttcgaagagcttcttcctcaactactttgatatgccaaccgatcggatccattgaatgcagaagctgctgctcttatgatgcgtgatcgtgctgcctatgaacacagagttaaagag

SEQ ID NO: 25386 - DNA, 240 bp, Gossypium hirsutum
  Clone ID: LIB3147-036-Q1-K1-A6
accggcggggagtcccaggcgtgacggcacgcgtccgcggacgcgtgggctgtcgatatcgcacagatgtatgagcccaattacaggctgatcatgaacggactcgatgccaatgtttagaatgccaattatcgctctaccgagatgatgcccttatcttagaagatccaaactttctacaaaaccagtggcttctgtcacatacaagattagatgaacactgagcagccacccttgggt

SEQ ID NO: 25387 - DNA, 447 bp, Gossypium hirsutum
  unsure (1)..(447): unsure at all n locations; Clone ID: LIB3147-036-Q1-K1-A7
ctttctcctctatttttcaatgtattatatgcatgaacttgtgataaagagaatgaaacagaaataaaaaatatatatatcaccttcgtttcctgtaaaaatctctggtgtattattgcaaaaatattctgtgtacagtatttttggtatatctctctggtgttttttttctctatgcgtgtgtaagtttttcttgtgtaagtcctttctacagattgaaaagaaggctttgtagcctcgataaaccactacaagttttggaaagaaatctctgatttctttccgtattcgcttcgcatgtctgttgtgattttctttccttttcttgcaggcgaatcgcaaggatttcgttcgagcaccaatgactgcgcgctgatggngccagtgttggattgtagcgcatgacaattctggcgtgattcgggcgccgatggtggcgcgatgcat

SEQ ID NO: 25388 - DNA, 459 bp, Gossypium hirsutum
  Clone ID: LIB3147-036-Q1-K1-A9
acactacgcgtccggagacggtttttcctgatgctatcaaatgggaaatccgcagggatgaaaccaggagaaatcccagatctgggctagttttgacgggaagtacagatagttcaagtatgattaatttggaagtggatcataaatatgatggttctaggcaaactttctatgccagcaacaatacaaagccagcagtgaccaccattgtcggttacaaagacatgtgcttgctagcaagtggaagtcgggtgtggctggaagactgcatgagcaacgatgctgaacaacaatgggcgatatatccagatgggaccatcaggcctcaaaagaatagaaacgggtgcctcaagtattcaaatgattatagtgggttgcacaacgtggctacgtgtgatggatttgttgaggaacgatgggtatttagaagcgatggaaccattttgcataaaatgactg

SEQ ID NO: 25389 - DNA, 177 bp, Gossypium hirsutum
  unsure (1)..(177): unsure at all n locations; Clone ID: LIB3147-036-Q1-K1-B1
accggncgcggagacccacgcgtgcgggttgatgtggttttgtcgtaattacaagttgctaacggaatttggagcaaatctcttcgcttaaaacacaaaaaaaacaaaaacaaaacaaaaagacaaaaaacaaagcaaaaaaaaaaaaaaaaaaacaaaaaagcaaacaccaacaaa

SEQ ID NO: 25390 - DNA, 394 bp, Gossypium hirsutum
  unsure (1)..(394): unsure at all n locations; Clone ID: LIB3147-036-Q1-K1-B10
gtcggcggcggctcttgtaatcaaggcgttaattgagccagagagggataggagaaagaccaagaacatcaagcacaacgggaacattaacctcgacgacgtcatcgaaattgccaaggtaatgaggccgaggtcgatggctaaggatttgagagggacagtgaaggagattttgggcacgtgcgtctccgttgggtgtactgttgatggaaaagaccctaaggatctgcagcaggagatcgatgatggagatgttgatgttcctttggagtgagaaagcttgttcttctcgttttttacgtctatcctcatgcttgcctcttttagaaaaatgttcaatataaagatnttgaacaatttgcttatatttaattcagaggctgttttgaagttt

SEQ ID NO: 25391 - DNA, 396 bp, Gossypium hirsutum
  Clone ID: LIB3147-036-Q1-K1-B11
gtcggcggcggctcttgtaattataggcgttaatttagccagagagggataggggaaagaccaagggcatcaagcacaacgggaacattaacctcgacgacgtcatcgaaattgccaaggtaatgaggccgaggtcgatggctaaggatttgagagggacagtgaaggagattttgggcacgtgcgtctccgttgggtgtactgttgatggaaaagaccctaaggatctgcagcaggagatcgatgatggagatgttgatgttcctttggagtgagaaagcttgttcttctcgttttttacgtctatcctcatgcttgcactcttttagaaaaatgttcaatataaagattttgaacaatttgcttatatttaattcagaggctgttttgaagttt

SEQ ID NO: 25392 - DNA, 191 bp, Gossypium hirsutum
  Clone ID: LIB3147-036-Q1-K1-B2
gtgggtaccgtcgatgctctgtcataccaaagactagaaagttgccgcttgtaatgcaactgcagataagtttgaagagacgttcatgactgatacaaacacgtggttctttacagagctcatgttttaagagttgtattggaaccatgttttatgcttaagctgttatatcgaacaattttgaatttaat

SEQ ID NO: 25393 - DNA, 254 bp, Gossypium hirsutum
  Clone ID: LIB3147-036-Q1-K1-B4
ggattttgtggtgcggcgatgtcactgctgataggttgaaatggggcaatgatttcttgagtaagaggataaagtcaggttcaacctctgagatctctccagaggccttgagaaggatgaaaagggttaagaagttaacaaagatgtcagagaaagtggccactggaattctttcaggtgtggttaaagcgtctggattcttcacaggttcaattgttaactccaaagttggtcagaatatttttcaacctgct

SEQ ID NO: 25394 - DNA, 445 bp, Gossypium hirsutum
  unsure (1)..(445): unsure at all n locations; Clone ID: LIB3147-036-Q1-K1-B5
gcgcccacgcgtccgaccacgcgtccgcccacgcgtacgcacaaatgcggcaggtgggaagcacggatggggcagttcctaggcaaaagggcttatgacaaggcagctatcaaaagtaatggacgggaggcagtcaccaactttgagctgagtacatatgaaggggagatggtctttgataccaggaacaaaggcaatggtcacaaccttgatctgaacctgnggatatctccacctgttagcgatggtcccaaggaaaaggaaaatgcggggcatctccaaatgaataacggaaagagtttaagggcagagaaccctgcagctgcaacatttagtgttccatctttccaagggttagcggggacttcagatcagcctattttctggaatagtgcatatccgagattcttccctagtgaggaaagaactatggtgaaaccggttg

SEQ ID NO: 25395 - DNA, 303 bp, Gossypium hirsutum
  Clone ID: LIB3147-036-Q1-K1-B7
gcgcgacccacgccttcggagctttataaaatgatgtatcggatgtggactcacgtgcagactgcagcaggatggctaatatttagggctttggaagcggatgcagtaggggaagaatcgggaaggagcaaaaagtaagcctactatacctaccaagtctttcataaacatgctcgaatagtgcattatctcctgtgcatattgcacatttacaaacgtaaagtaagaatgtttttgcctaatgtgccaggattatcgataattcaatcgaacatacatccaatccaacatcaatacatggac

SEQ ID NO: 25396 - DNA, 285 bp, Gossypium hirsutum
  Clone ID: LIB3147-036-Q1-K1-B8
cgtgcgggatgctgtggtgcggcgatgtcactgttgtttggttgaaatggggcaatgacttcttgagtgagaggataaagtcaggttcaacctctgagatctctccagaggcctcgtgaaggatgaaaagggttaagaagttcacaaacatgtcagagaaagtggccactggaattctctcaggtgtggttaaagagtctggattcttcacaggttcaattgttaactccacagttggcaagaaattatacaacctgctgccagtagacaacgttcttgattcct

SEQ ID NO: 25397 - DNA, 336 bp, Gossypium hirsutum
  Clone ID: LIB3147-036-Q1-K1-B9
agctagttctagatcgcgaccgttcgacctttttttttttctatagctttgtgtgggttttctgtggcgccttttttatcatggttattcttttccaaaccaaagaccccacggacaccggagccgcagcgcggatgctcagcgccgatatcgtcgccccgctgatggaccgcgacacgatcgacgcgccgctcgacctcgtgaccctgttccaccacgatacggacctgcccgacctcatccgtgccacgctgcgcgcgctgtccgatatcggccgcgccctgggccgcctcgtcaccagacgcatgttcccccacgacctctgccagctgcccg

SEQ ID NO: 25398 - DNA, 387 bp, Gossypium hirsutum
  Clone ID: LIB3147-036-Q1-K1-C1
cccacgcgtccgatggggtccaaagaggcctggttggtgaaatcattggcagatttgagaagaaaggcttctatttgaaagggttgaagctcatcagtgtggatcgatcttttgccgagaagcactatgctgacctgtctgcaaagcccttctttaatgggctcgtagagtacattatctccggtccggtcgttgctatgatttgggaaggtaagaatgttgttaccacaggtcgcaagattatcggagccacaaacccagctgaatccgctccgggaacaatccgtggtgactttgcaattgacattgggaggaatgtgatccatgggagtgattccgtcgagagtgcaaggaaggaaatcgccctttggttccctgaatgccctg

SEQ ID NO: 25399 - DNA, 462 bp, Gossypium hirsutum
  Clone ID: LIB3147-036-Q1-K1-C11
gcagaacacgcgcacgcccacgcgtgcgcttttctgctcaaccgaaccctaatccccttccctcaaacgccacaccgtcaccacaatggcggttagcattcttaggctacgaatgactactttgtagcctcgaagctcccttcaaaactctgatttcggcgaagcaaaggagaaccgatggcctaaacgcaaggtacggggtgtgcgtggcgcgagtacgggggctgtctgctggcgtacggaggcacgggcgtagctgctgaagcgctggagcatatggaggcgttggaggctatctgcggcgcaagcattaggtttagggctaggtttttctgaaaaccttagtattttgggtattaggccattgtatttgggccgtttgggttaatttggttttagggtctttgacttgggttatataattggactttgattattaatttggtttaatctttatggatt

SEQ ID NO: 25400 - DNA, 439 bp, Gossypium hirsutum
  Clone ID: LIB3147-036-Q1-K1-C12
cccacgcgtccgggaaacactgccaatgttattcgttatttccccactcaggccttgaactttgccttcaaggattacttcaagaggcttttcaacttcaagaaagacagagatggttactggaaatggtttgctgggaacttggcatctggtggtgcagctggtgcttcttcccttctctttgtctactccttggattatgctcgaactcgtcttgcaaatgatgcaaaggctgcaaagaagggaggagagagacaattcaacgggcttgttgatgtctacaggaaaaccctaaaatctgatggtattgccgggctttaccgtggtttcaacatttcatgtgttggaatcattgtttaccgtggtctatattttggaatgtacgactctctgaagccggtgcttttgactggaagcatgcaggatagtttcttcgcta

SEQ ID NO: 25401 - DNA, 296 bp, Gossypium hirsutum
  Clone ID: LIB3147-036-Q1-K1-C2
gcttgcttcacctaaagaatgaggctgaaactgcagtatacctgtgggaaaacatatggcttgatgggttcaggatctctgctttacccgaagaatgaggctgcactacataatgctagcattgttttcaatacaacatatccaattcctttgtctcaagcaattcagcaaacctggcaagccatatcaaattcagaagtttatagtaagatttctttggatatgcctctaccaattggaaagacatgctaacttaattgatcaatttggctaattcttctatagcttttggccat

SEQ ID NO: 25402 - DNA, 452 bp, Gossypium hirsutum
  Clone ID: LIB3147-036-Q1-K1-C3
ccgggcgaccagcgtcgcccacgcgtccgatggggtccaaggaggccttgtggtgaattcatcgcagatttgagaagaaaggcttgttttaaagggttgaagctcatcaggtggattatcttttgccaagaagcactatgctgacctgtctgccaagcccttctttaatgggctcgtagagtacatgatctacggtccggcctgcgctatgatttgggaaggtaagaatgttgttaccacacctcgcaagattatcggagccacatacccagctgaatgcgctccgggtacaatacgtggtgactttgcaattgacattgagaggaatgtgatccatgggagtgatctcgacgagagcgcaacgaaagacatcgtcctttggttacctgaatgcccatttaactggcagagcaaactttactcttggatctacgagtagaaatcatttggta

SEQ ID NO: 25403 - DNA, 149 bp, Gossypium hirsutum
  Clone ID: LIB3147-036-Q1-K1-C4
gggaaagtaaaaggagggttttgaggagggtgaaagatggctggttacagggcataggatgactacgacttccttttcaaggtggtgctgatcggtgattcgggagtaggcaagtctaaccttctctcaaggttcaccaggaaacgagt

SEQ ID NO: 25404 - DNA, 481 bp, Gossypium hirsutum
  Clone ID: LIB3147-036-Q1-K1-C5
gcagtccccggcgcgacccacgccttcgaaaaattttcttgctggacctggagcttcaatggttttcaactgtgtgattgaaatcccaaaatgtagcatggtgaaatatgaacttgagcaagaaaactgttctgatcaaggtcgatcgtgtgctttactcatcaattgcgtattctcacaactacggattcatacctcgcactctttgtgaagacaatgatcccatggatgtcttgatcattatgcaactacgctttttgatccacatctgtctctaaaatatcaatctgattcatgatcgagaaccatgttacatgctttggaactctcttgtaatgcctccgattgcctagtgcactatgtttgacacaggattataaattccatacatcggccaatgccacatgcaatacttataaactatcattgatcatagctctaaaaatttttatgatgtgactgatgctaccattaaaacata

SEQ ID NO: 25405 - DNA, 371 bp, Gossypium hirsutum
  unsure (1)..(371): unsure at all n locations; Clone ID: LIB3147-036-Q1-K1-C6
gaganccaggcgtgcggcgagcagtacaaggagggtattcgaggagggttaaagatgtctggttacagggcataggatggcgtacgactgccttttcaaggtggtgctgatcggtgattcgggagtacgcaagtctaaccttgtctcaaggttcaccaagaacgagtttagccttgagtccaagtccactatcggcgttgagatcgctactcgtaacttgaatgttgatggtaaggtcatcatggctcagacttgggacactactggtcaagataggtaccgtaccatcacaagtgcctattaccgaggagctgtttgagcgctactcgtgtgtggtgtgacccgacactccacgtctgagaatgtggaga

SEQ ID NO: 25406 - DNA, 358 bp, Gossypium hirsutum
  Clone ID: LIB3147-036-Q1-K1-C7
tcgagtgtacgctaagccggtctttactgagttttaaccgactgaatggaacgatcccgatggtctgtttgcacatgtaccccaacatcagcttagatatctcctgaaacaaagcactagggcaaccacctgctcaattcggtccaatgtaggctctctgaacatgtgacttacgctgcaacatgctgacccgatcaagtcacgtcgggtttctgtgctgtaccgatttgcgaatcttagacctgcatacacacttacttgcaggcaacattcaatacgtattgagtctgaaatcgaacttcatgggacttgattcattgtgaaataacttgaagggtgcgctcctcggatctttatc

SEQ ID NO: 25407 - DNA, 245 bp, Gossypium hirsutum
  Clone ID: LIB3147-036-Q1-K1-C8
accccggggcgacccaggcgtgcggacacaggtacatgaggctaatgcggccgcttaaagacttctgattccaagccaaacgatgactacaactcgcttgcctaggagatgctaagaactgaatgggccataaacagatgtaaagcagttctcagggttcaccgatctacgaataatacactcgatgggcatacagttcaagcgaaccggctgctgctgcgagcttgcatgtcgatgggtatgac

SEQ ID NO: 25408 - DNA, 463 bp, Gossypium hirsutum
  Clone ID: LIB3147-036-Q1-K1-D1
cccacgcgtccgcccacgcgtccgggtcacttctctccgttcaaattcgctaagttattagatccagaagcttcttgggacaaggatcaattaggagatgtattgcattggattcgacaagttgtagctcttttctgtggcttgttatggggagcaatcccagtggttggaggcatttggatcttcatttttctggccatatccactggtattatatatggctattatgcaatgatactgaagatcgatgaagaagaattcggtggtcatgcagcccttctccaagaagggctttttgcttcaatgactctctttctgttggcatggattctcgtatacagcttggcccatttttgatacgtattttagcatcaactccgcttccctctgtttctaaattcacatttcaaggatctctttagatgaggaacaattcattatctctgaaaacagtgcgaaactt

SEQ ID NO: 25409 - DNA, 385 bp, Gossypium hirsutum
  Clone ID: LIB3147-036-Q1-K1-D11
ccattttgcttgctagatattatgtgatattgttatcaattatcttaattttgggtttactatgagtttcgattcctcttcatccatgctgtaattgacttgccgttcccctccctgcattcactgccgaaactaattgttctactagttagggctgaatggagaatgatttgaaatactactatctgagaatgtggagtccaaaataatgaacgaatggatagattattctcgttttatgtgaagaccaagaacaagaaaaaaacgatgcacaagccctcccgcaagcttttataacgcatgaggcgaacccaactgatccagttctcctcgcccgacttggtgatcttatctactaagacgggcgggccccgcttttaaggaa

SEQ ID NO: 25410 - DNA, 474 bp, Gossypium hirsutum
  Clone ID: LIB3147-036-Q1-K1-D12
cacaaaccctgagcgaggctttaagctgacagatgagatactcattaaagcgctggagactatgaaaaagccatgggtatatatttctggtccaacaatcaacccaactggcttgctttacagcaaccaagagatggaaaacattttaagtgcatgcgcaagatttggggcaagagtggtgattgatacttcattctcaggactggaattcgaatatgaaggtaggggtggctggaatctggggagctgtttgtcaaaaatatcttcctctggcaacccctctttttgtgtttctctgcttggagggctgtctctgaaactgcttagtggagcactcaaatttgcctttctggctctaaatgaaccaattctaattgaagcatttcatagctttcctggcttaagcaaacctcattgtacagataaatatacaatcaagaagttgttgtctctgagagaacataaaaggaggtt

SEQ ID NO: 25411 - DNA, 444 bp, Gossypium hirsutum
  unsure (1)..(444): unsure at all n locations; Clone ID: LIB3147-036-Q1-K1-D2
cccacgcgtccgtttgaagaatgtcagaactcaagtactacttaagcttataaaaccatatacgagaatccggatccctttcatatcaaaggaactcaatgtgccagaaaaagatgtagagcagttgttggtttccttgatcttggataatcgaatcgatgggcatattgatcaagtgaaccggctgttggagcgtggtaacaggtcgaagggtatgaagaagtacactgctatcgataaatggaacacacaactgaggtccctttatcaaaccgttaacaacagggtttattgagaaagcaaaaatgctatatgatataatccctttggctaaggtactcccctttctttttggggctacaagaatatgcttgctctcttgtgtcaggtgactntagataatctagattcgaaagttatgttttgttttggtagtcaaagttt

SEQ ID NO: 25412 - DNA, 417 bp, Gossypium hirsutum
  Clone ID: LIB3147-036-Q1-K1-D3
cccacgcgttcgtttgaacattgtcataacttatctactttttaagcttataaaaccatagaggcaaatgcggatccctacaatgttcaatgaactcattgtgcgcattaaagacgtaaagcagttgctggtttctttgaccttggataatcaactcgacgagcgtatggatcaattgaaccggctgttggatcgtcgctacacactgaagggatttatgagcttcactcctttctactgatggatcacacaagatgaagtcccttggtcatgcacgcctcatccaggattgtcgagaaagcacaaaggctatatgacataatgcctggagctaaggatccagcctgtcttattggggatacatgtatatgcatgaactcttgtgttatgtgactctagattatcattatacggatg

SEQ ID NO: 25413 - DNA, 76 bp, Gossypium hirsutum
  Clone ID: LIB3147-036-Q1-K1-D4
cgtattgaggcatgaacaccctgttggtgcgggcatacacgctggagggatatatgactatcactcattgatactg

SEQ ID NO: 25414 - DNA, 417 bp, Gossypium hirsutum
  Clone ID: LIB3147-036-Q1-K1-D5
cccacgcgtccgatttgctgaggactctgatttgagtgtgacaaccaggcttgcttgtggggctgctgctggaactgctgggcaaactgttgcttaccctctcgatgtcatccacagaagaatggaaatggtcggatggaaagatgctgcatcagttgtcactggtgatgggaggaataaggctcctcttcagtatactggcatgatcgatgcattcaggaaaactgttaggcacgagggctttggagcattttacaagggtctggtccctaattctgtgaaggttgtaccttcaatagctattgcgttcgtgacatatgaagtggtgaaagacattctaggagttgaaatcaaaatatcagactaaactggtaccatttctactcaatgtttttagggatgtgtgatgtttttgta

SEQ ID NO: 25415 - DNA, 345 bp, Gossypium hirsutum
  Clone ID: LIB3147-036-Q1-K1-D6
gccatgcacatgctgggaagtggacccgtctttgagcgtatccaacctcatgccggaagagggtgcgttttacatgtggacggcactctgtacatacacacatggatgtacaagcatgtgcacagtgatcagcacgagtatgctactacatgtggactgacatctgaagatgctcaccctgccgagatattgaaccttgcctttgcaacaataattggcacagccatcactggccgacacgttattactatgtggttatagatgactgttaaagtcctagagacaggtgaagcacatagtgctatccattttacatggtgcgtctcaaacactctacttttatat

SEQ ID NO: 25416 - DNA, 457 bp, Gossypium hirsutum
  Clone ID: LIB3147-036-Q1-K1-D7
cccacgcgtccgcccacgcgtccgcttaaatctctggatattcttggtcttggaactggaccagagatagagaagaagatcaagtatgctgaagttgtttcttgtgctataatatttggaagagagcttgtgaattcaccagccaacgtacttacccctgctgcattagccgcagaggcttcaaagattgcttcactgtacagtgatgttctgtctgcaaacatcttgaccgaagagcaatgcagggaattgaagatgggatcttatctcggagttgctgcagcatctgcaaatcctcctcattttattcatttatgctacaaaccaccaagcggacctgttaaaaccaagttagcattagttggaaaagggttgactttcgatagtggtggctacaatatcaagactggacctggttcctcgatcgaaaccatgaaagtagacatgggaggttcgg

SEQ ID NO: 25417 - DNA, 391 bp, Gossypium hirsutum
  unsure (1)..(391): unsure at all n locations; Clone ID: LIB3147-036-Q1-K1-D8
ggcgaaggcctaaaggtatttactcccgtgttaggaggaagttcaagggatgcactttgatgcccaatattggttatgggtccgacaagaagactcgccactatcttcccaatgggtttaagaaatttgtcgtgcataacgtccaagagctgcagcttctcatgatgcacaacaggacatactgtgctgagatagctcatgatgtttcaacaaagaagaggaaggaaattgtcgagcgggcagcacagttggatgttgttgtgaccaacaaattggctaggttgcgcagccaggaggatgagtgaacatctctccctgatggtcgattctgctttttggtgtatattttatttaccatntaggggttttctttcctgcaattcgatcaaat

SEQ ID NO: 25418 - DNA, 467 bp, Gossypium hirsutum
  Clone ID: LIB3147-036-Q1-K1-D9
gggttgtgctgctgccttgaatcaagccggtgctcgcgtcattgtcaccgagagcgatcccatgtgtgcccttcaggctctcatggaaggacttcaagttttgacccttgaggatgttgtctccgaggctgatatctttgtcaccaccactggtcacaaggacatcatcatggttaaccacatgaggaagatgaagaacaatgccattgtttgcaacatcggtcactttgacaatgaaattgacatgctcggtctcgagaattatcctggtgtcaagcgcattaccatcaagccttaaaccgataggtgggtcttacctgaaaccaacaccggcatcattgtgttggctgaaggacgtctcatgaacttgggttgtgctactggccaccctagctttgtcatgtcatgctctttcaccaaccaggtgatcgcccagttcgagctgtggaaggagaaggcaaccggca

SEQ ID NO: 25419 - DNA, 442 bp, Gossypium hirsutum
  unsure (1)..(442): unsure at all n locations; Clone ID: LIB3147-036-Q1-K1-E1
ggcaagggtggcaaggggctcggcaaaggaggtgccaagaggcataggaaggttttaagagacaacatccagggcattactaagcctgccattcgccgtttggctcgtcgaggaggtgtcaagaggatcagtggcttgatctatgaagaaactaggggagtattgaagattttcttggagaatgtgattcgtgatgctgtgacttataccgagcacgccaggaggaagaccgttaccgccatggatgttgtttatgccttgaaaaggcagggcaggactctctatggttttggtggttaagtttaggatcattcttaagttcttaactgtaatgcctttagatcttgactctagatctatatcgntatgtacttgtttgtgtactcgagtgatgttataatgatttgtaaccctaagattgatcgaataattttcatttgca

SEQ ID NO: 25420 - DNA, 456 bp, Gossypium hirsutum
  unsure (1)..(456): unsure at all n locations; Clone ID: LIB3147-036-Q1-K1-E10
cttcaatagcatctctcactttgatatcttttatgagtgctttactcagctggggcttataacaatgaagggtagcaaaatgaccatgattttgattgcctacgttacggttcttgccgttttcaccaatggagccacagctttgagggaagatcaaggggccatcgcaccatctccaatggaaagtgcatgagcagctctaggtgttccaactgcagtagctgccttagcttctatggctgcatggttcttttgaagttcattcctttgtatctatcttttgattccttggcgaatatggtctaaaccctttttaatttctctttctcaagatttgtcctgttggtttatttgagtttattattattccaagcaactggtattgtggatggagactgaaattnttattcttcttttcaagtaattataatgttaataaaatcttaattgtagtgt

SEQ ID NO: 25421 - DNA, 307 bp, Gossypium hirsutum
  Clone ID: LIB3147-036-Q1-K1-E11
gtgaaacagaaacaatcttttgggaaactttaattagtgcagtagagatctttggttgaaaccgaaggtctgttgaaaattgaccgatgtaataagcgaaatctaactatgtgttgcttttttgaggagggtgaggcattgatcctcatttgagacttgtgctgaatttacatcacaaattgctattgctctaatctttgatgttgtgccactgcaccagctgccttaacttctatggctgaatggttcttttgaagttcattcctttgcatctatctttcgaatccttggcgaatatggaataaac

SEQ ID NO: 25422 - DNA, 285 bp, Gossypium hirsutum
  Clone ID: LIB3147-036-Q1-K1-E12
gctgatgtcagtttttaggataactataagggataagatttatttgtttcaaaatttgtgaaacagggaggggttcacgtttgaactttttttctttttctttctttctttttttttcactggaggaactacatccaatatttttaatttactttcaaggatatgcaatcataaaaaagttcttatattgttgcctctactgagttggctgctttactcgctttgttattgctttgttattggaatattgcgtgtattccagtgttgaaaaagcttgactgatcg

SEQ ID NO: 25423 - DNA, 454 bp, Gossypium hirsutum
  Clone ID: LIB3147-036-Q1-K1-E2
gacccacgcgtgcgggcaagggtggcaaggggctcggcaaaggatgtgccaagatgcataggaaggttttaagaggcaacatcgggggcattactaagcctgccattcgccgtttggctcgtcgaggaggtgtcaagaggatcagtggcttgatctatgaagaaactaggggagtattgaagattttcttggagaatgtgattcgtgatgctgtgacttataccgagcacgccaggaggaagaccgttaccgccatggatgttgtttatgccttgaaaaggcagggcaggactctctatggttttggtggttaagtttaggatcattcttaagttcttaactgtaatgcctttagatcttgactctagatctatatcgctatgtacttgtttgtgtactcgagtgatgttataatgaatttgaaccttaagattgatcgaataatttcatttgc

SEQ ID NO: 25424 - DNA, 321 bp, Gossypium hirsutum
  Clone ID: LIB3147-036-Q1-K1-E3
cgtgcgggcagcgggtggcaaggaactcgcccaaggatgtgccaattttcataacaaggttttaagagggagcatcgggggcattactaaacctgccattccccgcttggctcggcgaggaagcggcaaacacgatccggggccttgccctataaagaaactacgtgaagccttcacgacatcctcggagaatgtgattctttatgctccgacttataccgagcacgccaggaggaagaccgtgaccgccatggatgatgcctatgcctcgcaaacgcaaggcaggacgctacactgtttcggtggccaagggtaggatca

SEQ ID NO: 25425 - DNA, 387 bp, Gossypium hirsutum
  Clone ID: LIB3147-036-Q1-K1-E4
accggcgcggagacccaggcgcgacgcgcacgcagtcggacatgcagcacatgctactaacgatctcgaatcgtttgcagttaaggcatgctgaactttgatatagcatacttcgcgtctgtgtatgggcaacgaagttcctcttcggctcatatctgagtccctttatgatgacgatgatgatttaaaattacaaacagctaagtaacttgagcattttgtttgttccaagagtagattaagtcttgttatcccttctttgttttaagtattaggtttactatgttcctatctcagagaaaaaaaagctatacagaacactaaagatataattgtccaatctgcatgaccctatgggtagaaggccgtcatgaaataaactcaaaa

SEQ ID NO: 25426 - DNA, 422 bp, Gossypium hirsutum
  unsure (1)..(422): unsure at all n locations; Clone ID: LIB3147-036-Q1-K1-E5
gcgcccacgcgtccgacaaacttacgccgcttccgtatagcagagctttcttcgacgagcagccatctgtaatcaatcatgggtcattctaacgtctggaactctcaccccaaaacctacggccctggctctcgcgcatgccgagtgtgtggaaaccctcatgccatcatcaggaagtacgggctcatgtgttgcagacagtgcttccgtagcaatgccaaggaaattggattcattaagtaccgctgaggaatgtttatatggctagaagttggaaacactttttggctagtatgaacctttttcgaaattgtagcaacttgtaagataacattgctgtgttttgctgaatatagtctaagagctcgaagttttgtttctgcanaggataatttgttgctttctcaatgaagtgatcatac

SEQ ID NO: 25427 - DNA, 412 bp, Gossypium hirsutum
  unsure (1)..(412): unsure at all n locations; Clone ID: LIB3147-036-Q1-K1-E6
cccacgcgtccgcccacgcgtccgtgctttttggtgtaatatttttatttaccatttaggggttttcttttcctgcaattcggatcaaatgaatttaagttttattttgactctttttttggtcgctgctattgaatctaaactcgttatccgattcaaaataagcttgtttagttttctaatgttttttaaggttttcataattatttgacctgatcatgtttttaacataaaaaaaaaagcaataaggtgacgcgttatttatttattagaacaccataccagttatggtatacttcattcgtcttaaacaacatnttaagatactttgctgttttttgttgaatttagtttaagagctcgaagtcttgtttctgcaaaagataatgcggtgctttctcaatgaagaaat

SEQ ID NO: 25428 - DNA, 392 bp, Gossypium hirsutum
  Clone ID: LIB3147-036-Q1-K1-E7
aaaaaaaaaaaaaaaaaaaaaataaaaaaaataaaaaaaaaaaaaaaaaaaaaaaaaaaaaaaaaaaaaaaaaaaaaaaaaaaaaaaaaaaaaaaaaaaaaaaaaaaaaaaaaaaaaaaaaaaaaaggggggggccgttttaaaggaccaaagtttacgtccccgggcttgcaaggtaaaagtttttttatggggccaccaaaattaaattaatgggccgtggtttaaaaagggggggaggggaaaaacctgggggttcccaaattaaatggctttgaaaaaaatccccttttcgcaaggtgggtaaatacaaaaaaggcccaaacgaatcgcctttccaaaaatttgcccaccttaattggaaaagggaacccccctttaacgggccaata

SEQ ID NO: 25429 - DNA, 464 bp, Gossypium hirsutum
  Clone ID: LIB3147-036-Q1-K1-E8
accggcgcggagacccaggcgcgacgcgcacgcgtccgatttgtttcacatcctcttaacgatatcctctgtttgcagttaagaaaagcaaatcatggctgctaccacagtcccagccgccgcaaggcagctatctcctaaagaagccgatatccagatgatgttggctgccgaggtccatctcggtaccaagaactgtgatttccaaatggatcgttacgtcttcaagcgtcgcaatgacggaatttacatcatcaaccttggcaagacctgagagaagcttcagcttgcagctcgtgtaattgtcgctatagagaaccctcaagatatcattgtccaatctgcaagaccctatggtcagagggctgtcttgaaatttgctcagtacactggttgtcatgccattgctggaaggcacactcctggtacattcactaaccaatccagacatctttcagtgagcc

SEQ ID NO: 25430 - DNA, 435 bp, Gossypium hirsutum
  Clone ID: LIB3147-036-Q1-K1-E9
caggaaaatgggaacgctgagaaaaatggaaagtattctgagcaaaagagctcgaagaagcagcggaatggttcagttcagccaaagaaaccatttcaaagagtgaatgtggatgaggtagaatttgttgatagcaggcttgaagataattcatactgggcgaaggatggtgctgaaactggatatggtgcaaaagcacaagaagttctaggtcaagtaagaggaaggggtttccggcatgagaagaccaagaagaaacgtggatcatacaggggagggcagattgatctgcagtcgcactctataaaattcaattattctgatgaggagtaaatgttgactttctagttggatgatgagcactgctgtaccctctaaccgtttgcattcatttgagtctattaagtggaactcaatggaactcaatgataatat

SEQ ID NO: 25431 - DNA, 446 bp, Gossypium hirsutum
  Clone ID: LIB3147-036-Q1-K1-F1
gcagcttggatctttcaactcactcgagaactcggtcatcgctccgacggtaagaccattgaatggctgtcccgtcaagctgagccttatgtcattgctgccactgggtccggtacggcggcaccaccctcgccgcccatgagatctcttgtgcctctgggctcactacaacttcttcgcctaaggaatcgtgtaagctgcacccagtaggggtcggtagcggcgacgatgtggtgacggggatgtataccatgacaacgctgccaccaagttgccggctggacttgtgctagtcaatagggtttcagttttcagttgtatcaaaatatgccgtttacagcgttgcttttgcagctgacggtggaggttttgagagatattataatttataacaagaacaattataataattatataaaattgatttgcttttggttgatcgaatg

SEQ ID NO: 25432 - DNA, 423 bp, Gossypium hirsutum
  Clone ID: LIB3147-036-Q1-K1-F10
gctagggcttttgctacggtaccctctctctatggttttacgatcttcaacgagttagcttcgattctgagtcgtttcgcaatgcctcggtattactgtgattattgcgatacttatttgacccatgactctccatcagttagaaagcaacacaatgcaggttacaagcacaaggcgaatgttagaacttactatcagcaatttgaggagcaacagacccagagcttaatagaccaaaggatcaaggaacatcttggtcaagctgcggctttgcagcaggttggagctgctttcaatcaacatttaatggctcagaggcctcgacttcctgttatggcgattcccggggctccattacctgtaaaccaaccaatggtcccagggatgaggccccctgttctgccaagaccaattccaggtgcc

SEQ ID NO: 25433 - DNA, 284 bp, Gossypium hirsutum
  Clone ID: LIB3147-036-Q1-K1-F11
ggggagtgtttaacatttgaccaacttgctcttggagcacctattggacagaacacggctctgcttcgaggtccaaagaatgctcgtgaggctgagaagcacttcggacctgctcctggtgtgccacacagccacaccaagccctatgtgcggtcaaaagcaaggaaatacgagagggcatagaggaagaaggaacagcaaaggcttcagggtttgagattccaactgcactggaaaaaaagaaaactgatcatcccatcatgataatgggaatgcacaaagtt

SEQ ID NO: 25434 - DNA, 303 bp, Gossypium hirsutum
  Clone ID: LIB3147-036-Q1-K1-F12
gcgaagtgtttaacaactgttcaacttgctctttttgcacctatcgtacagcgcacggttctggggctacgtccaaacaaagctcgtcaggcttactagcactttagacctgctaatgctatcccacacatgatccactaatccctatgagcggaccgcagcttagaattcacacagcgactgatgaaaattgaactccacatgcttcagagcatcagaccccaactttactgcacaaaacgaaaacttatcatcttattatgactacgggaatgcacaaaattgtatttgttgctaaccacc

SEQ ID NO: 25435 - DNA, 273 bp, Gossypium hirsutum
  Clone ID: LIB3147-036-Q1-K1-F2
acgcgtgcgggattattgcccacccagcagacgccacttattatactgattcatttgatgtcatgcatgcgggacttttagatagcatacttcgcgtctttgtatgtgtaatgaagttcctcttcagctcatatctaagtccctttatgatgacgatgatgatttaaaactacaaacagctaagtcacttgagcattttgtttgttccaagagtagattaaggcttgttatcccttctttgttttaagaattaggtttactatgttcctatct

SEQ ID NO: 25436 - DNA, 453 bp, Gossypium hirsutum
  unsure (1)..(453): unsure at all n locations; Clone ID: LIB3147-036-Q1-K1-F4
gtacattcaagaaaaaaaaaccagtgaaaaattaaaaaaaaaaagtggttatttgttattagatggaaatttttcagacaattattgtaattacaacatctctgatgctgctgagttcggtcgtttcttcagacaacaccatcaccacttcaaacacgacatcgaagtaccagatcgagtgcaccatgtgttcatcatgtgaaaatccatgtcagcaaactccatcgccgccaccaccatctccaccgccgcctaaaccatcttcaccaccacctacagttcctaaccctaaccactgcccaccccctgcttctacacccacctgcagcggtggtggaaactactactactctccaccaccaccttctcaatccagcggcgganataactactacgctccaccaccacccgttggtgtcattggtggcatgtactaccctccacctacataca

SEQ ID NO: 25437 - DNA, 298 bp, Gossypium hirsutum
  Clone ID: LIB3147-036-Q1-K1-F5
acccgccagcagacgccaggccgacgcacacgtgcgctacttcattggaatcggactattttgtagtgaatcacttgtgagcgcgtgggtgctacagcatgtatacatgattttgcgaggtagaggtaaatcagtggacctgaatcgacaacctgcagaatgagaaaagacggctgtcacgcaacgtaactgacctagtagcacatacgagatttgccagatggcgtagtgctaaataggtcatatcctatcggccttgccaagagttgcgccggatctatggctaatgggaccctcg

SEQ ID NO: 25438 - DNA, 329 bp, Gossypium hirsutum
  Clone ID: LIB3147-036-Q1-K1-F6
cccacgcgtccgcccacgcgtacgagccctctgttgtatattgtttcttcttctactctgatctgtttgctttgattaacgagacgtgatgatgatttggcattattttctcaccaggatgaattatgttttagaaattctattattctgtgtgtttaaagataactacaacttcttctactaaggtatcgtttatgctgcacccaatatgggtcggctgccgctacaatgtggtgacagatgatgtatactatgactacgctgccacgggggcggccgttttgaatggtccaagtttataagcgcttccgtgctcagttttatctttt

SEQ ID NO: 25439 - DNA, 364 bp, Gossypium hirsutum
  Clone ID: LIB3147-036-Q1-K1-F7
gcggaatgggtcaaagtgcatgccatctgctatgtgttaactatgaggctacaggcccgcatggagcaatatgcagaacttagttagctcatcataaacaagggtattgagccctaaaaagaagttgctctacagatgctagaatcacgtcagtcaaagtttgcaaattaggaagctgggtttggatatgctaagacagctttctttgaatcatgatgatgtgtcgttattagagcaagacggatattatgttgaagctttacgttatgcacggaagcataatgtcactactatccggccatcattatttattgaagcagcatttacctccaatgacttacaacatctagcatcggttttgaga

SEQ ID NO: 25440 - DNA, 418 bp, Gossypium hirsutum
  Clone ID: LIB3147-036-Q1-K1-F8
gcggggccataaattcacgcctaaatggtttgacttcgccaacgaagttgctgctacaccttggggtgacttggaagtttatcaatacaacggcaagtataccgaacaccgagctgccatagatggctcgagtagcagtgaggagattgacattaagtccactgaattcaacccatggcagtatgaagatttggctgctaactaaaagcacatctttgcgcttgcttttgaactgtgtgatatattctttttctatgccttttacacttcggtttcctgttgtggctagtgtcaattatagaacaattacatcataggtatttattctgttctgttttatttataatttctagaattttattgtttagttattttttggtccatggttttcaagaaaagtttatgtatttttatcatc

SEQ ID NO: 25441 - DNA, 473 bp, Gossypium hirsutum
  Clone ID: LIB3147-036-Q1-K1-F9
gtgaagttcaaggaagatgtggtggtggaggatattttgaaaggtatggaaaagctggtttctgaggttgatgctgtcaagtcctttgaatggggacaggacatagaaagccaagagatgcttagacaaggatacactcatgccttcttgatgacgttcgaaaagaaagaagattacactgcatttaccagccatcccagtcacattgaattctccgccacttttgttactgccattgacaagttcgtggtgcttgatttcccttcggttcttgcaaaatctccggcttgatctgcaagaaagaaaaaagctacccaggaatttaagtgttttgagtatttgttatgtttaatctctctgttgtttgcatctctatgttttctgcttatgtgttatggctttctgccattgctatcaattccccaataatcacaatttgtattattgatatgcaaaaattcacatgcattttg

SEQ ID NO: 25442 - DNA, 395 bp, Gossypium hirsutum
  Clone ID: LIB3147-036-Q1-K1-G1
atttctggctacatgttgttggttcttgacaaatgcttaccttcgggaagaggctccaaatagtcatgttgttgaacaacgggttgaatggctgtatgcatttgatgtgcactgcaattctttcttcccgatgtttgtaatgctttacgtaatacattattttgtgtcaccgcttctggtagcccatggttttatacctgaacttctgtccaatctgctgttcatggtggcagctttttaactttaattaccttaccttttaaggtattaagtaccttcctttttggaaaaaaccaacttttttctttaaccaaatgggggcattaatggtctatcccctatcttgattttaagtggcttcaatccttcaagatattttatgaatatgtatttta

SEQ ID NO: 25443 - DNA, 350 bp, Gossypium hirsutum
  Clone ID: LIB3147-036-Q1-K1-G10
aattggagcacactgacggttcctactagtggttctgtcagcttttttccattgacctgcaccgacgatttttgggcgcgctcgttcattacatatgttcacgatcttgcccttcaacgccgtcaagcccttcaccgtcgcgacgagattcgtcactagatctgcgcggcgctgatactgcgcctgcacatacgcccatttcgccttgacattttcctctacggtcggtacgctgtttagtccaaacgccgagagcgacagggcatgctatcggctcgagtgctctacgaaactttatggggaagcaacctacaaataccatcaacggtgtgtcttatacgatgcctaca

SEQ ID NO: 25444 - DNA, 380 bp, Gossypium hirsutum
  Clone ID: LIB3147-036-Q1-K1-G2
gtaatacccagatttgtgacctatggcttgtatccaatttgatggccaaaatgtttgcagactgggaccctgctttctcttatgtttaaacacgacggaatatgtcattctttgtcttattgtgttttcagatattgagatgacttttagcgatgtgagattctttgctttcacttaaatcacccatttgtgctagagccttttcttggaatctttgccatatcatgaaggtccagtttttctttttaatgctgcttcctagagtgtgggagttggtgtatatattcatccagaacaaatttttaggggccgaatgaaattttaattttatataatctatatatttataatttataaaggattaaatacaatctttataa

SEQ ID NO: 25445 - DNA, 342 bp, Gossypium hirsutum
  Clone ID: LIB3147-036-Q1-K1-G3
cccacgcgtccgggagaacggagaaatggaagcatggatttttatatctattgacaaacatggaacaattaattatgaaagcaatattattatgtttatccttttttacattttgtaatttgtactttctagccatgctttgttcctagaaattagagattaaacgcagtttgtctaaaattgtggtttgaaacttcaaaaattttgattttcagctttacatgcaatgtctggtacgacttgttttggcaacacagtagttctattggttacttgtaattatgctcttgaaaatattaatgtatcttaagagtttaaataattcagaaggttcttagaaca

SEQ ID NO: 25446 - DNA, 458 bp, Gossypium hirsutum
  Clone ID: LIB3147-036-Q1-K1-G4
aatggaaccacaaagcttgttctctgggttttgctcaaactcaataaccccattatatagaaatcctcaaaatccattatcttcctcaccaccttctctttcttttccttgtttcaatcaatccaaacatcaagtttcttttgaaatgcaatatttcctatcttctcaaaggttgaggtctgtaagaagattactgtgtaaaaacagtgtagaaaaagtaagtaatcttgtctctgagaaggaaggttcaaaatcatgggttaagcggaaaaggctagctgtttttgtctctggtggaggctcgaatttcaggtcaattaaccaagcatgcattgaaggctttgtcaatggagatgttgtagttctggtcactaataaacatgcttgtggaggtgcacaatatgctagagataaaggcatcccagttattttgttcccaaaaacaaaagatgaacctg

SEQ ID NO: 25447 - DNA, 301 bp, Gossypium hirsutum
  Clone ID: LIB3147-036-Q1-K1-G5
cgagcggacgccagtgcgacggatacgtgcgcaatcgcatcacactgcccgtcgtcactagtggatccaagcattgcactggtggaatattttgattattgaaagctgtctagataaatgtgtcgttcaaactctattctcaaaattgaaatactagagggccaatgttgtgacacattaacctcatgtcgagctctgttgagttgaaaagcgattttattgcttaacaaactatcgatatccttgtacctgagacatgagatgacttctgctgcgtctataatctgagcactgataaaca

SEQ ID NO: 25448 - DNA, 438 bp, Gossypium hirsutum
  Clone ID: LIB3147-036-Q1-K1-G6
cccacgcgttcggggtgacaacatgattgagaggtctaccaacttggactggtacaagggccctactcttcttgaggctcttgaccagatcaatgagcccaagaggccttcagacaagcctctccgtctcccacttcaggatgtgtacaagattggtggtattggaactgttccagttggtcgtgttgaaaccggtgtcttgaagcctggtatggttgtgacatttggcccttctggtctgacaaccgaagttaagtcagttgagatgcaccatgaagctcttacagaggcacttcctggtgataatgttgggttcaatgttaaaaacgttgctgttaaggatctcaagcgtgagtttgttgcatccaactccaaagatgaccctgctaaggaggctgccaacttcacttctcacgtcatcattatgaaccaccctgg

SEQ ID NO: 25449 - DNA, 406 bp, Gossypium hirsutum
  Clone ID: LIB3147-036-Q1-K1-G7
cccacgcgtccgctcatatctctcctttgtttccccttttctctctcttttttcaaccctgaccctacctcaccaaccaggattcaacatgaagggaggaaaatctaagtcagatactaagagtgccaagctatccgtgaaatccaaagctggaaagaaatcggggaaggctgccaaggatccaaacaagccaaagaggcctgctagtgccttcttcgttttcatggaggagttccgtgagcaatacaagaaggatcaccctaaaaacaaatccgttgccgctgtcggcaaagctggtggagataaatggaagagcttgtctgaagctgaaaaagcaccttatgtagccaaggcagaaaagcgaaaggtcgagtatgaaaagaacatgaaggcctacaataagaga

SEQ ID NO: 25450 - DNA, 447 bp, Gossypium hirsutum
  Clone ID: LIB3147-036-Q1-K1-G8
gttgctccttggcctgctcgtttgcaaaccccacccgatcggctgcaaagcatacatatggaatcctacatagctagaaaagaactcttcaaggctgactcaaaatactggaatgaaatattggcaagctatgttcgtgctctacattggaagaagtataaactaagaaatgtaatggacatgagagctggctttggaggatttgctgcagcaatgattgacaatcaactcgatgcttgtgttctaaatgtagtccctgttagtgggcccaataccttgcctgtatatatatgatcgtcgattaataggggtcatgcatgactggtgagagtcgtatgatacatacccacggacctatgacttattgcatgcagctggcctattctcggttgagaggaaaagatgcaatatgtctaccatcatgcttgaaatggaccggatattacg

SEQ ID NO: 25451 - DNA, 286 bp, Gossypium hirsutum
  Clone ID: LIB3147-036-Q1-K1-G9
cccacgcgtccgaccacgcgttcgcccacgcgttcgtaaaattttgggatgggagtgagaaagtggaaagtgttggcagacaagatgtaagcagtctgagaataaatagaaattaagttcattagtaatgtgctttgtattgtatgtttcactttaatttgattccttgagtattttacagaagttattatggttcgtattagttttcattatctatccttgtaaagttgatgaaacagcctgtaggattgattatagtataccatgttgtaccattacctgattc

SEQ ID NO: 25452 - DNA, 155 bp, Gossypium hirsutum
  Clone ID: LIB3147-036-Q1-K1-H1
tcatgataacatatacttctctgcttctaatgttaccagatctgccgcgattgaagcggacgagtttatctgttcgaagcctacatacgtggcgcggattaagctgctgctcttgcttttgaagccataccacgtactttggcacaaaattgtgg

SEQ ID NO: 25453 - DNA, 265 bp, Gossypium hirsutum
  unsure (1)..(265): unsure at all n locations; Clone ID: LIB3147-036-Q1-K1-H10
cacactgncggttcctactagtggttctccgcgctttttaccgcagaaccggtgggcagcttattggggctcaccgtctcctccaataactctcatatcacgatcaagtctatcagcgtcacatggcgctcgcctttaaacatcaccagcgtctttcccctgatatttaagttcaaaaattcttctcccctcaatcaatgccatttgctcaccccctcataagccactcccttctttacaatctcgaacccgacctttcccctaa

SEQ ID NO: 25454 - DNA, 248 bp, Gossypium hirsutum
  Clone ID: LIB3147-036-Q1-K1-H2
cccacgcgtccggtttgaatcagtagtgtttttgtgtacctcaatgccaatcatggttttctgcattgacttttaaagaatctttgatgccaactgatgtttttttctttcccaaataaaggtgttcgagacttcataccgtcaaaaaaaaaactaaaaaatgtaatgaacgtaaaagtaacgctttagacgaattgctgcaatactgattagacaaataactcgaggccagtctttttaaaggatcc

SEQ ID NO: 25455 - DNA, 91 bp, Gossypium hirsutum
  Clone ID: LIB3147-036-Q1-K1-H3
gtctgccgttgtattttatgataacatctacaactcttccaagaatgctaagagagcaacatatcttgaaaaggcatttatttttgctcaa

SEQ ID NO: 25456 - DNA, 401 bp, Gossypium hirsutum
  Clone ID: LIB3147-036-Q1-K1-H4
acatacccctatatgtatcgggctgcttccctagtgttggaacagaacgctcatgccgcacttgaggagatcagccgatctcttgaaggcatactcacatgtccgtgcgaagctcctgctcttgcttttgaagccatcccacgtagcttagccacacaatagtggaggtaatgagagctcgtgactatgactgctcctgcaggcaagcatgctgatggacaaaatgcatggatcggcatacatggccacactgctgcccttgctgacatgaaggcaacagagatttgtgacgcacacaatgtgaaggcgcagacatttaagacagcgatagaagcagcatgcatgcttatacgaatggatgacattgcaagtgggattaagaagaaacacgctcctggagc

SEQ ID NO: 25457 - DNA, 376 bp, Gossypium hirsutum
  Clone ID: LIB3147-036-Q1-K1-H5
cgggccgaccgacgcgtgcgcccacgcatccggctcccggaggtggcgcttcagaattaaccgtttctgccacattgaagcagaagagttcatctgttggaaggcatagaaaagtggccgtatgaagctgctgctcttgcttttgaagccataccacgtactttggcacaaaattgtggagttaatgtgattcggactatgactgctctgcaaggaaagcatgcaaatggtgaaaatgcatggattggcatagatggcaacactggtgccattgctgacatgaaggaaagaaagatttgggacgcatacaatgtgaaggcgcaaacatttaagacagcgatagaagcagcatgcatgcttctacgaattgatgaca

SEQ ID NO: 25458 - DNA, 379 bp, Gossypium hirsutum
  Clone ID: LIB3147-036-Q1-K1-H6
gcgctctgacatacccctatatgtatcgggctgcttccctaatgatgaaacagaatgttcaagctgctcttgctgagatcaaccgtgttcttgggtttaaacttgcattagaatgcatggaactccgattttgtctttatttagctattgaggattacaaagcagccattcgtgatgttcaggcaattctaacactttccccagattacagaatgtttgagggacgagtggcagcatcccatctccgtacgcttgtgcgtgagcatgttggcagttggacaactgcagattgttggatgcagctgtatgataggtggtcttctgttgatgatattggatctctcttccgaatctatcagatgcttgaatctggtggggc

SEQ ID NO: 25459 - DNA, 299 bp, Gossypium hirsutum
  Clone ID: LIB3147-036-Q1-K1-H7
gagaaccaggcgcgacccacgcgtatgtcttttatgacaacatatactactctgcctttaatgccccaagactaacgtggcttggaagggcttggatatacatgctcagtcaggataccatcgcattacagaaacccccccagaggctagaacatacaccggctcctaaacctccgctggaccttgtaaagagggtgccgaacacccgtccacggatcgatgatgggttaagatcgtactgtgtgctgatcgaatgctaatgtaagcctgccgctactctgtggaagcttaccagaaaa

SEQ ID NO: 25460 - DNA, 198 bp, Gossypium hirsutum
  Clone ID: LIB3147-036-Q1-K1-H8
tgataatatatagttatagggacaaaagtgaatgtttccttacaatgctgaataattgtggtgatatctctaaccaaacagcctgttgtaagctatgaaaagcttagtctaataggatgattaccttttgttatgctttaggatataatgattgcttcaccagcggagttggctctaaaacaaaaataacactttacc

SEQ ID NO: 25461 - DNA, 455 bp, Gossypium hirsutum
  Clone ID: LIB3147-036-Q1-K1-H9
gtggaaatgcccacagtggtactaagaaaaaaggaaatgcacataagaggatgaaaggctctatgctgcaagctaagccctgggaacatgttgatcatgtgattatgaatcttcctgcttctgctttactatttttagatgctttcagagctattatctcaaggaagaactggagagggcctcttccattggttcactgctattgcttcatacgagcaaatgaaactcaagaatttataatatcagaggcagagtctgccttaaatgccaaaataaaagacccgatgtttcataaggttagggatgtcgctcctaacaaggcaatgttttgcttaagctttaggctgccagaagcatgctatattgaagacgttgctaactcgacctgtcataatacaggtggattatgagttatgatctcaaaaagtatccaattttcttctagctcttcaact

SEQ ID NO: 25462 - DNA, 360 bp, Gossypium hirsutum
  Clone ID: LIB3147-037-Q1-K1-A1
cccacgcgtccggttcaaagtctcttgattgtggcatcccgcaaacattacatggttgatgtagttgtggcatggtacactgttaatttagtggtattcttcatagacaagaaactgccagaattgcctgacagaagcagtggaagctcaccaatgttgctaccattgagcaccaaagacaaggatagtaagcaaagaagagaaccacaagctcttgaatgggaattctgtagatcctgcagattggaggccgagaactcaagtaaatggcaagattcaagaagatggcaatggaatccatgatactgcaatgaacggagcataagtgatggaaattacatgctgtcactataatggggc

SEQ ID NO: 25463 - DNA, 436 bp, Gossypium hirsutum
  Clone ID: LIB3147-037-Q1-K1-A10
cggacgcgtgggcggacgcgtgggctcggtagttctgtcctgaagctattatgttcctccgaactctgttgatggcagctacagaccacaaactagcatccgagcaagattcacagttctatcattttatggaactgaaagcactcaggcccttattatgcatacatgacggtgtggatgaaattaatcctctgaatttcctcatggtaatggaaatgtcagatgactcgttgtttttccgctcggataatttcagggctagtgcactgctaactgtgattgaaactttgcaaggatttatcgagatctatgatgggttgaactcctttcccgaaattttcttaccaattgcaacattattagttgaagtttcggagcagaaacacatgccgaaggcactgaaagataagttcaacaatgtttctcaactcattaa

SEQ ID NO: 25464 - DNA, 438 bp, Gossypium hirsutum
  Clone ID: LIB3147-037-Q1-K1-A12
cccacgcgtccgcccacgcgtccggaagcttccactgaatcatgaaatactgtaccatttacaggatgtgttcaacttgctgccaaacctaaacgtaaatgacctaatcaaggcttttgcagtaaaaaccaatgatatgatgttggttatatatctgtcatctctcatccgaagtgtcattgcgctccataatttgatcaataacaagatgttaaacaaagaacatgagaaggctgaagatgctaagccaacaactgtccaggctacgagttgaatccgaacataaagtcctaatcatgtcaaaaacttgagcatagggtgctattaacttccataggatcctctattcttgagattttgtattcttcatagctcaatcagaagatatcagtaggcttaaaaaatttgagagttttctctttgtttccatacactata

SEQ ID NO: 25465 - DNA, 305 bp, Gossypium hirsutum
  Clone ID: LIB3147-037-Q1-K1-A2
cacacgccggcgatccatatcagacagagattaggtgccctgccccaatgagggcgggcactatgatctgtgcgcaaagcgaagcattactgtttgcgcccgattcaagagggcgcgctgctgtatggggatacgctggaggtaacgtagccatcatataatacagaggctgtctgtattcgaggatcggtactagcaacagttgtggctcgggcaatggcttaccgacactaggcaaacattacagagaagctaatgttgtcgaagaggagcaatcagagaagtgcattctggtccccaaaacg

SEQ ID NO: 25466 - DNA, 343 bp, Gossypium hirsutum
  Clone ID: LIB3147-037-Q1-K1-A3
ggggacttataatttgttatcaattttcttaaagctaaaagctgtcaaatatttcattgctttagactttaatttgtatgaatacgtattagccagccttataaattcttccctttgagttcctattagcttggaacatgctgggcctcaattgaaaggatacaccatagcaagttgattgcagattcagttgggttgaggctcatatcatatcctgaattttaaggcccagcagaaaacacccttctaacatcgtctagtaataaaaagcaaatagaaaatgttttcccagatccccttgtattgtaaaaggaaagaaaatcccagcattactttttgcttt

SEQ ID NO: 25467 - DNA, 275 bp, Gossypium hirsutum
  Clone ID: LIB3147-037-Q1-K1-A4
aattccaccagatcagcaaaggttgatttttgctgggaaacaactggaaaatggaaaggactttggctgattacaatattcaaaaggagtccactcttcaccttgttcttcgtcttcggggtgggttctaagccttaaagtcttccttaatgtgggttttctggttttacgtgaaagattgtgccctttgatggccttttaaataatttctagtctttgtttaccggttgcatctatgtatggtttctctttgaatggaatttgcatatttacct

SEQ ID NO: 25468 - DNA, 435 bp, Gossypium hirsutum
  unsure (1)..(435): unsure at all n locations; Clone ID: LIB3147-037-Q1-K1-A5
cccacgcgtccgagccgtcaaggttgtggttatcgtcgacactttcagacttcaggagcaacctgcttttgacaagaagcagtttgtgaccttcatgaagaggtacatcaagaacttgacacccaaattagagcctgaaaagcaagagtctttcaagaagaacatcgagggggctactaaatttttgatgtcgaagcttaaagatctccaattttttgtgggtgagagcatgcatgatgatggtagcctagtgtttgcatactacaaggacggtgccaccgatccaaccttcctctactttgcctatggcttgaaggaaatcaagtgctaaatggangtttcacccgataccggaccggctttgttatacctaaagacttagttttaattctagatataangagttcttaactatctatttagncttttttatct

SEQ ID NO: 25469 - DNA, 378 bp, Gossypium hirsutum
  Clone ID: LIB3147-037-Q1-K1-A6
cggacgcgtgggatgcaagtgcatcgtcatcatcagtctatcagcaggccattggaaaatttccatcctagatcgtgtttatttgccttttagcagagtttgtaagacattgttctacttgagtttctccaacattgaaggtatggaaccggttacaaatttgcgtacctctttagccggagaaaatcatacaaggaagaagctggtggtaaaatgataacaagagcaaatgctctgtagctacagggactttctggcaaagcaaagaagctgaaagcatgcatggctgtgagtggtgtgtagcttcaccagattttttccttccattttggtaattggacattataacattacaataaaagttccaatggtttaatt

SEQ ID NO: 25470 - DNA, 321 bp, Gossypium hirsutum
  Clone ID: LIB3147-037-Q1-K1-A7
ctcgagttggaaagttctgatacgattgattatgtcaaggccaagatccaagacaaggaagggatccctccagaccaacagaggcttatctttgcaggtaaacagcttgaagatggccgaactcttgcggattacaacatccagaaagagtctaccctccaccttgtccttcgtcttaggggtgggatgcagatccttgtaaaaacccttactggtaagaccatcacccttgaggtggagagctccgatactatcgataatgtcaaggccaagatccaagacaaggaagggattccaccagatcagcagaggttgattttt

SEQ ID NO: 25471 - DNA, 380 bp, Gossypium hirsutum
  Clone ID: LIB3147-037-Q1-K1-A8
cccacgcgtccggcgggattacccgctgagtttaagcatatcaataagcggaggaaaagaaacttaccaggattcccctagtaacggcgagcgaaccgggaaaagcccagcttgagaatcggtcgccatcggcgtccgaattgtagtctggagaagcgtcctcagcgacggaccgggcccaagtcctctggaaaggggcgccggagagggtgagagccccgtcgtgcccggaccctgtcgcaccaagaggcgctgtctacgagtcgggttgtttgggaatgcagccctaatcgggcggtaaattccgtccaaggctaaatacgggcgagagaccgatagcgaacaagtaccgcgaggggaagatgaaaggactttgaaag

SEQ ID NO: 25472 - DNA, 203 bp, Gossypium hirsutum
  unsure (1)..(203): unsure at all n locations; Clone ID: LIB3147-037-Q1-K1-A9
aaaaaaattcaacggccgaccgtttgtgtcgttccggagacgtttcacatctcatttcaccagatctcaactcttccttcgccggtttatttgntcttccttgttttttggctggtttcaataaatttcttctatttttccatggctgctccacctgcaagagctcgagccgattacgactatctcataaagctccttttgat

SEQ ID NO: 25473 - DNA, 243 bp, Gossypium hirsutum
  Clone ID: LIB3147-037-Q1-K1-B1
gtgcctacttgaataataataacacctcatctaagactccaataattatcttgctatgccttacctcttttcagctattcttccttgttctgaagaagcctttcataaagaaaaaggtacagttagttgagatcatctctctttcgtgtgaggtggccatgtttgctacttgtttcgttctgttggacaaggaattttcgactacaatcggtatcttcatgcttactttattcctgatggggt

SEQ ID NO: 25474 - DNA, 384 bp, Gossypium hirsutum
  Clone ID: LIB3147-037-Q1-K1-B10
caaggtttccgggttgcatatgatttagcgggttctcgtgtcgggttttctccccgtggatgcgcctaaaaatggcggtgcttttaatttttatattaagggacaaagctctatccctatctctatattattttccttggatatttttgggggagggtaagaaaggaagaaacataataatgttttcatagataagaatgtaagggaaagatgatgaccaggaaaggcgggttgctggttagaagtagagaatgtcgttcggcgggttttcggttttcacgtgttgtccattgtacttttgaaacaaaagaaatggcatgtccaagaaagttatatatatttttaatttttaatttaataaaaaagattaatggaatcaccctt

SEQ ID NO: 25475 - DNA, 436 bp, Gossypium hirsutum
  Clone ID: LIB3147-037-Q1-K1-B11
gaggtactggtgaaatatttaaagatggaatggacctccataatttcgttaagagagcattgcctgaaagattatcccaaatttgggacataataaaaaaaaacaaaaacaaaaataaaaaaaatacacaataaaaaaaacaaatataaaaaaaaggaggaaaacatacaattataagctaaaactgcctctatacaaagcaatgtgaagggaaagcacgacacattgaattgcgctactgttttttactcaatagaatcagagtcggaacttttatcgatcagatttatgttaaaaagattgtatcatacagatacatacattttgggaagatgtttctgtatatatcaaatgagcaatttgtacatgtaataatgtaccattagaagtagtagatatatgtcctgtcaaattagtgtatcactttcatgaaaaa

SEQ ID NO: 25476 - DNA, 327 bp, Gossypium hirsutum
  unsure (1)..(327): unsure at all n locations; Clone ID: LIB3147-037-Q1-K1-B12
gttctcagctggaggccagagctgtttccctcaaagtcagctgccctatctgcaagattttgtagaccaggagccctaatgggtaggaaagagatctgcaagtgcaattagctaatgaaaaacaacttggtgatcattatggctccaaacatccaaaggaaaaccctcctgctgtgtcaagttgattgctttcttcccatgtaaaagaaggaaaagaacaaattatcttttcctgtgtgattctagatattgtatgttaaccgtctttttaaaaaaaattttaaaccgntgtagaacttataaaaaaaaaaaaatgactttttaaag

SEQ ID NO: 25477 - DNA, 316 bp, Gossypium hirsutum
  unsure (1)..(316): unsure at all n locations; Clone ID: LIB3147-037-Q1-K1-B2
cccacgcgtccgtgtaatgccagttttacggcaagttttgcatcggcgggaactgaaaatatcggcaatttttttcttctttttgtttaattaatattgttaatgagtgaagttaagaatattaaacatctccgtcacagtaacggtgacggacgagtttgggtacgtgttttatgctggatcatgcttatatgtttgttttcgtgaaggcacgtgataagaacatttcaaaaggctaagtntgtttattttatatttttttcttaataacatggtaaaaggttttttaccctactttagattcttattnnnaaaa

SEQ ID NO: 25478 - DNA, 363 bp, Gossypium hirsutum
  Clone ID: LIB3147-037-Q1-K1-B4
cttgtcagctgatgtgagaaagaaagctgaagcactagataggttttgcaagccaataatgacgaaacctaaaccaactaagccagcctcgcctgaaacacgaactaacccaccacctcagggggagggtcagtcccaaggagcggatgccaatgcaagccctaaccacaacaatgtgcctggtgaaaatgcaacggcaggcagtggtaaggcagctcctgcttctgcagaaccaatggaaactgacaaatctgaaactgcttcgactactgcataattcagtagcttggtggtctgttgatgatatatgtggccaaaatttccgttcctatgtacaaccgctattttcggaaccactatttt

SEQ ID NO: 25479 - DNA, 446 bp, Gossypium hirsutum
  Clone ID: LIB3147-037-Q1-K1-B5
cccacgcgtccgcccacgcgtccgggaaaatgcagtcttttatgttgccagtccagaagcttgtgctgcaattttgtggaagactgccaaagcttcgcctaaggcagctgagaagcctgcactttcttcaaccagcaaccaagggataagaagtcccaaacagagcatgaaaagcatgtgatggatctgcatggggaagtgatggcatgtgcatacgaagatgtccaagtcatgtggtccattcttgacaagtccaagtccatggcttgtaacatcaagccttaggattccctttttaccctttctctttttttttcttaaatttaaattttctttattttattttgcatgtgatgtagataaagctacaaaatcgattgcaaatttgggggaaattaggagattggggaaaagagggcattattgtaatttttgatggagagaat

SEQ ID NO: 25480 - DNA, 428 bp, Gossypium hirsutum
  Clone ID: LIB3147-037-Q1-K1-B6
cccacgcgtacgtccacgcgtccgccgacactccacagcgcagcaatgggtgaggaagtaaaggctttggttcctgagtcactgttgaagaagaacaagacgaatgaagaatgggagcttgccaaaaagcacgagctcgaagccgcgaagaataagaaagtcgagaaccggaagttgattttcaacagggctaagcaatatgcaaaggagtacgaggctcacgaaaaagagttgattcaattgaagcgggacgcgaagttgaaaggaggattctatgttgatccagaagctaagcttttgttcattgttagaatccgcggtatcaatgccatgcacccaacgaccagaaagatcttgcagctcctacgtttgagacagattttcaatggtgtgttgtttaaagtgaacatggcaacaatgaacatgct

SEQ ID NO: 25481 - DNA, 391 bp, Gossypium hirsutum
  Clone ID: LIB3147-037-Q1-K1-B7
tggagatccaagtcaatggtggaacttttgttgacaaggttgattttgcttacaagttctttgtgaagcaagtccccattgatgctgttttccagaaggatgaaatgattgatatcattggtgtcacaaagggtaaaggttatgaaggtgttgtcactcggtggggtgtcacgcgtctgccccgtaagacccacagacgtctgcgtaaggttgcttgcataggtgcctggcatactgccagagtctcctttacagttgccagggcaggtcagaatggataccaccaccgtactgagatgaacaagaaggtctacagggttggcaaggttggtgatgagacccactctgccataactgattatgacaggactgagaaagatattaccccaat

SEQ ID NO: 25482 - DNA, 235 bp, Gossypium hirsutum
  Clone ID: LIB3147-037-Q1-K1-B8
gccacgcgtccgaccacgcgttcagtattatggcgagcagaatatccaaccggcagatccggtggctcttgatcttgtttgtgtatcaaacccaatcgatgaggttctggacacattgtgcacgcttattcatgattcacattcacaagttgcaatggctgcaaatatctgcttgggtatatataagtgctgaaaccaataatgctcgcattgctggcatgctatgcaaactttc

SEQ ID NO: 25483 - DNA, 326 bp, Gossypium hirsutum
  unsure (1)..(326): unsure at all n locations; Clone ID: LIB3147-037-Q1-K1-B9
cacttttgacggacccaaatcccgatgatttcttggtgccagagattgcccacatgtacaagaccgacagggctaagtacgagacaactgctcggagctggacccagaagtatgctatgggttagtgtgctaatatgcatataataggagggctttattctatgtggctttgatcttcaatttaatatgtatgaatcaatgaaacagtatgtgtgatctgtctctccaactatgtactggaccaatccctccttaaaacacatttgttgccttaattgtttgtatggaaattatgtttcaaaaaaaaaannnntnnnnnntnnnnn

SEQ ID NO: 25484 - DNA, 433 bp, Gossypium hirsutum
  Clone ID: LIB3147-037-Q1-K1-C1
gccctctccaacatttcctttttgtttccttaaaaccctaacgcctccatggcatggctacccaaactccgagttgccagcgcctctgttgcttcatccgccgtcaacccactccgacgttggatccgagatatcggctcagccgctgcgttggagctcgactacgactatgactactacgagtatgagcgagctccccgggataggcgcctgcctcagcagaagcttgatgtggatggttcagtgccggagaggggaatccagtgggtgcttataggggagcctggagtgaaacgccatgcttacgccgagaggctttccaagcttctaggaatccctcatatttcaatgggttcccttattagacaagagcttgatccttactcctctctttacaaacaggtcgtaaatgctgtgaatgaagggaagcttg

SEQ ID NO: 25485 - DNA, 285 bp, Gossypium hirsutum
  unsure (1)..(285): unsure at all n locations; Clone ID: LIB3147-037-Q1-K1-C10
ttccaataggtgcgactttggtaactgaattagttgcttctgccatagcccatggggaccatggaagtacttttgcaggttcacctcttgtttgcagtgctgcaatttctgttttcaataaaattgcaaaccccagtttcttgtccagcgtctcgaagaaaggtgattacatgaaagaattgttgaaccagaagctcggagggaatccccacgtgaaagaaatacgaggatggggtcttatgattgngatagagttggatgtgtctgcttcgccccttgtagatg

SEQ ID NO: 25486 - DNA, 440 bp, Gossypium hirsutum
  Clone ID: LIB3147-037-Q1-K1-C11
attctatagctttcatctacatttcgccccagaaattatagtaaagcagagacaatgagaggaacattgatgttgagttggattctgatcatctgcctctcccaagtagcagtgcagagccaatactactcgaagagccgaccatatcatcccaggccacctaaggtcaccaatcttcacttctttatgcacgaacatacgggtgttactgcagtcgtggtagcccaagctaacatctcaagcaataattcatcagtgccatttgccaccctagttgccgttaatgatcccctcaggactggtcctgagcctgactcagaggtaattggaaatgttcagggtatttcgctcctggctggatcaaatgcatcgagtacgcagtacatagaatttggatttaataccggtaagtttaatggcagctctcttagcgtattttc

SEQ ID NO: 25487 - DNA, 437 bp, Gossypium hirsutum
  unsure (1)..(437): unsure at all n locations; Clone ID: LIB3147-037-Q1-K1-C12
cccacgcgtccggcaaattaaggtgttctcgggaatatgtagttgaatgtgtggaaaagcgtagttttccttagctgtttcccttaaggcaacttaaaataggtggtagttgaatgtgtggaaaagtgtagttttccttagctgtttcccttaaggcaacttaaaataggtggtagttgaatgtgtggaaaagtgtagtttcccttggctgtttctagtgtacattaggtccaggcataaaataggttggtttgaatctttgatttgtacttttcaggatggcaatggcagccaatactggaccttaaatatatgcatcctgaactgaatgttgttgtnnaatataaaatctgnctgaatcaatgcataaaatacccantacatanaatttgtatttaataccggtaagtttaatggcagctctctaagcgtatttt

SEQ ID NO: 25488 - DNA, 432 bp, Gossypium hirsutum
  Clone ID: LIB3147-037-Q1-K1-C2
cccacgcgtccgaaacctttctacaagtcggaaccaattcctgaaacaaacaatggggatgtgaaagtagtggttggcaataactttgatgaaatcgtattagatgagtcaaaggatgtccttcttgagatctatgcaccttggtgtggccattgccaagcacttgagccgacatacaacaagcttgccaaacatctccgcggcattgactctttggttattgctaaaatggatggtacaacaaatgaacatcctagggcaaagtccgatgggttcccgacaattctgttcttcccggcaggaaacaagagttttgatcccataactgtggacactgatcgaactgtcgtggcattttataagttcctaaagaaacatgcatcaatcccattcaagctccaaaaaccagtgtcagcacccaaagctgaagca

SEQ ID NO: 25489 - DNA, 429 bp, Gossypium hirsutum
  Clone ID: LIB3147-037-Q1-K1-C3
cccacgcgtccgcccacgcgtccggtttcaaacgacgacatcaaggaattgttttctgaggttggtgacctgaaacgattttcggtccactatgataggagcgggagatcaaagggaacagcagatattgtcttcacacggcgagcagatgctttggctgcagtaaagaggtacaacaatgttgagctcgatgggaagccgatgaaaatcgagattgttggaacaaacatcgctacccctcctgcacctttaggagctaatggtgcctttcgaagttctaatggagccattaaaggtggccaaggcaagggtggtggatttggtaggcaacgtggtggtggtgctgctggaagaggctgtggacgacggaagggtcgtggagaaaaggtttctgcagaagatcttgacgccgatctagagaagtatcat

SEQ ID NO: 25490 - DNA, 62 bp, Gossypium hirsutum
  unsure (1)..(62): unsure at all n locations; Clone ID: LIB3147-037-Q1-K1-C4
cccacgcgtncgtgtttggtgctggattggtgactaggaagaaaccgattgaacattcgatt

SEQ ID NO: 25491 - DNA, 271 bp, Gossypium hirsutum
  unsure (1)..(271): unsure at all n locations; Clone ID: LIB3147-037-Q1-K1-C6
aggccgcccttttttttttttttttttngtttttttttaangaatgacacattnaaaagcgggaggtttttttttgttgttggttgaaaaaaaaaaaaatcaaaagatttgccttaaaaaaactcaaaaaaatttttaaaaaaaaacttttaaaaaaaaaaaataccccagtcttcaaatttcccaaaatgccacaattttttccgaaaaaataaatgggttatttttttccatcccattaaaaaaaaaaaaaaaaaaaaaaaaaaagaaa

SEQ ID NO: 25492 - DNA, 176 bp, Gossypium hirsutum
  Clone ID: LIB3147-037-Q1-K1-C7
taacgcctccatggcatggctagccagactccgagttggcagcgcctctgttgcttcatccgccgttatcccactccgacggttggatccgagatatcggctcagccgctgcgttggagctcgactacgactatgactactacgagtatgagcgagcctccccggggataggcgcc

SEQ ID NO: 25493 - DNA, 430 bp, Gossypium hirsutum
  Clone ID: LIB3147-037-Q1-K1-C8
cccacgcgtccgcattacttcgttttggtttttttgctttgctctgaaactccaagctctcatcaatggcggatccagcgactatctcaccagccacgctgttgaaagatgagcttgacatcgtgattcccaccattaggaacttggatttcttggagatgtggagaccctttttccaaccttaccatctcatcatagttcaagatggcgatccttcaaaggccatcaaagttcctgaaggctttgattacgagctttacaacaggaacgatatcaataggattttgggtcctaaagcttcttgcatctctttcaaggactctgctagtcggtgctttggatacatggtttccaagaagaagtacatctataccattgacgacgattgtttcgttgctaaagatccatctggaaaagacattaatgcatt

SEQ ID NO: 25494 - DNA, 429 bp, Gossypium hirsutum
  Clone ID: LIB3147-037-Q1-K1-C9
tcaaagtgtatattgaaccatgcggtaaatttgttaattgtatgaggataaattaatgctgatctaaagaacaattggatgttgctattaatgttattcggatctaagataagtcatgggattgaatgtaatgtttaattaagctatgagaagaaatatatgaacaatgtataaaaggattttgtttttgcctgctggtgttacattaaggagttgcactgtccttgagactgctggcaatggtgctcttcccgtgcttctcaaggtcttggaatctggcatctcagggattgacaccaaaaacgaacttgttatatggcttcacttgggggttgatggcggagcacaaaaatttaccctcgaacagcaggctgtaaatgaagcttctttcttttgtcctgatgaactaggatggcaaccaatgcgaca

SEQ ID NO: 25495 - DNA, 426 bp, Gossypium hirsutum
  Clone ID: LIB3147-037-Q1-K1-D1
atttcttccagttcttgtggcgcccaaggcccccacccttcttgagcgctgagaaggaggaagagatattaaaatacttgaagaagtacagtaagaagtatgatgcagaggaccaggatgtttcgatgctattgagcgaacaggatagggagaagagaaggatgttgaaggaagaatgggagaagtggataagcgaatggaggcgggcaagtgaggaagagaagttggagaggcagaagttgagggatggagaagcaagtgatgaggaagaggagtacgaggccaaagaagttgaagttgaggaaatcttggacttctccgaagaagtcctttttgaagagtgagttgattgggacaagatttttcagtatgtaggagtggagtagatgatatttcggctatttttattttagaattttgatcatc

SEQ ID NO: 25496 - DNA, 239 bp, Gossypium hirsutum
  Clone ID: LIB3147-037-Q1-K1-D10
aaaaaagaaaaaatatatgagagatttttttatgtaaaaggaatttttgtgcaagtgaaaggtaaaagaggaaatgggcgggtgacattaagggtggtgtttgattggaacaaggcaaataacgggtttatgagttataacttgacgctgttaggaatcctaaaaaggagcttcagtatagaaatttggttgcagtgaactacacttttcgtgtaatatatcattatgatatttctttt

SEQ ID NO: 25497 - DNA, 427 bp, Gossypium hirsutum
  Clone ID: LIB3147-037-Q1-K1-D11
cccacgcgtccgccggctttacaacaacaaatgatccaacaacttctccaggagatgtctaataacaacacgggagttcaacagcagtccgtgaatgggcagaatgagaatggaagtgcggggagaaacacctctgctctggctacagctacctctaccgtgtctggaagtgttgcagggcctgcactgagtcaaagcaacagtttcaaagccacttcaaacgacaactctttagctgccggtggcgacaacagattcaaccgaggacaacctgatttgccccagaatctccattcacaggacgatacagttccggatatagcaaatgatttcatggataatgggttttttaacaatgaccttgactataatattggttatggctggaaggcatgactaacataattttgccccatatcattgactt

SEQ ID NO: 25498 - DNA, 439 bp, Gossypium hirsutum
  Clone ID: LIB3147-037-Q1-K1-D12
attacaattaccatggggatttgccaagggctcttgagcactttctggaatgtgaaaattggcaaaaggctcattctattttcatgacttcagttgctcatgaattgttcttgtctgccaaggactcagaggtatggaggattgccacatccatggagaaccacaagtctgaaattgaaaattgggatttgggagctggaatatatatttcattctatgtgctaagaagttcattccaggacgataacaatactatggctgaacttggttccctcgacagcaaaaatgctgcttgtagagactttcttggctgtttgaatgagtcctcagcagtttggggtggcaggttacatgttgatgctagggtagcatattcaaagatggcggatgaggtatgcaatttgttgctttcagatacaagcggaagtcgaacgcatga

SEQ ID NO: 25499 - DNA, 411 bp, Gossypium hirsutum
  unsure (1)..(411): unsure at all n locations; Clone ID: LIB3147-037-Q1-K1-D3
cggacgcgtgggcggacgcgtgggctggatccaatgtaaacctattgagcataccaaacatgctttgggaacttgccctcatgtctgtcggatacagaactcaaatgtggaaaattaactcctgaggttgggattttcccgaatccatcaagcaaacaatgaatgaagagaagcaattagccgattcgataacattaggttgaaagcattcttttaggaaaaaaggaatttacagtcagctgattgcagcttatcctagcttttttcattatacaatatcacagccagaacatgcagtttttttcagttgtaatagtgaggtaacactttaatgttttcttacatttttagtgttccaacttcttgaattccaaannnnaaaannnnnnnnnnaaaaaaaannnnnccccc

SEQ ID NO: 25500 - DNA, 394 bp, Gossypium hirsutum
  unsure (1)..(394): unsure at all n locations; Clone ID: LIB3147-037-Q1-K1-D4
gcaagaagaagcgctaagtatagtagatgtgctgagaaaagccgacctttctttttgtttgcagttaaataaggttgccctttgttgttgctttttaatttttcttttattacggntagaacatatgttatcgggaatttctattcaaatgagtttagcacaacaagaatcaactgattcctagttcctagggctagtaaacttgactgaaacaagtaatgctaggagtggattaagtaatattacagtgatgggttgacaattttgaaatttcccanacaaaagaaaagtaacaataccttacccgatcaacacttacactaactgcaaaaatgtgaaatgagatggatgaagagagggttttgcagcagcttgaaagaaatataatataaag

SEQ ID NO: 25501 - DNA, 440 bp, Gossypium hirsutum
  Clone ID: LIB3147-037-Q1-K1-D5
gtgcttctaaacaacacatctggccaagcttagaagagtgcagtcccaaatctaacactgaggggctttgatttcattgaaagagtgaagagcctcctcgaagccgaatgccctggcgttgtctcttgtgccgatatcctcactttggttgccagagactctgtagtaaccactggaggtccattttggaatgttccaacaggaagaagagacggtgtgatatccaatatcaccgaagcaaataccaacattccaagccctttccacaacttcactactctccttactcttttcagtaaccaaggacttaacttgaccgacttagttctcctatctggtggtcacaccatcggcatatcccattgcccggctgtttcgcgccgactgtacaattccaccggccccggcggaatcgacccaaccatggacagcgagtacgc

SEQ ID NO: 25502 - DNA, 376 bp, Gossypium hirsutum
  Clone ID: LIB3147-037-Q1-K1-D6
cccacgcgtccggtgggatactgtagtttccttggcacggctttatgatctgttgtttggattgattgtcatagctcctgtggcattggtatcgtggttgcctggattccaagccatgcagacaagaatcttattcaatgaggcattcagcagaggtttgcagatttctcgcattatttccggcaaaaagtccacagcatgatgttaaggtaacatttgcatccgtagttcagtttaaacatttgcatttattgtccagtaatatttgttctgtctatgcgtgtatagttggcgtttgctctggatggcatgttttgttttgtgtacatgtatgttttgactcaagttgaatttgccaaagttttttttatgcgag

SEQ ID NO: 25503 - DNA, 318 bp, Gossypium hirsutum
  Clone ID: LIB3147-037-Q1-K1-D7
cccacgcgtccgaaaagactctcactatctagatgctgacgcccgctcgaaggctgtggattaaagttcaatcaatgttcttgacgagcttcgcggtggcgacagcattggctactcgctggcagacctgctcggcttggttacaataaccctgggctccaccgatcacactggagttgtttggatgtctaaagcttgggctgagcttgtttgccctttttcttaatgttctatttttctgggctttggatgtacacatttatgagttaatgaaatgatttgaatttacttaattaataattttaatatttttattat

SEQ ID NO: 25504 - DNA, 429 bp, Gossypium hirsutum
  Clone ID: LIB3147-037-Q1-K1-D8
gcgtggacagcctttctgtaactttttcatttcatgcctggtaatggcctttgtactgccgtggttcttccgtgtgaatatgttttagcaaaggtgtgaaccggacataacgttcgtcctctgcaccaccttttcttgccttcctgtcgggtcagcttctcctgtcgaatttgaatggatatgaaataactcgtcagtgaagctacattacgggttgtttccggttttcaatacccatatagacaaaccataaagattgagttttcaaatttcagaagtagccatccatgccccaattcttttactgtgacaaaattgtatttgctgcttgcaatattacttgtttggtatttgtgcctttcagcttaaagtcaaagcttaagcaaaagatggcttcggctgtataactgtattacagtgagaagtttt

SEQ ID NO: 25505 - DNA, 412 bp, Gossypium hirsutum
  unsure (1)..(412): unsure at all n locations; Clone ID: LIB3147-037-Q1-K1-D9
cccacgcgtccgttctcgctctctagggttttcgtggtcaagtaaaaaaaatgaaggtggtagctgcctacttgcttgccgtcttgggagggaacctttccccttctgccgatgatttgaaggatattctcggatctgttggagctgaggctgatgatgataggatagagttgctattgtccgaagtcaaaggcaaagatatcaccgagctaattgcatctggaagggagaagttggcttcagtcccttcaggtgggggtgctgttgctgctgctcctaccgcangtggcggtggtgccagtgctgcaccagctgctgaggccaagaaagaggagaaggtcgaagagaaggaagagtccgatgatgatatgggtttcagcctcttcgattaagccaagtaatgcagatgtca

SEQ ID NO: 25506 - DNA, 313 bp, Gossypium hirsutum
  Clone ID: LIB3147-037-Q1-K1-E1
cccacgcgtccgggttttgaaacaggtcggagcatatccggatgtcgtaaaggctaaggacagtcaaggaatccgacccgggaaagggaaaatgaggaaccggaggtacatttctcgtaaaggtcctttgattgtttatggaaccgaggggtcaaagctcgttaaggcctttaggaacattcctggagttgaggttgccaatgtggagaggcttaatcttttgaaactcgcccctggtggacaccttgggcggttcattatttggaccaaatcagcttacgagaagcttgactcagtttatggatcattcgag

SEQ ID NO: 25507 - DNA, 441 bp, Gossypium hirsutum
  Clone ID: LIB3147-037-Q1-K1-E10
ctttgcaaaaaagttactgattcatgttctttgggatggaacaagaagtaggggaggccgtgattcagctggggaactcagatggttctaattctagcagctcagatcccgtaactcgtgtaaggaagctattgtttcgccggatgctggtggggatcaaagacggccggtttttcttgggcactttccactgccttgacaagcaagggaatatcattctccaagatacaatagagtatcgtagtacccgtcggtcttctccgtctcctatggagcaacgatgccttggtcttgttctcatcccttcctcttgtcagaactcctgtcatgtggattgctccgtcgaggaacagttgtcactgctgaaggtataagaaactagaatcttatgttcccataaaatctatgtttgaaagaaacaacagttttcatgcaagtatt

SEQ ID NO: 25508 - DNA, 87 bp, Gossypium hirsutum
  Clone ID: LIB3147-037-Q1-K1-E11
cccacgcgtccgaaaaaaaaaaaaatttattaaaaaaaaaaaaaaaaaaaaaaaaaaaaaggaaaaaaaaaaaaatttagatcgcga

SEQ ID NO: 25509 - DNA, 407 bp, Gossypium hirsutum
  unsure (1)..(407): unsure at all n locations; Clone ID: LIB3147-037-Q1-K1-E12
cccacgcgtccgcggtgatatttaccctcttggagttaagcaacaggggatcttaataaatgggcagtttccagggcctcatatcgatgcagttactaatgacaacttgattatcagtgtttataactacttaaatgaaccattccttatctcttggaacggtgtgcagcaaaggaggaactcatggcaggatggagtttctggcacaaactgtccaattcgaccggggaaaaacttcacttacgttctccaagtgaaagatcagattggtagcttttactacttcccatcacttttattccataaggctgccggagggtacggtgctatcagaatctggangccgcccaagatccctgtacctttccctagtcctgctggggatttcactgtactggctggggact

SEQ ID NO: 25510 - DNA, 296 bp, Gossypium hirsutum
  Clone ID: LIB3147-037-Q1-K1-E2
cgattgtttgtactcggctagctaggcggctgatggctccagcatactaacccatgggagtgcgtgagccattgaccgtctcagatgcacactctcggttctgataatgtcccgcacagggattgtctcatcattgggaaagcgacctcgcacttgaaccaacggatgatcgtcgtggcccttgttttgatgaaagtgagccgtaacgagttctcgaagacttctgcgtatagacagttttgtcgagattaccaaaaggtggcttgccacgtgattacgcgatgtgcgttggacat

SEQ ID NO: 25511 - DNA, 407 bp, Gossypium hirsutum
  Clone ID: LIB3147-037-Q1-K1-E3
cattgttgctaatggactagctaggaggtgcatcgtgcaagtctcctacgccattggtgtacctgaaccattgtctgtatttgtggacacttacggtactggaaagatcccagacaaggaaattctcaagattgtgaaggagacctttgacttcagaccaggaatgattgccatcaatcttgatcttaagagagggggcaatagcaagttcttgaagactgctgcgtatggtcattttggtcgggatgaccaagatttcacttgcgaggttgtcaagccactcaagtgggacaaggtccaggcttaattggagcttcatcacattgggtctatgtctgatttatttgatctgctgtctgctaccacatgaggctgcttttcttacaatttcctttaatttctttttt

SEQ ID NO: 25512 - DNA, 372 bp, Gossypium hirsutum
  unsure (1)..(372): unsure at all n locations; Clone ID: LIB3147-037-Q1-K1-E4
catgatcatcccagaaaagaaccgccgcgagatctccaagtacctcttccaagagggcgtttgctatgcaaagaaagactataatttggcgaagcaccctgaaattgatgttccaaatcttcaagtaataaagctgatgcaaagcttcaagtcaaaggaatacgtgcgtgaaacttttgcttggatgcattactattggtaccttacaaatgatggcattgagttcttaaagacttacctgaaccttccttctgagattgttcctgctactttgaagaaacaagctaaacctgctggtcgtcccatgggccctcctggtgaccagccacgcggnccaccacgctttggtgagggtgaagaggagattggtga

SEQ ID NO: 25513 - DNA, 448 bp, Gossypium hirsutum
  Clone ID: LIB3147-037-Q1-K1-E5
cccacgcgtccggaaatcagttcaaatgggagatgctgttgctttaataaggggcgagggaaagaatttgcggaggaaagagaaacgagtcaggatcgagcagattagagctaaccttggcctctcagattcacagagaacaccaacgcctggagaatcattgagggatttctatagacgtactaatttgtactggcaaatggctgcccatgaacatactcagcacactggcaaggaactccgtaaagatggttttgatcttgctgaggctcgttacagggaacttaaaccacttcttgacgagttggccatattagaggcagaacagaaggctgaagaggcagaaggaccagaaacaagttcgagaaagagagggaaaaagagagtttaagaatttagcaccctgcatttgcaatactttcagactttgggtaagctgtgaaatttt

SEQ ID NO: 25514 - DNA, 416 bp, Gossypium hirsutum
  Clone ID: LIB3147-037-Q1-K1-E6
catgttgttggttggtatagtaccggcccaaagttgcgggaaaatgacctagacattcatagattgttccacaactatgtcccgaatcctgtcttggtcatcatcgatgtccaacctaaggagttgggtatccctactaaagcctactatgatgttgaagaagttaaagagaatgccactcaaaagagccaaaagattttcgttcatgttccttcagaaattgctgctcatgaagttgaagagatcggagttgagcacttgcttaaggatgtaaaagatacaaccattagtacactcgcaactgaggtaactggaaaactcacagcttttgagggtttagatgcaaggttaaaaagagaacgttcttaccttgacctttgtatcgatgagaagcttccactgaatcatgaaatact

SEQ ID NO: 25515 - DNA, 435 bp, Gossypium hirsutum
  Clone ID: LIB3147-037-Q1-K1-E7
catcgttgctactggactagctaggaggtttatcgcgccagtcttctaccccattggtgtgcctgaaccattgtctgtatttgcggacacttaccgtactgaaaagatcccagacaaggaaagtctcatgattgtgaaagagaccttggacttcaaaccacgaatgagcgtcatcaatcttgatcttaagagagggggcaatagcaagttcttgaagactgctgcgtatggtcattttggtcgggatgaccaaaatttgacttgggaagttgtcaagccactcaagtgggacaaggtacaggcttaattggagcttcatcacattgattctatgtctgatttatttgatctgctgtctgctaccacatgatgctgcttttcttacaatttcctttaattacttttttgagttttgacatcgattacaatgtatat

SEQ ID NO: 25516 - DNA, 316 bp, Gossypium hirsutum
  Clone ID: LIB3147-037-Q1-K1-E8
catcgttggtgccgggctagataggcggcttatctgtccagtctcctaccccattggagtacctggaccatcagtccgtgtctatgcacactgtcacgtctgataatatcccgcacacggatagtcgcaacattgggaaagagaccttgcacttgaaacaacgaatgatcatcgtggaccttgttttgatgaaagggagctgtaacgagttattgaagactgctgcgtatagacagttttgtcgacactaccaaacagtgaattgctacgtcatcaagtcatctgcgtgggtcatggtacatgctccatagatagc

SEQ ID NO: 25517 - DNA, 327 bp, Gossypium hirsutum
  unsure (1)..(327): unsure at all n locations; Clone ID: LIB3147-037-Q1-K1-E9
gccgcctaaaagagagccgggaaatgttgctagaagagcanagcgaaaatgaagactatactttcctccgagacaatggacatccccgacggngttagcattaaggtcaaggctaaggtgatcgaggttgaaggtccaaggggtaagcttacccgcaacttcaagcacgtcaaccttgatttccatctcatcaaggacgaagagaccggcaagcgtaagctcaggatcgaggcttggtttggctccaagaagaccagcgccgccatccgtacagctcttagccacgttgagaacctcatcaccggtgtcactaaaggatacctttac

SEQ ID NO: 25518 - DNA, 194 bp, Gossypium hirsutum
  Clone ID: LIB3147-037-Q1-K1-F1
gatctttgcatggtcagaaatgtggaacatacaagataagatgtgctggatgcttgtcgcatgtcatgagagttatcgaacggcaaagttgaaatataaagcttgtgcatgattactctaacatggaaatcaagcaacacaaaaaattgatatgggctatttctcggccaaccgaccaacacattcaagtgaat

SEQ ID NO: 25519 - DNA, 443 bp, Gossypium hirsutum
  Clone ID: LIB3147-037-Q1-K1-F10
cccacgcgtccgggtgctactccagggttgacgagatcaatgcaagaggttcaattggacaagaatgtaaaattattggactgtcctggtgttgttatgcttaaatctagtggaaatgatgcatcaatagctcttcgaaactgcaaaagaatagaaaagttggatgatccggttgctccagtgaaagagattctcaagctttgtccagagcgactgttggtgacaatatacaagatcccgggctttgaatcagttgacgaattccttcagaatgtagccactgtaaggggtaagctcaaaaaaggtggtattgtggatgtcgaagctgctgcaaggatcattttgcacgattggaatgaaggtaaaattccctattacaccatgcccccgggccgaaatcaagaagagccttcggaggcaaggattgtcacagaacttggaaa

SEQ ID NO: 25520 - DNA, 194 bp, Gossypium hirsutum
  Clone ID: LIB3147-037-Q1-K1-F11
cccacgcgtccgcaaaaatagtccgcgttttagctttggaacattacttacaaactttcaaatgttgagatacattgatgaattgttcaaaaacagagttaatttatactttcccttctgggatttcatctgttattaccattttcatgtaaaagatactgcttatggttttttgagcattcacatgttgtttt

SEQ ID NO: 25521 - DNA, 446 bp, Gossypium hirsutum
  Clone ID: LIB3147-037-Q1-K1-F12
aaaagtcgactctgctcctcggacccttgcatgaatacccagggcattttctgaatacgtgagagcaatcttcatccctcgaataacaacggaggcaatgagcgtacatgagcgtacgtgagcacccttttacacctaaggtttgcaagcgtgggcatgtaattccaggagatatgccagattgtaattgtaacttttgtgagaagttgtaggctctagagtttgttgtaaaattttttagattcggtctgtattaaattactactaggatctagtaaagagtcctataatagtttataagcactacgtacggagaattccctagactgttctcccttccaaacttaaaagtttgcatgacctgtttttgcaagggggatctacaatattttttgagcaacctcgtcatgaaagcatagtccaccttgaagaagttccttcaacgc

SEQ ID NO: 25522 - DNA, 117 bp, Gossypium hirsutum
  Clone ID: LIB3147-037-Q1-K1-F2
attctttcatggcatattttggaatattccatgttttgccattgatattggcaagccggacttggtttcttttttacaaatcttggattccaaaaaaaaaaaaaaaattggtgccag

SEQ ID NO: 25523 - DNA, 199 bp, Gossypium hirsutum
  unsure (1)..(199): unsure at all n locations; Clone ID: LIB3147-037-Q1-K1-F3
cccacgcgtncganacatagtatattgtctttaggagtcaatggcagggattggtaaaacggctccaaatttcgaggacttattgccgccgatggcggaaaagctggggggagccgggctgatgagggagttgtgtaatgggttcaacctgttgatggacgaggagaaaggggtgatcactgcggcaagcttgaaaagg

SEQ ID NO: 25524 - DNA, 176 bp, Gossypium hirsutum
  unsure (1)..(176): unsure at all n locations; Clone ID: LIB3147-037-Q1-K1-F4
gcgtncgccacgcgtncgccacgcgtnncgtttttggtagcttagctcattttagtttagagctttaacaaagtcatccttgtttgataaaatcttattgtttaaagaaataactcggttttgtacaataatgtattgacttctttattaatactttaaacttatctctgtagttt

SEQ ID NO: 25525 - DNA, 446 bp, Gossypium hirsutum
  Clone ID: LIB3147-037-Q1-K1-F5
gtgggatcttccaacgaggatgatgataataacattgtgatgaaatggtttgaggaaaactaccccaaaaggaaccaagaattcgaggtttacagcatcgaagcaactgcaagcatcgatgtttcggattggttgatgatgaatgtaagagaagaagattacgttgtaatgaaagcagaagctgaagtggtggagaagatgatagaaaggaaaacaattggattggtggatgaattgttctttgagtgtaacaatcaatggcaagatgaagtgaagaagaagaagaagaagaagatgaggaaaaagaaaaggaagaagaataaaagggcttattgggaatgtgtagctttgtatggtaggttgagggatgaaggagttgcagtgcatcaatggtgggaatgaaaattaccaattaagtcacgattagaagacagatgctgtctttt

SEQ ID NO: 25526 - DNA, 446 bp, Gossypium hirsutum
  Clone ID: LIB3147-037-Q1-K1-F6
aaggagatgatgtggtttgtgtgattaagaactctgcaacattggctgggtcattgttcactttgcatggctctcaaattcatattggtttgcctaccctcactgataaagacaaggaggttataagtacttggggagttcaaaacaaaattgacttcctctcactatcatacacacgacatgcagaagatgttcgccaagctcgtgagtttctttcaaagttgggtgacctctatcagactcaaatatttgcaaagattgagaacatagagggattaaaccattttgatgagattcttcaggaagcagatggtatcattctttcccgtggaaatttgggcattgatctcccacctgagaaggtgttcttatttcaaaaagctgctctttataagtgtaacatggctggaaagcctgcagttgtcactcgtgttgtggacagtatg

SEQ ID NO: 25527 - DNA, 334 bp, Gossypium hirsutum
  unsure (1)..(334): unsure at all n locations; Clone ID: LIB3147-037-Q1-K1-F8
cccacgcgtccgcccacgcgtccgatctgatgtgggcgactttaagatcccgatatctgcatctatctgcaactacgttgccttcctcctctctcacaaatggctcgtggaagctggggttttcaggtttaaatcagacgttctcttcatccactgtggagagaataagcaatgagttgctgagcctgcaagaggtggagaaggttctaagcgacgtgagagcagacgacgtggcggtggttccggntggtaccaatgcgattgggcagatttcatggtgattgccacccggtaggtccccgtgcacgtaaagacatcgcccagccctatttac

SEQ ID NO: 25528 - DNA, 251 bp, Gossypium hirsutum
  Clone ID: LIB3147-037-Q1-K1-F9
ttatgactggaaggaaacgcggggagcttatatgttcaaagggcgtgtgccagatcttaaaaaagaagaactgaaaatacaggtagaaaatgatagggtgttacctattattggagaaaggtacgtggagaaagaagataagaacgattcctggcaccggcttgaacggtgcatcggcatgtttattacgaggttcacgttgccggaaaatgttaagacgggctacgttaaggcttcaatggaaaatgggg

SEQ ID NO: 25529 - DNA, 402 bp, Gossypium hirsutum
  unsure (1)..(402): unsure at all n locations; Clone ID: LIB3147-037-Q1-K1-G1
cccacgcgtncgcaaaatgaaggtcaaaccgtacattccggatttcaagctagcttttgagcatttctgcattcatgccggaggaagagccgttttggatgaactggagaagaatttgcagctgtctgaatggcacatggaaccatcaagaatgactctctaccggttcgggaacacctcaagcagttctctgtggtacgaattagcttactccgaagctaagggtagaattagaaggggtgacagaacatggcaaatagcatttggttcaggattcaagtgtaacagtgcagtttggaaagctttgaggacgataaatccggtaaaggagaaaaacccatggatggatgagatccataatttcccagttgatgttccaagggtctccaccatctaaatgac

SEQ ID NO: 25530 - DNA, 300 bp, Gossypium hirsutum
  Clone ID: LIB3147-037-Q1-K1-G10
cccacgcgtccggtgaagtgtacgagaaagaaagtgcttgaggtttgatgtagagaattaagaggcaacttgtcggatgttgtatggcaaagagaataacaagaagaatagtgtatgtgttgtatgaaagttaataaatattaagcttaatgcttaaaaattagatggcgtcttgtaccactggtgaattacatttacatttacccttgagtgacccttgcttttgggtttttctttattctcctttccgaggctgatcaagggcattgaatgaatggttattttgttttcttggtattt

SEQ ID NO: 25531 - DNA, 221 bp, Gossypium hirsutum
  Clone ID: LIB3147-037-Q1-K1-G11
caatcttacgtttgttcagctgaattatttttaaatgcattgaattgatgttttgggtgagaaaaaaaaaaaaaaaaggaagaaaaaaaaaaaaaaaaaaaaaaaaaaaaaaaaaaaaaaaaaaaaaaaaaaaaaaaaaaaaaaaaaaaaaaaacaaaaaaaaaaaaaaggcaactaaaaccactaaacaaaacacaaattaaaaaaacactgggaccggc

SEQ ID NO: 25532 - DNA, 441 bp, Gossypium hirsutum
  Clone ID: LIB3147-037-Q1-K1-G12
ggttccttgagacgaactcctccggtgtgttcatgcagatcggagaccatgtccaattcgcttattctcaccataaagagtctcctttacggcccagatcatttgctgtgaaagatgaaatcttctgcttgtttgagggagcccttgataacttggggagtttaaagcagcaatatggtctggcaaagtcggcaaatgaagtgattttggtcattgaagcttacaaggcccttcgtgaccgagcaccttatcctccaaaccatgtggttggccatctaattgggagctttgctttcattgtctttgacaaatccacctccactttgtttgtggcttctgatcaatttggtaaggttcctctctattggggaatcaccgccgacggatatgtggcctttgctgataatgctgaattgctgaaaggtgcctgtggcaaatctc

SEQ ID NO: 25533 - DNA, 428 bp, Gossypium hirsutum
  Clone ID: LIB3147-037-Q1-K1-G3
ctctggcttcgattctccactctttacaatcctggaagacatgctggacatcccggaagaacaagaaaagttccgagcaacccatctcgagcctatgttcgagatgcaaaggccatggctgccactccagctgacgtgatagagtacccaacatcttacgtcttcatcgtggacatgcccggcataaatcacggcgagatcaaggtgcaggttgaaaacgagaatgtgcttgtggtgagcggggagcgaaagcgtgagaaagagaaagatgagaaagaaggggtgaagtatgtgaggatggaaaggagagtgggcaagtttatgaggaagttcgcattgcctgagaatgcgaatatggataagatatctgcagtttgtcaagatggggtggtgagagtgactgtggagaaattacctccacctgaacc

SEQ ID NO: 25534 - DNA, 330 bp, Gossypium hirsutum
  Clone ID: LIB3147-037-Q1-K1-G4
cccacgcgtccggcaagtatgtactcagcaatgcttttaaccggatggtcaacctcggtcggagaaagcggcaagttagtcgacgtaggatggccatcggtgtgggttcggattataactgggtgggcaacagcaggtctctatgtatggtctctagttgctcctattcttttcccagagagggaattttaggtctccaaagtaagttattggccattgttgcaataaatttagtttatatgtgtgtgtgtgatttgactgaccaagatggattaaaaaaaaatattatgtgcgtctcaaaagagaagttgaatatatgtgtgattaatg

SEQ ID NO: 25535 - DNA, 437 bp, Gossypium hirsutum
  Clone ID: LIB3147-037-Q1-K1-G5
cccacgcgtccgattgacatgattgctctttcttttgttcgaaaaggatcagacctcgtggaggttcggaagctgcttggaaagcatgctaagaatattcttctaatgtcgaaggttgaaaatcaagaaggggtagcaaattttgatgacatccttacaaattcagatgcatttatggtggcacgaggtgaccttggaatggagattcccattgaaaagatatttctggcacagaaggtgatgatttacaagtgtaacatccaaggaaaacctgttgtcactgcaacacagatgttggaatccatgataaagtctccccggccaactagggctgaggccactgatgttgccaatgcagttcttgatggcacagactgtgggatgttaagtggtgaaaccgcagctggagcttacccggaacagcaaagtttccattg

SEQ ID NO: 25536 - DNA, 83 bp, Gossypium hirsutum
  Clone ID: LIB3147-037-Q1-K1-G6
gtttttttgtaccaaattgtcactccattaaaatgagagtggctaaactttgctctattttattaatgaagatggtgttgttt

SEQ ID NO: 25537 - DNA, 350 bp, Gossypium hirsutum
  unsure (1)..(350): unsure at all n locations; Clone ID: LIB3147-037-Q1-K1-G7
ccggggtcctgcagaagcagatgagctctttgctaaagccggttatgttcaaacacacggttatatttggattcctcccaccttatagaaacattatatatatttatatatatatagctttgcgatatcctatcaccattgccatagaaagaagttgaggtttgtaacagatacaataaaatgctaagcctaagagctttgtaacttttccctttaaatcatgtttggaacacttttataaagggtctttccttgttatatttacaacttattccaattcggntgagaaaaaagaaagattaaaagaaaaaaaaatacggtaaaggagaaaaacccatggatagataaaa

SEQ ID NO: 25538 - DNA, 438 bp, Gossypium hirsutum
  Clone ID: LIB3147-037-Q1-K1-G8
cccacgcgtccggtttacactgcccgtgactatgctgatatagttgaatatctggttgaccgatggaagttgaaggaactcattggactttcacccgagggccgtgaagctcaggaatttgtgtgtggacttgcaccgagaattagaaagctagaggagagagctcaattgaggaccaaggaatcacccagtgttccattcagttgggtttctggtagagaagtgaagctctaaattggctatcctccaagtgacttgtaatacaagaaagaaacaacagggcttagggaggagcatgatgaaaactgcaactctgtgtttagctggaatgcaataagtggaggaagtgtgtgtgtgctgtttcgttgttacttttcttaaaacaagtaatatcaacatcttcctcctatttgatgaaatgataaacgatatctatag

SEQ ID NO: 25539 - DNA, 358 bp, Gossypium hirsutum
  Clone ID: LIB3147-037-Q1-K1-G9
cccacgcgtccgctttttctattgctattatgttatttacagtagaaactctttgatttacttttattcttgtggttatttcaaagtagatttttacataatcatccatttatgttatgttatgaatgtcgcattgttacgatgtaacctttttcatgttatttctaacatttaataaggatggtaacgaaacgagatagttatatggatattggcttgtcttatccattctgttttttgtttgcattgatgttgaaaatattcacgttcatacatgttggatatatatgtgtaactccacatgttttatactgttccaccttattttatttttattaatgagatttcgatttaatat

SEQ ID NO: 25540 - DNA, 283 bp, Gossypium hirsutum
  unsure (1)..(283): unsure at all n locations; Clone ID: LIB3147-037-Q1-K1-H1
gtactggtttcttagaaggctgtttggctgctctgtgctgttgttgcctgctggatgcttgcttttgagaatccaactctgccaaaagcctcaaatgttgaaaaatcaaatgttcttaccgtctcgcctttttttttttgtttattttctttaaataattaaattggacctttgtttggaattaaactaaactattgtgctattttatattaattcctagttcatggtttttatctgtatatatatttgntctgccgttactcttcctagtaaaggaatattt

SEQ ID NO: 25541 - DNA, 359 bp, Gossypium hirsutum
  Clone ID: LIB3147-037-Q1-K1-H10
agcgaacccatttcacagagctgaaccaaatggctgaggaagccaaaaggagagctgaaattgctaggttgagagaactgcacacactgaaagggcatgtggaatcggtggtgagattgaagaacctggacatagacacaatccagcaagcgtacacggtgtaaggcggtggaatggtattccgaaggaatagtggaaaatgtaatgagagggagcgttttcctgcgagtgaagctctaatatatgtatcttttattaccttaatcccgtccgccattttacaagggaaaggttattgtttatggcattttatgtttatattagtagtaaaaaaccatgtgttttgcttttgttgtagt

SEQ ID NO: 25542 - DNA, 267 bp, Gossypium hirsutum
  Clone ID: LIB3147-037-Q1-K1-H11
atgaaaaaaatattatattacaagctttatttgtctgaggaagccaatactaactggtgaaggtgatactttggaagaactgtgctacaccttactgtcatgtcctttacttgggtagatggtaaaacctgtaattaaactcaaacctacaagcgcactctgtgtatggcaagggattatgctgccgatcctttaaccgaaaataaaacgagagggtgcgactttctgcaagtgaagctgttatatatacatctattattagctcaa

SEQ ID NO: 25543 - DNA, 197 bp, Gossypium hirsutum
  Clone ID: LIB3147-037-Q1-K1-H12
cccacgcgtccgcccacgcgtccggtttaaaatatgagttaagcttgaattttaagattcaaggcttcagtttggtttgttccattttatacttttgtaatatatttttatattatgttttatatcatataaaattaaatatgtaataatacaatattatgtaaatatttgaaataataaataatattaatgggttt

SEQ ID NO: 25544 - DNA, 218 bp, Gossypium hirsutum
  Clone ID: LIB3147-037-Q1-K1-H2
agaaagatgtgtattccgtgggggcactggttcacgaaaaccttactggtaaggtcaaaaaggtggttggaaggttaaaatcccaattccgggggcccaaattcgagccccaaggtacgggtggtgggggccataacttaaccgcttatgaatccttggcccaattctgggtcccttgggatggccgcaaggcttataatgccaactgtcgatcgtgt

SEQ ID NO: 25545 - DNA, 433 bp, Gossypium hirsutum
  unsure (1)..(433): unsure at all n locations; Clone ID: LIB3147-037-Q1-K1-H3
ctgaaatggcgatgaanattttcagcgttttcttctttgctctcctcttcctcgcatctcctttgcttcaagttgctaggtgtcaatcagaagcagaggcagatgttgcagaagctgttgaaggaggtgatctcggtattgttggggaggatgttcaggattttggtgatcctaattacagttcagctcctgaagttaaaactgtttgcgttttccccaaaaatagtgccaaattggttctggctggagaacagactgagctcctcgttgggatggaaaatattggggagtcacctgtgaatgtcattgctatcaaagccagtgttcatcttccttttgatcatcgtatgcttgttcaaaatcttacagcagtggctttcaacaatgctactgtacccccttcagttcaagctactttcccttacgtatttgc

SEQ ID NO: 25546 - DNA, 434 bp, Gossypium hirsutum
  unsure (1)..(434): unsure at all n locations; Clone ID: LIB3147-037-Q1-K1-H4
tggaaaaattttgaatgttgaagttgtggatggaggactagtatgctcaagtggcgtgtatgtagaagaaatgggagataagaatgatgattgttacatagttaatgctgcagtttatgttggttactagttttattcccactgccatcttgagagtttctttcaagtatttggaccatggcatcaagtagacttcagtcttcgggcgcctatgctgaaagttggcatgcttttgacggagaatatttgtataactgcaccatctttatttcctgctgcttgatcctatgtgatgcttttttttttttttgtggaattggtgatttttggaacaccctattttccctagaagaaacaagtataattcttgttatacacgaacagatctttcagacaataataattaattgctaaacatattgcctnnnnnaaaa

SEQ ID NO: 25547 - DNA, 422 bp, Gossypium hirsutum
  Clone ID: LIB3147-037-Q1-K1-H5
gtacactgctgggatcaacttgaacaagccagatttctctgttgctcttttgctgactgataaaggtcaggcattgaaggcatcttatatccattctgtcaaccccttcacttgtgttgccgctgaaatggctcatagattttccacctacgaaaacactttcaccattggaagttctcatgctgtggatccttttaccgtggtaaaaacacggttctctgacaatggaaaggttggaatgctgtgccaacgtgaatggaggcccaagtcacttgtaacattttcggcagagtatgattcaaaggccataaatgcatcccctaagatggggcttgcccttgctctcgagccttgacgggaaggtctcattttggattccatatttttaaattttgatttgaccttttccccgaacccttggg

SEQ ID NO: 25548 - DNA, 334 bp, Gossypium hirsutum
  unsure (1)..(334): unsure at all n locations; Clone ID: LIB3147-037-Q1-K1-H6
aacaaaccctntaattccttctttctttttcttcctttcgattgattttcagagaaaaccatggagtttagacctttagaaatcaaagttatctccgccaaggatcttaaagacgtcaatcttttcactaagatggacgtttacgtcgtcgtttcgatcaacggtgattctcgcacagcgcaaaggactccggtcgacaaggacggtggttcaaacccagagtggaattacaccgtgaggttcaccgtcgatgaagctgccgcccgtcagaatgggcttaccgtcgtgtttacccttaaatcacaacgtcagcttggagataaggatatcggta

SEQ ID NO: 25549 - DNA, 120 bp, Gossypium hirsutum
  Clone ID: LIB3147-037-Q1-K1-H7
agaattctttcatggcatattttgaattatcccatgttttgccattgatattgtcaggcagtacttgctctctttctaccaaatcttgaatccaaaaaaaaaaaaaaaaattgatgcgag

SEQ ID NO: 25550 - DNA, 310 bp, Gossypium hirsutum
  Clone ID: LIB3147-037-Q1-K1-H8
aaaaaaaaaaaatttattaaaaaaatatatttctaaaaaaaaaaaaaaaaaaaaaaaagggggaactttaaagggggggggccgccacttctttccacccaaaaatacaaaccctcccgcccgcaaagcatatctaaaaaaaagggctaccctttccttaccaaccaatctttccaaccctaccatcccaaacagcaacacttttatttaaacccacctaaccctcctcactttccaatactccacaacatccttactgaaaaaactatctgatcctcccccttaccctccacatatcatatcccaatat

SEQ ID NO: 25551 - DNA, 427 bp, Gossypium hirsutum
  Clone ID: LIB3147-037-Q1-K1-H9
cccacgcgtccgatccacaacagctgttgatccattgcttccctgtttcctgtaagcaaaaaagagagaaaatgaaggttgttgctgcttatttgttggctgtacttggaggcaatgcctctccttcagctgatgatcttaagaacattcttgccagcgttggagctgacgctgaagaggaaaggctccagcttcttttatctgaagtgaagggaaaagatataaccgagcttattgcatctgggagggaaaagcttgcctctgttcccagcggtggtggtgttgctgtggcggcatctgcacccggagccgccgccgccgccgctcctgctgcagctgagactaagaaggaagagaaagttgaggagaaagaggaatccgatgatgatatgggcttcagtctcttcgactaaaactaccacgcacc

SEQ ID NO: 25552 - DNA, 361 bp, Gossypium hirsutum
  unsure (1)..(361): unsure at all n locations; Clone ID: LIB3147-037-Q1-K2-A1
cccacgcgtncggttcaaagtctcttgtttgttgcatcccgcaaacattacatggttgatgtagttgtggcatggtacactgttaatttaatggtattcttcatagacaagaaactgccagaattgcctgacagaagcagtggaagctcaccaatgttgctaccattgagcaccaaagacaaggatagtaagcaaagaagagaaccacacgctcttgaatgggaattctgtagatcctgcagattggaggccgagaactcaagtaaatggccagattcacgaagatggcaatggaatccatgatactgcaatgaacggagcatatgtgatggaaattacatgctgtcactataatggggct

SEQ ID NO: 25553 - DNA, 313 bp, Gossypium hirsutum
  unsure (1)..(313): unsure at all n locations; Clone ID: LIB3147-037-Q1-K2-A10
cggacgcgtgggcggacgcgtgggtnctgttagttctgtcctgaagctattatgttccgtgcgaactctgatgatggcggcggcagaccacaaactagcatccgagcaagattcacagttctatcattttatggaactgaaagcactcaggcccttattatgcatacatgacggtgtggatgaaattaatcctctgaatttcctcatggtaatggaaatgtcagatgactcgttgtttttccgctcggataatntcagggctagtgcactgctaactgtgattgaaactttgcaaggatttatcgagatctat

SEQ ID NO: 25554 - DNA, 391 bp, Gossypium hirsutum
  unsure (1)..(391): unsure at all n locations; Clone ID: LIB3147-037-Q1-K2-A11
agctgcaacagttcaccttaataaactagagcgtgaggagcatctcgttgctgcattccgatactttgataaggatggaagtgggtatattacagttgatgagcttcaacaagcttgtgctgagcataacatgacagatgttttgctcgaggatataatcagagaagttgatcaagataatgatggaagaatcgattatggtgaatttgttgccatgatgcaaaaaggcaatgcaggaatcggtagacgaaccatgcgaaacagtgtgaatataagcatgagagatgccccaggtgctatgtaatctccagctgcgcacacatcatgtacagatngtacagcagatccagaagatgatgactcatgacaaaagtgatcgggaaaacgggtt

SEQ ID NO: 25555 - DNA, 398 bp, Gossypium hirsutum
  Clone ID: LIB3147-037-Q1-K2-A12
cccacgcgtccgcccacgcgtccttaatcttccactgaatcatgaaatactgtaccatgtacaggatgtgttcaacttgctgccaaacctaaacgtaaatgacctaatcaaggcttttgcagtaaaaaccaatgatatgatgttggttatatatctgtcatctctcatccgaagtgtcattgcgctccataatttgatcaataacaagatgttaaacaaagaacatgagaaggctgaagatgctaagccaacaactgtccaggctacgagttgaatccgaacataaagtcctaatcatgtcaaaaacttgagcataaggtgctattaacttccataggatcctctattcttgagattttgtattcttcatagctcaatcagaagatatcagtaggctt

SEQ ID NO: 25556 - DNA, 371 bp, Gossypium hirsutum
  Clone ID: LIB3147-037-Q1-K2-A2
acccacgcgtccgccaaacgggcgctcattttaagacaattttttggtaccctgccccattgagggcgggcacgatgatctgtgcgcaaagcggagcattaatgtttgcactctattcaaaagagcgcgctgctgtatggggatacgctggaggtaacatagccatcatataatacaatggctgtctatattcaacgatcggaactaacaacagatgtggctcgggcaatggcttaccgacactaggcaaacattacagagaagctaatgttgtcgaaaaggagcaatcagagaagtgcattctggtccccaaaacgctaagaattgacaatccaaatgaagcttcaaggagtcccatatgggctacatta

SEQ ID NO: 25557 - DNA, 353 bp, Gossypium hirsutum
  Clone ID: LIB3147-037-Q1-K2-A3
cacccgtccggggaacttataatttgttatcaatttttttaaagctaaaagctgccaaatatttcatgggtttatactttaatttgtatgaatacgtattagccagccttataaattcttccctttgagttcctattagcttggaacatgctgggcctcaattgaaaggatacaccatagcaagttgattgcagattcagttgggttgaggctcatatcatatcctgaattttaaggcccagcagaaaacacccttctaacatcgtctagtaataaaaagcaaatagaaaatgttttcccagatccccttgtattgtaaaaggaaagaaaatcccagcattactttttgcttt

SEQ ID NO: 25558 - DNA, 274 bp, Gossypium hirsutum
  Clone ID: LIB3147-037-Q1-K2-A4
aattccaccagatcagcaaaggttgattttttctgggaaacagctggaagatggaaggactttggctgattacaatattcaaaaggagtccactcttcaccttgttcttcgtcttcgtggtgggttctaagccttaaggtcttccttaatgtgggttttctggttttacgtgaaggattgtgccctttgatggccttttaaataatttctagtctttgtttaccggttgcatctatgtatggtttctctttgaatggaatttgcatatttacct

SEQ ID NO: 25559 - DNA, 202 bp, Gossypium hirsutum
  Clone ID: LIB3147-037-Q1-K2-A5
ttggtgaccttcatgaaaaggtacatcaagaacttgacacccaaatatgagcctgaaaagcaagagtctttcaagaagaacatcgagggggctactaaatttttgatgtcgaagcttaaagatctccaattttttgtgggtgagagcatgcatgatgatggtagcctagtgtttgcatactacaaggacggtgccaccgatc

SEQ ID NO: 25560 - DNA, 381 bp, Gossypium hirsutum
  Clone ID: LIB3147-037-Q1-K2-A6
cggacgcgtgggatgcaagtgcatcgttttcttcagtctatcagcaggccattggaaaatggccatcctagatcgtgtggatgggccttttagcagagtttgtaagacattgttctacttgagtttctccacattgaaggtatggaaccggttacaaatttgcgtacctctttagccggagaaaatcatacaaggaagaagctggtggtaaaatgataacaagagcaaatgctctgtagctacagggactttctggcaaagcaaagaagctgaaagcatgcatggctgtgagtggtgtgtagcttcaccagattttttccttccattttggtaattggacattataacattacaataaaagttccaatggtttaattgaat

SEQ ID NO: 25561 - DNA, 409 bp, Gossypium hirsutum
  Clone ID: LIB3147-037-Q1-K2-A7
ctcgagttggaaagttctgatacgttttattatgtcaaggccaagatccaagacaggggagggatccctccagaccaacggaggcttatctttgcaggtaaacagcttgaagatggccgaactcttgcggattacaacatccagaaagagtctaccctccaccttgtccttcgtcttaggggtgggatgcagatccttgtaaaaacccttactggtaagaccatcacccttgaggtggagagctccgatactatcgataatgtcaaggccaagatccaagacaaggaagggattccaccagatcagcagaggttgatttttgccggaaagcagctcgaggatgggaggacacttgcggattataacatccaaaaggagtcaaccctgcacttggtgctgcgactgcgtg

SEQ ID NO: 25562 - DNA, 283 bp, Gossypium hirsutum
  Clone ID: LIB3147-037-Q1-K2-A8
cccacgcgtccggcgggattaccctgtttattttaagcatatcaataagcggaggaaaggaaacttaccaggattcccggagtaacggcgagcgaaccgggaaaagcccagcttgagaatcggtcgccatcggcgtccgaattgtagtctggagaagcgtactcagcgacggaccgggcccaagtcctctggaaaggggcgccggaaagggtgagagccccgtcgtgcccggaccctgtcgcaccaagaagcgctgtctacgagtcgggttgtttgggaatgc

SEQ ID NO: 25563 - DNA, 396 bp, Gossypium hirsutum
  Clone ID: LIB3147-037-Q1-K2-A9
aaaaaaattcaacggccgaccgtttgttttgttccggagacgtttcacatctcatttgaccagatctcaactcttcctgggccgggtttatttgttcttccttgttttttggctgttttcaataaatttcttctatttttccatggctgctccacctgcaagagctcgagccgattacgactatctcataaagctccttttgatcggcgacagcggtgtgggtaagagttgccttcttttgcgtttttcggatggctcatttactacaagttttatcacaaccattggaatcgactttaagattaggactatagagcttgatggaaaaagaatcaaactgcaaatttgggatactgctgggcaagagcggtttcggactattacaactgcttacta

SEQ ID NO: 25564 - DNA, 416 bp, Gossypium hirsutum
  Clone ID: LIB3147-037-Q1-K2-B1
gtgcctacttgaataataataacaccttattttagactccaataattatcttgctatgcctgacctcttttcagctattctggcttgttctgaagaagcctttcataaagaaaaaggtacagttagttgagatcatctctctttcgtgtgaggtggccatgtttgctacttgtttcgttctgttggacaaggaattttcgactacaatcggtatcttcatgcttactttattcctgattgggttcttagcacaaatgagtgctgaaaggtatgctttgtatgaacaaacaaagcaactagacaccagtgagaacaagttcttcacaggtttgaaaatagcatcagtcgggtttctcctatatttcgtccctcagaaactgatgaaaagctttgagagcacattcccagtatttgga

SEQ ID NO: 25565 - DNA, 382 bp, Gossypium hirsutum
  Clone ID: LIB3147-037-Q1-K2-B10
caaggtttccgggttgcatatgatttattgggttctcgtgtcgggttttctccccgtggatgcgcctaaaaatggcggtgcttttaatttttatattaagggacaaagctctatccctatctctatattattttccttggatatttttgggggagggtaagaaaggaagaaacataataatgttttcatagataagaatgtaagggaaagatgatgaccaggaaaggcgggttgctggttagaagtagagaatgtcgttcggcgggttttcggttttcacgtgttcgccattgtacttttgaaacaaaagaaatggcatgtccaaaaaagttatatatatttttaatttttaatttaataaaaaagattaatggaatcaccc

SEQ ID NO: 25566 - DNA, 349 bp, Gossypium hirsutum
  unsure (1)..(349): unsure at all n locations; Clone ID: LIB3147-037-Q1-K2-B11
gaggtactgatgaaatatttaaagtttgtatggacctacataatttcgttaagagagcgttgcctgaaagattatcccagatttgggacanaaaaaaaaaaaaaaaaaaaaaataaaaaaaataaaaaataaaacaaacaaatatttaaaaaaggaggaaatcatacaattaatgggtaaaacttactctatacaatgcaatgtgcagtgcaagcacgacacattgatttccgctactgctttttactcagttgaaacagagcgggaacttttatcgatcaaatttatgttaaaaagattgcatcataaagatacatacattttgggaagatgtttctgtatatatcaa

SEQ ID NO: 25567 - DNA, 371 bp, Gossypium hirsutum
  unsure (1)..(371): unsure at all n locations; Clone ID: LIB3147-037-Q1-K2-B2
cccacgcgtncgtgtaatgccagttttacggtaagttttgcatcggcgggaactgaaaatatcggcaatttttttcttgtttgtgtttaattaatattgttaatgagtgaagttaagaatattaaacatctccgtcacagtaacggtgacggacgagtttgggtacgtgttttatgctggatcatgcttatatgtttgttttcgtgaaggcacgtgataagaacatttcaaaaggctaagttgttttattttatatttttttcttaataacatggtaaaaggttttttaccctactttagattcttattgnnaaaaaaaaaaaaaaaaaaaaaaaaaaaaaaaaaaaaaaaaaaannnnanaaccccaacc

SEQ ID NO: 25568 - DNA, 192 bp, Gossypium hirsutum
  Clone ID: LIB3147-037-Q1-K2-B3
aaaacattgcccgatgttattattttcttttctgcgtgagccgaggatcatacgtgttggcatcatgaaaatcgtgtttaatgcacctattaaggctcacaattatgctcaacctcatttccaaacaactggatcaccgacggaatttatataccgtttctatttcctttttgactgcaaccttgtgacaca

SEQ ID NO: 25569 - DNA, 406 bp, Gossypium hirsutum
  unsure (1)..(406): unsure at all n locations; Clone ID: LIB3147-037-Q1-K2-B4
cttgtcagctgatgtgagaaagaaggcttattcactagataggttttgcaggccaataatgacgaaacctaaaccaactaagccagcctcgcctgaaacacgagctaacccaccacctcagggggagggtcagtcccaaggagcggatgccaatgcaagccctaaccacaacaatgtgcctggtgaaaatgcaacggcaggcagtggtaaggcagctcctgcttctgcagaaccaatggaaactgacaaatctgaaactgcttcgactactgcataattcagtagcttggtggtctgttgatgatatatgtggccaaaatttccgttcctatgtacaaccgctattttcggaaccactattttaagaaaggcttgngttcggctgtgttattcgggtcataatttt

SEQ ID NO: 25570 - DNA, 377 bp, Gossypium hirsutum
  unsure (1)..(377): unsure at all n locations; Clone ID: LIB3147-037-Q1-K2-B5
cccacgcgtccgcccacgcgtncgggtttattcattcttttatgttgccagtccaaaagctggtgctgcaattttgtggaagactgccaaagcttcgcctaaggcagctgagaagcctgcactttcttcaaccagcaaccaagggataagaagtcccaaacagagcatgaaaagcatgtgatggatctgcatggggaagtgatggcatgtgcatacgaagatgtccaagtcatgtggtccattcttgacaagtccaagtccatggcttgtaacatcaagccttaagattccctttttaccctttctctttttttttcttaaatttaaattttctttattttattttgcatgtgatgtaaataaagctacaaaatcga

SEQ ID NO: 25571 - DNA, 424 bp, Gossypium hirsutum
  Clone ID: LIB3147-037-Q1-K2-B6
cccacgcgtacgcccacgcgtccgccgttatttcacagcgcagcaatgggtgaggaagtagaggctttggttcctgagtcactgttgaagaacaacaagaggaatgaagaatgggagcttgccaaaaagcacgagctcgaagccgcgaagaataagaaagtcgagaaccggaagttgattttcaacagggctaagcaatatgcaaaggagtacgaggctcacgaaaaagagttgattcaattgaagcgggaggcgaagttgaaaggaggattctatgttgatccagaagctaagcttttgttcattgttagaatccgcggtatcaatgccatgcacccgaagaccagaaagatcttgcagctactacgtttgagacagattttcaatggtgtgtttcttaaagtgaacaaggcaacaatgaaca

SEQ ID NO: 25572 - DNA, 409 bp, Gossypium hirsutum
  Clone ID: LIB3147-037-Q1-K2-B7
tggagatccaagtcattggtggattattttctgacaaggttgattttgcttacaagtggtttgagaagcaagtccgcatggatgctgatttccagaaggatgaaatgattgatatcattggtgtcacaaaaggtaaaggttatgaaggtgttgtcactcggtggggtgtcacgcgtctgccccgtaagacccacagaggtctgcgtaaggttgcttgtattggtgcctggcatcctgccagagtctcctttacagttgccagggcaggtcagaatggataccaccaccgtactgagatgaacaagaaggtctacaaggttggcaaggttggtgatgagacccactctgccataactgattatgacaggactgagaaagatattaccccaattggtgggttccctcacta

SEQ ID NO: 25573 - DNA, 255 bp, Gossypium hirsutum
  Clone ID: LIB3147-037-Q1-K2-B8
gccaacgtccgaccacacgttcatcattatagctagcagaatatacaaccggcagagacttttgctcttgaacttgtgtgtgtatcaaacccaaacgataatgttctggacacattgatcatgcttagtcatgattcagattcacaagttgcaaagggagcaaatatctccttgggtataataagggctggaaccaataatgctcgcattgctggcatgctacgcaaacttacaagatattactacaaggatgct

SEQ ID NO: 25574 - DNA, 299 bp, Gossypium hirsutum
  Clone ID: LIB3147-037-Q1-K2-B9
cacttttgacggacccaaatcccgatgttcccttggtgccagagattgcccacatgtacaagaccgacagggctaagtacgagacaactgctcggagctggacccagaagtatgctatgggttagtgtgctaatatgcatataataggagggctttattctatgtggctttgatcttcaatttaatatgtatgaatcaatgaaacagtatgtgtgatctgtctctccaactatgtactggaccaatccctccttaaaacacatttgttgccttaattgtttgtatggaaattatgtttc

SEQ ID NO: 25575 - DNA, 408 bp, Gossypium hirsutum
  Clone ID: LIB3147-037-Q1-K2-C10
ttccaataggtgcgattttggtaattgttatagttgcttctgccatagcccatggggaccatggaagtacttttgcaggttcacctcttgtttgcagagctgcaatttctgttttcaataaaattgcaaaccccagtttcttgtccagcgtctcgaagaaaggtgattacatgaaagaattgttgaaccagaagctcggagggaatccccacgtgaaagaaatacgaagatggggtcttatgattgggatagagttggatgtgtctgcttcgccccttgtagatgcgtgccgaaattctggacttattgtattgactgcaaggaaaggaaatgtggtgagactggtgccaccattgatcatctcagacgaagaattgaaacatgcagctgagattcttcatgaatgtt

SEQ ID NO: 25576 - DNA, 333 bp, Gossypium hirsutum
  unsure (1)..(333): unsure at all n locations; Clone ID: LIB3147-037-Q1-K2-C11
attctatagctttcatctacattttgttctagaaattatagtaaagcagagacaatgagaggaacattgatgttgagttggattctgatcatctgcctctcccaagtagcagtgcagagccaatactactcgaagagccgaccatatcatcccaggccacctaaggtcaccaatcttcacttctttatgcacgaacatacgggtgttactgcagtcgtggtagcccaagctaacatctcaagcaataattcatcagtgccatttgccaccctagttgccgttaatgatcccctcangactggtcctgagcctgactcaaaggtaattggaaat

SEQ ID NO: 25577 - DNA, 333 bp, Gossypium hirsutum
  Clone ID: LIB3147-037-Q1-K2-C12
cccacgcgtccggcaaattaaggttagttcgttaatatgtagctgaatgtgtggaaaagcgtagttttccttagctgtgggccttaaggcaacttaaaataggtggtagttgaatgtgtggaaaagtgtagttttccttagctgtttcccttaacgcaacttaaaataggtggtagttgaatgtgtggaaaagtgtagtttcccttggctgtttctagtgtacattaagtccaggcataaaatacgttggtttgaatctttgatttgtacttttcaggatggcaatggcagccaatactggaccttatatatatgcatactgaactgaatgtt

SEQ ID NO: 25578 - DNA, 384 bp, Gossypium hirsutum
  Clone ID: LIB3147-037-Q1-K2-C2
cccacgcgtccgaaacctttctacaagtcggtttcaattcctgaaacaaacaatggggatgggaaagtattggttggcaatagctttgatgaaatcgtattagatgagtcaaaggatgtccttcttgagatctatgcaccttggtgtggccattgccaagcacttgagccgacatacaacaagcttgccaaacatctccgcggcattgactctttggttattgctaaaatggatggtacaacaaatgaacatcctatggcaaagtccgatgggttcccgacaattctgttcttcccggcaggaaacaagagttttgatcccataactgtggacactgatcgaactgtcgtggcattttataaagttcctaaagaaacatgcatc

SEQ ID NO: 25579 - DNA, 378 bp, Gossypium hirsutum
  Clone ID: LIB3147-037-Q1-K2-C3
cccacgcgtccgcccacgcgtccggttttaaacgacgacatcaaggaattgttttctgagggtggtgacctgaaacgattttcggtccactatgataggagcgggagatcaaagggaacagcagatattgtcttcacacggcgagcagatgctttggctgcagtaaagaggtacaacaatgttgagctcgatgggaagccgatgaaaatcgagattgttggaacaaacatcgctacccctcctgcacctttaagagctaatggtgcctttcgaagttctaatggagccattaaaggtggccaaagcaagggtggtggatttggtaagcaacgtggtggtggtgctgctggaaaaagctgtggacgaaggaaaggtcgt

SEQ ID NO: 25580 - DNA, 286 bp, Gossypium hirsutum
  Clone ID: LIB3147-037-Q1-K2-C4
cccacgcgtacgcttattcttgcgccctttcttgtttctataaagacacaccctgaagcgaggcggcctttaatatgatcgtgggcgccatccatgaatctcgacgacccaaatccgaattcaactctgatgatggccgaagctcttaatactagcaaacttctgcggactgaaacactgggcatggtcaaaggccggaatttaaccattaacatcaacctaatttcgaacccgagcggatatcagaatttgagcaaactacaacaactgagtttgcattttagaa

SEQ ID NO: 25581 - DNA, 310 bp, Gossypium hirsutum
  unsure (1)..(310): unsure at all n locations; Clone ID: LIB3147-037-Q1-K2-C6
ccacgcgtccgggccgccctttttttttttttaaaaatttattantataacaaaaaaaaaaaaaaaacgcgcgcgttttataaaatgatcggcggccaaacaaacaacanccaaacccaaatctctaaacaaacccaaaacaaaatttaaaaaaaaactttcatcccaaaccacctaacgacacccaacttaaccccaaaatccaccaaactaaccaaaaaaataaaaagcttatcctttcaccccccaaaaaaaaaaacaaacaaaaaaantaaatttgccaccctagttgccgttaatgatcccctca

SEQ ID NO: 25582 - DNA, 412 bp, Gossypium hirsutum
  Clone ID: LIB3147-037-Q1-K2-C8
ccacgcgtccgcattacttcgttttgttttttttgctttgctctgaaactccaagcgggcatcaatggcggatccagcgactatctcaccagccacgctgttgaaagatgagcttgacatcgtgattcccaccattaggaacttggatttcttggagatgtggagaccctttttccaaccttaccatctcatcatagttcaagatggcgatccttcaaaggccatcaaagttcctgaaggctttgattacgagctttacaacaggaacgatatcaataggattttgggtcctaaagcttcttgcatctctttcaaggactctgcttgtcggtgctttggatacatggtttccaagaagaagtacatctataccattgacgacgattgtttcgttgctaaagatccatctgga

SEQ ID NO: 25583 - DNA, 405 bp, Gossypium hirsutum
  unsure (1)..(405): unsure at all n locations; Clone ID: LIB3147-037-Q1-K2-C9
tcaaactgtatgttgtcccatgtttctttcttgttatttgtatgaggatacatgactgctgttctaaaaaacaaatggctgttactactaaatgttattccgatctaaaataattcatgggactgaatgtaatgtccacataaactatgagaaataacacttgaactatgtatagaagcaaatggcttttgcctgctggtgttacattaaggagttgcactgtccttgagactgctggcaatggtgctcttcccgtgcttctcaaggtcttggaatctggcatctcanggattgacaccaaaaacgaacttgttatatggcttcacttgggggttgatggcggagcacaaaaatttaccctcgaacagcatgctgtaaatgaagcttctttcttttgtcctgatg

SEQ ID NO: 25584 - DNA, 450 bp, Gossypium hirsutum
  unsure (1)..(450): unsure at all n locations; Clone ID: LIB3147-037-Q1-K2-D1
cggaaanaccggcccgacccacgcgtccgatttcttccagttcttgtggcgcccattgcttccacccttcttgagcgctgagaaggaggaagagatattaaaatacttgaagaagtacagtaagaagtatgatgcagaggaccaggatgtttcgatgctattgagcgaacaggatagggagaagagaaggatgttgaaggaagaatgggagaagtggataagcgaatggaggcgggcaagtgaggaagagaagttggagaggcagaagttgagggatggagaagcaagtgatgaggaagaggagtacgaggccaaagaagttgaagttgaagaaatcttggacttctccgaagaagtcctttttgaaaagtgagttgattgggacaagatttttcagtatgtacgagtggagtagatgatatttcggctatttttattttagaattttga

SEQ ID NO: 25585 - DNA, 239 bp, Gossypium hirsutum
  Clone ID: LIB3147-037-Q1-K2-D10
aaaaaagaaaaataatatgagagtttgttttatgtaaaaggaatttttgtgcaagtgagaggtataagaggaaatgggcgggtgacattaagggtggtgtttgattgtaacaaggcaaataacgggtttatgagttataacttgacgctggtaggaatcctaaaagggagcttcagtatagaaatttggttgcagtgaactacacttttcgtgtaatatatcattatgatatttctttt

SEQ ID NO: 25586 - DNA, 407 bp, Gossypium hirsutum
  unsure (1)..(407): unsure at all n locations; Clone ID: LIB3147-037-Q1-K2-D11
cccacgcgtccgccggctttacaacaactaatgatccaacaacttctccaggagatgtgtaataacaacacgggagttcaacagcagtccgtgaatgggcagaatgagaatggaagtgcggggagaaacacctctgctctggctacagctacctctaccgtgtctggaagtgttgcagggcctgcactgagtcaaagcaacagtttcaaagccacttcaaacgacaactctttagctgccggtggcgacaacagattcaaccgaagacaacctgatttgccccagaatctccattcacaggacgatacagttccggatatagcaaatgatttcatggataatgggttttttaacaatgacctngactataatattggttatggctggaaggcatgactaacataatt

SEQ ID NO: 25587 - DNA, 371 bp, Gossypium hirsutum
  Clone ID: LIB3147-037-Q1-K2-D3
cggacgcgtgggcggacgcgtgggctgttttcaaggtaaacctattgagcataccaaacatgctttgggaacttgccctcatgtctgtcggatacagaactcaaatgtggaaaattaactcctgaggttgggattttcccgaatccatcaagcaaacaatgaatgaagagaagcaattagccgattcgataacattaggttgaaagcattcttttaggaaaaaaggaatttacagtcagctgattgcagcttatcctagcttttttcattatacaatatcacagccagaacatgcagtttttttcagttgtaatagtgaagtaacactttaatgttttcttacatttttagtgttccaacttcttgaattc

SEQ ID NO: 25588 - DNA, 394 bp, Gossypium hirsutum
  unsure (1)..(394): unsure at all n locations; Clone ID: LIB3147-037-Q1-K2-D4
gcaagaagaagcgctaagtatagtagatttgttgagaaaagccgacctttctttttgtgtgcagttaaatagggttgccctgttgttgttgatttttaatttttcttttattacggttagaacatatgttatcgggaatttctattcaaatgagtttagcacaacaagaatcaactgattcctagttcctagggctagtaaacttgactgaaacaagtaatgctaggagtggattaagtaatattacagtgatgggttgacaattttgaaattntcaaaacaaaggaaaagtaacaatactttacccgatcagcacttacactaactgcaaaaatgtgaagtgcgaattggatgaaaagaaggttatgcaacggccttgaaggaaatataaaaa

SEQ ID NO: 25589 - DNA, 365 bp, Gossypium hirsutum
  unsure (1)..(365): unsure at all n locations; Clone ID: LIB3147-037-Q1-K2-D5
ccacgcgtacggngcttctaaacaacttatttggccattttttgaatacgcaggcccaaatctaacactgaggggcttttattacattgggcgagtgaaaaacctnctcnaagccgaatgccacaacgttaactattgagccaatatcctcactttggctgccagagactctgtattaaccactttaggtccataaaggaatgttccaacaacaacactagacggtgtgatattcaatatcacctaagcaaataccaacattccaagccctttccacaacttcactactctccttactcttttcaagaaccaaagacttaacttgaccgacttaattcttctatctggtggtcacaccatcggca

SEQ ID NO: 25590 - DNA, 181 bp, Gossypium hirsutum
  Clone ID: LIB3147-037-Q1-K2-D6
ttaaataaacagggcctgcactctatcaaaacaacagtttcaaaaccacttcaaacgacaactctttaactgccggaggcgacaacaaatttaacctaggtcaacctaataaacctaaaacacttctttaccagacgccatatttccggatatagcaaatgatttcatggataaagggttt

SEQ ID NO: 25591 - DNA, 318 bp, Gossypium hirsutum
  Clone ID: LIB3147-037-Q1-K2-D7
cccacgcgtccgaaatgactctcactatctagatgctgacgcccgctcgaaggctttggattaaagttcaatcaatgttcttgacgagcttcgcggtggcgacagcattggctcctcgctggcagacctgctcggcttggttacaataaccctgggctccaccgatcacactggagttgtttggatgtctaaagcttgggctgagcttgtttgccctttttcttaatgttctatttttctgggctttggatgtacacatttatgagttaatgaaatgatttgaatttacttaattaataattttaatatttttattat

SEQ ID NO: 25592 - DNA, 218 bp, Gossypium hirsutum
  Clone ID: LIB3147-037-Q1-K2-D9
cccacgcgtccgttctcgctctctagggttttcgtggtcaagtaaaaaaaatgaaggtggtagctgcctacttgcttgccgtcttgggagggaacctttccccttctgccgatgatttgaaggatattctcggatctggtggagcttaagcttatgatgataggatagaagtgctattgtccgaagtcaaaagcaaagatatcaccgagctaattgca

SEQ ID NO: 25593 - DNA, 320 bp, Gossypium hirsutum
  unsure (1)..(320): unsure at all n locations; Clone ID: LIB3147-037-Q1-K2-E10
attacaattaccatgtggaaacgtttgtgttctngagcactnnccggaatgngaaagggggcttaaggctcattctcttttcatgactacagttgctcatgaattgttcttgtctgccaaggactcacaggtatggaggattgccacatccatggagaaccacaagtctgaaattgaaaattgggatttgggagctggaatatatatatcattctatgtgctaagaagttcattccaggacgataacaatactatggctgaacttggttccctcgacagcaaaaatgctgcttgtagagactttcttggctgtttgaatg

SEQ ID NO: 25594 - DNA, 344 bp, Gossypium hirsutum
  Clone ID: LIB3147-037-Q1-K2-E11
aaaaaccggcgcgacccacacaaacgattgacaaaaaaatttctgagaatttgttttttacccgcaacacgaaaaagagggctcgggtattaaacaggcgagcggccaccacaaaaaactaccaacaagatcccgcaacacgtgtcaagaagctattgccacaccggaagctgacccgcaacaaaaaccaccgcaacctctagggcactctccactaccacgacaagcccgggaatctcaatctccaaaacacaacatagtatcgcaccacccagaccacctcccccactcctacagagcaacaacaccttgataaccttctcaccccttccactaaacaaaac

SEQ ID NO: 25595 - DNA, 87 bp, Gossypium hirsutum
  Clone ID: LIB3147-037-Q1-K2-E12
cccacgcgtactaattaaaaaatttattttttaaaaaaaaaaaaaaaaaaaaaaagggggggaaaaaaaaaaaaatgtagggcgcga

SEQ ID NO: 25596 - DNA, 396 bp, Gossypium hirsutum
  unsure (1)..(396): unsure at all n locations; Clone ID: LIB3147-037-Q1-K2-E2
cctgttatgagcctgtatatagaggcttttgttggctccagcatananaccaangagagtggtttggtgtggcaccatggagatgcanaccctgacttcggatcatgccaagccaaggaattgttggatcatttggaaagtgttctcgcaaatgaaccagcggttgtccatagaggccagcatattgttgaagttaagccgcaaggagtaagcaaagggctggtagcagagaaagttttgtcgagaatggtaaatggtgggaagccacctgatttcgtgatgtgtgttggtgatgataaatccgatgaagatatgtttcagagcatattaacttcagtttctaatccattcttgcctgtggctccggaaatctttgcatgcacaagtgggcgaaag

SEQ ID NO: 25597 - DNA, 409 bp, Gossypium hirsutum
  unsure (1)..(409): unsure at all n locations; Clone ID: LIB3147-037-Q1-K2-E3
cattgttgctaatggactagctaggaggtgcatcgtgcaagtctcctacgccattggtgtacctgaaccattgtctgtatttgtggacacttacggtactggaaagatcccagacaaggaaattctcaagattgtgaaggagacctttgacttcagaccaggaatgattgccatcaatcttgatcttaagagagggggcaatagcaggttcttgaagactgctgcgtatggtcattttggtcgggatgaccaagatttcacttgggaggttgtcaagccactcaagtgggacaaggtccaggcttaattggagcttcatcacattggttctatgtctgatttatttgatctgctgtctgctaccacatgangctgcttttcttacaaatttctttaatttcttttttgg

SEQ ID NO: 25598 - DNA, 225 bp, Gossypium hirsutum
  unsure (1)..(225): unsure at all n locations; Clone ID: LIB3147-037-Q1-K2-E4
ctcatgaatagctcttgtctgccaaggactcacaggtatggaggattgccacatccatggagaaccacaagtctgaaattgaaaattgggatttgggagctggaatatatatatcattctatgtgctaagaagttcattccaggacgataacaatactatggctgaactnggttccctcgacagcaaaaatgctgcttgtagagactttcttggctgtttgaatg

SEQ ID NO: 25599 - DNA, 387 bp, Gossypium hirsutum
  unsure (1)..(387): unsure at all n locations; Clone ID: LIB3147-037-Q1-K2-E5
catgatcatcccagaaaagaaccgccgtgtgttctccaagtacctcttccaagagggcgtttgctatgcaaagaaagactataatttggcgaancaccctgaaattgatgttccaaatcttcaagtaataaagctgatgcaaagcttcaagtcaaaggaatacgtgcgtgaaacttttgcttggatgcattactattggtaccttacaaatgatggcattgagttcttaaggacttacctgaaccttccttctgagattgttcctgctactttgaagaaacaagctaaacctgctggtcgtcccatgggccctcctggtgaccgnccacgcggnccaccacgctttggtgaaggtgagaggagatttggtgacagagatggctatcg

SEQ ID NO: 25600 - DNA, 212 bp, Gossypium hirsutum
  Clone ID: LIB3147-037-Q1-K2-E6
attaaagctaaccttggcctctcagattcacagagaacaccaacgcctgaagaataattgagggatttctataaacgtactaatttgtactggcaaatggctgcccatgaacatactcagcacactggcaaggaactccgtaaagatggttttgatcttgctgaggctcgttaaagggaacttaaaccacttcttgaccagttggccatatt

SEQ ID NO: 25601 - DNA, 401 bp, Gossypium hirsutum
  unsure (1)..(401): unsure at all n locations; Clone ID: LIB3147-037-Q1-K2-E7
gaaanaccggcccgacgcacgcgtccggtttctctttgcgcctttcttctttctttcgcagcactgatattgcaggtaagtcatgggtaagcataacaatgtcgtgcgaaatgggcacttcaagaaacactggcagaactatgtgaagacttggttcaatcagccagcacgaaaggctagaagacgaattgccaggcaaaagaaggctgtgaggatctttccaaggccaactgctggaccccttcgccctattgtccatggccagactttgaagtataacatgaagttgagagctggaaagggtttcaccctcgaagagcttaaggctgctggtatttcaaagaaaacttgcaccgaccattggtatcgctgttgatcaccgccgtaagaacaaatcactt

SEQ ID NO: 25602 - DNA, 402 bp, Gossypium hirsutum
  Clone ID: LIB3147-037-Q1-K2-E8
acgggccacagtttgtgcggcgctttgtttgctcttttcccggcgattttgttttaccgcgacgaacagttggtgcttgagagaatggaaggcgtttacacgttcgggcagcccagagttggtgacgaagcctttgccggctacatggagaagaatttgaacaaaaatgggatccagttttacagatatgtttactgtaatgatatagttcctagggttcctttcgacggcatgttcaagcactttggtacctgcgtttactacaacagcaaatatcaagcaaagatagttgaagaagtaccatacttgaactacttctcgctgtttggattctttccgatgcatatgaacgccatttatgaggtgataagaagcttcacaatgaaggttaaatatggagca

SEQ ID NO: 25603 - DNA, 419 bp, Gossypium hirsutum
  Clone ID: LIB3147-037-Q1-K2-E9
gccgcctaaaagagatccgggaatggttgctagaagagcaaagcgaaaatgaagactgtgctttcctccgagacaatggacatccccgacggggttagcattaaggtcaaggctaaggtgatcgaggttgaaggtccaaggggtaagcttacccgcaacttcaagcacgtcaaccttgatttccatctcatcaaggacgaagagaccggcaagcgtaagctcaggatcgaggcttggtttggctccaggaagaccagcgccgccatccgtacagctcttagccacgttgagaacctcatcaccggtgtcactaaaggatacctttacaagatgaggttcgtctacgctcactttccgattaatgcctccatcactaatggcaacaagtcgatcgagatccgtaacttccttggcgagaa

SEQ ID NO: 25604 - DNA, 412 bp, Gossypium hirsutum
  unsure (1)..(412): unsure at all n locations; Clone ID: LIB3147-037-Q1-K2-F10
cccacgcgtccgcggtgaaaaanttctttttttagcnaagcaacaggggancngaagggangggctaaaaggagggcctgggatcaaaacagnnaccaaagacaacnngannatcagnngggataacnacccaaangaaccannccggancncncggaacggngngcagcaaaggaggaacccaaggcagganggagnnncnggcacaaacngnccaanncgaccggggaaaaacnncacttacgttctccaagtgaaagatcagattggtagcttttactacttcccatcacttttattccataaggctgccggaaggtacggtgctatcagaatctggagccgccccaagatccctgtacctttccctaatcctggtggggatttcactgtactggctggggactggtat

SEQ ID NO: 25605 - DNA, 388 bp, Gossypium hirsutum
  Clone ID: LIB3147-037-Q1-K2-F11
cccacgcgtccttgttctactcctttgtttattagaccaatgcaagaggttcaattgggcaagaatgtaaaattattgggctgtcctgatgttgttatgcttaaatctagtggaaatgatgcatcaatagctcttcgaaactgcaaaagaatagaaaagttggatgatccggttgctccagtgaaagagattctcaagctttgtccagagcgactgttggtgacaatatacaagatcccgggctttgaatcagttgacgaattccttcagaatgtaaccacttgaaggggtaagctcaaaaaaggtggtattgtggatgtcgaagctgctgcaaggatcattttgcacgattggaatgaaagtaaaattccctattacaccatgcccc

SEQ ID NO: 25606 - DNA, 194 bp, Gossypium hirsutum
  Clone ID: LIB3147-037-Q1-K2-F12
cccacgcgtccgcaaaaatagtccgtgttttagctttggaacattacttacaaactttcaaatgttgagatacattgatgaattgttcaaaaacagagttaatttatactttcccttctgggatttcatctgttattaccattttcatgtaaaagatactgcttatggttttttgagcattcacatgttgtttt

SEQ ID NO: 25607 - DNA, 120 bp, Gossypium hirsutum
  Clone ID: LIB3147-037-Q1-K2-F2
agaattctttcatggcatattttgaaatatttcatgttttgccattgatattgtcaggcaggacttgctctctttctaccaaatcttgaatccaaaaaaaaaaaaaaaaattgatgcgag

SEQ ID NO: 25608 - DNA, 190 bp, Gossypium hirsutum
  Clone ID: LIB3147-037-Q1-K2-F3
cccacgcgtccgaaacatagtatattgttattaggagtcaatggcagggattggtaaaacggctccagatttcgaggacttattgccggcgatggcggagaagctggggggagacgggctgatgagggagttgtgtaatgggttcaagctgttgatggacgaagagaaaagggtgatcactgcggcgagc

SEQ ID NO: 25609 - DNA, 415 bp, Gossypium hirsutum
  Clone ID: LIB3147-037-Q1-K2-F4
gcatgttgttggttggtatagtaccggtcctttttgcgggaaaatgacctagacattcatagattgttccacaactatgtggcgaatcctgtcttggtcatcatcgatgtccaacctaaggagttgggtatccctactaaggcctactatgatgttgaagaggttaaggagaatgccactcaaaagagccaaaagattttcgttcatgttccttcagaaattgctgctcatgaagttgaagagatcggagttgagcacttgctaagggatgtaaaagatacaaccattagtacactcgcaactgaagtaactggaaaactcacagctttgaaaggtttagatgcaaggttaaaagagatacgttcttaccttgacctttgtatcgatgagaagcttcactgaatcatgaaatact

SEQ ID NO: 25610 - DNA, 170 bp, Gossypium hirsutum
  unsure (1)..(170): unsure at all n locations; Clone ID: LIB3147-037-Q1-K2-F5
cccacgcgtncgcccacgcgtncgcttttgttatcttagctcattttagtttagagctttaacaaagtcatccttgtttgagaaaatcttattgtttaaagaaataactcggttttgtacaataatgtattgacttctttattaatactttaaacttatctctgtagttt

SEQ ID NO: 25611 - DNA, 339 bp, Gossypium hirsutum
  Clone ID: LIB3147-037-Q1-K2-F8
cccacgcgtcctccctcgcgtcctttcttatgtgggcgactttaagatcccgatgtctgcatctatctgcaactacgtggccttcctcctctctcacaaatggctcgtggaagctggggttttcaggtttaaatcagacgttctcttcatccactgtggagagaataagcaatgagttgctgagcctgcaagaggtggagaaggttctaagcgacgtgagagcagacgacgtggcggtggttccggttggtaaccaatgcgattgggcagatttcatggtgattgccaccggtaggtacccgtggcacgtcaagaacatcgcccaagccctaatttaca

SEQ ID NO: 25612 - DNA, 290 bp, Gossypium hirsutum
  Clone ID: LIB3147-037-Q1-K2-F9
aaaagaaacgccgggggcttatataaaaaaaggctgccaaccaaaacttaaaaaataagaattgaaagttcacgtagaaaatgatagggtgttacagataagtggagaaatgaacgtttataaagaagataagaacgatactttgcaccgcctttaactgatcatctgcaattttattacgaagttcatgttgcccgaaaatgttaatattggtcaagttaaagcttcaaatgtaaaatagtgtgctcaccctgacttttcctaaaatctaaattaaaaaacctgatttc

SEQ ID NO: 25613 - DNA, 179 bp, Gossypium hirsutum
  unsure (1)..(179): unsure at all n locations; Clone ID: LIB3147-037-Q1-K2-G1
cccacgcgtncgcaaaatgaaggtcattctttacattccggatttcaagctagcttttgagcatttctgcattcatgcgcggggaagagccgttttggatgaactggagaagaatttgcagctgtctgaatggcacatggaaccatcaagaatgactctctaccggttcgggaacacct

SEQ ID NO: 25614 - DNA, 403 bp, Gossypium hirsutum
  unsure (1)..(403): unsure at all n locations; Clone ID: LIB3147-037-Q1-K2-G10
gcattttctggaatacgggtgagatgctaatctgtcatggcggtgcgaataacaacaggagggcaatgaagcgtactattgagcgtactgtgagcacctcttttacaacctaagggtttgcaagtcgtgggcantgtaanttctcaggagatantgccagattgtaatntgtaaccttttgtgacgaagttgtagggctctagagtttgttgtaaaattttttagattcggtctgtattaaattactactaggatctagtaaagagtcctataatagtttataagcactacgtacggagaattccctagactgttctcccttccaaacttaaaagtttgcatgacctgtttttgcaagggggatctacaatattttttgagcaacctcgtcatgaaagcatag

SEQ ID NO: 25615 - DNA, 322 bp, Gossypium hirsutum
  unsure (1)..(322): unsure at all n locations; Clone ID: LIB3147-037-Q1-K2-G11
cccacgcgtccggtgaagtgtacgatatttaaagtgcttgaggtttgatgtagagaattaagaggcaacttgtcggatgttgtatggcaaagagaataacaagaagaatagtgtatgtgttgtatgaaagttaataaatattaagcttaatgcttaaaaattagatggcgtcttgtaccactggtgaattacatttacatttacccttgagtgacccttgcttttgggtttttctttattctcctttccgaggctgatcaagggcattgaatgaatggttattttggtttcttggtattntaaaaaaaaaaaatacncaaaa

SEQ ID NO: 25616 - DNA, 345 bp, Gossypium hirsutum
  Clone ID: LIB3147-037-Q1-K2-G12
cactcttacgtttgttcacctgcttgatttttaaccccatcgaattgatgtttggtgcgagaaaaaaacaagacggccgcccaaaaacaaaaaaaaaaacaaaaaaaaaacctccacgtgctcaatgcaacccacacaatattaccccttcaccccccctcattacactgcccctaataccactacactgaccacctttacaccaccccggggccccccccctaaccttgacccaacccaaacttaccccccccttccaccgcttatcaatttccattggccccccccaatttcaatcccccccccccttttttcccccccggcgcgccccggaaaacccccccc

SEQ ID NO: 25617 - DNA, 392 bp, Gossypium hirsutum
  unsure (1)..(392): unsure at all n locations; Clone ID: LIB3147-037-Q1-K2-G2
cccacgcgtccgcttttttcggtctgcctttttgttgctttcaaaactggataaattctcggggctaatcgtatctcgcttgatattttanagggcgaactggcgaaacataagtcttacgccgaatatctgcttcaacagctatttcgtgcgaagaatatacatttaagggagggggaaacttttaagggagtagtagaaaatcatttggtttttgaagagcccttaaaagagcaaattgatgggctctatcaaatctgttgtgatctcattctaaatggggccaacagtagctactttctaaaaattgtggaattttatggatccacgcttggtatgtagccaagcccaagaaaaaaggaacgaggggaagaatcgacagggatccttac

SEQ ID NO: 25618 - DNA, 409 bp, Gossypium hirsutum
  unsure (1)..(409): unsure at all n locations; Clone ID: LIB3147-037-Q1-K2-G3
gaanaccggtcgacgccacgcgtcgtttggcttcattctccactctttactttttggaagacatgctggacatcccggaggagcgaagataagtcccgaaacaacccatctcgagcctatgttcgagatgcaaaggccatggctgccactccagctgacgtgatagagtacccaacatcttacgtcttcatcgtggacatgcccggcataaatcacggcgagatcaaggtgcaggttgaaaacgagaatgtgcttgtggtgagcggggagcgaaagcgtgagaaagagaaagatgagaaagaaggggtgaagtatgtgaggatggaaaggagagtgggcaagtttatgaggaagttcgcattgcctgagaatgcgaatatggataagatatctgcagtttgtcaagatg

SEQ ID NO: 25619 - DNA, 410 bp, Gossypium hirsutum
  unsure (1)..(410): unsure at all n locations; Clone ID: LIB3147-037-Q1-K2-G4
aaggagatgatgtggtttgtgtganttttatttctgcaacattggctgggtcattgggcacgttgcatggctctcaaattcggattggtttacctaccctcactgataaagacaaggaggttataagtacttggggagttcaaaacaaaattgacttcctctcactatcatacacacgacatgcagaagatgttcgccaagctcgtgagtttctttcaaagttgggtgacctctatcagactcaaatatttgcaaagattgagaacatagagggattaaaccattttgatgagattcttcaagaagcagatggtatcattctttcccgtggaaatttgggcattgatctcccacctgagaaggtgttcttatttcaaaaagctgctctttataagtgtaacatggctgga

SEQ ID NO: 25620 - DNA, 124 bp, Gossypium hirsutum
  unsure (1)..(124): unsure at all n locations; Clone ID: LIB3147-037-Q1-K2-G5
tgcaataaaatttgagtttaatttatgtgtgtcgtgtgaatttgacttgacccaagaatgtgattaaaaaannaaatattatgtgcgtcgtcaaaaagaaagaagttgaatattatgtgtgatt

SEQ ID NO: 25621 - DNA, 272 bp, Gossypium hirsutum
  unsure (1)..(272): unsure at all n locations; Clone ID: LIB3147-037-Q1-K2-G6
gnncgaaaaggatcagacctcgggggggttctgaagctgcttggagagcatgctaaaaatattcttctaatgtcgaaagttgaaaatcaagaaggggtagcaaattttgatgacatccttacaaattcagatgcatttatggtggcacgaggtgaccttggaatggagattcccattgaaaagatatttctggcacagaaggtgatgatttacaagtgtaacatccaaggaaaacctgttgtcactgcaacacagatgttggaatccatgat

SEQ ID NO: 25622 - DNA, 176 bp, Gossypium hirsutum
  Clone ID: LIB3147-037-Q1-K2-G7
tatgttcaaacacacgggtatatttggattcctgccgccttatagaaacattatatatatttatatatatatatagctgcgacatactattaccattgtcatcataaaaagaagttgtggtttgtaacagatacaataaaatgctacgcctaacagctttgaactttttcctttaa

SEQ ID NO: 25623 - DNA, 384 bp, Gossypium hirsutum
  Clone ID: LIB3147-037-Q1-K2-G8
cccacgcgtccggtttacactgcccggttctatgctgatatagttgaatatctggttgaccgatggaagttgaaggaactcattggactttcacccgagggccgtgaagctcaggaatttgtgtgtggacttgcaccgagaattagaaagctagaggagagagctcaattgaggaccaaggaatcacccagtgttccattcagttgggtttctggtagagaagtgaagctctaaattggctatcctccaagtgacttgtaatacaagaaagaaacaacagggcttaaggaggagcatgatgaaaactgcaactctgtgtttagctggaatgcaataagtggaagaagtgtgtgtgtgcttgttcgttgttacttttcttaaaac

SEQ ID NO: 25624 - DNA, 355 bp, Gossypium hirsutum
  Clone ID: LIB3147-037-Q1-K2-G9
cccacgcgtccgctttttctattgttattatgttatttacagtagaaactctttgatggacttttattcttgtggttatttcaaagtagatttttacataatcatccatttatgttatgttatgaatgtcgcattgttacgatgtaacctttttcatgttatttctaacatttaataaggatggtaacgaaacgagatagttatatggatattggcttgtcttatccaattctgttttttgtttgcattgatgttgaaaatattcacgttcatacatgttggatatatatgtgtaactccacatgttttatactgttccaccttattttatttttattaatgagatttcgattta

SEQ ID NO: 25625 - DNA, 282 bp, Gossypium hirsutum
  unsure (1)..(282): unsure at all n locations; Clone ID: LIB3147-037-Q1-K2-H1
gactggtttcttagaaggctgtttggttgttctgtgctgntgttgcctgctggatgcttgcttttgagaatccaactctgccaaaagcctcaaatgttgaaaaatcaaatgttcttaccgtctcgcctttttttttttgtttattttctttaaataattaaattggacctttgtttggaattaaactaaactattgtgctattttatattaattcctagttcatggtttttatctgtatatatatttgttctgccgntactcttcctagtaaaggaatattt

SEQ ID NO: 25626 - DNA, 360 bp, Gossypium hirsutum
  Clone ID: LIB3147-037-Q1-K2-H11
agcgaacccatttcacagagctgttcttttatggctgaggaagccaaaaggagagctgaaattgctaggttgagagaactgcacacactgaaagggcatgtggaatcggtggtgagattgaagaacctggacatagacacaatccagcaagcgtacacggtgtaaggcggtggaatggtattccgaaggaatagtggaaaatgtaatgagagggagcgttttcctgcgagtgaagctctaatatatgtatcttttattaccttaatcccgtccgccattttacaagggaaaggttattgtttatggcattttatgtttatattagtagtaaaaaaccatgtgttttgcttttgttgtagt

SEQ ID NO: 25627 - DNA, 285 bp, Gossypium hirsutum
  unsure (1)..(285): unsure at all n locations; Clone ID: LIB3147-037-Q1-K2-H12
gacccacgcgtncgaatgaaaaaatttattttaaaatttcgtttnttcaccacgaaaccaaaaaaaaaaggcggcgttattaaaaaaaaagggcggcgacacacaaaaaagacatatagaaatcaatggtgagatttaataacctgtacatagacacaattcatctagcgttcacattgtaaggccttggaatggtattccgaatcaatactgaaaaatgtaatgataagaagcgttttccttccagtgaatctctaatatatatatcttttattaccctaatcc

SEQ ID NO: 25628 - DNA, 380 bp, Gossypium hirsutum
  unsure (1)..(380): unsure at all n locations; Clone ID: LIB3147-037-Q1-K2-H2
agaaagatgtgtattctgtgtgggcacttctttacgaagacgttactgctagggtcaagaagttgatggaaggtttaagatccgagttcggcgggccacagttcgagccccacgtcacggttgttggggccatcagcttaaccgctgatgatgccttggccaagttctggtccgcttgtgatggccgcaaggcttataatgccactgtcgatcgtgtggctaccgggactttcttttatcagtgcatctttttgttgcttcatcccactcctgaagtggcggaaactagtgctcattgtagtagccattttggttacaagagctcaacancaggagagaagaagaaagctcaagaaaagctaatatgctggatgaaagca

SEQ ID NO: 25629 - DNA, 433 bp, Gossypium hirsutum
  unsure (1)..(433): unsure at all n locations; Clone ID: LIB3147-037-Q1-K2-H3
ccacgcgtccgctgaaatggcgatgaaaattttcagcgnngtcntctttgctctcctcttcctcgcatcgccgttttttcaagatgctaggtgggaatcaaaagcagaggcagatgttgcagaagctgttgaaggaggtgatctcggtattgttggggaggatgttcaggattttggtgatcctaattacagttcagctcctgaagttaaaactgtttgcgttttccccaaaaatagtgccaaattggttctggctggagaacagactgagctcctcgttgggatggaaaatattggggagtcacctgtgaatgtcattgctatcaaaaccagtgttcatcttccttttgatcatcgnatgcttgttcaaaatcttacagcagtggctttcaacaatgctactgtacccccttcagttcaagctactttccct

SEQ ID NO: 25630 - DNA, 144 bp, Gossypium hirsutum
  Clone ID: LIB3147-037-Q1-K2-H4
ccacgcccgtccggtgtttttttgtacccaatatttgtcactccatttatttatgtagagtggctaaacctttgctactatgggtgatgtaatgatagatgggtggtgggtggtgaaaaaacaaaaaaaaaaaaaaaggggcgg

SEQ ID NO: 25631 - DNA, 527 bp, Gossypium hirsutum
  unsure (1)..(527): unsure at all n locations; Clone ID: LIB3147-037-Q1-K2-H5
aaccggcccgcacccacgccgtccgnnggaaaaatttntgaatggtttaagttgtttattttgtttgactagtatgcatcaagatggcgtggtatgtgtttattaannatgggagatgaaggaatgatcgatatgttacccatagttaaatgcgtcgcacgtttattggttgcgttaccttagtnntttattacccaaactgccanttcttgagacggtttctttttcaagtatttnntggaccatcgtgcatcnnaagtagaaacttcagtnncttcgggccgctctattttgcttgaaaagttggcattgcttttttgacgcgagaaatattttgtattaactctgcaccatctttatnttccttgctgcttgatcctttatgtgatgcttttttnttttttnttgtggaaattggtgattttttggaacaaccctattttcccttaaaaagaaacaagtataatttcttgttataccacgaacaggatctttcaagacaataataattaaattgctaaacatat

SEQ ID NO: 25632 - DNA, 393 bp, Gossypium hirsutum
  unsure (1)..(393): unsure at all n locations; Clone ID: LIB3147-037-Q1-K2-H6
acgcgtncggtacactgctggaatcaatttgaacattcttttttctctgangctcttttgctgactgatgaatgttatgcattgaaggcggcttatatacattctgtcaaccccttcacttgtgttgccgctgaaatggctcatagattttccacctacaaaaacactttcaccattggaagttctcatgctgtggatccttttaccgtggtaaaaacacggttctctgacaatggaaaggttggaatgctgtgccaacgtgaatggaggcccaagtcacttgtaacattttcggcagagtatgattcaaaagccataaatgcatcccctaagatggggcttgcccttgctcttgagccttgacaggaaagtcttattttggattccatattt

SEQ ID NO: 25633 - DNA, 120 bp, Gossypium hirsutum
  Clone ID: LIB3147-037-Q1-K2-H7
agaattctttcatggcatattttgtaatatcccatgttttgccattgatattgtcagggagtacttgctctctttgtaccaaatcttgaatccaaaaaaaaaaaaaaaaattgatgcgag

SEQ ID NO: 25634 - DNA, 169 bp, Gossypium hirsutum
  unsure (1)..(169): unsure at all n locations; Clone ID: LIB3147-037-Q1-K2-H8
ataaaaaaaaaatatttaaaaaaaggtgnnatccaacccaaaaaaaaaaaaacaacggccgctttctaaaaaaaaaatgccgccccaaaaaaacaccacccaactaaacaaaccttccccccccactccctctaccataccaacctccccccctcaactccaaccccct

SEQ ID NO: 25635 - DNA, 420 bp, Gossypium hirsutum
  Clone ID: LIB3147-037-Q1-K2-H9
cccacgcgtccgatctacaacagtttgttatccattgcttccctgtttcctgtaagcgggaaagatagaaaatgaaggtggttgctgcttatttgttggctgtacttggaggcaatgcctctccttcagctgatgatcttaagaacattcttgccagcgttggagctgacgctgaagaggaaaggctccagcttcttttatctgaagtgaagggaaaagatataaccgagcttattgcatctgggagggaaaagcttgcctctgttcccagcggtggtggtgttgctgtggcggcatctgcacccggagccgccgccgccgccgctcctgctgcagctgaaactaagaaggaagagaaagttgaggagaaagaggaatccgatgatgatatgggcttcagtctcttcgactaaaactacc

SEQ ID NO: 25636 - DNA, 333 bp, Gossypium hirsutum
  Clone ID: LIB3147-038-Q1-K1-A1
gggtgaacgcgtgataacggagctctcatgatgcttttaatatggttagtaaggatgagagaagcaatggattctttattaatccaaggagattttcttgcctcttagcaaatcttttttatttctcatcttttggttcatggatgggatttggaggggcagatggtatgattcacatatatatataaaaagagtggatttttgtgagttaatgtgtaatgagagggatagattattggtgatgggctttttacatttttggtcttgaattaatatatagttgtaatacaaggatccatggtttaaccttatgaagtagccaattcatcgaac

SEQ ID NO: 25637 - DNA, 400 bp, Gossypium hirsutum
  unsure (1)..(400): unsure at all n locations; Clone ID: LIB3147-038-Q1-K2-A1
gtgtgaacgcgtgataacggagctctcatgttgcttttaatatggttagtaaggatgagagaagcaatggattctttattaatccaaggagattttcttgcctcttagcaaatcttttttatttctcatcttttggttcatggatgggatttggaggggcagatggtatgattcacatatatatataaaaagagtggatttttgtgagttaatgtgtaatgagagggatagattattggtgatgggctttttacatttttggtcttgaattaatatatagttgtaatacaaggatccatggtttaaccttatgaagtagccaattcatcaaacannnnnnnnaatnaaaaaataaaaattantatatattttaatatcttatttttattttttttttttt

SEQ ID NO: 25638 - DNA, 374 bp, Gossypium hirsutum
  unsure (1)..(374): unsure at all n locations; Clone ID: LIB3147-038-Q1-K2-A11
catcaacaaggctgttgtcgcaataatcntgcccatgatcgntgaaggcagtggggggtcaggtttttgtgcttggggggggtgtacaactgacttgaaccgtcaatgcccgtcggagctccgggttggagacggtgacgcttgcaagagcgcgtgtgaggcattcgggagtcccgagtattgttgcagtggcgcgtatagcacacctgccacatgtaagccttcagtttattctgagatgttcaaggccgcttgtcccagatcttacagctatgcatacgatgatgctacaagcactttcacgtgtactggagcagattatacggntaccttttngcccctcttcttctaatcaaaaatctttcgagagatgc

SEQ ID NO: 25639 - DNA, 230 bp, Gossypium hirsutum
  unsure (1)..(230): unsure at all n locations; Clone ID: LIB3147-038-Q1-K2-A12
acgaacccnaanaagagccggcgccttaagaaggggagaggccgtaaaaaaagaaacgtcacgctgaggatgacggggagaatgctgaagttaaacaaaagaaacagaagaagcgaaagcatgccgaagaggaagaacctgaggtgcagaccaagaaagagaattaaaaacaaaagaagaagaaagatgaggttgaagaagactaataattagaagagggaaagaaagaa

SEQ ID NO: 25640 - DNA, 252 bp, Gossypium hirsutum
  Clone ID: LIB3147-038-Q1-K2-A2
ggaaagctgtcttttcgttttacgttatcctcatgcttgcctcttttagaaagatggtcaatataaagattttggacaatttgcttatatttaattcagaggctgttttgaagtttaatttagatgattttaactattatggattctttatattgttttgtttcagaaaaaaaaaaaaaaataaaaaaaaaaaaaaaaaaaaaaaaaaaaaaaaaaaaagaaaaataaaatttttggatattggcataatac

SEQ ID NO: 25641 - DNA, 401 bp, Gossypium hirsutum
  unsure (1)..(401): unsure at all n locations; Clone ID: LIB3147-038-Q1-K2-A3
ccacgcgtncgcccacgcgtccgcccacgcgtccgcctactcgtccgcccacgcgtccggaagaaagtctggcgttccttggagagattggacaaagcacatctttaaggcatgcagttcaactgttatcacctgctagcattgtggcaaaaatgaatggtcgagacaacatatgcaaggcggatcttgaggaagtaagcaagctatacatagatgccaagtcttcggcaaaaattcttcaagagcaacaggaaaaattcatttcatgataatcctatttttatatcttctttcctcttgccctgcagttttaggttgaattttgttgtgcattgttttctctcagttggacaattgatcattagtatgtgcaatgcangatgattaaatgatttattttt

SEQ ID NO: 25642 - DNA, 351 bp, Gossypium hirsutum
  Clone ID: LIB3147-038-Q1-K2-A4
attccttatgatcctcggtttaaaccgtctatacttggaaagctttctatgggaaggatcattacatcgtccggtttcaggaacctggagtaatagaagcagagtttgcagagattggtgtaggacgagcagttttggagctgttatcgtatcgggtacccgacccactttatttaccaaagggaaatctattcgggtatccactagattctccggttaacttgccgccatggctgtcggagaaagatgccgattgctatgccacccagttccaaataaccggcatcccggtgccctcaattattaccgcaattttgatcgatactgggaactatttgcaccatggtggaa

SEQ ID NO: 25643 - DNA, 377 bp, Gossypium hirsutum
  Clone ID: LIB3147-038-Q1-K2-A5
gccactgctctcctgcaaaaagcggctctatgggatctacaagaagcaaccctacagtcactaacagtggattatttgggttaatgagctcacccccttcaacaattccgagccccatcaatgaccacaacaaaaatgaagcttattacaagctgtttaagcaagcaaatcaatctgagaacataaacgaggtagtgagttcattgccttcaacgcaagcagccatcatcaaagatgggtcatttgtcaataacgcctccatgaaggcaaatgaaagacaaggaggccaagcggttgcatcaaagctgaacacaaatgcaaatgaagtggaagcaagcttaaccagggactttcttggtgtgggaagtcaatcaagc

SEQ ID NO: 25644 - DNA, 359 bp, Gossypium hirsutum
  Clone ID: LIB3147-038-Q1-K2-A6
tgccggaggttggtgcatctctcctctttatcactttgatatggctcagcctgcctgggaaaagattggtatttacagaggtggcattgtgcctgttttgttccaaagggttccatgtaagaaacatggtggagtcaggttcactatcaacggtagagactactttgagcttgttttgattagcaatgtaggtggggcaggatccatccaatccgtatccgttaaaggctctaaaactgggtggatgtcaatgtcaagaaactggggagctaactggcaatccaatgcctacctcaaccgtcaatcgttgtcgttcaaggtcaccactaccgatggtgttacccgactgttccctgata

SEQ ID NO: 25645 - DNA, 336 bp, Gossypium hirsutum
  Clone ID: LIB3147-038-Q1-K2-A7
ggccgactcaaattcctgcaccaaattcggcccggattcaggcgagggaatcatagagcaccaccgcggcgtatccttgaaggtatttgtggcgagaaacgtgtgcgtggaggggagatcggccccgagacgtgcgccgattggagtcttactggcggcgctggaggtagtggctggtggggcgtttgaagagcggctagggttttgttctttttgttttttgttttgctgtattggctattgggtttgggccaattgactgggcctgaactgttttctttttgtgtttggacccaagccgattgggccttattacaatgtgaatgagattttttt

SEQ ID NO: 25646 - DNA, 380 bp, Gossypium hirsutum
  Clone ID: LIB3147-038-Q1-K2-A8
cccacgcgtccgcccacgcgtccttctacgcgtccggttcaaacctctttggacgaagatacgtggactatgatctggagtttgtccaggcctgcaatttcggtgtttaaataaaacatcatcattgaaggttctgcactggtaaatgcttcaaaatctagtttttgttacagcaagagtttccaccataccatctgcattattattttttcttgcacgttaaaattcaattgtctctaattctgcgtggaagaaaattagcatctttattcttagtatagaatactttttcatttttagaatttcttggtttataaattattctgcaaatgttgaaattatcctgcaatgataaaaaatgatgaagagtttttttgttc

SEQ ID NO: 25647 - DNA, 321 bp, Gossypium hirsutum
  unsure (1)..(321): unsure at all n locations; Clone ID: LIB3147-038-Q1-K2-A9
aaccctaaacattcttcccccacttatcagatcaattcgcagagggctccccgcgcncactttcactacgctcaggagccccaacaccatctccaactccaaaaatgtctggagaagaggtagccaatgcccaaccagaggcaccccctactcttggagagccaatggacatcaacacagccacgcctctagtggcgaggaaatcccaagctccacgtgagcttgctcgtggctcacatgaagcttccaaggcaattgaaaagctcaattcacatctatgagacttggccaatgacagaaaccaacctgttataaataatc

SEQ ID NO: 25648 - DNA, 384 bp, Gossypium hirsutum
  Clone ID: LIB3147-038-Q1-K2-B1
gcttatgatactcgcaatatcttccagtctcttgatttagcgtggactttgcttcgtatcttcccacgtgaactcctgcaccgtataccagcaaagacccttgaccagtattacagccgtgatgcaacaagctaagctgatgaaagctagtctgctctttgcttatctacatatatgtcaattttcatataagtcacccgtgggttgttttatttgccaacgctgcttcatggcctcgaccagaatcaaatctcagtggacggtatctctatgattgcatatgttaattcgggttcccgtttcattaaagttcggggcatgtgattattgtagtagtaagtgtaattctttgtgttggggaaagccattattttgtgattcaaa

SEQ ID NO: 25649 - DNA, 319 bp, Gossypium hirsutum
  Clone ID: LIB3147-038-Q1-K2-B10
cccacgcgtccgcccacgcgtccgtttacgcgtccggccaagttgaaacaggctgggaaacagggcgcttctgttcctctcattcccaaaactgctaatgcttaagctgcctccagggaggttttagactactttggcggatattttgatgtttgtcacctgtctggggggagtttgaaactgtttgttgtggacgaatgtaaggactattttatttgtgatctgtcatcagctcatcaactttgtttatggaataaagttgctcatcaaattggacatctctttttcagatatagttataacaatcgttttcacttag

SEQ ID NO: 25650 - DNA, 345 bp, Gossypium hirsutum
  Clone ID: LIB3147-038-Q1-K2-B11
cccacgcgtccgaaaatttccttgttattcctatggctactgctgaggttgcatcaggtcaaactgcacttcatgaggagaaaactgaagaatcagtgaaggatcaagaagctacaacagatgaagtagttgccgaagctcctgcagcggaagcagctgccgaagagccaaaggaagcggagcctgcggcggtggcagtcgaggaacctgaagcctcggttgaagttgaaaccaaggaggtggtagaagaaccaaaggctgttactgaggagccagtagtagaggagactcctaaggaaacagtgccagaaccagttgccgaggagatcaaagaaaccactgaac

SEQ ID NO: 25651 - DNA, 362 bp, Gossypium hirsutum
  Clone ID: LIB3147-038-Q1-K2-B12
gaacagcgaggtctctccttcgaatgttagcccagaattaaaaaatctaaccccaggtgaacctgcttctggggtccgacctattcctaccatctccaatcaattctcagctcgtggacgaatgggtgttcgagcaagatatgtggacacattcaaccaaggtggtggtggccaagcaaatttattccaatcacctgctgttccctctgttaagcctgcaatggcagcaaatgcaaagttctttattcccattcctgcatcaacaaacgagcaaatgatggaggcaatagccgaaaatgcacaagaagaaaatggaactagtaataaccctacgacatccaatgcgaatgagttctatgaat

SEQ ID NO: 25652 - DNA, 362 bp, Gossypium hirsutum
  Clone ID: LIB3147-038-Q1-K2-B3
gatgaagaggtggttcgatccatggccggttttcttcaagagagagttcaaccggacgtggccctttcttgttggtttcgctgtaactggaactatcatcaccaagttctccctcggtctcactgaggaagatgcgaagaattcgcctttcgctcagaagcacaagaggtgatcccaattgaattcaaatgctcatctggtttgaggcttttggttgtttccactcttttctttttttcaattaactacaaaaataacataggacatcatcagttgtgagtattctactctagttatgaattggtattcttgtattgccattaaggtttttttgcctttgaacaatgttaaaacaccttttt

SEQ ID NO: 25653 - DNA, 387 bp, Gossypium hirsutum
  Clone ID: LIB3147-038-Q1-K2-B4
ccacgcgtccgcaaggctactgtgttgttcatagttccattagatttatccttttgtattcgtttttgaagaggaacatgtccaagaaagtgatggtctttctctcttcatgcaactcagtcaaatttcatgctgaacttcttagatatattcatgtggattgtcttgatatccatggaaagcagaaacagcaaaaacgaaccactaccttctttgacttctgcaaagcagaaaagggcattttgctttgcactgatgttgctgctcggggacttgatatacctgctgtggattggattctgcagtatgatcctccggatgaaccaaaggaatatatccatagggttggtcgaacttgccgtggggaaggtgcaaaaggaaatgctc

SEQ ID NO: 25654 - DNA, 277 bp, Gossypium hirsutum
  Clone ID: LIB3147-038-Q1-K2-B5
atttgtggtttctattttcatgtagctttttaagctattgttgcttgacacttaattactggatatttttgtggatgaagttaatcatgtgcttgtttcaaaaaaaaaaaaaaaaaaaaaaaaaaaaaaaaaaaaaaaaaaaataaaaataaaaaaaaaaaaacaaaaaaagcaaaaacaacaaaaaacaaaccactacctaatttagaacttataaaaaacaaaaaaaggcaattttgctttgggctgctgtttttaaaaaaacaactttatatac

SEQ ID NO: 25655 - DNA, 373 bp, Gossypium hirsutum
  Clone ID: LIB3147-038-Q1-K2-B6
gaagggtgtaaatatataagactggattatataggcaccccagaagctgatgaggaagttccggttgccggagaatgccaatgtggcagccattacggctaaatgtgaaaatggggttttgactgtggttgtcgagaagcttcccccgccaccaaagcctaaaactgttgaagttgcgattgcttaaaaggatctagttgtttggggggggatagaaaggttaaattatagagggctttcaagtttctcacctttgggaactggagatcaaacaatggttgatgtatttaggtgtggttcatcagcatgtatttttatttgcagtgtaatttgattgggtggatttgcttcttctcagtctacagtcttttct

SEQ ID NO: 25656 - DNA, 345 bp, Gossypium hirsutum
  Clone ID: LIB3147-038-Q1-K2-B7
ggcattcccaaaggatgaccctaccataccttgcaagctcactgcctttctggggtgcaaggctggtatgacacacattgtcagagaggtcgaaaaacccggatctaagcttcacaagaaggagacatgtgaagctgttacaatcattgaaacccctcctatggtgattgttggggtggttggatatgtgaagacaccacgtggccttcgctccttgaacaccgtctgggctcagcatctgagtgaggaagtcaagcgccggttctacaagcactggtgcaagtccaagaagaaggcttttgtcaagtactcaaagcagtatgaaagtgaagaaggaagaagagt

SEQ ID NO: 25657 - DNA, 312 bp, Gossypium hirsutum
  Clone ID: LIB3147-038-Q1-K2-B8
gacaactcaacttatttacacgtgctaatatacttcaagaacatgaccattgagggggctttatcccatggcgtgggggatcctaactgcttattgaactttggtgacagtatcacaacagatcacatttctcctgcatgaagcattcataaagacagttctgctgcaaaattcctacttgacctatgggtggaccccaaggacttcaacttttatggaaatcgtctcggttacgattaagagatcgcacgtgaaacttttgctcaccttccccttgtgaacaaactgttgaatggttaatttttcccaaaa

SEQ ID NO: 25658 - DNA, 373 bp, Gossypium hirsutum
  Clone ID: LIB3147-038-Q1-K2-B9
cccacgcgtccgcccacgcgtccgcgtgtttagggttttagcttcgcaaagcttcttcttctgtctcatctcgcttataccttggaacactaaagcaaaaaacaagcgaatatggaggctggagatggaggcgctgaccgagtcgttgactcaaaggatttacaacaacaaagcaaagccttcgataaactcactgaccgtgtcgaagatcgacagcttgattcttctcgtgcccaatcggccatggcatcgattgcagcctcggctgaagcagaaaagaatgctatgagattgagagagaaagaattagctgctgttaaaatcaacgcggctgaagttgacatcattgcaaacgaattagagttggacaaaa

SEQ ID NO: 25659 - DNA, 372 bp, Gossypium hirsutum
  Clone ID: LIB3147-038-Q1-K2-C1
cccacgcgtccgcgtgttcgagttatttgtggtggtcgaaagaggcctgttcccaaagggattgtctatggtaagccgacagaccaaggtgttacccaattgaagttccagcgcagcaagcggtctgttgcagaggagcgagctggtcgaaaattaggaggtctcagagttgttaactcatactggatcaacgaggattctacttacaagtactttgaggttatccttgttgatgttgcacacaatgcaatccgcaacgacccgagaattaactggatctgcaatcccgttcacaagcacagggaacttcgaggactcacatctgcaggtaagaaaaacaggggtctgcatgggaagggtcacttgcaccac

SEQ ID NO: 25660 - DNA, 365 bp, Gossypium hirsutum
  Clone ID: LIB3147-038-Q1-K2-C10
aggagctcaacttgtaaccacaaactcttcaccagttgtgaatgcaacttcagaatcaactgtctccgagttgcgggaagaaaggactgaggaaggtccctccaacccatctattgtctcatgtgaaaatcaggtgctcccaaaactagtatgccctctatgtcgtggtgaggtaaaagattgggttgttgtagagcctgctcgtcatttcatgaatgccaaatctagaagctgttcctctgaaacatgtaattttactggttcctataaagacctaaggaaacatgctagactagagcaccctgctgcccgcccatctgaggctgatcctgagcgacaacgaaactggaggaggttggagcgtc

SEQ ID NO: 25661 - DNA, 322 bp, Gossypium hirsutum
  unsure (1)..(322): unsure at all n locations; Clone ID: LIB3147-038-Q1-K2-C11
caaaatatttgtatcatctttatntttatatgcggaaaaaatgaaaaaaaaaagtgagaaaaaggggttgtatttggtgtatgatggtaatagtgtgtgatgtatttgacaagctatgaatgtaatatgatatgagaataaatttttgtcattnaaaaaaaaaaaaaaaaaaaaaaaaaaaaaaaaaaaaaaaaaaaaaaaaaaaaaaaaaaaaaaaaaaaaaaaaaaaaaaatatagaaaaaaaaaaaaaaaaaataagggggggccctttaaaaaaagggggggccctttttaaaggttcaaagttttattacccttttt

SEQ ID NO: 25662 - DNA, 384 bp, Gossypium hirsutum
  unsure (1)..(384): unsure at all n locations; Clone ID: LIB3147-038-Q1-K2-C12
acgcgtccggctcaaagtgaacggttctgtggggaactaaatcngttgttgatgtgaatgtgannggtactcaaagagagattgcttatagccagagggaagagtgcgcttgcatcnnaggtttgtttgagaatnngggcacacgaacnnaaggagtgttgtgcgcccttgtgaagagcttcaacaanggaaaggatgaaacaaaaccttgatatttttgattggaagctcactgctgatgagtcgcataaaataagccaactcccacagtgcaaagggtttccaggtgcggcatttttatcagatgacggcccttacaagtctgttgaagagctttgggatggagagatatgaatttcattatccactggatttattacaaat

SEQ ID NO: 25663 - DNA, 363 bp, Gossypium hirsutum
  unsure (1)..(363): unsure at all n locations; Clone ID: LIB3147-038-Q1-K2-C2
cccacgcgtccgaaaggagctaactggcctttcagccgaggggcgtaaagctcaggactatgtgtgtgcactttcttcgagaattagaaggctggaggagagagcacaagaaaaggccaaggaagcaccctgtattccattcagttggatctttgatagagaagtgaagctctaaaggtcttgaaatgcactcgaggaaacaaacttgaagaagctgaatttaacttgtctttgtattctgatgaaatggtgctggtgtgtgtaagaggaatagtgcctggctttagtggttntagatgttttgttgtattagatgtagcgtctgtctgtcatatcatgtgcgaatagcatgtgctgtgtcgt

SEQ ID NO: 25664 - DNA, 343 bp, Gossypium hirsutum
  Clone ID: LIB3147-038-Q1-K2-C3
gttcaaatgcggtggagtttgtcttgtagtagggattcaacatactttaggagacggcgcagcggctcttcatttcatcaatagttgggctgacacttcacggggcttgacgcctgccattgcaccattcattgatcgaactcttcttcgtgctcgggacccaccaacgcctaagctccaccatgttgaatatgacccttcaccggcattgaagtctgcattaaaatctcaatcagatgatcataagccatccattgtctccacctttaagctcacagctgatcaattgaacaccctgaaagccaaagctaatgttgcaaatgcaaacggtggtataaaatat

SEQ ID NO: 25665 - DNA, 394 bp, Gossypium hirsutum
  Clone ID: LIB3147-038-Q1-K2-C5
ggcgtggacaaattattcattaaccgaattaaaaaataaaagatctgactaagagaacaaacacaatcaaaaatcaaatacaaaaaattctaattataaaagacaagaaaaacgaatttctaactcaagaaataaatagtagttctaacaaaataagttatcaggataaaatattagaatcatcaaaaaaattttggcaaatagtaaaaagaagaaatattcgattaatccggaaattctatttttttataaattttttcattgaaaagatatacatggatattcttctatatatcattaatattccaagaaccaatacccaactttttcttgaatcaacaaaaaaaatgattgagaacttcattcacaataatgaagcaaatcaagaaagaat

SEQ ID NO: 25666 - DNA, 336 bp, Gossypium hirsutum
  Clone ID: LIB3147-038-Q1-K2-C6
cccacgcgtccggcttggaaggcaactttctaacacaaagctgtcaagcaacaagacagtcaggaggattagggttcgtggtgggaatgtgaagtggcgtgctttgaggctcgacaccggaaactactcatggggaagtgaggctgtgactcgtaagaccaggattttggatgtggtgtacaatgcatccaacaatgagctggttcgcactcaaactctggtgaagagtgctattgttcaagttgatgctgctccattcaagcagtggtatctccagcactatggcattgacattggtcgcaagaagaaatcagctgcagccaagaaagaaggaga

SEQ ID NO: 25667 - DNA, 363 bp, Gossypium hirsutum
  Clone ID: LIB3147-038-Q1-K2-C7
gctgttccagagggcgagcatgttttttgggtggctcacatctttgcttcatttaaggacacattcattcatgtgacggatttgtctggaagggaaacaatggttcgcattactggtggcatgaaagtgaaagctgatagggatgagtcttccccttatgcagccatgcttgcagcccaagatgtttctcatcgctgcaaggagttgggtattactgcccttcatataaagcttagagctactggagggaataagaccaagacaccaggtcctggtgcacagtcagcacttagagcccttgctcgttctggcatgaaaattggacgcataaaggatgttacccccattcccactgacagtacc

SEQ ID NO: 25668 - DNA, 407 bp, Gossypium hirsutum
  Clone ID: LIB3147-038-Q1-K2-C8
cccacgcgtcctcccacgcgtccggtctactggaaaatatgagaagaaggtttacgggttgccaaagcacctcggcgagaaagttgctgcacttcacctcggcaagctcggagctaagctcactaagctcactaaagatcaagctgattacattagtgtgcctgttgaaggtccttacaagcctcctcattacaggtactgagggggacagttaatgagtttttatcgagaaagaaaaagcatccggatggtttgattgtttcttgttttactgaaatttcatgatggttaggtttttgttttatttttagagttcttttttgtgtttgggtgatgggaaagtgtctggggatgggaaaatgatgtgggaattgggcttttcttggttgaagatgaccaaattggtt

SEQ ID NO: 25669 - DNA, 203 bp, Gossypium hirsutum
  unsure (1)..(203): unsure at all n locations; Clone ID: LIB3147-038-Q1-K2-C9
attttttatgctgtcgcagtgtactatttctgtgtcaaaaatttgcattatccttgggatttcaaacccaagtgcttattttgttattacatatttggtctccctttgtttattttcattcaatctgttaataaaaattttaggttttggcttantttcaaaaaaaaaaaaaaaaaaaaaaaaaaaaaaaagaaggacgnacg

SEQ ID NO: 25670 - DNA, 343 bp, Gossypium hirsutum
  Clone ID: LIB3147-038-Q1-K2-D1
tcaaagtgttgagttttgcaaggatttttttggcttaggagaagctgctacggtgctaggtgcaagtactgtttcaggtttctttgctgctgcttgcagtttgccttttgattatgtcaaaacacaaattcagaaaatgcaacctgatgcttcgggaaagtatccatatagcggctctttggactgtgccatgaaaaccctcaaggctggaggaccattcaaattttacaccgggttccctgtatattgtgttaggattgctccgcacgtcatgatgacttggatattcctcaaccagattcagaaggcagagaaaaaaataaggttgtagagcgtggtcact

SEQ ID NO: 25671 - DNA, 367 bp, Gossypium hirsutum
  Clone ID: LIB3147-038-Q1-K2-D10
ctttgagcttagcattgaagattgtttttcctgaaagagcttggtcgaatatgtgctgcttcgttttcgatgtttgaggaagctagatggcattctacttggataaaatttctagatatcacggaattgtgttaaacaattagcattagtgggaagctttgaggagaaccatggctacattgttttcgttatggaatcatcttagacgcatgtattcacagttcacacacccgcaaaaggtgtcgaaccttgaagataaggggatgcatatgcagatgctgaactaacttgttaggccctaagttacatatgataaatcaacctcactgtttgcaaacctcttctttaatttgtggggatatatatg

SEQ ID NO: 25672 - DNA, 353 bp, Gossypium hirsutum
  Clone ID: LIB3147-038-Q1-K2-D11
cccacgcgtccggtcattccacattttataacgttgagaggtggttaagagagttaagggatcacacagatcccaacatcgtagtcatgctcatcggtaacaaatcagatcttcgtcacctcgtggccgtcccaactgaagacgggaagtctttcgctgagaaagagtctctctacttcatggaaacttccgctctcgaagctacaaatgtagagaacgcatttgccgaagttcttactcaaatctaccatatcgtaagcaaaaaagccatggagacagctgacgaagggactgcatcaaccgttccttccaaaggcgagaaaatcgatgttggtaaagacatctccgcaatg

SEQ ID NO: 25673 - DNA, 372 bp, Gossypium hirsutum
  unsure (1)..(372): unsure at all n locations; Clone ID: LIB3147-038-Q1-K2-D12
ggccgatgatgttgctagtataattatttctcaaggcagggctacagtatgtggggcctgaacttgatgctatgaaagctgttgctgacgcccatgccaaacgttccctgaagcttttcgagattgctcttcatgatttcaaggctcaactagaggaagacccaattgttcacaggcacctttcttcgctatatgacactctattggagcagaacctgtgccgattgattgagcctttctcaagggttgagattgcacatattgctgaactgattgagttgcctgtagaccatttggagaagaaactttctcagatgattcttgataagaagttttcagggacgctggatcanggtgctggatgcctcgtca

SEQ ID NO: 25674 - DNA, 347 bp, Gossypium hirsutum
  Clone ID: LIB3147-038-Q1-K2-D2
cttgtggctgctgggaagttggttaaagttaaggcttcgtataaacttccttctgctaggtcttcgaagacggctactgctgcttctgctcctgcaaaaaagaaaccggctactactaagtcgaagtctaagcctgcctcaaagcctaaggaagggaagagtacaaaaactactcctaaagcaaaggccaagacaaaaactacttcgaaggctaagagtaagccggcgcctaagccaaagcctacttctaaggcgaaggctgctccagccaagactaaggcagtggcttctgtgaagccgaagactactgcagctacaaagtcaaaagctgcagccaaagcctaaga

SEQ ID NO: 25675 - DNA, 393 bp, Gossypium hirsutum
  unsure (1)..(393): unsure at all n locations; Clone ID: LIB3147-038-Q1-K2-D3
gtaggaaggaagtggataccaatcctgtgctggaattgggtcgtgttttgtccttggattcctctgctaatgtattagatattgaagagacatgcgaggcaagtgattttgagaagcgaatggcagcgaatgcatttaacagcatcttgtctgtgctaaccaactatagtgagtcaactggcagattggtctgtgggacgagatgcagtgtacctggggtatgctacatcagttcatcattaaatatatcacttggtagaatcagacaaagctttgtactaattgatccacatttacccgggatgcctatagtttatgcaagcgatgccttcttaaaaatgacaggctatgataggcatgaaatatngnngcttaatttttgcagtttgaatg

SEQ ID NO: 25676 - DNA, 342 bp, Gossypium hirsutum
  Clone ID: LIB3147-038-Q1-K2-D4
gcttcacaaggtttttctttctttctttttttttccttttagggataaataatgggagggttcaagcatcttgttgttgtgaagttcaaggaagatgtggtggtggaggggattttgaaaggtatggaaaagctggtttctgaggttgatgctgtcaagtcctttgagtggggacaggacatagaaagccaagagatgcttagacaaggatacactcatgccttcttgatgacgttcgaaaagaaagaagattacactgcatttaccagccatcccagtcacattgaattctccgccacttttgttactgccattgacaagtttgtggtgcttgatttccct

SEQ ID NO: 25677 - DNA, 384 bp, Gossypium hirsutum
  Clone ID: LIB3147-038-Q1-K2-D5
taactctccaactgttgtttccactttttctcttccagatctgaatcgcaaaagggaattttcagttgaaaaagatgggtcgcggagttagcagtggcggtgggcagagctcattaggttatttgtttggtagcggagaagctcctaaaccagggacaaacaactcccaagctgctccagctgaagcaccagctgtctccaaacctggccctgctcctgaaccagtagatatttccaagcaaattcctgctggtattaacagtatttccgcaaacaattacatgcgtgccgatggtcagaatactggcaatttccttacggatcgaccttccaccaaggttcattctgcccctggaggcggatcttctctggactacctatttg

SEQ ID NO: 25678 - DNA, 341 bp, Gossypium hirsutum
  Clone ID: LIB3147-038-Q1-K2-D6
cccacgcgtccggctgctgctgctgctgctgctgcagtaaatggaaaagctaagccagatgcaaaaacagccaaggctggtgctgggaaacctgatgctgttaaacaatctggcaagatagcagaacctagcaataacaggaaatctgaggatgaagatgatgatgatgagtccgaggatgagagtggttctgatgaggaagatgattctgatgacgatgatgagtctgacgagatgtctatggatgaaagttcagatgacgaggatgaggagacacctaagaaggtcgagtcaagcaagaagatacctgtcgagtcaagcaagaagagacctgctgaagc

SEQ ID NO: 25679 - DNA, 387 bp, Gossypium hirsutum
  Clone ID: LIB3147-038-Q1-K2-D7
gccgtaaggataattctgaaaagcttttgcattatcagagagaagagttatagaagaggatcaagaatcagcagcgcgttgggattttaccttaagagttggtcaatgctctcatataacaagggatagttttgacgagaatttcacatcatagtataagcaaagcaagcatgaagattttagtatcaggagaatcctagtcctaacatatgcttttgaattaaggataaaataactttaacttcatggaattcttattcttagtcatacactgaaaggcagcctatcaatttgtaagtaaccattattcaccattatctttggaatttggtaaccagtttatcaacagagagagcgctatagaaaactgcaagatgaatgttagta

SEQ ID NO: 25680 - DNA, 407 bp, Gossypium hirsutum
  Clone ID: LIB3147-038-Q1-K2-D8
ctcggcgcccaaacgttgcctttgtttactcttatggtctcgacggtcttagtcggggttttagtcatgattttcaggtttatcggcaacgttttcggcggcgcaagcttcaatcccgcggcttctatgactttccacgttgcgggtctcaagaaaaacgactccatcctctccatggccgtcagattcccagctcaagccgccggtggagtcgcaggcgtcaaggcagctctgggtttgattcccgcggaatacagcaacaccctgaccggaccttccctgaaagtggacttacacaccggagccgtcgcagaaggactgtttacattcggacgaagccttgcactgctgctgataatgtttatgggtccaaaaaacgggtgggttaagcaatggttggtgtcttt

SEQ ID NO: 25681 - DNA, 386 bp, Gossypium hirsutum
  Clone ID: LIB3147-038-Q1-K2-D9
aatggttcctaaacagatcaaaatcgttgatgctaagtcttcggtgaccgtaaaatccgacgtgtatgccggatcggctttctccgtttctccggcaccgagctcacttcctttacccactttctcgaagaagaaacaggttccggtcgatgattcagctacaagggatctcaggcgtttgctccggcttgatctctgagacccgaaaatttagatttggatccaaataagccttcgtctctttttatctccatctctctcttgatacgtttcgtctctatttagatatctccggaaatttcaagatccgatgccctccgtgatattttttcaagacggtggacggatttgaaaatctgggaaaattttacgggcgattagatgat

SEQ ID NO: 25682 - DNA, 381 bp, Gossypium hirsutum
  Clone ID: LIB3147-038-Q1-K2-E1
cccacgcgtccgctttttcggtaacttatagatgagggttgtgatgcttggccttgatgcagctggaaaaacaactatattgtacaagttgcacattggagaagttttatctactgtccccactattggattcaatgtggagaaagttcaatataagaatgtgatgtttacagtttgggatgttggtggacaagagaaactaaggccactctggaggcactactttaataacacagatggattggtgataattaccgctctctctctcctcttaaaaaaatggaatacattttcaccctccaattgttcttctgattgttttggtaatttgtcaaaactgaaagatttatttgtaaagtgatttactccgtcttcactact

SEQ ID NO: 25683 - DNA, 372 bp, Gossypium hirsutum
  Clone ID: LIB3147-038-Q1-K2-E10
cccacgcgtccgctcgtttcttctgtactgaagagaggaaaagaaaaattaaaaggaaaaaaaaaatcattgcagtggcctcctccttctctctgtccctgcaacagccgttcaaagatctataaactttctctcctcaggattttagggttttttttttcattttctactgtaaactccaaaatgcataaactgggcagaggccatcgggacaaagtccagcagttcatgactataactggagcgagtgaaaaacttgctcttcaagctttgaaggcgggtgattggcatcttgaaggagcttttgattttttctatggccagcagtctcatattaaaagttataccaatactacacatttggaagaactt

SEQ ID NO: 25684 - DNA, 394 bp, Gossypium hirsutum
  Clone ID: LIB3147-038-Q1-K2-E11
atcgttactgagtcaattgctccactaatcccaccaaccagaagtgaaggaaaggagagtaatataagaacatgggtgattgttgcttctgttgtgggtggagtggcattgctggcattcttgggattccttgtactctgggcacgcaaatgcaagcggagaaagaaaatgcaagagatggaaaaggctgctgaagtgggagaagcactacatatgacctccgttggggatacaaaagctccgtcggcaacggtcactcggactcaaccaactcttgagaacgaatatgtgccctaaccctccctctgtgatatacgagcattttcctgttttcagtaattcttctgttcacagcctcacacccattcttttttttatggccgtttgttctttg

SEQ ID NO: 25685 - DNA, 162 bp, Gossypium hirsutum
  unsure (1)..(162): unsure at all n locations; Clone ID: LIB3147-038-Q1-K2-E12
attccttctnaaccttcctctncaccttatgttaatncgnnccntcataaatatgcgactattattggaatgtaggtgcacttaataaagtgtgtgaatttgtatggtatcttttttactttctttcaactttgcatctatttagtaaatattaataaggtt

SEQ ID NO: 25686 - DNA, 372 bp, Gossypium hirsutum
  Clone ID: LIB3147-038-Q1-K2-E2
caaacatggctgcttcacttgttcttttctctcttttgctgcttcatttcactcaagctgaagaattgatgagcattgatggagctccaagcccttcacctcaggcacaacctattgattgtggagtagcatgtgaaggaagatgcagactatcaaagaggccaaatctgtgcaaaaggtcgtgtgggagttgctgtcatagatgcaagtgtgttccaccagggacgtcaggcaactatgaagcctgcccttgctatgccaacttaaccacgcgcaaaaatgttcgcaagtgtccatgattccataaatgttccacttgtttgatgttatttacttagttcaagataagtctttctttctactgggaaatga

SEQ ID NO: 25687 - DNA, 350 bp, Gossypium hirsutum
  unsure (1)..(350): unsure at all n locations; Clone ID: LIB3147-038-Q1-K2-E3
cccacgcgtccggaaagcaatgcatgttattaagaagcagtatgcagtgtttgatgcagaggttctaagtaagattccaaggggaccattaaaggagaaaaagaaggattagatttaccggccaagatgtgcttttgctaggtttctgacatacatttggtagctgccttccgtgaaaatgtgttatttactatatatcctgtatcagttagaaccctgttttaatctttttccggttttagtacacaatgggttcaaaaagtttgatgaatttggcatctttttttctaaatcttgtttagttgttttttgatatggatccatatgctatgtgacgatatgttttcnaa

SEQ ID NO: 25688 - DNA, 394 bp, Gossypium hirsutum
  Clone ID: LIB3147-038-Q1-K2-E4
ctacaaatggttgaagccagggggcatatttcttataagtgattactgcaaaagcgcaggagcttcatcgcccgaatgggcagagtacatcaagcagagaggctatgatctccatgatgtaaaagcttatggccagatgcttaaggatgctggttttgatcaggtcattgcagaggatcgaaccgatcagttcatacaagttctgcagcgtgaattagacaaagttgagaaggacaaggataccttcatcaccgacttttctcaggaagactacgacgatatcgttgggggatggaaggcaaagctgattaggaccagatttggggagcagagatggggtcttttcattgccaacaaaaactaagtcctgcttcttctctaatggtactttctc

SEQ ID NO: 25689 - DNA, 127 bp, Gossypium hirsutum
  unsure (1)..(127): unsure at all n locations; Clone ID: LIB3147-038-Q1-K2-E5
ccggtttcggaattacccgggctcgacgccacgcccgtccggtcggagaagagaagtgtctcannacatctcctttatcctctnngggacccgnnggtcacaagaagggtgaagggagtattgttga

SEQ ID NO: 25690 - DNA, 383 bp, Gossypium hirsutum
  Clone ID: LIB3147-038-Q1-K2-E6
aatcctgggaaacgaatccaggccgttattacatttggaaaaggtttcagtggatcgaattcaattgtccaaggctgaacagttagatagtgaccaaacactatccatggaccttgagtcagagccaggtcatagtctaccctgcattggaaacggacaaggaaatatccatttttgatatccatcagatgaaaaggttgagagggtttccaaaggctagaaatacgattgtgtaacgccccgtaacctatgttccatcctaacagcttgacaactacgatagtctccatatccctaactaaaaaattccttataagctccgagaagtcaatggcagggattccattaatggaggatcgaagaatgtcaccttcttcaatgac

SEQ ID NO: 25691 - DNA, 396 bp, Gossypium hirsutum
  Clone ID: LIB3147-038-Q1-K2-E7
cccacgcgtccgagagaattaagggatcgattgtcaatgtcagtggagagactaaatcagtcaagtgagagaattaaggagagtagaagaactgttctggaaacagaagagctcggtatctcgatacttgaagatttgcatcaacagcgacaaactcttttacatgcccacaacaagctttatgatgtggatagcgccattgacaagagcaagaaagttttaacaaccatgtcaagaaggattaccaagaacaaatggatcgttatctcgataatcgtagcacttgtccttgcaatcatcttaatcctgtattacaagatttcacatggctgatgaaatcttttgaaccattaatggtctgcaattgtattatgtgatccgcatttgatactttca

SEQ ID NO: 25692 - DNA, 299 bp, Gossypium hirsutum
  unsure (1)..(299): unsure at all n locations; Clone ID: LIB3147-038-Q1-K2-E8
gattttcttcattctcatttntgggtggaagaaacaaccaatagtanaaaacaaggccggatttaaagaaacatcggagggtaaaagaagcantggataaaaggctgaaaaggcggagaaagaagaagctgctgccgctcctcgccgaaggcgccgtgacaattgagcaaatcttaaaacaaaggtggctggtggcgactagcaagttgagttttggctaatttttgcactggaggtggttttcgtagctgagatattatttgcctttggcattattttagatttacttactgaatatt

SEQ ID NO: 25693 - DNA, 331 bp, Gossypium hirsutum
  Clone ID: LIB3147-038-Q1-K2-E9
gagctatcaaattcgttcctatgcttttttggggagcttttggaacacctataccgtgtcaacatccgatgcatgtggtggtggggaaacctatttacttgaagaaaaatccacaacctactgccgaagaggttctggaagtgcatgaccaatttgttaaagcacttgaagatctcttcgagagacacaaagctcgggttggatacgatgatcttcatttaaggattctttagtttcagcttattttaagtgaacagtgtttctttatttcccaatttcttgtatcctcttgttcactagcgatgcctcaaggaactactcagtgattaaa

SEQ ID NO: 25694 - DNA, 404 bp, Gossypium hirsutum
  Clone ID: LIB3147-038-Q1-K2-F1
cgtattattctcccggatggcggacttgtgctgcggtggcgattcaattggcttggaggcggtacaaacaccggttgacccttacgtcgttgtcattcattaggcctcggaggccgttgtcgagaagtaattcattgggggaggacagactcaggctttatacagctatgttaacttcaccaaaaccaaatcaagatgattttgatttttgaaaataaaaaaaaattaaaatgatgctacatggaattcccatggtccttaagtttgagttttctgaattaatgttcgctctaataccatttgtaagtacctcgtatttggtacgagagcattattctttacttcgactcagcctgtagttttgtttttaaaagaaaaaaaaaagtttgtttctacagctatat

SEQ ID NO: 25695 - DNA, 400 bp, Gossypium hirsutum
  unsure (1)..(400): unsure at all n locations; Clone ID: LIB3147-038-Q1-K2-F10
tgggaatgagcgggtacccatatnatttgggaaataataataaagtcccagctcattcatggtgatttgtgaagcgtccattgacgagtactttcttaatgcaactactagttttatactcacagttcaccaacatgtttggtctttgcagttaggtcacatgatgaccaacatgtttggtcttttgcaattagttgtcatgatcggttgtatcttgaaccaactttgcgagaccaggtgttgcacatcagaacaaaaagatcattgggtttgatgtaggagagcttaatgttagcattccataaatttccctggtttcttgtagttaagtctaatatactttgtcttattgatattatttagtgtggtttttttctttggtggggtcaaatgatccttt

SEQ ID NO: 25696 - DNA, 375 bp, Gossypium hirsutum
  unsure (1)..(375): unsure at all n locations; Clone ID: LIB3147-038-Q1-K2-F11
gcgaccacgcgtccgtgtaatcaaaanttgccagcgccatgtcagagagcggtgagatcaaggttgaaggacgggtgagggatggaattccccatttgacgaaagtagggtcatttgaagtggatgtgagcttggaaggtagcattatactttgcagacaggttgatcagccaggcatgatcgggactgtcggcagcattttgggcgaggagaatgtgaacgtgagcttcatgagtgttgggagggttgctccaaggaagcatgcagtgatggccattggagtcgacgaacaacccagcaaagaaactttaaagaggattggtgaagtccctgccattgaagagtttgttttcctcaagttgtangctggctgtg

SEQ ID NO: 25697 - DNA, 359 bp, Gossypium hirsutum
  Clone ID: LIB3147-038-Q1-K2-F12
accacgccaacgactatgacaacttctttgttcaatacgatgtccaagctgctgcggaagctgacactaaaggcgacgctaagttcgctaccgatgcggctactgatgccgctgctgaagccgatgcttgcagcaaccgatccaaaaaccaacccaaggctacaatctatgctagccacaaggttgctcatgatcttgctgctatggttgatttcatactacaagtactactaagagtacgaacaaatgaatgaactgtctaatgccatgtaaagggctatacagatgtatgttcagatgtgttatagatgttatgaaaaatggatgatgagtgaaatgatttgtggttttgtttaaaa

SEQ ID NO: 25698 - DNA, 181 bp, Gossypium hirsutum
  Clone ID: LIB3147-038-Q1-K2-F2
cccacgcgtccgaaaaagtggaagaattctccgccgttgaaggggtagactgtattcaaatgggtccgttggatttaagtgctagcctgggttacctctgggacccgggtcacaagaaggtaagggagatgttgaggacggcggaaagagaagtgcttaagtccgaccggaaagacggcgg

SEQ ID NO: 25699 - DNA, 260 bp, Gossypium hirsutum
  unsure (1)..(260): unsure at all n locations; Clone ID: LIB3147-038-Q1-K2-F3
cgcccacgcgtccaaaatcatctggggggttaaaagtgcatgttccgtcctgtaaaatggtgattatatgtgagagatgtggctttgcggtnaaaaaaaaaaaaaaaaaaaaaaaaaaaaaaaaaaaaaaaaaaaaaaccacaaaagaaaaaaaaaaacacacttccaaaataccaaaaaaccaaaaagattgctgacaaaaattaacaagaagcttgccgtgctccagaccaacatcctgagggttaaaccctgactgt

SEQ ID NO: 25700 - DNA, 379 bp, Gossypium hirsutum
  Clone ID: LIB3147-038-Q1-K2-F4
cccacgcgtccgcccacgcgtccgccctcgcgtccggcttttgcgtggagagaaccggagctactgccgtcgtcgccgccatggtgaagtttctgaaatccaacaaggccgtgattgtcctccaaggccgatatgctgggcgcaaagcggtgatcgttagatccttcgacgatggaacacgtgaccgcccctatggccactgtttggttgcagggataaagaagtacccgagcaaggtcatccgcaaggattccgccaagaaaacagcaaagaaatcgcgcgtcaagtgcttcgtcaagctcgtcaactaccagcacctgatgcccacccgctacaccctcgacgtagacttgaaagacgtggttaccgtcgatgcact

SEQ ID NO: 25701 - DNA, 170 bp, Gossypium hirsutum
  Clone ID: LIB3147-038-Q1-K2-F5
tggtgagcttgcgtgaaaatcccatagtggattttagagaagagatggagaaatttaggaggaaagaatttagtaaagtgtgagctgtttccagatatctgaatcctgctagtagagctgtcttgttgctaatttggctaataataataataataatttgttcttgttct

SEQ ID NO: 25702 - DNA, 380 bp, Gossypium hirsutum
  unsure (1)..(380): unsure at all n locations; Clone ID: LIB3147-038-Q1-K2-F6
ggaagccatctttctgatttctactctttttcttcttcttctaacaccattgctatccacatcgaagccttaagtaggaaacccatgtctgttagaggaaagggggaaaaagatgatcgcttcgataatgttaatgatgctttgattttgttcaataagatgattgacaagtacccaaagccttccattgtggaatttaataaattattaggagccattgttaggatgaaacattatgccattgttgtttctatgtatagacggatcgatttattgggcgtttcccgtgatgtttattctttgaacatctngattaattgcttttgtcaattaggtcgaattgattttgagttttctggtttggngaaagtgctgaaatt

SEQ ID NO: 25703 - DNA, 265 bp, Gossypium hirsutum
  Clone ID: LIB3147-038-Q1-K2-F7
ctttactagtttctgctctgtttttatggagttgatgagaatttttagctatgcttcgattattctttcgatttcagtttatttgcttccaattatggttaattcgattgggatcaattacgggcaaatagcagacaatcttccttcccctgaaaacgtagtgccgctcgtgaaatctattggggtcaccaaagttaaactttacgatgcagatccgagagtgctcggcgcattcgccaactccggcgttgaattcatgatcgga

SEQ ID NO: 25704 - DNA, 301 bp, Gossypium hirsutum
  Clone ID: LIB3147-038-Q1-K2-F8
cggacgcgtgggctgacgcgtggtcttctatcattgacatggatgccgatgtcataagcattgagaactcacgttcagatgagaagctcctgtcagtcttccgtgaaggagtgaagtacggtgctggaattggacccggtgtctatgacatccactctcccagaataccatcaaccgaagagattgctgacagaattaacaagatgcttgccgtgctcgagaccaacatcttgtgggttaaccctgactgtgggctcaagactcgcaagtacgctgaggtgaaaccagccctgagcaacat

SEQ ID NO: 25705 - DNA, 335 bp, Gossypium hirsutum
  Clone ID: LIB3147-038-Q1-K2-F9
cccacgcgtccgataagagctttttatataaatccagcaaacagcaggttttctaaaggaatatatattccctggaggaaccctgctttctttggataggaatttatcagccatggctgctgcaacaagattcagtgtggagcatgtggaaaatataggaatgagttattaccacacactgagatggtggagaaaacttttcctggaaaacacaagcaaagttctagctctggggttcgacgagaagttcatgaggacatgggaatactatttcgattactgcgctgccggttttaagacaggaactcttatagattaccaagttgtattttcaa

SEQ ID NO: 25706 - DNA, 347 bp, Gossypium hirsutum
  unsure (1)..(347): unsure at all n locations; Clone ID: LIB3147-038-Q1-K2-G10
aaacttataacgttcgatcgtttaactcatacccatttttaagngggggaaaggtggagagttcttagtcgtaagcaggatcaatggctccttcaactctgacggctcttgcggaagagaaaaccttgcaggcaagcttcgttcgtgatgaagatgagcgtcctaaggttgcttacaaccaattcagtaatgatatccctgtcatctctcttgctggtatcgatgatgttgatggcaagaggggtgagatatgcaagaagattgttgaggcttgtgaggattggggtgtcttccaggttgaggatcatggtgatgatactaaactcgcggtcgaaatgacacgtttt

SEQ ID NO: 25707 - DNA, 354 bp, Gossypium hirsutum
  Clone ID: LIB3147-038-Q1-K2-G11
ggaaaagtaaagtatggagccggaggtaatgaaaggtggtggcccgaagaagaagcgcgttttaaggtctgtcaaagctggtctccaattccccgttggtaggatcggccgttacttgaagaaaggaaggtattcacagcgtgttggaaccggagccccggtttacttggctgctgttcttgagtacttggctgctgaggtcctggaattggctgggaacgctgcacgtgacaacaagaaaaacaggatcatcccaaggcacgttctacttgccgtgaggaacgacgaagaattagggaagcttctcgccggcgtaacaatcgctcacggtggtgtgttgccgaacatcaaccc

SEQ ID NO: 25708 - DNA, 361 bp, Gossypium hirsutum
  Clone ID: LIB3147-038-Q1-K2-G12
cggacgcgtgggcgttcgcgtggttgttcttctgacagtccatatgctggtggagtgtgtctagtcaccattcattgtggtccggactatccatttaaaccaccaaaggttgcattcaggacaaaggtctttcacccaaatattaacagcaacggtagcatttgccttgatattttgaaggagcagtggagccctgccctcaccatatccaaggtattgctatctatctgctcactcttgacggatccgaatcctgatgacccattggtgccggagattgcccacatgtacaagactgacaagagcaagtatgagacaacggctcgaagctggacccagaaatatgcgatgggttaacgtg

SEQ ID NO: 25709 - DNA, 368 bp, Gossypium hirsutum
  Clone ID: LIB3147-038-Q1-K2-G2
caaaatccttcccgttcattgttccttatcttcttttcgagaataccatgtcggtgaccaagttcaatgctatgataggtggtcttttccaactcggcagtgcatacgagtgggtcgttacgaaaaaatccggacgatcttcggagggtgatcttgtttcattggttgagaaaaagccaaaacaccatcgggttggatcagaacccaatcttgaggaaatgaaagctgatctccagcaagaacaggaacaaaaggctcgtaaaaagaagcataatagaatatacacgaaggagctctctctggcgttcctcctcctaacagcttcagctaggagcttactgtctgcacagggtatccatttctatttc

SEQ ID NO: 25710 - DNA, 333 bp, Gossypium hirsutum
  Clone ID: LIB3147-038-Q1-K2-G3
cccacgcgtccggcctgcctaaaccgttataccagatgaaccagggcccaccttgatgctactacctagaaggaccaaatatatgtggagatattactattctctttgaaatttgccatgtccatgccaccaaaataccaagctctataatatgtgctcccaagaaccttgctagccggaaatgcctgttgctgccttacagttccttttttgtttgatgtcgtttctgcttagtagttttgcatttgtttagtcgttcaaaaccttgttgcttcttccatcttctgactgttgtaccaagtgcctggtttataatttggcttctgctttctc

SEQ ID NO: 25711 - DNA, 362 bp, Gossypium hirsutum
  Clone ID: LIB3147-038-Q1-K2-G4
cccacgcgtccgaaaaaatgggcagacgatatggagaagagggagagaggggagcgggcatggccgattacagtgttcatgggcgctcaacgcctccaccgttgcaccaatccgaagccactcgaactgctggtacagggcgtgtgtacgagggctgggtgctggtcgtacggaagctgtgctggcgcggggcgtgggcgtggcgccaggaggctggggcgtacggaggcctggagctgctggggttgctggttgcggcgcgaggacccctctgccctagggtttgccaaaatcgggcttaacctttgggccgtttagggtattaggttaaatcatttaggattttgggctattgggttgta

SEQ ID NO: 25712 - DNA, 183 bp, Gossypium hirsutum
  Clone ID: LIB3147-038-Q1-K2-G5
cccacgcgtccgtcggatcgcggcgacgtgggcggttcgctgcccgcgacgtcgcgagagagtccactgaaccttatcatgtagaggaagaccatgacagtgggtgttattgaatgtctcatctaattttaaggatgcattgctaataaagcctatgacaagctgagttggacctttgtgggc

SEQ ID NO: 25713 - DNA, 142 bp, Gossypium hirsutum
  unsure (1)..(142): unsure at all n locations; Clone ID: LIB3147-038-Q1-K2-G6
tcgcggccacatgctttatccgatgcccgcaacgncgcggggagtttttttaaccttatggtgtacaccaaaaccatnacantgtttgttattgaatgactcatctaattttaaggatgcattgctaataaagcctattaca

SEQ ID NO: 25714 - DNA, 278 bp, Gossypium hirsutum
  Clone ID: LIB3147-038-Q1-K2-G7
cccacgcgtccggagctttactctttattaacggttgctgaaatcccagctgaaggattgaagggtttaggcaccaaggtcattgatgacgatgaggaataatttttatctgtctcttgtttacttgcattttgttctcctacaagtttcatcagagttttgactagttttacaattgtgacattaaaaatatttggtttgtgttatttagattcttaagcttgtcgctttagtttagagctttataaatagattcaaatgatgagtgtttggatttt

SEQ ID NO: 25715 - DNA, 361 bp, Gossypium hirsutum
  Clone ID: LIB3147-038-Q1-K2-G8
cgatttccttcaagaatccctaattgtcaagccgttatttctccaacagagagaaaatacaaatggagtcttcaggaccttcaaggaggacttgtttcatccaagaagatgatggattggcttccattgtagatatggaggctggatattcaggaagccattaccaaaaggttaaccaaaatgggtttctttcaagacctctttgttactctagaaggagtagtttgaggaatctatcgtctttttcttcgtcatcttcttctggttcagtttcttctccgaggcctgctcgcttttatgatgccagatttgaagacgttcatcaaccctatttcttggatgtttgctttctttgcaaaga

SEQ ID NO: 25716 - DNA, 290 bp, Gossypium hirsutum
  unsure (1)..(290): unsure at all n locations; Clone ID: LIB3147-038-Q1-K2-G9
cgcagggctnggttcggactttgttaggctttcttccggagatgcttaaaaacccatttgaaacgagagtttttgcttttgtttgtgaaaattgttatggcttctgtgttttccgttttgtgctaatcaattctgtaatttttccatcagtaaatgtgatgaatgttgcttcctttgacagataaccaaaaagagtaactataaaaaccaataaaaaactataaaagggcggccgttgtggaatctatagactttctcttcctcacttgctactggttcatttttttttt

SEQ ID NO: 25717 - DNA, 315 bp, Gossypium hirsutum
  Clone ID: LIB3147-038-Q1-K2-H1
aaaacccggccggacccacgcttcctaccaaacaacgatttatggctattctatctacggacacattttaaccaaccaagcgggccggttcaaattatgtgttggcacatgaacccccactaccatgcccgggaaaggattcacaattcggtgaggttaacatcggaaggggcaatccattccattaacgtttgccaataagggatggcttaagaaactttttggtcatgtttgattttggcacacccatggatctgcgtatttgttccatcccgacatttataccgaccgaaggatcttcgttcagggtattga

SEQ ID NO: 25718 - DNA, 229 bp, Gossypium hirsutum
  unsure (1)..(229): unsure at all n locations; Clone ID: LIB3147-038-Q1-K2-H11
cccacgcgtccgcacatgacaatcatgntttattcagttaatgctgacgtggtaggggattaatgaaaacacgtgtgggttacatacactccccaatttaggaaagagaaaaagggaggtttcaaagcatgatgagcattgagacttgttggccttagtgtatacaaagaatttgtcattatttcatggatgttttgttaaatggaaatttttgtttgtttttggttgg

SEQ ID NO: 25719 - DNA, 408 bp, Gossypium hirsutum
  Clone ID: LIB3147-038-Q1-K2-H12
gacaaaagggagttttgccagaatatttgctgacatagatttggatgatggtaaccgggattcagtgcccatagtttgcgacaatgaagagaccgaagaggtaagaacaaaagtatcttcatcttgcacatccaaacgtaaaagaaaaaatgttcaagaaagtgtcgttgatgaacaaattaaatttgtgggtgaacaacttgacaaaattgctaatgctttggaacaatttattgcggataagacaccacatctttacgaagaagtgatgtcgatggaggaagaaggatttgatgatgactccctgtgttttgtgtttgattatctagtgagtcatgaatccgaggccaaagctttttttagttaaaagtaagaagtataaaaaaaatttggctttaaaaatttttt

SEQ ID NO: 25720 - DNA, 341 bp, Gossypium hirsutum
  Clone ID: LIB3147-038-Q1-K2-H2
aaaaaggggaacgctccatataggatttttaatttggggaatacttccccggttaaggtgccggagctggtgaacatcctggaaagacatttgaaggtgaaagccaaaaggaatatcgtagatatgcctggaaacggtgacgttccattcactcatgcaaatatcagtttggcccaaagagaattcgggtacaagcccacaaccgatttgcaaaccgggttgaagaagtttgttagatggtatttatcttattatggttataacaaccgtaaaggtctacaataaaatttatttttggttttaaatgtagggattctctcggtttcccgatagaatgaaat

SEQ ID NO: 25721 - DNA, 264 bp, Gossypium hirsutum
  unsure (1)..(264): unsure at all n locations; Clone ID: LIB3147-038-Q1-K2-H3
cccacgcgtccggttggtaattctaaattactctgttactgtttggtttgggttctgtcgtttttgatcgatgttggggctgttctcttaaaagcataaaaatggaatgaagtatcttcttttcaaaaaaaaacaaaaacataaaaaaaaataaagcaaatataaattaaaaacaaaaaaaaattaaagtacaagcccacaaccaaatttcaaaccttaaagaaaaagattaaaaaaaaagnatggggcggcctttttaaagaa

SEQ ID NO: 25722 - DNA, 414 bp, Gossypium hirsutum
  unsure (1)..(414): unsure at all n locations; Clone ID: LIB3147-038-Q1-K2-H5
gaaaaccggctcgacccacgccgtccgcggacccttggccgtacccgtgggtnataatttaatatatccctggatatacttaagaaggtgtctcccaagtagttgtgaatcaaggctaaagttcggttttatcatgtttagctggttcattggagaggctttttaaagggagatatcttgttcaaatggtggtgttggagaatatctaatttctttttgctcaggggaaggggttgttgaggttcaaaccctcgtcctggtgacaagctaagacgtgaaagcaatagaagtcttttgctattatactagtggtttggtttggagaatctctgattgatttcttcgtacattgcgtggattatttacaatagaagaagaagattacatgcttgattttcagncctgactgatttc

SEQ ID NO: 25723 - DNA, 189 bp, Gossypium hirsutum
  unsure (1)..(189): unsure at all n locations; Clone ID: LIB3147-038-Q1-K2-H6
aaagttcggntttatcatgtttagctggttcattggagaggctttttaaagggagatatcttgttcaaatggtggtgttggagaatatctaatttctttttgctcaggggaaggggttgttgaggttcaaaccctcgtcctggtgacaagctaagacgtgaaagcaatagaagtcttttgctattatac

SEQ ID NO: 25724 - DNA, 334 bp, Gossypium hirsutum
  Clone ID: LIB3147-038-Q1-K2-H7
acccaacgacgaggcaatggcgaagcttacgacggaccagttgagcgaaccaggcgcgccggagcaaatcatatattggcatataatcccagagtaccagacggaggaaagtatgtacaatgcggtgaggagatttgggaaagtgtcgtacgatacattgaggttgccgcataaagtgttggctcaagaagctgatgggtctgttagatttgggcacagcgatggatctgcgtatttgttcgatcccgacatttataccgacggaaggatctccgttcagggtattgacggcgtccttttcccgctggaagagaaagctaaggaagaaaagaaa

SEQ ID NO: 25725 - DNA, 363 bp, Gossypium hirsutum
  Clone ID: LIB3147-038-Q1-K2-H8
ggctttgaagactctcctgattgcatgattcctgaagcagattgtgaaggcatgcgtagactttataaagaaatttgggtgcacctaaaatgaagcaaatcaggacagttgagagaaatagatgatgaactcatgtgagtctacaaacatagtgtaaaagatgaattacatgtatagtatgagcataaaagaaaattgcatagctccctccaatttatggctttgattcatagttaatgttttcaaatttgtatatcgtccctgcttaggggaaaggtttcctgttagacaggagcaataactaaaaatggccttttcatttgtcaaaatttctctagagtggggaaaattaccaacgttttt

SEQ ID NO: 25726 - DNA, 215 bp, Gossypium hirsutum
  Clone ID: LIB3147-038-Q1-K2-H9
aaaaaaaaaaatataaaaaaaataatactatacttgaaaagcgtccatattaaaaggggcattttataaaaacgcttgcaggcacctaaaattaatacaatcaaaggttgcctaagattcaatgtacgaccagcagttttacaactgttatcgcttcgttacccgacccacctatcaccaaaggtaactatactctctcactaatttccgatact

SEQ ID NO: 25727 - DNA, 341 bp, Gossypium hirsutum
  Clone ID: LIB3147-039-Q1-K1-A1
gcatttccactcgcaatgggagagaaaattaacggaaacaagcaaggaggagcggatgggaaaaagaaggaaatgagttcttcaacctctgttttcaaatttgagtgtctctgtgatggttgtgcttccaaaatcctcaaatgcattaatcaatttgaaggggtggagacggtgaaaccagagatgagctcaaacaaagtgacggtgataggaactgcggatcccactgccattaaagagaaactcgacaagaaaacgaagaagaaagttgagctcatttcttctcaacccaagaaagatgataacaaaagaggaaaaaaaagaaaaaaaaccttgaccac

SEQ ID NO: 25728 - DNA, 383 bp, Gossypium hirsutum
  Clone ID: LIB3147-039-Q1-K1-A10
gctttaaaactagctctatggttttagatgttcaatttagtgtcagtcaaacgagcttgagaatggttgctgcttactcagatggcttcgtgaaagtctttgagctccttgatcctttagaactaaagaactggcaacttcaggccgaatttcaaaatgttatagattcggtttccatagtagggaaggcttcatgcttgacagcatgtatttcatggaatccacaaaatggtgaaggccaagaatcaagctttattttgggttttaaattctgacactccacaactcaattcccccaaaggtggtgggaatttgatccagctcatcagagatggctgccagtagcagagttggctttgcctggtgacagaggagatcaaata

SEQ ID NO: 25729 - DNA, 361 bp, Gossypium hirsutum
  Clone ID: LIB3147-039-Q1-K1-A11
cggacgcgtgggcggacgcgtgggggtgcataccaagtaactgcacaaccgatagttgagttggatttaagctagtgcgccagacattattgctactacaagatcataacccgagaacacgctatggaagtatccgatctgcagcattatactatataaacttcttaatattagcatggaggacagtgtacggtatagtaacagacgggctatcaatgatattccgtatgttaaacgatttcttgggtttgatcggaactgatgcgatgtgtacagtaacaggttactagctgatcgagatgcacattgcgcaagctaatataccaaagtatacattgatgtgggtatggctgaaaatact

SEQ ID NO: 25730 - DNA, 147 bp, Gossypium hirsutum
  Clone ID: LIB3147-039-Q1-K1-A12
gaaaatgcaacctgatgcttcgggaaagtattcatataacggctctttggactgtgccatgaaaaccctcaagtctggaggaccattcaaatcttacactgggttcccccgatattgcggtaggattgctccgcacgtcatgatgac

SEQ ID NO: 25731 - DNA, 368 bp, Gossypium hirsutum
  unsure (1)..(368): unsure at all n locations; Clone ID: LIB3147-039-Q1-K1-A2
tgacgatgttgacacactggagatctttttcgaaggcgtcatcgctttcgacaacaagctcgcagatgctgatttcttcaaaaacttcgaagacaattttgatgactctgatatcgactgaaaaaacaaagaaggatcgtttcaagtactcatctatcttttttttccctttttactttcgctttttagggtctgaaatttattaaaactttgttcaatttagtcgaatctgaactgtaatatggatgcttatctgtatgcaaatcaaaatagtgtagtttataagtttaaatcggtataaataaatataattttccttttnaaaaaaaacatgccaaaaaaaaaacctaaaaaaatgaaataaacaa

SEQ ID NO: 25732 - DNA, 377 bp, Gossypium hirsutum
  Clone ID: LIB3147-039-Q1-K1-A3
cacactcctggagatgtgatttcaatgccttcaatgcctcatagtggcagttcttccaagcctttgatgatgtttggtgctgagggtgctggtacacttgcatcaccttcaaatcaattgtgggatgataaagatcttgaattgcaggctgaaatggatcgatttgtggaggatggatctcttgatgataacgtcgagtcttttttatcccatgatgatacggatcctagagatgccgttggccgatgtatggatgtaactaaaggtgtataaatattacttgtatggttgctatgataatgataaagtctatcgttgtcgggaatctattgtagcgtattttttcaaacattgtagtttcactctatttgcttttt

SEQ ID NO: 25733 - DNA, 350 bp, Gossypium hirsutum
  Clone ID: LIB3147-039-Q1-K1-A4
accttgtataacaaaattgggaaggccgttttcacttgtccgtcatggctttcgcctggtgcaaagaaattcataaagcgtattcttgatccaaaccctcttacacgtataactatccatgatatcttaaacgatgaatggttcaagaaagggtacaaaccacccaaatttgaggaggaagaggatgtaaatcttgatgatgtagatgcagcttttaatgactcaacggaacactttgtaacagaaaggaaagagaaacccgagtccttgaatgcttttgagtttatctctaggtctcaaagctttagccttgacaagttgtttgagaagcctacgggtcatgtgaagcg

SEQ ID NO: 25734 - DNA, 345 bp, Gossypium hirsutum
  Clone ID: LIB3147-039-Q1-K1-A5
agtgatcgaaggagatttaatggaagagatttaaagctttgtaatcacgattcaagttgcgcccaaaagcgagggtagcggcagcgtaatgcactggactttggaatactagaagctgaacagtgggaaagcgcatactgagactctgatggaatcagatcaagaaatctctaaagacattgacgcccaacctcacgcaagcaagctaaacagtatcacatgctgctattagcgccgctgctcgaagcactgttcatctattgaatgaataaagggacttcctttcatatgtatttcgatctgaatatgtctgttcagatcaatatgcaatccatgcgagggagc

SEQ ID NO: 25735 - DNA, 339 bp, Gossypium hirsutum
  Clone ID: LIB3147-039-Q1-K1-A6
accggacgaaggagaattaggggagccgatttcaatctatcttaacaccattcaccttgcgcccaaaagcgaaggaagtggcaccttcattcactgcactttagacttctagatgttcgggagatggattgcgcatactgggactatgctggggtcagtccaacatatctctaaggacatgaacgcgcacctcacgcaaacgagcttaacagtatcacatgctgatattgtcgccgctactcgaagcacagatcaaatactcgagtgcatgaaggcacttgctttcatatgtatgtcgaactgaatatgcctggacagatcaatatacaatccaaggga

SEQ ID NO: 25736 - DNA, 333 bp, Gossypium hirsutum
  Clone ID: LIB3147-039-Q1-K1-A7
cttggaatgtggtagctgttactacagcctttatcaaaggagaaggtccaacaatttggtttcttgccattatatatttcatatctggggtccctggtggctacgtaatgtggtatcgccctctctatcgtgctatgaggactgatagtgcgttgaaatttggatggttttttttgttttacttgttgcatattggcttttgcatctttgcttcagttgctcccccaattattttcaagggcaaatcccttgcaggtattttgcctgcgattgatctcattggccacaatgctttggtggggatattctacttcattggttttggatttttct

SEQ ID NO: 25737 - DNA, 211 bp, Gossypium hirsutum
  Clone ID: LIB3147-039-Q1-K1-A8
tgaattgaattccagtgagatgaatccatttgacagcacgaaagagttgtggaggacgaaggaccctccattataaaagtacaaacggctattcctagagtatatgatgacactgacacgaataacattaagttgctcctttaagatttgtatttcttagaggcgaatttgagttatttattattggtgatgcatcatcgccgttaagatt

SEQ ID NO: 25738 - DNA, 337 bp, Gossypium hirsutum
  Clone ID: LIB3147-039-Q1-K1-B1
cacagccttgcccttgtggttaggaagttttgagctcacggtgggctcgcacggggctggcatgaatctgccaaggcaattgaaaagcacaatgcgcatccttgcgttatagctgatgactgcgaccagccggactatgttaagctggtcaaggcactttgtgctgatcataatgttaaagtgctacgtgccccgagcgcaaaaacactcggcgagtgggctggtttgtgtaagatagactctgagggtaaagcacgaaaggtagttggttgttcctgcgtagttgtgaaggattatggtgaacaacatgaggccgtcgaagttgttctgcagcaca

SEQ ID NO: 25739 - DNA, 338 bp, Gossypium hirsutum
  Clone ID: LIB3147-039-Q1-K1-B10
cccacgcccgtccggcagaattcagaattggggtttgagattttactttattaaaacagagccaggaaaactcctacgggtggaggagcattcaaaaactacactgggttcccacgaatattgagataagattgctacgaacgtcatgatgacttgtaatattcctaaaccatattcaaaaatgtatagaaaaaaatgggggggggggagcgtttttagttatcaaagactttgtaccggtgctggacaaatttaattgcttttaataggggccccaaattttagttgggtggggctagttatacaaattttgaaatggaaaacacgtgggtgtcccc

SEQ ID NO: 25740 - DNA, 411 bp, Gossypium hirsutum
  unsure (1)..(411): unsure at all n locations; Clone ID: LIB3147-039-Q1-K1-B11
aactagtgaatacaagcttatcactaattcaatattctagtgatcctttgaagtttaaagggtcacttttcaggaaggaaggtcaacagccgatggcaggtttcctgctgcttgtaaatcttcttgaggaccacatgggcggtactgttggatacgtcgattggataatgcaaatacaccgacaagtccaacaaaatgcatgatatacgggtaattgttcaagaggtggctaaactttcatagtcttcttgaacttaagaacaactattgttcctttcatttgggataacttttaatctaatttttggttgagacaagcaagtttttcgagtcaggatctttagtcagagttaaatggtgtttgagttaggggctttcttttaatggattacattgcaatgaatcttccng

SEQ ID NO: 25741 - DNA, 302 bp, Gossypium hirsutum
  unsure (1)..(302): unsure at all n locations; Clone ID: LIB3147-039-Q1-K1-B12
naggatgttaaccgagagcagccgggttacttggcggcgccatatcaaggaatgccacagatggcggcatctggtagtgtcccggtggtcagtcaatatagtgaagctaatgttaatgctcatgcttctacccaaacttcttctctgtgatttcaactaaaatatgtcagtgtcggtttgtttataaagttataattaaaaaaaccactctgaatcaaactgaatatctttataggctatggcgaattcttcaatttgttatgtaacttttaagccatttattttaaacatttctaacagat

SEQ ID NO: 25742 - DNA, 380 bp, Gossypium hirsutum
  Clone ID: LIB3147-039-Q1-K1-B2
cggacgcgtgggctttcattctctctccctaaactctcattctctcgctctctctctctctctctctttcttcacaagaaaagtttttctctcgtgaatccatgtcggaggaaaagggtcggccattgccaaaatttggtgaatgggatgtcaacgatcctgcatctgctgagggattcactgtgatctttaataaggcaagggacgagaagaaaacaggtggcaagcctgagtcaccggcaaagtctgattctaatgttaagcctggagctgatcctggcaaaacccaacctaaaaaatggttttgctgcgttcaagccccgcctgcggaatcttgacgacgccctactcgtataagacataagagcttccacaagtat

SEQ ID NO: 25743 - DNA, 252 bp, Gossypium hirsutum
  Clone ID: LIB3147-039-Q1-K1-B3
cccacgcgtccgatgaatagtcatcgactttccggaaagggtagaagaatgggacctatgatgggacctaccatggcttacaagcctattgatcattacgcttcaaccgggttattctattccacctcttaaaacgaaaggaacttaaatcaaaatacttaatagcatggcgatccatttatacaaaacttctaccccgggcccccccatggagccgcagacagtgaaagtggaaatcacaatccatgaaat

SEQ ID NO: 25744 - DNA, 154 bp, Gossypium hirsutum
  Clone ID: LIB3147-039-Q1-K1-B4
tacgagaggaaccgttgattcgcacaattggtcatcgcgcttggttgaaaagccagtggggcgaagctaccgggcgctggattatgactgaccgcctttaagtcagaatccgggctagaagcgacgcacgcgccggtcgcccgattgccgaccc

SEQ ID NO: 25745 - DNA, 406 bp, Gossypium hirsutum
  Clone ID: LIB3147-039-Q1-K1-B5
agctcctaaatacaagcttatcactcctttaatattctctgatcgtatgaggattaatgggtcacttgcaaggaaggcgatacgggacttgatggcaatagggttgattaggttggtctctgcgcattcaagccagcagatttacactagggcaacaaacaactagatctttagttatatttttgcttaattagttctatgaagtattgccatggttgagttttgacttggataaatgatttttcccccttcaaattaggttgaaaacttctctttggctactttttctagaatgatttagtggttgaatttcagcttctttggcactcagctttcctagatgaaattgataaggttcttaacatgtgctatatgaggaaattgacgccaagcaacacctctttct

SEQ ID NO: 25746 - DNA, 385 bp, Gossypium hirsutum
  Clone ID: LIB3147-039-Q1-K1-B6
ttctgtttgggctttatttccgaaaatcttttgatttcctattgctattgtctatctctgcatgttttctttgtttgcctttgcgtgttgcactttctgttcccctttatggtctgtttgcaggttgggaggagggtcaacgagagaggcttccgttttggtgcaaaggacgggcaaagcctatcctcgagtgtccaatgcgctgctgaagcacatgggcagtaaaggggaggcgcggcgctgacgctagctaaggtttcggctagctgagacccaatttggacattgggcctattgggccgattgggttaggggtttagggtctgcttgtaaaatgggtaggatcttgagtttgcgttttatgtcaaatggactatctttatta

SEQ ID NO: 25747 - DNA, 327 bp, Gossypium hirsutum
  Clone ID: LIB3147-039-Q1-K1-B7
cttgcagcagctcgaagctattgtgggcaattacaagcttgtggcgtctacctcctgctcgcttctccacactgccgttgatctagtaaacgagactaagctagatgatgaaatcaaatcctggctcgcatttgctgcccagaaagttgttgaagtcaatgctgctgctcaggcttctaggaaatcctccccgagagtgactaatgaggctgttcaaaaggctgctgctgctttgaagggctctgaccaccgccgtgcaacaaatgttagtgctagactcgatgcccagcaagaaaagcttaacttacctgtccttcccaccacaac

SEQ ID NO: 25748 - DNA, 354 bp, Gossypium hirsutum
  unsure (1)..(354): unsure at all n locations; Clone ID: LIB3147-039-Q1-K1-B8
cccacgcgtncgaaaaaaaaagccaaaggattatgaagaggtggttcgatccatggcccgtgttcttcaagagagagttcaatcgcacttggcctttcctcgttggtttcgccgtcaccgggaccatcatcacaaagttctcccttggtctaaccgaggaagatgctaagaactctccctttgctcagaagcacaagaggtgatccaactgatttcaaaagcctatatgggtgccagccccttggtatgagaggctcagctgttttcctttttccttttcccaatgaacaatgaaaataacagaagacatcagttctgagtacactttattttgtgaattatgattttgtcatc

SEQ ID NO: 25749 - DNA, 232 bp, Gossypium hirsutum
  Clone ID: LIB3147-039-Q1-K1-B9
acagaacccaagatcaaaaagcggtggcgcgtgacttcacttacatcgacgacattgtgaaaggttgcttatgagcgttagacacggcggaaaaaagcaccggtagcggcggaaaaaagaaaggaccggctcaattaaggggttacaactttggaaacactttccctgtttccctcggccgattattctctattttagaaggagttctctacacaaaagcccacaaacatgt

SEQ ID NO: 25750 - DNA, 406 bp, Gossypium hirsutum
  Clone ID: LIB3147-039-Q1-K1-C1
gagaatgcatggcagatgtagaaatgattggatttttttttttttaccttcatggtgattttaggtttctgaggtctactagcgccccataggatcaaggaaaacgtagtgaaaagcacgaagaagccaacaagaaaggagaggaaatagcaacgtcgacggtgtagggcatgatgggcagcttcaccgtcaagcaaagcttcttcttcaatggcgtcgaactctttccatgactgcttattggtgcgaggcttgcgagatccatggtgttttgagaggcgggtggaagaagactcgcgggaagaatgagggcctaaggaaaaatttgaattgaaaatgggtgggctgagcaccggggtgagttgaagagtggtagtcttttaccatcatgggaatccttgatgac

SEQ ID NO: 25751 - DNA, 271 bp, Gossypium hirsutum
  Clone ID: LIB3147-039-Q1-K1-C10
atcgcctacgcgtgacgggacgtagatggaaaattagaatgatatatggaagttcagtggaggagcaagctgaaaggaattgaccgcacatccggatgttgatggctttatggatgaaggagctttcgtaaaaccaaagattgttgatgtgatcagagctactatggtgaaaaggacttataatttagaaagaaggagtgacaggtgaaacgtgaccatccttctgaaaaagtttaagtactcgtgtgaacaactcaccttggaacctaat

SEQ ID NO: 25752 - DNA, 380 bp, Gossypium hirsutum
  Clone ID: LIB3147-039-Q1-K1-C12
gctattcttcacaaaaaagaaaagaaaaaattcagtgaaaatggcaacctccagtcactggctcagatcgcagagaatctctccaggcgcaaatagcaaacaacgaaaccaagtcattttcgtgagtagattcagaaccctccatcaaaatagattaatttctctctctctctctctctctttggtgatacgccgtcgattttgtgagtatccgatgtttgggttgccgatggaacatctcatcactgcaaagttcatgtttatcatttcacctgtgtatgtgtatcagcttcttttggttattttgtttctctttttctttacttgtttaatctgtgaaatactattatactaataataaatacggacacttgattgtt

SEQ ID NO: 25753 - DNA, 300 bp, Gossypium hirsutum
  Clone ID: LIB3147-039-Q1-K1-C2
cccacgcgttcggctattcttccgggagctcaagtttccactataaccgtccaagggagcgccccttttggagaggtgtggacaaagtctatcgctgctgaagctgttcctggacctgggattggttctgccgctggtcgggggaattcgacaggtcctcttggttaaacataaactggtctttctaggccatgtcctggtgttggtcgacccgcaccttgtaggaaactttaatttttgtagctgacagcttttcttggaacctaaatgttgtccaaaaacttccgctgtaataaggcc

SEQ ID NO: 25754 - DNA, 423 bp, Gossypium hirsutum
  Clone ID: LIB3147-039-Q1-K1-C3
agtgatcgaaggagatctaatggaagagtttaagagctttgtaatcacgattcaagtttcgcccaagagcgagggtagtggcagcgtagtgcactggactttggaatacgagaagctgcacggtgggattgcgcatcctgagactctgctgcaattcgttcaagatatctctaaagacattgacgcccacctcacccaagcaagctaaacagtatcacatgttgctattgttgccgctacttgaagcactgttcatctatttaatgaataaagtgacttcctttctcatgtattttgatctgaatatgtatgtttagatcaatattcagtcaaggggagggagctttgtattttcttgcatgttggctttttagtatgtatgaattcaatgtatcctatgctttaattgtgtctaatgaatat

SEQ ID NO: 25755 - DNA, 452 bp, Gossypium hirsutum
  Clone ID: LIB3147-039-Q1-K1-C4
cccacgcgtccgcccacgcgtccgcccacttgttcgcccacgcgtccgcccacgcgtccggttttattgatgcagtagccagcattgccaagggattgaggtggagctgccatagagaagacaccgaatatggtgtagcgaaggagaagttattagtttgccagaaaaagctctggtattccgctagcagcagttcaagatgacaatatatgtcttgcctggctaagttaaaaagtactatataatataatattattgttcttacaagcgtaacgttggagctgaaaagatggaagttgcatacggatacaagcatatccatagaaatcaaagagcctctaaattcatattcgtccattgaagggttagccctcccccaataatagtttgatttatagatatatattctttgtaaggcatctatctattctatacacagattttaaattttt

SEQ ID NO: 25756 - DNA, 327 bp, Gossypium hirsutum
  Clone ID: LIB3147-039-Q1-K1-C5
aattgctaaccttctctattggtttgactggaagttgcctcctcatatctctgctcagaacttggacatcactgaagctttcgggttaggcgtttgcatgaagttccctctttgtctcctggcaatgccttatcgtccttagtccacctagttaacatttccaattcaagtccatttcgctctcacctaaagccatttactatgctatgaaataataaaggaaaagaatattagagttatttaagggtactagatcgagcacataatctgctctacttgcaccacattgttttatgattgaatttaactgtgtttgtttccatgtga

SEQ ID NO: 25757 - DNA, 388 bp, Gossypium hirsutum
  Clone ID: LIB3147-039-Q1-K1-C6
gatcgttaaccctctgtatgggtgggactttgcctggcctcacgatatctctgctcagaagttgcacatcactgaaactcccggcttatgcgtttgcatgacggtcgctctttgtctcctggcagtgccttatcaagcttagtccacctatgtaacattgcccattcaagaccatttcgctctcacctaaaggcatttactacgctatgaagtagtaaacgagaagagtattacaggtattgaagggtactagatcgagcacatactctgctctacttgcaccacattggtgtatgatagaatttaactgagtatgtttccatgtgatagggaaaaagaactggacgatgctggatatatggatgcccaacaacagccttaatttact

SEQ ID NO: 25758 - DNA, 416 bp, Gossypium hirsutum
  unsure (1)..(416): unsure at all n locations; Clone ID: LIB3147-039-Q1-K1-C7
nncgccacagcgtacgccacgcgtncgagaacacatgtatccagtctagtcctccaatcaaacgccccttttgttaactgtctcaactttatccatttgccttgtttttagcaaaacaatgtctactttagttcctgatttcccaaatctttcttaatttttcttccgattttcattttcgggttttacaaatagatttcgtcttccaattttccctataaaaagaaataaaaaaaatgatgccccgtgaacagcaaagtcatgatcaacatcgggatccgttatcgtgtgttatttacaagctgtcggcgctagtcctgaatattctccgatcgccaccgacgccggttccgactaagatatcggcggtgggattcgcttggctgatgctagggatatcggcttctttaatgctt

SEQ ID NO: 25759 - DNA, 281 bp, Gossypium hirsutum
  unsure (1)..(281): unsure at all n locations; Clone ID: LIB3147-039-Q1-K1-C8
cccacgcgtncggtgacattgctgcatcaactagaattatatatggaggttccgtaaatggagcaaactgcaaggaattggccgcacaacccgatgttgatggctttttggatggtggagcttccctaaagcccgagtttgttgatatcatcaaggccgcgatggtgaaaaagaattagaagttgaaaagcaggaattaaaggtgaaacagaaacaaccttctgggaaactgtaatttttgcaggtaacaccgttcctttgaacactaagtgtggtgaaaa

SEQ ID NO: 25760 - DNA, 365 bp, Gossypium hirsutum
  Clone ID: LIB3147-039-Q1-K1-D1
ctcattcttttcccggttcccagacaaactcttagatcaagaacatggcaccaaaagcggggaagatgccagctgagaagaagccagcggaggacaagaagacggtagctgagaaagcccccgctgagaagaagccaaaggcaggcaaaaagcttcccaaggaaggcggagctgcggccggagacaagaagaagaagagggtcaagaagagtactgagacctacaagatctacatcttcaaggtcttgaagcaagttcaccctgatatcggtatctcaagcaaggctatgggaatcatgaacagcttcatcaatgatatctttgaaaagcttgcccaagaatcgtctatgctcgcaaggtacaac

SEQ ID NO: 25761 - DNA, 370 bp, Gossypium hirsutum
  unsure (1)..(370): unsure at all n locations; Clone ID: LIB3147-039-Q1-K1-D11
cccacgcgtccgcccactcgtccgcccacttgtccgcccacgcgtccgcccacgcgtncgggatcttgtaccgatactaatagtgcaagggccccagatagaatgttaggtgaagtgagagggagtaactccaggtgcatggcttcatcattagtacgtactggttttgtgcggggttccgtgacccaaggaaacggttgttaccagcacagatgtgtaaataactcattagaggttgctgtggatggtatttggaaagtgtgtcctaaatctggtggaccggttcagttccctggttttaatggtgaactgatttgtactgcttaccacgaactctgtagcactggcactgtttccatgtccgggcaat

SEQ ID NO: 25762 - DNA, 392 bp, Gossypium hirsutum
  Clone ID: LIB3147-039-Q1-K1-D12
gtgatgttgataaccacattcaaagggtacttgcaagctgctgttgcaaaactcgctgagagtaccatattacagaatgcgacagagttgaaaaagattttccatgattctaaataaacagtgggagaatttgatatacgatgtagaatgtggccactgaaagaacaggtaacaagttcagcctatcacctttatacagtttttgagactcacgttttcattgctatctgccgatggtactgggatcgaatgggacaagatgttctgagctttctggaaaacaggagagagaatatatcatgggataaagggttcagaattgctggatctatactggatgatacttttgcgtcacagatgcatcaggttgttggcaatgcactatcggaaaa

SEQ ID NO: 25763 - DNA, 385 bp, Gossypium hirsutum
  Clone ID: LIB3147-039-Q1-K1-D2
ccttaacattgccaatttcgtcggctacatcaaatgtcgcatagatgccaagaagcaggggcaacagtttgccacccagagcattgcctcaagattttcttccaccttacaatcagcatttagtgttgcttgaaatagtcgatagtaatatacaagaacgaaaacggaagaaaatgcagtagtagacgagagaagttaacaagtgtggcatgtaaaaaaaacgaggcgtatcgaattgccgattttcgattgtttttttctttatggtacatctaatgcttttgtataatgaatcacacagtaaaactttgtgataacaatggtctttctgcaaaggttacattcctacaattacaatcttctttgagatttttttttcttctta

SEQ ID NO: 25764 - DNA, 337 bp, Gossypium hirsutum
  Clone ID: LIB3147-039-Q1-K1-D3
gcgataccaatcgattaatttcaaaaacattacatcaatggctagcaataatgtaggaggagaagagcaattgctgaagatggcggaattgagcaaaaccctaaaagaaggagaaagaattctggcgcccacccgaagacccgacggcaccctccgcaaacccattcgtattcgggccgggtatgttccccaagaggaagtcgccatttaccagtctaaaggtgccctgtggaaaaaggagatggcatcacaagtagtgcctccaggttatgatccacctgcagatgcaaaaccaaagaccaagtcggcaaagagaaatgaacgaaagaaggagaaa

SEQ ID NO: 25765 - DNA, 374 bp, Gossypium hirsutum
  Clone ID: LIB3147-039-Q1-K1-D4
cccacgcgtccgcccacgcgtccgggggatctctctgggagctggttcgcataacacgggactgttctcgagaggacattagaagtcttgctcgccgaacactgaattcgagcctgttatttcgatctgaaatgaggcggctaaggatagagttgtgattgaggtaaagttttgggcctttttgtaacctgttctaaaagtgggatgtcaggaaaacaacatatctcgacactgtatagtcttaaaggtcgagagaatggtgtaataccaccctcagcgctgaaagagcttccacaggcttatgtaaatgaatctggggtgggtttgtagtagtattaattatttatgctaggttctttcgttgagcttaacgt

SEQ ID NO: 25766 - DNA, 398 bp, Gossypium hirsutum
  Clone ID: LIB3147-039-Q1-K1-D5
gactttcgtggggagcttcaaagctggtatctgttggctatggcatcaagaagctacagggcatgcttaccatggtggatgatcttgtttcactcgatacccttatagaggagtgcctcacgacagagccacgcaatgaatacattcaaagctgtgacattgttgcattcaacaagatttagaggacacagtttttttccacggctgttgagagtgccattggccatgttatcaccttttgccccttgctttcccctcgaatatatatatttttgcttgaactgtgctttgctagagcttatgctctataatgagcataaataaagggattatcaagtatttaatgatgttctatgttttgacttacattaagcatgcccaaagtaattttagtgaca

SEQ ID NO: 25767 - DNA, 408 bp, Gossypium hirsutum
  Clone ID: LIB3147-039-Q1-K1-D6
tcgcgcaggaaaacgatggactcttggatgaaaaacaaaatgtgattgaacaaatgaaggacaaagttgggggaacccttgcagaaatggagaatgttatggccagaacacgacgtgaagcagacaactcaaaaaagtttgctgtacagaattttgcgaaggacctattagatgttgcagacaatttaaaaagggcttctgcccatgttaaaggcagtttctctaagatcgacgaatccaatgatactgccggagctgtaccactccttaagacactcctcgaaggagttgaaatgactgataaacagcttggagaggtgtttagaaagtacgggatcggaaaattcgaccctacaaatgaaccatttgatccaaacatgcacaatgcagtattccaagttcctgata

SEQ ID NO: 25768 - DNA, 396 bp, Gossypium hirsutum
  Clone ID: LIB3147-039-Q1-K1-D7
caccgagctaactgcatctggaagggagaagttggcttcagtcccttcaggtgggggtgctgttgctgctgctgctcctaccactggtggcggtggtgccagtgctgcaccagctgctgaggccaggaaagaggagaaggtcgaagagaaggaagagtccgatgatgatatgggtttcagtctcttcgattaagccaagtaatgcaaatgtcaaggtttttcttatgcagttagtgcttctatttcaagcggtatatgattctgtatgtttgttactctctggtcgaaagttgtttttttatcatcttttaggttcgagttttctttggaaaatgtagttaaagataatccattcaagttgttactttaattttggattaaaacaaattattatct

SEQ ID NO: 25769 - DNA, 430 bp, Gossypium hirsutum
  unsure (1)..(430): unsure at all n locations; Clone ID: LIB3147-039-Q1-K1-D8
cccacgcgtncggcatggattggcatagatggcaacactggtgccattgctgacatgaaggaaagaaagatttgggacgcatacaatgtgaaggcgcaaacatttaagacagcgatagaagcagcatgcatgcttctacgaattgatgacattgtaagtgggattaagaagaagcaggctcctggagctggccaaggtccatcgaacccaaggtcgagactgaagcagatgcggatggtgagcaaattcttcctgattgaagatactgaatcacttaaactcacccttcgctttcaaactgtttgatgaaatgatgggtttgttttgttgaagatgttttaaaggatttgttgagcatcttgtgcttgtatttttgagaattttaaatctgtggttggcgttagcttttaagtcattttatctttttact

SEQ ID NO: 25770 - DNA, 399 bp, Gossypium hirsutum
  Clone ID: LIB3147-039-Q1-K1-D9
ctcctcttcctatacgtcaccatagccaccgtcatcggccacaagaaacaacacgatgcatgcgatggtgttggtcttttgggcattgcttgggcttttggtggcatgattttcattcttgtttactgcaccgccggtatctcaggtggtcacattaacccggcggtgacatttgggttgtttttggctaggaaggtgtcgttaataagggcggtggcttacatggtagctcaatgtttgggtgctatttgtggtgttgggttagttaaggcattcatgaagagtgaatacaactcccttggcggcggtgttaacacggtggcgactggttataacaaagggactgctttgggagctgagattattgggacattcgtgcttgttacactgtttttcagc

SEQ ID NO: 25771 - DNA, 308 bp, Gossypium hirsutum
  Clone ID: LIB3147-039-Q1-K1-E1
gtggtgtttataaccattttcatagggtatctgatagctgctgataaaaaactgccacgggtggctgcatctgggagtgtgccggagttaagtcaaaatggtaaggatgctgcaaatgctaatgctcctccccaacttccttttttgggaattcaattaccatttggcaggattggtttggttatcaaggtataaatataatataagactttgaataagactgaatatttttataggctttggtgaaatcttccaggcttattggacttttcaacatttattttaaaaattttggtgatgttacgttg

SEQ ID NO: 25772 - DNA, 387 bp, Gossypium hirsutum
  Clone ID: LIB3147-039-Q1-K1-E10
gaaacaatggttcgaatcactggtggtatgaaggtgaaagctgatagggatgagtcttccccttatgcggccatgcttgcggcacaagatgtttctcaacgctgcaaggagttgggtattactgcccttcatataaagctccgagctactggaggaaacaagacgaagacccctggtcctggtgctcagtcagcacttagagcccttgctcgttcaggcatgaaaattggtcgaatagaggatgttactcccattcccactgatagtacccgtagaaagggtggcagacgtggaagaaagctttgaatctttgctttatatcaattactcactcagctactactgctgtggtgcttggagttttcttttgtaaacagttttctttat

SEQ ID NO: 25773 - DNA, 376 bp, Gossypium hirsutum
  unsure (1)..(376): unsure at all n locations; Clone ID: LIB3147-039-Q1-K1-E12
cccacgcgtnncgaggaacattctngttgacatgggaatctactttcaagtacaggatgactatttggattgctttggcaatcctgagaccattggtaagattggaaccgatattgaagattttaagtgctcttggttggtggttaaagctttggaaatctgtaatgaggagcagaagaaagtgttatatgagaactatgggaaaccagacactgccaatgttgctaaagtgaaggctctatacaatgagcttaatctcaagggcgtatttgaggactacgaaagcaagagctatgggaggctcgtaacctcaattgaagctcatcctagcaaaccagtgcaagcagtgttgaagtcattcttagggaagatctac

SEQ ID NO: 25774 - DNA, 373 bp, Gossypium hirsutum
  Clone ID: LIB3147-039-Q1-K1-E2
cggacgcgtgggcggacgcgtgggttagtattctcaagtaggcttgatggtcgtttgtactcatattattgttatgtaatttctaaatagacgtttagtaaaaaaaaaaaaaaaaaaaaaaaaaaaaaaaaaaaaaaaaaaaaaaaaaaaaaaaaaaaaaaaaaaaaaaaaaaaaaaaaaaaaaaaaaaaaaaaaaaaaaaaaaaaggggggggccgtttaaaagaaacaaagttaacgtacccgggattgaaaggaaaaagtttttttttagggcccccaaaattaaattaatgggccggggtttaaaaacgggggaacgggaaaaaccttggggtaaccaaattaaatggcgtggaaaaaaaacccctttt

SEQ ID NO: 25775 - DNA, 379 bp, Gossypium hirsutum
  Clone ID: LIB3147-039-Q1-K1-E3
cccacgcgtccgcccacgcgtccggaaaatgatgaagagttgaagaaaattcgtgaagaacgaggttactcctacatggacttctgcgaggtttgccctgagaagcttccaaattatgaggagaagataaaaaatttcttcgaagaacatattcatactgatgaggagatccgttactgtgtggcaggaagtggttattttgatgtacgggatcataatgataaatggattcgtgtgtgggtgaagaaaggaggcatgatagttttacctgctggaatttatcatcgctttactctggatacagacaactatattaaggcaatgcggctctttgttggtgatccaatttggactccgtacaatcgtccgcacgatcatc

SEQ ID NO: 25776 - DNA, 283 bp, Gossypium hirsutum
  Clone ID: LIB3147-039-Q1-K1-E4
cccacgcgtccgctgacactgaagggggttaatgtgaccttaagaccttgcggcgtcactgcgatgctatcatgtgctgcgctctcaaggctttgccagttcatacttttgcaaatcaggctggccttgacatgctggaaacgaccctgggtgctatgcaggacttgactttgggaaaaatatttcaagaacatggacgaaaaaatttttgcaccgagtttccacagaatattcacaaggggtttgcttggtaccaggtgggatctgtttgtcaaacatggga

SEQ ID NO: 25777 - DNA, 280 bp, Gossypium hirsutum
  Clone ID: LIB3147-039-Q1-K1-E5
tccgccactagatcgagagagtgccaccgggtatcttttatctgttgttaaaaaactggctgcgggtattttattacagactgcgagcacaaagatatatcatctccaacattctaaagaaacaaccgcactaactataatgctaacaactattggtccactcaagaagcagacccctggtactgtatctcacttacatactatagccactactcgctcttgcattacaattggccgactagacgatgatacatcgatacccactgataataccttccta

SEQ ID NO: 25778 - DNA, 304 bp, Gossypium hirsutum
  Clone ID: LIB3147-039-Q1-K1-E6
gtggtgtttcaagtctgtatttccacgtctcggtgcgtagcaccagctttagtgtcagtgggattgctgcttctagctttgattaacgggttagatccaataggtaggaacagagtaacaagttgtggttgctgggattttgattcgtgtataaagttttttccatgtttcagattttggcactgtataagtaaacagtaactgtaatattatgcctgttatgttttctaaaaaaaaaaaggaataaaatgaaacaagattgaatcagttaactgaaaaaaaaaaagaaaaaatatatcatctg

SEQ ID NO: 25779 - DNA, 314 bp, Gossypium hirsutum
  Clone ID: LIB3147-039-Q1-K1-E7
caggatgtttaccgagagcagtcggtttacacggcggcgccatatcaaggaatgccacaaatggcggcatctggtagtgtcccggtgttaagtcaagatggtaaggttgctgcgaatgctaatgctcctccccaaacttcttctctgtgatttcaattaacaatttgtcagtattgttttgtttatcaagttataattataatatagtactttgaataagactgaatatttttataggctttggtgaattcttcgatgtcttatggaacttttcaacaatttattttaaaaatttttgggtgatgttacgtttg

SEQ ID NO: 25780 - DNA, 390 bp, Gossypium hirsutum
  Clone ID: LIB3147-039-Q1-K1-E8
gtcctttgaatggggacaggacatagaaagctcaagagatgcttagacaaggatacactcatgccttcttgatgacgttcgaaaagaaagaagattacactgcatttaccagccatcccagtcacattgaattctccgccacttttgttactgccattgacaagttcgtggtgcttgatttcccttcggttcttgcaaaatctccggcttgatctgcaagaaaaaaaaaagctacccaggaatttaggtgttttgaggtattgttaggtctaatctctctgttgttggcatctctatgtcttctgttaatgggtaatggctttctgccattgctatcaattccccaataatcacaaatttgtataattgatatgcaaaaattcacatgac

SEQ ID NO: 25781 - DNA, 187 bp, Gossypium hirsutum
  unsure (1)..(187): unsure at all n locations; Clone ID: LIB3147-039-Q1-K1-E9
atttcttggaactgatgatgaaccccaatgtgaaggttacagggaggagttcttcataaaccaccacctatctacttcctattcacatgtataactttgcatcaatcacttccaggtcatacgatcaggtattgctttggtataagattttgatttntaagtacaagaaaaagaaattataatgtta

SEQ ID NO: 25782 - DNA, 421 bp, Gossypium hirsutum
  Clone ID: LIB3147-039-Q1-K1-F1
cacggccgacgaaaatgatcgcctcgagtatcataaagtgcgtcaccgtcggcgatggagccgacggaaagacctgcttgctgatttcctacaccagcaacactttccctacggactatgtcccgactgttttcgacaatttcagtgcaaatgtcgtcgtcgatggcagcactgtcaacttaggtttatgggacactgctggtcaggaggattacaatagactacgaccactgagctatcgtggggctgatgtgtttattcttgcattttctctcatcagcaaggccagttatgaaaacgttgccaagaagtggattcctgagctaaagcattatgcccctggtgttccgatagttcttgttggaactaagcttgatctccgagatgatcaacaattcttgacagaccatcctaacgcagt

SEQ ID NO: 25783 - DNA, 174 bp, Gossypium hirsutum
  Clone ID: LIB3147-039-Q1-K1-F10
cccacgcgtccggaattattttgggtgtgctttttgtgcatggttgggatataatcaaaaattgaactacatatcttttggtaatttcatctttctttaaaaggtatgggttcaaaaaaaaacaaagcatgcaaaaacaaaccaaaaacccaccgaaatgttaaaaccaagaga

SEQ ID NO: 25784 - DNA, 343 bp, Gossypium hirsutum
  unsure (1)..(343): unsure at all n locations; Clone ID: LIB3147-039-Q1-K1-F11
accacgcgtccggaattattactgngcgagctttttgagcatggatgtgacgtcagcaagagttgaactacgtatcttgatgacattgcatcttgctttacaagttatggtggctgacaaaagactcatttttacaggtttcctcgatgccgaaccagttcataaccttttgttaggcagaacaataaacactgctgctgaagtgattcaagtatttttttgcgatgattgctgtagctcataaacattgttataaatgttttgctagaaacaagaaagggaaatttagatatgccaaactcttcgacctatgactgttggtgtatgagtgagtcattttatg

SEQ ID NO: 25785 - DNA, 254 bp, Gossypium hirsutum
  Clone ID: LIB3147-039-Q1-K1-F12
cggacgcgtgggtgggatcttgaacacatcttataactgctataacagacactgaccacgaggcgcatgctttcggcgagtgagccgtcatcagtgcagcctatcaaagccgtgacatcgtcactggggtaccacactgtaaggacgccctcagttaccgctcgccctcaaagctcaaggcacctttgggaggttaggataagaatatacaccagtatggtctctgtcgacacactggcactcgttacaattac

SEQ ID NO: 25786 - DNA, 267 bp, Gossypium hirsutum
  Clone ID: LIB3147-039-Q1-K1-F2
cccacgcgtccgaattattgcacggtgaataattatacagcccagaggacgacagtggggatcatactaaacagaccggtgacgctaactttatggttatacggcaaagaatgcagacctttgcagctagggccaacattctcatggcacctgtattttgaagtttcagataagatcctattaatagatggttaagctaaggatgctttttttttttcgactatctgcatattctgttgtacgccttccagatccctaaacagcata

SEQ ID NO: 25787 - DNA, 399 bp, Gossypium hirsutum
  Clone ID: LIB3147-039-Q1-K1-F3
ccgcttcgtgcacgattctgaaattttgtttgccgctccatctctacatcacagtaggaatggcgacagatgttgcagcccccgccaccgccgcacccaaagacccaacccaacctcaccttgaagtaaaactcttcaaccgctggagcttcgaggaagttcaggttgctgatatctccttgagtgattacattggtgtccaagcttcgaagcatgctacctatgtgccacacactgctgggaggtactcagttaagcgtttcaggaaggctcagtgcccaattgttgaaaggcttacaaactcacttatgatgcatggccgaaacaatgggaagaagcttatggcagtcaggattgtgaagcatgccatggatattatttatctcttgactgatcaga

SEQ ID NO: 25788 - DNA, 389 bp, Gossypium hirsutum
  Clone ID: LIB3147-039-Q1-K1-F4
gccacacccacaggtcaacccgttgggtgttgcttagcctagagaagttttgctggaagagcgcggtcaggattggcgaaggattgatcttgaactataacggcgttggatggacagaccagaaacagaggaggaaaagatattgaaagaagaaatagataatctgaagaaagagcttgagaaggattcaactccagcttcggaatctgctttggaccagtctgctttacgtgacacactacttcataaggagagggaactagagaaacttatccgaggtttggagaacaaagttaaatttgggcaaaaagctgttgaaaggcctggttctggatcaagcaggattggcggcagctactctgatagaccaccctctcagtctggttcta

SEQ ID NO: 25789 - DNA, 118 bp, Gossypium hirsutum
  Clone ID: LIB3147-039-Q1-K1-F5
cgatccaaggcatggcaagtacatggctgtctgcctgatgtatcgaggagatgtggtgcccaaggatgtgaacgctgctggtgcttccatcaaaaccgaaaaggaccgggcggttggt

SEQ ID NO: 25790 - DNA, 405 bp, Gossypium hirsutum
  unsure (1)..(405): unsure at all n locations; Clone ID: LIB3147-039-Q1-K1-F6
gtttgctacatgcatcccttgccccattgttacgactgaaagctgccccaacactgagctatctggaaactataaaagctttcaatgtccaccaaatcattacaatgatctggcctccctctttctaaatactaatgatgatgctatccgtaacctattgagtcccagtcctacaaaggaatttaatatctcctcccttttcattttcttcattgctatttactgccttggtgttatcacttatgggatagctatcccctctgggctcttcattcctgtcatattggctggagctggctatggccgccttattggtagactttttgaacccgctcactactctcaagttggtctgtttgcccttcttggggcagcnttcttttcttggtggcactatgaaaatga

SEQ ID NO: 25791 - DNA, 442 bp, Gossypium hirsutum
  unsure (1)..(442): unsure at all n locations; Clone ID: LIB3147-039-Q1-K1-F7
cccacgcgtncgcaacattccaggttcacgaatatttaagacccaagttgtgtgatttctatgaaaacgattcaatctttgacaaatttgagtgttgcctaagtggtgatggattgcgagttgcaacaggttcctacagcaatctgttccgtgtatttggttgtgcccctggaagcactgagacaacaactttggaagccagcaaaaatccaatgaggacacaagttcagacaccctcaaggccttccagatccctaaacagcataacacgtgttgtacgacgagaaaccctcggagttgatgcaaatggaaactctttttgatttcacgacaaagttgctgcacttagcgtggcaccccaccgaaaacttgatagcttgtgttgctgctaacagcttgtacatgtactatgcataaaagatggtccaagaagcaatgtatt

SEQ ID NO: 25792 - DNA, 401 bp, Gossypium hirsutum
  unsure (1)..(401): unsure at all n locations; Clone ID: LIB3147-039-Q1-K1-F8
cccacgcgtccgatttagaggaacgagagagttgaaacaacccagaagttgaaagtggagaaacaacagaagagatcggagaatatagcggacaagattcaccagaagaagatgcgacgcattgcaaagagggagaagaagctgttgcgacctgggtttgaaggtcgcaaagagggttttattaatgaagggtcaagttaaggttcctttttttctttcaattttctgcatagcctgtggctttaactgatctgttccttttctgatggtaagattacatgctaggaatgccgttcttacaactggtttcccttctgttttctttttccacctagaagaaaatgtntgaatgtngntcacannactgatttgagttaatatactggannaatgtttgattc

SEQ ID NO: 25793 - DNA, 189 bp, Gossypium hirsutum
  unsure (1)..(189): unsure at all n locations; Clone ID: LIB3147-039-Q1-K1-F9
gtttgctgttgctagggttntgacatacatatgcggtagctctgttntatgaaggttatgtttcattttaatatcaattagaacccttcatttatactttttagttttatagtcaccggatgaatatgggattctgttttaaatcttgttttttctacaaatgatagccttttgtgataatattttatc

SEQ ID NO: 25794 - DNA, 351 bp, Gossypium hirsutum
  Clone ID: LIB3147-039-Q1-K1-G1
cccacgcgttcgtctatatcgcgagcgctttcctttttttttatttttttttttttttggtgggattaacaaaagatgtgtcaaattaccaaaatcctcatccttaacaaccttaataataaatgagcaagcgtaagtctcagtatctaacataacttaaagcatatgacactgccattaaataaaaatactagaggtgcagcaaccaaaatgtctctttcaagtaaagatgcagaaatggacttcatttcagaggaatgaacctagaagaatgggtggcaccaataccaggtctaccatgcttaacgggcttgtacgaaatggaaaactcggcaaggtaatggctgatca

SEQ ID NO: 25795 - DNA, 320 bp, Gossypium hirsutum
  Clone ID: LIB3147-039-Q1-K1-G10
ctcttccaaaaaattttccccagggagtgataaggaacaaaaaatcttctactcaagaaaagagagaaagatcttccttagcgaaactatttgcaggaaaatcaaaaagaacagtgatgagttattacaatcaacaacagcctccagttggtgttcctcctactcaaggttatccaccggaaggatatccgaaggatgcttatccaccaccgggatatcctccacaaggatatcctcaaggttatcctcctcaaggatatcctcctccttacgcccctcaatatcctgctcagcctcctcctcagcaacagcaaagtact

SEQ ID NO: 25796 - DNA, 286 bp, Gossypium hirsutum
  Clone ID: LIB3147-039-Q1-K1-G11
ctgtcgcgtggagcctacggacggagcgtattagcagctaaagatccttactgaacatgagggagagagatcttgcgtggcgcagctatccgcaggaccctgacaagaaacagagatgagtgattacgatcaacatgcgccgtgagctggtgccactactactctcgggtattcaccggaaggatattcggatgatgctgatgcaccacggggatatgctccaccacgatctgctcaagggtattctcctggaggatgttctcctaattacgcccctcaatatact

SEQ ID NO: 25797 - DNA, 357 bp, Gossypium hirsutum
  Clone ID: LIB3147-039-Q1-K1-G2
atcgcttcaactatctcaccaaacacatattcaatggctccgatcgctgtcggcgacgtgttaccggacggtactctctcctacttcgacgccgatgataagctccagcaggtgtccgtacattccctggctgccggtaaaaaggttatcatctttggcgttcccggtgcctttacccctacttgcagcttgaagcatgttcctggattcatcgagaaagcaggggagctgaaatccaagggcgttgatgaaattatttgcattagcgtgaatgatccctttgtgatgaaggcatggaccaaaacttaccctgagaacaaagatgtcaagtttctagctgatggttcagcaacatac

SEQ ID NO: 25798 - DNA, 412 bp, Gossypium hirsutum
  Clone ID: LIB3147-039-Q1-K1-G3
gagcaatggtgattctcgatctagtcgatttagccgctttggggtctccgatgttgatactgatcagagcactggaagaacacccttctaaattctttgagggaagaaggcagcaatctcgatgacagctttcagtgggaaacagaaattgggaaacaaggattttttgttttggtacgtgataagttttgttgggaagaaagaaaggatatataaccctaatcgctttcctctcccctcgccggttagtgcttaagttaactaatatatatactagttactcagatgggaatgttttaagatgcttgactattaatattgaaattgattctatgtgaagagaaaatataataaaaaaaacattcagtacgatcatgtattacgatttaagttatcatagtatattttcaat

SEQ ID NO: 25799 - DNA, 435 bp, Gossypium hirsutum
  unsure (1)..(435): unsure at all n locations; Clone ID: LIB3147-039-Q1-K1-G4
accagaagaaattctccggtccaagatgtttagctttggtgaagaagggtgccaagaaacagaggttgctctgggcctcaactagtgtcaagaaccctgcctaccctgacaccctatatgttgctcctctcattggacctgacacggtctcaaccatgcctgaccaagcactccaagcctttatagaccacggcacagtttcaaggacgattgacgcaaacgtgtctgaagctgaaggcatctatagtgcacttgagaagttggggattgactggggcaaagtcggttcacagctggaagacgagggagtggagtctttcaagaagagctttgacagccttctcgacacattgcaagagaaggcaaacactcttaaaattgngatttcttagatttgctgtcactgcaaacacaataaaaacaagcgggtgttgg

SEQ ID NO: 25800 - DNA, 198 bp, Gossypium hirsutum
  Clone ID: LIB3147-039-Q1-K1-G5
ctctcgcatacgaatgtacgaatggagttgtaaacgttcaggacctcttatccttaagaagagagacaatcatttgcgctgcgggatcttattgagcagctatattgttactgaagaagtttaattacattctccaactagcctcagattgtaagtttactcctcaatgttatctaccgaccttttatgcagataatg

SEQ ID NO: 25801 - DNA, 156 bp, Gossypium hirsutum
  Clone ID: LIB3147-039-Q1-K1-G6
cccacgcgtccgcccacgcgtccgcccatttgtccgaaggcgtctcgccttccaatccataaattatgtatgttacaagtcagtgaaacaattggatgaaaaaataagttaatttatatttgtttcacaaaaaaaaaaaaaaaaaaattggagatt

SEQ ID NO: 25802 - DNA, 227 bp, Gossypium hirsutum
  Clone ID: LIB3147-039-Q1-K1-G7
aaattcagatacttgataggtaggttccatcttttgttaaacatgctttggatagaagaaaatgaggtctttaattgtaatctctgatgttgttttaggcttttttagccctataatttccttcatttaaaaaaaaaatctgaacttgtagatttttccttttcagaatacgaactccatcgaatcctaactttttttccttggaaaaaggactggtttttttggtt

SEQ ID NO: 25803 - DNA, 348 bp, Gossypium hirsutum
  Clone ID: LIB3147-039-Q1-K1-G8
cccacgcgtccggctgagtttaagcatatctataagcggaggaaaagaaacttaccaggattcccctagtaacggcgagcgaaccgggaaaagcccagcttgagaatcggtcgccatcggcgtccgaattgtagtctggagaagcgtcctcagcgacggaccgggcccaagtcccctggaaaggggcgccggagagggtgagagccccgtcgtgcccggaccctgtcgcaccaagaggcgctgtctacgagtcgggttgtttgggaatgcagccctaatcgggcggtaaattccgtccaaggctaaatacgggcgagagaccgatagcgaacaagtaccgcgaggaaa

SEQ ID NO: 25804 - DNA, 238 bp, Gossypium hirsutum
  unsure (1)..(238): unsure at all n locations; Clone ID: LIB3147-039-Q1-K1-G9
cccacgcgtccggtaactttaaccaactctacaatactgggttatatacatnngggactgagaacactgtggcctaatgatcctgtgttcaaggatgaatccacttcaacttgtgaaacatacgaagtgctactattgacataatacctatatatatattctgcataagaaaataacattcatcatacaaaataaagagtgtagttgaacaaattgactatttctttgagaccttttt

SEQ ID NO: 25805 - DNA, 264 bp, Gossypium hirsutum
  Clone ID: LIB3147-039-Q1-K1-H1
gtaacttcagccaactcgacaagcacgaataagctaaaggggtgactgagaacactgtggcctaaggatcctgtcttcaagcatgaatcggtttcaacttgtgaagcatacgaagtgctactattgtgttaatcctattatatgtattcgtcatcggagataaacattcagctgaagagtttgagtttattgatataattttttttttctttgtgatctttttgaattgatgcatttgagtacaaaattggtgttgattcgtgt

SEQ ID NO: 25806 - DNA, 403 bp, Gossypium hirsutum
  Clone ID: LIB3147-039-Q1-K1-H10
caattgttcatcccttcattaaaaaaaatttccctaaaaaaccaacagtgaggtgcagggaaatagaacacaaaatggcgacagttccaggacagttgatttgggaggtggtgaagaagaacaattgttttttggtgaaacaatttggaagaggaactgctggcgttcgattcagcaaagagcccaacaatctctacaatgtcaactcctacaaacactctgttttggcaaacaagaaaaccgtcaccattcaaccttgagggcaagaccagtctgtgctcttagccacaaccaagtctaagaagcagaacaagccttcgagcttgctccataagtctgtcatgaaaaaagagttccctaagatggccaaggcagtcaaaaaccaggtgacagacaactacta

SEQ ID NO: 25807 - DNA, 210 bp, Gossypium hirsutum
  Clone ID: LIB3147-039-Q1-K1-H11
tacccgggccgaccacgcgtccgagagaattgttggggtattcctgaagctctatatcaatatcagggtttttggctcacccgcccttttctacaaggagcattgtcggctcaacaacaattccaggctcaacccactgatatcatcctttgtagctctccaagaacaggtgcagcctggttaaaatccctcacttttcgccactattac

SEQ ID NO: 25808 - DNA, 283 bp, Gossypium hirsutum
  Clone ID: LIB3147-039-Q1-K1-H2
cccacgcgtccgattttatcaagtgtgatttgtactttatttttgaagaaatctgaaatgggtaattttactttctggtaaaaaaaaaaaaaaaaaaaaaaaaaaaaaaacaaaaaaaaaaaaaaaaaaaaaacgcgcgcacaaataaaaagaaccatacatacgcacgcatgcaaccaaaaacaaacctacttataaaaacccaactaaattcaatccactcgccgaaaaaaaacaacaaaatgccggaaaaaaccctgtcctaacccaaataaatctcctt

SEQ ID NO: 25809 - DNA, 157 bp, Gossypium hirsutum
  Clone ID: LIB3147-039-Q1-K1-H3
cccactcgtccgaccttttccaccaccaataatctaccatcaagactgaaaaaacgcatgactgtttttacagggtgttggggcccatacacacccaatcccaaaccaacgcatctgtcaactatttgccaaaaccacacaatctaacactcaacat

SEQ ID NO: 25810 - DNA, 280 bp, Gossypium hirsutum
  Clone ID: LIB3147-039-Q1-K1-H4
cccatgcatgcggggatataaacaaggggtctaattattggaccacctatagcatcggggattgttgctatgagggaacctatgaagaaacccaataaattgccatcggaggatttatcttaggagtattgtatggacactgtgaagaacacagtggatactcatgttgatgctgaccaagcatgaaaacttgcttagattatagacgatcttggaaccactggtggtaccttgactgttgtaatacggctactggtacacgtaggggagcatgcttggg

SEQ ID NO: 25811 - DNA, 389 bp, Gossypium hirsutum
  Clone ID: LIB3147-039-Q1-K1-H5
cccacgcgtccgcccattcgtccgggttgttatctcaggggttaacgtagacaagtttgatgacaagtactttgccaaggaagtagagaagaggaagaagaagactgagggagagtttttcgaggctgaaaaagaggataagaaaaaactgcctgaagacaagaaagaagaccagaaagcagtcgacgcctctttgataaagtccattgagggagtcccagacttgaaggcctacctcgccgcaaggttttctctcaagtctggcatgaaaccgcatgagcttgtcttctagaagatattttgcattcccttatgttaaagggcttttacttttgaattctattggattagattatctatggatgtattatggcgtgctattgctatat

SEQ ID NO: 25812 - DNA, 337 bp, Gossypium hirsutum
  Clone ID: LIB3147-039-Q1-K1-H7
cccacgcgtccgcccacgcgtacgcttggcttcctggtttgattctggcactaggttctacaagtatgcacgagcggagcatagagagaccatatttgactgcattggatcacattaagctccattttccatcatggcccctaattttggcaaagatcgagcttgctgaaatgagtgaacatgatgatctggaagaggatgatagagtttctgaaccagaattcaccgagttcaagaaactcatgggaattatcatttcattgttaaagggaaatcgcagcatactggatgcagttggcgttatcttcttggcaacctcagttgttgggctagatag

SEQ ID NO: 25813 - DNA, 241 bp, Gossypium hirsutum
  Clone ID: LIB3147-039-Q1-K1-H8
ctcacgcgttcgctcacacgtacgttcaggtctgtgtcttgaaaaaggcgctagggtctaggactattcgcgagcctaacgttgctagaccatataagactgcattgaatcacatgagccttcatacccgtcagggctactaatcactgcatatatgaaggtgagctacatgagcgaacactatgctactatacaggagcagtcagtgcatgaaccagcaagtacctatttgacaaaacta

SEQ ID NO: 25814 - DNA, 281 bp, Gossypium hirsutum
  Clone ID: LIB3147-039-Q1-K1-H9
cccacgcgtccgacgagaaactgcatccgctagtccgaagctagctttggcaaacgcaaagcggtacttcgaggatgttattgcccatacgcacgcaattccataccgacgcttctgtggcggagatgggcgaaccacacaggctaacaatcgactttctaatggacaaggccgctggcccgtgaaatctgcaaaattgattctagatatgctcaataatgccgaaagcaatgctgacgtaaaaggtacggatgtagactcacttatcatatctcacatgc

SEQ ID NO: 25815 - DNA, 390 bp, Gossypium hirsutum
  unsure (1)..(390): unsure at all n locations; Clone ID: LIB3147-040-Q1-K1-A1
accggctctgattcggtcgaccacgcgtcgcttttaagaaagttgaaatcttacactttcccccccccctgctcttcgccgaaaggcttatgcgcaggccttcaaccacccaaaagtcgccggcgaccggggaagtaaggccctctcgatggcgcaaacatgaggcgtggtaagtctcccttcttctttcctatttttaacttatattgtggatccgatttaaaaaaaaatgaagaaaaacaaaataaaatcacctttgaaactatttcttggtgggtttttttactgattcttgcgtgagatttgtatataaactttagtacctaagtcccgattctcgatttactctngaacttatatattctctggtatattcgaaaaagaaaactc

SEQ ID NO: 25816 - DNA, 439 bp, Gossypium hirsutum
  Clone ID: LIB3147-040-Q1-K1-A10
cccacgcgtccggctatgagttgggacaaatgtacgattcacatcttgatgcgttccctgtcgaacaatacggtccccaaaagagccaaagggttgctacctttttagtatatctgtcagaggttgaaggaggaggggaaactgcatttccattcgaaaatgggttgaatatggatggaagttatgatttcaagaagtgtataggtctgaaagtgaagccacgcatcggagatgggtttctgttctattcattgtttcccaataatacgatcgatacggcatcacttcataccagctgtcccgtaatcaaaggtgaaaaatgggtggttacgaaatggatcagagatcaaaaagattttttttagggatcgatcccttcccatcagtcaagttgtcccagagtttttgactgggttctcctcatatcgccattaaactt

SEQ ID NO: 25817 - DNA, 316 bp, Gossypium hirsutum
  unsure (1)..(316): unsure at all n locations; Clone ID: LIB3147-040-Q1-K1-A12
cccacgcgtccgcccactcgtccgcccacttcttccggaaaaaacaatggctacccttcatttcacaccatctccttgtactcctcccttaattgtcaacaaaccaaaacaccccaccacaatttcaacctcccaatcgaagttcaaccccaaaacccaccatgggtctttcaaaagattgtcgactttgatagcaaggtcttacaaaagtgtattggagcatgaatgcaagtctaccgagctagangtggaagacgatgagaccatactatcaaggcattggacttgggcataaccgtgccatatgattgtcaac

SEQ ID NO: 25818 - DNA, 387 bp, Gossypium hirsutum
  Clone ID: LIB3147-040-Q1-K1-A2
gcgtctgaggagatcaaatggttactcaaaggtgtgttatggaagacccagaggagataatccatcgacgagctcagttcttgatccacaaagtgctggagcgagcagattgtagaagaaaaccatcgtttctacgaatcagactgtgtaggctaaaggtgaagatcaggagaagattgaagaagttaaggaagagtggcgtggttagtatttcggcagcaagaactggtgtttacaagcaggttatggatcaattggaaacatggagacggctgttttaccctgctaggcatcatggaaccattgccacccttactcgccctttgttaacttgaaacatatatatatgtggcctttatattatacacaatctcctctgggtttttt

SEQ ID NO: 25819 - DNA, 70 bp, Gossypium hirsutum
  Clone ID: LIB3147-040-Q1-K1-A3
cccacgcgttcggccacgcgtccgcccacgctttcgcccacgcgtccgacaatttgaaatataataacag

SEQ ID NO: 25820 - DNA, 439 bp, Gossypium hirsutum
  unsure (1)..(439): unsure at all n locations; Clone ID: LIB3147-040-Q1-K1-A4
cccacgcgtccgcggattaatgtgaagcacatgccatctagtggaaccggtatgctttcagctgcgggattgtctggtagtggaaagcctaagaccttgagccttgctccaccacccagtggtgctggaaaaataaggtctcctctcccaccccctcccaatgaccctgttgctgctcggcttgcctctactagtcaaggtgttggtcaaagagcacccaaagaaaacatgaaacaaaccaacccatcaacatatttttctcaactagaggtatgcctttagcatgtatgatacttaaaccaaatatagatttcgtgtgctctacatacccaaaagatctgcaaattttgattttggttttctcttgaatgtagcattgttagggaattgggtatcataatatgtttaccacatncacattcgttattttcgtagcttt

SEQ ID NO: 25821 - DNA, 394 bp, Gossypium hirsutum
  Clone ID: LIB3147-040-Q1-K1-A5
ctctctttctcccttttcctcggcccattctctccctccttccctcaccggcggtgacatccgtgtcggcgttggccccaccatccctgatcccatcgaacaagacccacaacccgagactgaatctaagaaaaaatcatctcaaaaacgttcaaagcctgataaaatcgatgaaccaattggaaatcctggggagttagctggaaacggaaatgggttttcagattcaaaggtgaaaagcaaagagtcgaagaaaaaagaagatctggggagcaatttcgatggagaaggtaaggaatggagtgaaactgaaattgagattttgaagaaacaaatggtgaaaaacccagtggggaaaccaagtagatgggaagctatagcttcagcatttaaa

SEQ ID NO: 25822 - DNA, 421 bp, Gossypium hirsutum
  Clone ID: LIB3147-040-Q1-K1-A6
ctctagcgttgtgcatgttggtggttgagcttattgacacaaccgccataacatgcggcgatgtgacaagcaaagtggccggttgcttatcatacttgcagaacggagggaacgtgccgaaggcttgctgcgacgggatccggtccctgaacatgatggctcgaaccacccctgaccgccaaaccgtgtgtgggtgcttgcaaactggcgctaaggctgtcaaaattaaaggcaacttggctgagaccctcccggccaaatgtagtgtcaacatccgttacaagatcagcacttccactaactgcaaaaatgtgaagtgagatggatgaagagagggttttgcaacagctttgaggagatataatatatgattaaaaaagaacaagacgaatgaatcatgattttgggatggaattttcaa

SEQ ID NO: 25823 - DNA, 442 bp, Gossypium hirsutum
  Clone ID: LIB3147-040-Q1-K1-A7
agtaaaactaatgggtgaccgtgctaatgcttctaagctcgacttctcagaggtattaccagaagaggttgagactgaattaaaggaggcagcagtcatatccatggggactgaaattagtgaccttgatctgatgaatatcaaagatttatgtgatcaggttctcaatctttctgaataccgagctcagctatatgattatttaaagagcaggatgaacactgttgcaccaaacttgactgctcttgtcggtgaacttgttggtgctcgtctcattgctcatggtggcagcttaataaatcttgccaaacagcctggtagtactgttcagattctaggtgcggagaatgctctcttcagagctctgaagacaaagcattcgactcccaaatacggactcatctaccatgcatccttggttggtcaggcagcgccaaaacac

SEQ ID NO: 25824 - DNA, 348 bp, Gossypium hirsutum
  Clone ID: LIB3147-040-Q1-K1-A8
cccacgcgtccgcgaaaatagaaatgggattcgatagcgaagtagagaagacgcagcagaaggagaaggagaggagaagatggtagctatagctcccatcgcaaagccccttgctggcaaaaagctctccaagaaaacccttaagctcgtccgaaaagcatctgagcacaaatgtttgaagagaggagtaaaggaagtggttaaaagtattaggcgtggtcataaaggattatgtgttatagctggaaacatatctcctattgatgtcataactcatgttccgatcctatgtgaaaaagctgaaattccatatgtctatgtttcttcaaaagaagatcttgcaacagc

SEQ ID NO: 25825 - DNA, 283 bp, Gossypium hirsutum
  Clone ID: LIB3147-040-Q1-K1-A9
cccacgcgtccggtccctttcttctcccatttggatgatcagctgcttgatgcaatatgttgaacgcctagtgtcgtccttgagcactgagggtacttatcttgttcgtgagggtgaccctgtgacagagatgctcttcattattagaggtatattagagagttctacaacaaatggtggacgaactggattcttcaactcaattgtgttgagacctggaaatttttgtggaaaggaactgcttgcatgggctttgctaccaaaattcaccatgaacttaccc

SEQ ID NO: 25826 - DNA, 378 bp, Gossypium hirsutum
  Clone ID: LIB3147-040-Q1-K1-B1
tcgggcgtgtcaagcgtcgaagtttgtggcatattacggaactgcttactacaagcaattgtgggaacagaataagcaatatattcaggagccaccaacagtggagaagtgcaatgagctgtctaagcagctgttttatactcgacttgccagtatccctggccgtgacgaggcattctggaaggagcttgattatgtcaagaatctgtggaagagatggcaagaactgaaagttgaagacgcttgtattgctgcattgtttggactggaatgctttgcatggttttgtgctggtgagatagtggggaagggttttacttttactgggtactatccctaaggaaaatcaactagtagaaggcagggagtctgatggat

SEQ ID NO: 25827 - DNA, 378 bp, Gossypium hirsutum
  Clone ID: LIB3147-040-Q1-K1-B10
ctttgtctctcttaagtcttaccataaaacagagcagagaaggtaatacccaaagtttgaaaaccatcaaaaatggttcaaaggctcacttaccgtactcgccatagctacgctaccaaatccaatcaacaccgtgtcgttaagacccctggtgggaaattggtctatcagacaactaagaaaagagcaagtgggcctaagtgtcctgtcactggcaagagaattcagggtattcctcacttgagacctgctgaatacaaaaggtctagattgccaaggaaccgccggactgtgaatcgtgcttatggtggtgttttgtcctgcagtgctgttagagagaggataattcgagccttcttgggggaaagagcagaaaat

SEQ ID NO: 25828 - DNA, 324 bp, Gossypium hirsutum
  Clone ID: LIB3147-040-Q1-K1-B11
gccaataaagagaactcagctgcctcaggatcgaataaaagaaggacttggtggtcacctgctctgttaacagctagtatatcatctgcaaagtattttgtgaagcatctcttaagacaaaatactattacacaagctcgtaggaacatttctcgtcattatgatctgagtaatgaacttttcactctatacttgggtaaaatgatgcaatactcttctggagtctttaggacgggagaagaacatttggacgttgcacagcgtagaaaaatcagttctctaattgagaaaagcaggatagagaaatggcacgaagttctcgac

SEQ ID NO: 25829 - DNA, 361 bp, Gossypium hirsutum
  Clone ID: LIB3147-040-Q1-K1-B12
cgcagatccgtggcttgtgtagcttacctgctcatcgatctttctatacgcaagtgaaacattgcagtattcgcaataaaaaaaaaagaagcaaatagttcgaaattgtcactctttagattgcagtgatgccacttcacctgaggtgagagactacaccaactctagaactagggcattgttgtaacttttttgtgtactaaaatacaccaaagttctgaaaagtttttctgatgaaaaatagtttcccattaaaaatattgtcgttcaattttaaaactattgttttttacaaagtaattgtttcaagtttcaacaacgaactagtttgtaggcaatgttatatgggcttgaattaatt

SEQ ID NO: 25830 - DNA, 375 bp, Gossypium hirsutum
  Clone ID: LIB3147-040-Q1-K1-B2
atttcaaggcaaaagaaggctgtgaggatctttccaaggccaactgctggaccccttcgccctattgtccatggccagactttgaagtataacatgaagttgagagctggaaagggtttcacccttgaagagcttaaggctgctggtatttcaaagaaacttgcaccgaccattggtatcgctgttgatcaccgccgtaagaacaaatcacttgaaggtcttcaagccaatgttcagaggcttaagacctacaaggccaaacttgttgtcttcccaaggcgtgctcgcaagttcaaggctggtgattcaactgccgaagagctcgcaactgcaacccaagtccaaggaccatacatgcctatttctcgtgagaag

SEQ ID NO: 25831 - DNA, 398 bp, Gossypium hirsutum
  Clone ID: LIB3147-040-Q1-K1-B3
cccacgcgtccgtgtcaaaaggcctgcaaatttagctgcagcaatggaatctagagatggtgattttgatttggacatttctcgtgaccaaaagtctagacgatcaacatcagctcaggatgcttcaaggtcggaatcttcttcaaggctgcatgcttcaaggcctgatgcaacaccaatggactttgttgtgcgcccccagtctaagattgatccagatgaaattagggcccgtgcgaaacaagttattcaagatcagcgccgtttaaagatgaataagaagttgcagcagttgaaagcaccaaaaaagaagaatttgcaggcgactaaacttagtgttgagggccgtggtatgctgaagtacctgtaaatgataccctagatgcccaaattggcta

SEQ ID NO: 25832 - DNA, 437 bp, Gossypium hirsutum
  Clone ID: LIB3147-040-Q1-K1-B4
cccacgcgtccgccggaattgctcacaatgtggttcggagaaagtgaggccaatgttcgtgaaattttcgataaggctcgccagtctgctccttgtgtccttttctttgatgaacttgactcaattgctactcagagaggaagcagtgtcggagatgcaggtggtgccgccgatagggttctgaaccaacttcttaccgagatggatggcatgtctgccaagaaaactgttttcatcatcggagccaccaaccgaccagacattatagatcccgcacttttgcggccaggtcgtctcgatcagttaatctatattcccctccccgacgaggaatctcgtcatcaaatctttaaggcttgcttgaggaagtcaccacttgcaaaagaagtcgacctccgtgctcttgcaaatatactcaaggctttagcggtgctgat

SEQ ID NO: 25833 - DNA, 168 bp, Gossypium hirsutum
  Clone ID: LIB3147-040-Q1-K1-B5
cccacgcgtccgatcgtagaatacattttcttgtgatttaaggggcaaaaaaagggaaatatttccttaatgcttttcaaattcatggtataattagtgtggcagcatgaatattatgtttagctgttgacgaaaagtgtgttcagaatatcatcaaaccatatccat

SEQ ID NO: 25834 - DNA, 403 bp, Gossypium hirsutum
  Clone ID: LIB3147-040-Q1-K1-B6
cttccgcagaacggagggaacgtgccgaatgcttgctgcgacgggatccggtccctgaacaacatggctcgaaccacccctgaccgccaaaccgtgtgtgggtgcttgcaagctgccgctaaggctgtcaaaattaaaggcaacttggctgagaccctcccagccaaatgtagtgtcaacatcccttacaagatcagcacttccactaactgcaaaaatgtgaagtgagatggatgaagagagggttttgcagcagcttgcaggagataaaatatatgattaaaaagaagaagaagaagaatgaataaggattttgggatggaattttcaaaatccaaaattagtctccactttagtgtagtgaggggcttgttattttggtttatggtttggcccctgcatg

SEQ ID NO: 25835 - DNA, 417 bp, Gossypium hirsutum
  Clone ID: LIB3147-040-Q1-K1-B7
gttgaaaagaataaaaggggtgctatgatctttccgaggcccacagcggaccaccgaatgactaaagtgcagggccagtcaatgccagtccacatgtggaattcaactggatatggttctatccttgaacaactttacactgctggtattagaaacaaacagggaccaaccattgtcttcggtgaagagcaccgcctttagaacaaatcacgtgtgggtcttaagtgaaaggatctcaggcttttgacctacaaggccaaacttgttgtcttcccaaggcgtgctcgcaagttcaaagctggtgattcaactgccgaagaactcgcaactgcaacccaagtccaaggaccatacatgcctatttctcctgaaaagccgttcgtcgatctcatgaaggtcacctgagacatgaaatca

SEQ ID NO: 25836 - DNA, 391 bp, Gossypium hirsutum
  Clone ID: LIB3147-040-Q1-K1-B8
cggacgcgtgggcaaatgtgtcccaccagggacatatggcaacagggaaatgtgtggcaaatgttatactgatatgagaacccaccgcaacaagcacaaatgtccttgaaaagcccaaccaaagcccccaaaaaaacgacacttcttgagtatgtttttttcatatttgtaatagcaaaaaagcttgcagtaataagttctgtaagaagagaggaaatggatggatttcttgtagtgtcttcgtttgtaatcctagaagctatgaacttgtcaaatagttttaattaacatataattgaagataaataagtagtatatagtaagctcccttttgttctcgttaagaccaaggaagcttgaattatataaaaaaaacccataatatgacccc

SEQ ID NO: 25837 - DNA, 388 bp, Gossypium hirsutum
  Clone ID: LIB3147-040-Q1-K1-C1
tcggccacgcactcatgcacgcgtccgtttagttttaaatctcatgtgcacgaaccgacgacatggggtggaaacctgggccgtgttctctccaaaccaagattaagccataccccaaaacggaatactggcgcggtgtcccaccttcttacatcacaatttatgacgtcgtgcttaagaacaaaggagaagtctaatttacgttttttgtgcatctggggagttgggtgatggaaaccatatcaagtgaagcatataaaactggccgtactgcctgctacaagtacatggactaatttgcagggacggatgcttaacatttgagagtgcgaaaacatccgttgcatgctctgtgtatcaacatgatgccatcctgtgccggcgctga

SEQ ID NO: 25838 - DNA, 428 bp, Gossypium hirsutum
  Clone ID: LIB3147-040-Q1-K1-C10
cccacgcgtccgaaactctcaagtgcactatctgctgctagtgctgcttgtgatcacattcgtgattgggtccttggaactcccgagggcacatgggtttccatgggggtttactctgatggttcatacaatgcaccagctggggtcatctattccttccctgtaacttgtaagaatggagaatggacaattgtccaagggctggcaattgatgaattctcgaggaagaagttggacttgaccggagtggagctgaccgaggagaaggaattggcatactcgtgcctctcatgaatgcattcatcatttccataatctgtttggaagaggagtggtttgccttaataggattagctgcagttttgaataaaaaaccgttctagatgaactgttagtgattggtaagcgacgtcctctgatcgagatct

SEQ ID NO: 25839 - DNA, 367 bp, Gossypium hirsutum
  unsure (1)..(367): unsure at all n locations; Clone ID: LIB3147-040-Q1-K1-C11
cccacgcgtccgcccacgcgtccgcccacgcgtccggtataaaccctaaaatttcaaatttcccttctcgcgttctagggttctctttctcttcgccaagatggcggattctcctcgtaaaaggaattctcagtctccctccccatggagagaacagtcaaggtcacgatccagatctagacctaggtctaggtctaggtcaagatcccgctcctggtcgaggccaaggcatatgtccaggtcacatagtcgcggcaggtcaaggtcaagaagtcgaggcagggttgacgctggaaatcctggcaacacactntatgtgaccggtctatctcaaagggtcactgagagggannnctgagagcatttc

SEQ ID NO: 25840 - DNA, 294 bp, Gossypium hirsutum
  Clone ID: LIB3147-040-Q1-K1-C12
gcagtttcaatataaaataaaaaaaaaaaatattcatgacaacaatgaaatatacaaaaaaagcaaaaaaaaaaaaaaaaaaagaaatgggtggaggatgaggacgaagcctttaccccctggtgatgctgcacaatctgggctccaatttggaggcaatcaacttcctgtcccctctggtggattcaatttcaattgaaggaagcttggttggagtggaatgaaactcagtggtcagtactttcttggtgtttctcggaattcacatatcgttcaagtaatgcatatgtatgt

SEQ ID NO: 25841 - DNA, 285 bp, Gossypium hirsutum
  Clone ID: LIB3147-040-Q1-K1-C2
ctgccatctcttcttttaacaatgctatgttggaggggcaagaaattcgtgtaaacaaggcataaaacggggtgctccttctcatcttgtatccatttcacattcattgcaaagtaggtagttgttttgtttctgttgaatggacaatcactcaacttatgaggttgttgtaattataggaggctgaagcttaatttgttgaactggaaaaggagaaagaggataaacactttttcatttgggaagctgaatctgatgcatattatatcatctcatttttcccta

SEQ ID NO: 25842 - DNA, 395 bp, Gossypium hirsutum
  Clone ID: LIB3147-040-Q1-K1-C4
gggaaatttagggttttatttgaattaggggaaaatggcgatgaggaaagtttacagcgagataaaagggatgaaattgaaggaagttcctggctacttcaagccgatgctatctatgggttacttgaagaaatctgttcagaggggtttggacaattaccatgctaagtacattgagactgattctatcgaacctctctaccatgtctgtttcggtgggatgatcttttcttaccttgttgctcttcccaacgagcgacgccacctcgagcacaagaagcatgctgagcaacacggtcatcattaatcccatctagctttaaagatggtttggatcgttgttgtgcccttctcggttttatccagtaacaattcgatttgcttaatgctttttg

SEQ ID NO: 25843 - DNA, 333 bp, Gossypium hirsutum
  Clone ID: LIB3147-040-Q1-K1-C5
aaaattgactagttgtgcatttggcatccagtgttattctgcatcaagctttgctgtagttggtctatagatagagaccaaagattgcagtgtcattttcttaaaagaactttttttcctttattccttcagttgctgcttggtggcttttttactgcttatatggtgtttatgtacagttagagtaagcggaaacctttattatattaaactggggagggaggtaaatggtaaattgtagatgaagaaaattttatgtagggaaacatgttaatttctccctaatatttgatgcagtttattattaatccaaagcagtggattgttttctct

SEQ ID NO: 25844 - DNA, 414 bp, Gossypium hirsutum
  Clone ID: LIB3147-040-Q1-K1-C6
tcgatatcgaagatgtcaggaagaggaaagggaggcaagggacttggcaagggaggagcgaagcgccaccgtaaggtcctccgtgacaacatccagggcatcacaaagccggcaattcgacgcttggcccgtaggggaggagtaaagcgtatcagtggcttaatctacgaggaaacccgtggagttctcaagatcttcttggagaacgtcattcgcgatgctgtcacctacactgaacatgccaggaggaagacggtgaccgccatggatgtggtttatgctctgaagaggcagggtaggactttgtatggatttggcggttagtcgatttaaggtttaggtttgtaattaggggaatcctttatggcttaatcgaaactacaagttgggtcttggtgttcgatgttatgattt

SEQ ID NO: 25845 - DNA, 66 bp, Gossypium hirsutum
  Clone ID: LIB3147-040-Q1-K1-C7
gcttgtagttttactgatctttgttcttttttcaatatgtggaaatgaaaatgaccattcattatc

SEQ ID NO: 25846 - DNA, 398 bp, Gossypium hirsutum
  Clone ID: LIB3147-040-Q1-K1-C8
catctacggtttagggtgtggctttagcactttctaacattatcatttgatcatgaacacgaagctggaagttgccaagctgctctatttgttgttcatatagtctcttcctcttcaagcactgtatagccgctctcttgtatctcgctttggcgaattacttggccttttcaacctctgcagcagcctttttgagaagtactgtcaactcctattggagctgcagctgattttgacgaggatgaattggaggcagaactcgaagagcttgaaggtgctgagatagaagaacagcttctccatcctgcaacaacagctcctgcaacaccaattcatgtgcctgctggaaggcaaccggctcgtgctattactgaaaagcacacaggcgaggaagatga

SEQ ID NO: 25847 - DNA, 376 bp, Gossypium hirsutum
  Clone ID: LIB3147-040-Q1-K1-C9
ggcagctccaaaatggttcagcggctcacttaccgcacgcgtcacagctacgccaccaagtccaaccagcaccgcgtcgtcaaaaccccaggagggaagcttgtttatcaaacgacaaagaaaagagctagtggacctaaatgtcctgttaccggcaagaggattcaaggaattcctcatttgaggcctgctgagtataaaaggtctaggttgcctagaaaccgtaggactgtgaaccgtgcttatggtggagttctatctggaagtgctgttcgagaaaggatcataagggccttcttggtggaagagcaaaagattgtgaagaaggtactgaagattcagaagacaaaggaaaagcaatcatccaagtgagagc

SEQ ID NO: 25848 - DNA, 425 bp, Gossypium hirsutum
  Clone ID: LIB3147-040-Q1-K1-D1
ggcatatcagaagatttctggaccactagcgttttgggatctggacaaccaccgcttggctgtggagaaatgcatctcatcgatcagcacaagcaaccagacacttgatctgcatggcagtgttgcaactgctgatgccccagctgaatttgtaaatcatggccttcttctctggaatcaaattaggcagagctgggtgggaaacaggaggtctcaaaatcggaagcaattggttcaagaacccaagctaaattggaatgcaacttatgaaaatttacttggaagcaacaagccattccctcagcctattcctctttctgaaatgatagattttctcgtggatgtttgggagcaagaagggttgtatgactgagcaacaacagtacaactacatttgagagatggtgagatatcaatatttatcg

SEQ ID NO: 25849 - DNA, 265 bp, Gossypium hirsutum
  Clone ID: LIB3147-040-Q1-K1-D11
ggtggtgccagttccgcaagcggtgcaggtcttccatgagtttgtcagtttaggttgaatggcacttcctagttcattttggggtgtgcttttttgcactcaaatggttgagattatctatgttcttttttcccccttgtttttgatgcttttgttgcattgattttctttggttcaattagacagtaaataccgaagttgtgcagctcaatttcggaagaaacattaattattataatatataatgaaatcggcatctttggcc

SEQ ID NO: 25850 - DNA, 373 bp, Gossypium hirsutum
  Clone ID: LIB3147-040-Q1-K1-D12
ccgattaagagagattgtgggagttgtagagattattgcagcatggcttctttggcatggccgaaaaccactgagaaaggcttggctcaaggatactatggtggcggttctagttggggaagccaggccactaaaatggagaacaaataccagaatggctatgcaatgtcttacagcgaacaagaacgccatagccaaatccgccgccccacctatggaatgagcgaatcctacactacttacggccaatctcatggcacccacaacggaaacgcaatgtcgaaaccccaatttcatggtcatgggaatggctacggtagccacatgagcaacgggatggctcacactcaagcatatggctctaaccatcaca

SEQ ID NO: 25851 - DNA, 430 bp, Gossypium hirsutum
  Clone ID: LIB3147-040-Q1-K1-D2
cccacgcgtccggcccgttatcgtaatcggtgtcttcctcatgctcgtctcacttgcgggactaatcggcgcgtgctgtcgcgtcacttggctactctggctttacctagtcgtcatgttcctcctcatcgtgctcggcatcgtcttcaccatctttgctttcgcggtgacgaataaaggtgctggagaagctttgtctgggaaagggtacaaggaataccgacttggtgattactccaactggttacagaagagagtcactagccagaagaactggaataagattaagagctgtttggctgatagtaaagtctgtactgatttccgcgataagtatctgaatgcttctgcctcggagttttaccagacgcatttgtccgccgttcagtctggttgctgtaagccatcaaacgactgccaattcacgtat

SEQ ID NO: 25852 - DNA, 407 bp, Gossypium hirsutum
  Clone ID: LIB3147-040-Q1-K1-D4
ctgagggattggaaaagattgaaagcctccttagtcatgacaacaatgaaatatacgagaaggcagtgaagattcttgaaacttattgggtggaggatgaggacgagcctttaccccctggtgatgctgcacaatctgggctccaatttggaggcaatcaacttcctgtcccctctggtggattcaatttcaattgaaggaagcttggttggagtggaatgaaactcagtggtcagtactttcttggtgtttctcggaattcacatatcgttcaagtaatgcataagtatgtcctcaagaagtcgtcaaataaagacaaggtggtaaagacgctttgagagtccagaagccgtacaaatattatttttctacttatctttgcagagtcatcttttcacatcgtatac

SEQ ID NO: 25853 - DNA, 444 bp, Gossypium hirsutum
  Clone ID: LIB3147-040-Q1-K1-D5
cccacgcgtccgcagccgcggcgtttaccaccgtgatttgaagccggagaatcttctcttagacgaagaaggcaacttgaaggtcaccgatttcggactcagcgctttcacggaacatttgaagcaagacgggttgttgcacacgacttgcggaacgccggcgtatgtggcgccggaagtcattggaaaaaaagggtacgacggagccaaggcggatatttggtcttgtggggtgattttatacgttcttctcgccgggtttttaccgtttcaagatgataacttggtggcgatgtataagaagatttacagaggagatttcaagtgtccgccatggttctcacctgaagctcggaggctaatatccaagcttttagacccgaacccgaaaacccgaatcgccatctccaagatcacggaatcatcttgggtcaaaaaatcaat

SEQ ID NO: 25854 - DNA, 243 bp, Gossypium hirsutum
  Clone ID: LIB3147-040-Q1-K1-D7
cggtaattagttaatatctaaatcaaaagtttatgaagcaaagcaaacaccatatggctatggagaaatcccatggattaaaaaaaataaaataatgagagatcatgcagccaagataaatcatcatcatttgatttctgaatctttagaccatcgtctaaatcattgatacgaacttaggtacttgggcatctgatatttgcactagagtcgcattactcctaataaaagaatactacaact

SEQ ID NO: 25855 - DNA, 392 bp, Gossypium hirsutum
  Clone ID: LIB3147-040-Q1-K1-D8
cccacgcgtccggtctccctgaagaagatatggcccgaatgtcagccatgatcgaccaccttcagcttcgtgacagtttgagaatgtacaattcactcgtcgagagatgcttcactgactgcatcgacaacttcactcgcaagacgttgcagaaacaagaggaaacctgtgtgacacgatgtgctgagaagttcttgaagcactcgatgcgcgtaggcatgaggttcgcagagcttaattcacaagcagcaacgcaagattgaagggtaataataagaactgcgagaaggggctcggaatttcttatttcgtaagaattttctttttggattaatcgagttcttcgcaatcttgtttcttggaagaatttgttgattttcactattgaatca

SEQ ID NO: 25856 - DNA, 436 bp, Gossypium hirsutum
  Clone ID: LIB3147-040-Q1-K1-D9
cccacgcgtccgccaacaaaacctgtgctgtccttacagttttctctcttcttcttttcaacttatcattcaccaatgcttgccattcatgcaagccaccaaagcccattccaccacctgctgcatgccctccaccaccagcaaagcctgcttcttgccctaaggacacattgaagctaggtgtttgtgctgacctacttggactggtaaacatagtggtgggaacacctccttcgagcaaatgctgtgctttgctccaaagcttggctgatttagaagctgccctttgcctttgcaccgccattaaagccaatgtgcttggggccaacctcaacatccctattacccttagcttactccttagtgcatgtcagaaggaaatccctccaggcttcaaatgttgattttttttaagaagcacaatcagttgttgatg

SEQ ID NO: 25857 - DNA, 247 bp, Gossypium hirsutum
  Clone ID: LIB3147-040-Q1-K1-E1
gatcgtcctcagaaaaagactgggcctggcctggaagataaaaataaccaaagcttaaagatcttttgaattctgagagatgtggagaaggctagtgacttcacccttcaaaaccctagccaccgttccatgccgatctgcttctaagacgccatcgccgtcgccgctccgtttcaagtctcacgtttctccattcccttccacttatttccttactcgccgcttctctactggttcagcgggtact

SEQ ID NO: 25858 - DNA, 358 bp, Gossypium hirsutum
  Clone ID: LIB3147-040-Q1-K1-E10
cccacgcgtccgacacatggttggactgcgtgctttgaattttaggtgttcctgcagagtgaggaagctcccctgaaaacttcagttgaaaatgcctaagcaaattcatgagatcaaaggacttcctctcaacgctggaaagaaagatgctcccgtcgttgatctcgcgtaaagcaacaatgttttgaagtttaaagtccgttactacaagtacttgcctgcagagacacgggtcaaagccattaatgagatatgtgggcaagctaaattttcagatcttacgaacaactttttagttatactatacgacaatggttagcttatacatatagaaagcattgcaaagagatttgtggag

SEQ ID NO: 25859 - DNA, 278 bp, Gossypium hirsutum
  unsure (1)..(278): unsure at all n locations; Clone ID: LIB3147-040-Q1-K1-E11
cgtcaatctcgaccatttaaccgaaacctttaatatgtcattctacatgacgtatttagctcgatggcccgattattttcaagtagctgagggccctggcaatcgagtgatgggttacattatgggaaaagttgaggggcaaggtgagtcttggcacggtcacgtaacagcagtcaccattgcacccgaatatcgcaggcagcagcttgctaagaaactgatgaactntcttgaagaaatcagtgataagattgacaaggcatattttggggatcctt

SEQ ID NO: 25860 - DNA, 218 bp, Gossypium hirsutum
  Clone ID: LIB3147-040-Q1-K1-E12
aaaccccaattttaaatcctggttatagttggagaggtgctttacttggccatcatgactttgacgaactcctcgtagttgatctgcccatcaccatcaacatcagcttcgcggatcatctcgtcgacttcctcatctgtaagcttttcaccaaggtttgtcatgacatggcgcagctcggctgcagatatgaacccattctggcccttgattttccc

SEQ ID NO: 25861 - DNA, 426 bp, Gossypium hirsutum
  Clone ID: LIB3147-040-Q1-K1-E2
cccacgcgtccgcccacgcgtccgctatcttcgaaaggatcaacatgggatgaaattgatttcgagttccttgggaatttaagtggtgacccttacattcttcacacaaatgtgttcagtcaaggaaagggtaacagagaacaacaattctacctctggtttgacccaactgcagatttccatacttattcaatcctttggaatccccaacgtataatgtgagtattcataaaacaaaccatccattagaattttttttttctgttttcaaattgattgattgactaagtttttgatattgttatgctccagcttctctgttgacggtacacccattagagagttcaaaaacatggaatcatttggtgtcccgtttcctaagaaccagccgatgagaatttactctagtttgtggaatgctgatga

SEQ ID NO: 25862 - DNA, 226 bp, Gossypium hirsutum
  Clone ID: LIB3147-040-Q1-K1-E3
agctcatcaagcgcttctagcttacaaggtcttttagaacttcgagatgcaaagtcaggatcggtgatggaatcacacgactgttctggacagtcagactctgatgtcaacaattccggcggggactgagaactccccttctgaatcctcgacgcgtacagcggcatcacaatggagtctccgtcagaatcacccgcggacaacctgacgaatgatctttgtgccg

SEQ ID NO: 25863 - DNA, 445 bp, Gossypium hirsutum
  Clone ID: LIB3147-040-Q1-K1-E4
atttatctggaaagccctctgtggatcttgctgaattgcagatctccactttgaaagaaatggatattgatattggtcacaagcaggtggcctgaagtaaaaaggcttcaaccctcaaccaagggtgtaactggcttatatttagttcaagattatcttcaaaagtgcaatggtccaaaatcaccatcggagtttcacaacttgtacaaaacttagagccagccaacagcaggccgaaatcccactctcgtagtctgtcagatacagaaaagccttgcaggaatggcaatgtcaagctatttggtcagatactcaattccagttcccatgacgatgggaagatccgtttccctgaacagagcatgaaatcttcgaatttgaacttcagaggtcataacaatgttgatggaaatgcatctttctcaaaggttgatcaaaatatcat

SEQ ID NO: 25864 - DNA, 413 bp, Gossypium hirsutum
  Clone ID: LIB3147-040-Q1-K1-E5
cgagctgtcgaggaaatattctacttctctgaagaaggacgagaatgttaaggtgcctttggctttgtttggtggatctggaaactatgcatctgcactgtaccttgcagccgtaaaaggaaatgctctggacaaggttgagtctgaacttcttgaccttgttcaggcatcaaaaaacagtcaattgttttctcaattcactaaggacttgtcagtacctgcagagacacgggtcaaagccattaatgagatatgtgggcaagctaaattttcagatcttacaaagaactttttagttatactagctgagaatggaaggctaagacatatagaaagcattgcaaagagatttgtggagttgaccatggctcataagggagaagtgaaagctattgtcacaagtgttattcccc

SEQ ID NO: 25865 - DNA, 386 bp, Gossypium hirsutum
  Clone ID: LIB3147-040-Q1-K1-E6
ttttgaaaaaaaaaaaaccctcaaaagccctaattcggaaaaaaaaaatcaaaagcaatggcctcattcgagcaagcaccgcctggtgatgcgaaagctggggagaagatcttcaagaccaagtgtgctcagtgtcataccgtcgataaaggcgccggtcacaagcaagggccaaatttgaatgggcttttcaggaggcagtccgggacaacaccgggatactcgtactctgctgctaataaaaatatggctgtgatttggggagagaatactttgtatgactacttgcttaatcctaagaagtacattcccgggacaaagatggttttccccggattgaagaagcctcaagatcgtgccgacctgattgcatacctgaaggaatc

SEQ ID NO: 25866 - DNA, 340 bp, Gossypium hirsutum
  Clone ID: LIB3147-040-Q1-K1-E7
cccacgcgtccgcacatcggctgcacctgcttatcatgtgcagtggtattacccagcagtggggacacctgcgtcaccctttcatcatcagcatcatcaggccgttcccttctatggctactctcccacctacattcccacagatatgagctacaatcataagctgagctacagtggaggatcctacatgaatggacatttctctcaagtgtatccagcagggcaggctgtcgtaagtgcaaatacattgatgccaatgtacccgttctatcattaccatcaatcacaaacgatgggattaccagcagcagccacccacatctacccatcaacaacagct

SEQ ID NO: 25867 - DNA, 185 bp, Gossypium hirsutum
  Clone ID: LIB3147-040-Q1-K1-E9
cagaaatcctgatacacttccattggcgctttcccggtaagaacagcgagctcatcaacaggctgtgaaagacatcctgggtgaggctttccggctcgatccttggataagatattggacttggttttgcccatgtcaagtacccactcgagtagcgggatcttaagttgactggtagcgtgaaa

SEQ ID NO: 25868 - DNA, 273 bp, Gossypium hirsutum
  unsure (1)..(273): unsure at all n locations; Clone ID: LIB3147-040-Q1-K1-F1
ggcattgagttcttaaggacttacctgaaccttccttctgagattgttcctgctactttgaagaaacaagctaaacctgctggtcgtcccatgggccctcctggtgaccgcccacgcggnccaccacgctttggtgagggtgagaggagatttggtgacagagatggctatcgcggtggtcctcgaggaggcggtgattttggtgataaaagaggagctccagctgattatcagccttcattcaggggccctggaacacggcctgcttttggt

SEQ ID NO: 25869 - DNA, 215 bp, Gossypium hirsutum
  unsure (1)..(215): unsure at all n locations; Clone ID: LIB3147-040-Q1-K1-F10
attcctcattaaagtgtctcgtagcaggtgcttgctatgagcaacaaagtcttgtatatgatattcacttgttaaggattaacttgctcatttgttcctcatcttcctctcgttttctatgtatgtgcgtggggttttatggtgacaaaaccacccttgctttataaataaattaattgcaccattagtctgtgcattatcagcnnngcnnanna

SEQ ID NO: 25870 - DNA, 315 bp, Gossypium hirsutum
  Clone ID: LIB3147-040-Q1-K1-F11
cccacgcgtccgagaatcctttcgacaatcctccgtgtctcagccaaaagctaccgccatgggaatcgttggaaatctctctccacagcagcgccaatctttcgactctcaaggttttcttgtgattgaatcatttgcgagccctgcagaaattgaagctatgaagaagagaatggacggaatgcttcaagcctttgaccctaccaccaccgcttctattttctccaccaaaaatcaagtaaaattgaccagtgaatacttctatgaaagtgctgaaaacatttcctttttctttgaagaaaaagcaattgatga

SEQ ID NO: 25871 - DNA, 292 bp, Gossypium hirsutum
  Clone ID: LIB3147-040-Q1-K1-F12
ctcccgcaagccccaactcttttttatttcttgtttcatataatttcgttgctgatctaaaatggcgggtcggggcaaaactctcggatccggagcctcgaagaaggcgacatcgaggagtagcaaagctgggcttcaatttccggtgggtcgtatagctcggttccttaaggctgggaaatatgctgaacgagtcggcgccggagctccggtttaccttgccgctgttcttgaatatcttgccgctgaggttcttgagcttgccggaaatgcagcgagagacaacaagaaa

SEQ ID NO: 25872 - DNA, 344 bp, Gossypium hirsutum
  Clone ID: LIB3147-040-Q1-K1-F2
cccacgcgtccgctttttggcaacctctagttttagtcaattagaagacttccatctgatatagccctcgatgtcctaaacaatcttttaagcttgagtggttggttacagggcttttgtagtttttgattttcccatgctagtattaaagttaaggttctattttgccctgtggctctggattctctttcctttttgttacctaaaaagatcatgtctggatgattttgtttattgcattatttgacattaaatatcacgagactagctgcttcattttcaaaaataaaaaagaaaaataaaaactatataaattataaaaaaaaaaaaaataaatttaaaaa

SEQ ID NO: 25873 - DNA, 434 bp, Gossypium hirsutum
  Clone ID: LIB3147-040-Q1-K1-F3
gctgagtcacccaagccatccaaatccaaattcaaatccaaacacaagatagccgatgcaccggaatccgatgcaccagcggagagtgatccagctgatgatcagacggcagacaatgacaatggggttgcaggactggacggtaggagattggtgatggggatgctgagcctgtgcattggggtattgctgatttgaatacactgatatagaaatatttatcagattgatacaaatggtatgggagacaatactttttaggccattggataacgagaaatggggtccttatttcatgtgagagatttgaaattttctttttcttttaatttctttggtggtttgtgagcaaaagagcaataagtgatgagtcccacttgcatggggtcattttctttattcttttttatttattcccgtttgtcattattagc

SEQ ID NO: 25874 - DNA, 392 bp, Gossypium hirsutum
  Clone ID: LIB3147-040-Q1-K1-F4
ggaaaataaagaggcatctgctgcagctggtctacttgagaagttgagtgttgaggaaaaggaagccaaggataaagtggaagagaaggatgttaaagcaaaggaagaaacggaaacaaaggaggatacaaaaaaagtagatgatagtgagaagaaagatggggagccagcatcaacttaaaaaaaggggttgggttgtgtttgttttctgtgccatatgctttttgggatatatggtgagattagtcacctcccatgtcttgcatattcatctcctgcagaggaaactagatgggtcagtatgtttataagctggaatggtttgagttcctttgcgtgtcattaggtgtgagtgttgacgattgtcaaacaccgagtcatgtttacataca

SEQ ID NO: 25875 - DNA, 203 bp, Gossypium hirsutum
  Clone ID: LIB3147-040-Q1-K1-F5
gccacgcgtcgccacgcgtcgaaaaattttttaaaaaaaaaaaaaaaaaaaaaaaggggaaaaaaaaaaaaaaaaggaaaaaaaaaaaaaatgggggccgttctggggtccagcttagtaccgtgctgcagtcgtactttttatgtgcacctaatacattcctggccgcttttacaactctgatgaaaaacctgcgtacccac

SEQ ID NO: 25876 - DNA, 353 bp, Gossypium hirsutum
  Clone ID: LIB3147-040-Q1-K1-F6
cccacgcgtccgcgagaaccaatgtcagatgcattactggatagcatttttagtgcaaggctgcagacaaacagaataaactggggagcctatccgcattataaagctccggaactgtttgcaccattcattttggatggtcaacatttgtattatgtaaacgcattcgagaatgcggccagcaccatggagacgggtgcggttgcagctgagaatgtagcaaggctcatattgtcaagatattttggtgaagcatccctgcagtcatcaaacttgcagagctttagtcccgatgcagacgtatcacacttcgacctgtaacttacggcgaatgtaatattggtgtgtaaatt

SEQ ID NO: 25877 - DNA, 383 bp, Gossypium hirsutum
  unsure (1)..(383): unsure at all n locations; Clone ID: LIB3147-040-Q1-K1-F7
caattcctcgagttcttctttcatttctgattccgttctcaaaaaaccctcgttttccccattctttatatcctatggctccaaaggttggtgggaagaagcccgccgagaaaaaaccggcggaaaaggctccggcggagaagaggccaaaggcggagaagaagatctcaaaagaaggcggcgcagatgagaagaagaaggctaagaagagcgtcgagacttacaagatttacatcttcaaggtattgaaacaggttcatcctgatatcgggatctcgagcaaagcgatggngataatgaacagtttcatcaacgatatctttgagaaattggctcaagaagcatcgagattggctaggtataataagaagccgacgattaca

SEQ ID NO: 25878 - DNA, 393 bp, Gossypium hirsutum
  unsure (1)..(393): unsure at all n locations; Clone ID: LIB3147-040-Q1-K1-F8
cccacgcgtccgcccacgcgtccggggggactgagataggggagtttacgctatctgatctggaatcttgtgaggtaagattaatcggctgctgcaatgcggtttttgtgaacagattgaagaactgcaaggtttatatggggcctgtaattgggtctattttgatagaggaagtggaaggctgtgttttcgtattggcgtcgcatcagataagaattcatttggcgaaaagttgtgacttttatttgagagtgaggagtaggccaataattgaggacagcaatgttgtgaagttcgctccgtactgtttggattatgaagggatcgagatggatttggagaaggcaaggttgagtgaagagacggggaantgggggaaatgtgatgatttta

SEQ ID NO: 25879 - DNA, 441 bp, Gossypium hirsutum
  Clone ID: LIB3147-040-Q1-K1-F9
agctagtcgaggtgatttcagccctgaagaattgaaggaaagacaggccaaggcaatgcaagatccagaaattcaaaacattctatcggatccagtcatgagacaggtgttggttgattttcaggagaacccaaaggcagcgcaggagcacaccaagaatcctatggtgatgaacaagattcaaaagctggtcactgctggtattgtccaactgagataaactggaaccaaaatttcaacttttttcttctttttatcctttttcccattttgtcggttgaacttgaatggattgttcataaaagtagttcctgctggaaatgttcaatagttgcctgttatttaaatggtttgtttttgagccgtcaaaactgtcgctggattctattatatcattgattttcaggttttaaaaaatatatgcgtgtatatctcaatata

SEQ ID NO: 25880 - DNA, 411 bp, Gossypium hirsutum
  Clone ID: LIB3147-040-Q1-K1-G1
cctttgtcccttggactcgaaactgctggctgtgttatgactgttttgattccgagaaacactaccattcccaccaagaaggagcaggtgttttcaacttactctgataaccaacccggtgtcttgatccaagtttatgagggtgagagagctcgaacccgggacaacaatttgttgggtaaattcgagctctctggcattccaccagcacccagaggcgttccccaaattacagtttgcttcgacattgatgctaatggtatcttgaatgtctctgctgaggacaagactactggccagaagaacaagattacgatcacaaacgacaagggtcggttgtctaaggaagaaatcgagaagatggttcaagaagcggagaagtacaagtccgaggatgaggagcacaagaag

SEQ ID NO: 25881 - DNA, 169 bp, Gossypium hirsutum
  Clone ID: LIB3147-040-Q1-K1-G10
cggacgcgtgcgtccactcgttcgtccattgtgcggtcatcgattgctttcctttacgctgagctcttcaccatgtactcaagtgcttgctttaattttcacttaatggctcgctatttttttttttcaaggaaaagaacaaaaacttaagttgcttcatccgcgactt

SEQ ID NO: 25882 - DNA, 335 bp, Gossypium hirsutum
  Clone ID: LIB3147-040-Q1-K1-G11
cccacgcgtccggagagatgttaaggaaaatctgtcttacattgcccttgactatgaacaggagctagagacctcaaaaacaagttcatcagtagagaagagctatgagttacctgatggtcaggttattaccattggtgctgaacgtttcagatgccccgaagtgcttttccaaccatccttgattggtatggaagctgcaggcatccatgagactacatacaattcaataatgaagtgtgatgtggatatcaggaaggacttgtatggtaacattgtccttagtggtggtacaaccatgttcccgggtattgcggacagaatgagcaaggagc

SEQ ID NO: 25883 - DNA, 307 bp, Gossypium hirsutum
  unsure (1)..(307): unsure at all n locations; Clone ID: LIB3147-040-Q1-K1-G12
gcagcctctagttttggtcattcctagtttatatattgtggaacaaacagtgctttttcccacctttcaagctcagtacatcataatttgtttcatgacccgatctgtcaagtcatgtgtcagatttcgggattgtcttttttgtttgaaaaaaaaaaaataaaaaaaaaaaaaaaaataacctttcaacaattgacctattatcttatnaaaggcaacttgccatgagcaaaatgggtggcgttcatgctctaatgcaccctcagggacagcatcctctgaagcaagcagcaattggagtgggtgc

SEQ ID NO: 25884 - DNA, 426 bp, Gossypium hirsutum
  unsure (1)..(426): unsure at all n locations; Clone ID: LIB3147-040-Q1-K1-G2
ctcttgcggcagtataattggaaagggaggatctaccataaagtcattgattgaagactcccaagctggcattaagatatctgcattggataataatttctatggcttgaatgataggctagtaacacttactggcacactagatgagcagatgcaagcaattgatttgattctttccaagctttgcgaagaccctcattactcacaagctatgcatgctccattttcatatgcagcgacttactattcgatgagctatgcaccaaatgggactggcgggaagtttccaaatcacaatgaggatcgtagcaactccatcacgattggtgttccagatgagcatattgngctggttcttgggcgtggtggaaggaatataatggaaattagtcaggtaaagtgggcccagaataaaatatcggatcg

SEQ ID NO: 25885 - DNA, 414 bp, Gossypium hirsutum
  Clone ID: LIB3147-040-Q1-K1-G3
gatattttaggtggtggtagccccacagctaggccaatcactggtttacttggcaacatttatggcggtcaagtcccttttgctaagccagttgggttcttaccacccgacggtgccgtcccgatccccaacgcaaatggtgctatcccaaccgttaatggtgtcactggtctcccgttggggaccggtttagccgggacggcttttgcgggaaaccctaaccagaatggtcagcctcaattccctgtaggaccagatgggttaggattagggttcgggacgattaccgtcatcgacgatgtgttaaccgttagccctgacttggggtctcaagtaatagggaaagctcaaggggtttatgtggcaagctcagctgatgggacaacacaaatgatggcgttcgcggcgatgatc

SEQ ID NO: 25886 - DNA, 364 bp, Gossypium hirsutum
  Clone ID: LIB3147-040-Q1-K1-G4
gatccgagaaggttaaggatgagattgtttttgatggtaatgacatcgaacttgtatcccgatctgcagctttgataaaccagaaatgccatgtgaagaacaaggatattagaaagttccttgatggtatctatgttagtgagaagggaagggtcgccgaagaagaatgaatactatctccctgaatcatagttatagtgctgctttatttttttgtcgtagtaatattttgggactccgttttttgtcttgtctttcctgtttccatggattgcaactgttacagagtacaaggatgttatctttatttgtttggaagaatttggatatctggttaatctttagtactctaaatattcccccc

SEQ ID NO: 25887 - DNA, 233 bp, Gossypium hirsutum
  Clone ID: LIB3147-040-Q1-K1-G5
gccgcgcttcactatggatagctatgcctactgtgccttgcccagcaccagcatagagccacgagcctacccacatgagcccacgctcggcacctaaacagacagtcacttgccccagagatacactgaaactaggtgtttgcgctgatttgatgagctcggtgcgcgttgttgctggaccgtcgaggaccaaatgctgctcactcatttcgggttaggctgatctcgatgct

SEQ ID NO: 25888 - DNA, 424 bp, Gossypium hirsutum
  Clone ID: LIB3147-040-Q1-K1-G7
ggaatgtatgagcagaaagttctgccaaatcaaccacctttacccccaatgcctcccccaccaacaattttgccagtccaatccgattatttatcttcggttagtggcagtccttccctgttgcaatcttccattcccgtgtcagattccaagtttatgagaacttctatgccttcgcctagtggaactactaggcctccaccatcccttccttcaacaccgcctccatttgcatctagcccatataatttagcttccttaaatacttctgcttcccaaccagcactgtacaatcagtctgttatgggtaaaaccgaacttcctcagggttctattggacctactattgatgctcgtcttcctacttcagctgctggcttggcttcatatccacctccaccattgatgcaatctttagttttta

SEQ ID NO: 25889 - DNA, 335 bp, Gossypium hirsutum
  Clone ID: LIB3147-040-Q1-K1-G8
cccacgcgtccgcttaatcagatttcaaattaaaatatgatttcaatcagtttcttttactgattcagtcattatctttcgcaaaataccagttcgtatttattaattcatttgcgttttgttatggtgattcgcagggagtaccagctttcggactatcatccggcgtgggagcattaaacgcgttcgttttcgagatcgtgatgactttcggactggtctacaccgtctacgccacagccgtcgatcctaaaagaggcaacttgggagtgatcgcaccagtggcgatcggtttaatcgtgggagccaatattttagccggtggggcattcgac

SEQ ID NO: 25890 - DNA, 438 bp, Gossypium hirsutum
  Clone ID: LIB3147-040-Q1-K1-G9
cccacgcgtccgcccacgcgtccgcccacgcgtccggtcatcgattgcttcccttcacgctgctttcttcatcgtctccatcaattgcttgcttcacttttcacttagtggctcgctatttttttttttcaaagcattgcaccatattcttaagttgcttcatccgcaacttaggttgtaaccgtgaagttctggtggttgcttgctttaccttaccttaaaaatgtcatcattaaagaatgctatcagcagacgtgctcacaaggaacgtgctcaaccttcatcgaggaaaaaatttgggcttcttgagaaacacaaggattatgtcgtccgtgctaaagcattccacaagaaagaagaaatgttacggaaactcaaggagaaagctgcattcagaaacccagatgaatttactttcagatgataaaaacgagaact

SEQ ID NO: 25891 - DNA, 188 bp, Gossypium hirsutum
  Clone ID: LIB3147-040-Q1-K1-H1
cccacgcgtccgcccactcgtccgcggactcttgggaccaacttccctttaccggatgaaaccaactgttacaagggccagaaccagcatatccctagccaaagcagcacggtggaggaatctggaagcccaacggtggagtcgataatggtgggattagcggagtgacccggtcgcggccggttcta

SEQ ID NO: 25892 - DNA, 268 bp, Gossypium hirsutum
  Clone ID: LIB3147-040-Q1-K1-H10
gtgctagaccagcttgctgattatttcaagagacgcttggctggctaccctactacactgaatgaagatgagtcattgttgtcagatccaaacttgaatcccaagaaacgagttgccactcagcttgttaggttggaaaagaaaattctccatgcatgtttgcaggcaacaatggatctgattgaccagttacctgatcacactgtgtctccatgccctgcaccttatgcccccctgttgaaataaaagtctgctgtattaccagtct

SEQ ID NO: 25893 - DNA, 365 bp, Gossypium hirsutum
  Clone ID: LIB3147-040-Q1-K1-H11
caaaactgctaatgcttaagctgcctccattgaggttttagactactttggcggatattttgatgtttgtcacctgtctggggggagtttgaaactgtttgttgtggacgaatgtaaggactattttatttgtgatctgtcatcagctcatcaactttgtttatggaataaagttgctcatcaaattggacatctctttttcagatatagttataacaatcgttttcacttagccaactaggtaaatatgcttcagtttggtgtttatttaattgcaacagatatacaatggatatgcataaccggcgggatatgcgtcaaatgagaaataatatgcaatgacaatgtataataaatcttttgct

SEQ ID NO: 25894 - DNA, 395 bp, Gossypium hirsutum
  Clone ID: LIB3147-040-Q1-K1-H12
gttttgagggtgacaacatgattgagaggtctaccaacttggactggtacaagggccctactcttcttgaggctcttgaccagatcaacgagcccaagaggccttcagacaagcctctccgtctcccacttcaggatgtgtacaagattggtggtattggaactgttccagtcggccgtgttgaaaccggtgtcttgaagcctggtatggttgtgacctttggcccgtctggtctgacaactgaagttaagtcagttgagatgcaccatgaagctcttacagaagcacttcccggtgataatgttgggttcaatgttaaaaacgttgctgttaaggatctcaagcgtggtttttgtgcatccaactccaaggatgacccctgctaggaggctgcc

SEQ ID NO: 25895 - DNA, 345 bp, Gossypium hirsutum
  Clone ID: LIB3147-040-Q1-K1-H2
tagctcttttatgttttgactggtggcaaatggaacaggaaaaaccaactacactggattgcggtccaagaacaatttgcagaaggcatataatgaatggctgctacctctacgaatgcttgtgggaggcattgcagcagcgaataagaatgatattgatcaacatgcagttgacaccgtatgtgctctgaatccaattgagttggttttgtatcggtgtattgaactcgttgaagagaatttgaaacatttagcctagcatgcttgagtgtttggtgctcaagccatttattggggaattcctcacaacatctgaagccattatatcgaagtaggcaatgctaa

SEQ ID NO: 25896 - DNA, 429 bp, Gossypium hirsutum
  Clone ID: LIB3147-040-Q1-K1-H3
ccacgaggcacgtgctttcagaatatgggatcatgtcaagtgcttgtgtgctgttcatattggatgagatgaggaagaaatcaaaggaagatggacttggaaccacgggtgaagggctcgagtggggtgtcctgtttgggttcggaccagggctcactgttgagaccgtggtgcttcatagtatctctgcttaaacaaggttttaatgttcatgttggctagccctggctgcactacaatttgctttgcatttttatttattttattttcctttttattaatgaaatttgggatttgtatggttatttgaaagagagtaaagctctcacatatggtgtttaacgcctgtagaatttatgtgccaccttatattttatgatatggtgtttaacgcctgtagaattatgtgccaccttatattttatggga

SEQ ID NO: 25897 - DNA, 374 bp, Gossypium hirsutum
  Clone ID: LIB3147-040-Q1-K1-H4
cccacgcgtccgcccacgcgtccgaataggctgtgtgttggacaaaacttctgctcagtgacggtagcacccgaaatgttcggaggagacccgtgtcctaatgtaatgaagaaactctctgtagaggtcatttgcagctgatggaacacatcagaagtacatgaaacaaacatggtctatcatttctctcaaatccagcatgtcattcacctcttctcttttttgggttcacaagcatttctttcagcttttccagggtgaagttgtacaaatacacagcacgccacttggaaaaagctcggtttagatcgcaaaaattgattgcagataagctctatgtatatatatacaatgtttattcctgcatgatatac

SEQ ID NO: 25898 - DNA, 182 bp, Gossypium hirsutum
  Clone ID: LIB3147-040-Q1-K1-H6
tgaaggatcatgatttgctagctcatctcatgactgatccaagagctgatggttttggggtgtcttcatgcattgagagaagtcttgaagatgctggtgtgtcccctgaggaggttaactacatcaatgcacatgcaacttctactcttgctggtgacctagctgagatcaatgctattaaa

SEQ ID NO: 25899 - DNA, 229 bp, Gossypium hirsutum
  unsure (1)..(229): unsure at all n locations; Clone ID: LIB3147-040-Q1-K1-H7
cttccgcccacgcgttcgtccacgcgtncgagactattgtgatcggtacatcgaaccatgtgggtctggccaaacgtgtcggttcaaggattttacttaccataacttgctaagtttatggagattccttggaacattcccagaccgaatgctaatggtgaaatgctaaccctatcggagatcgaagctgctacgatgaaggaaaacgagtggctgaaactttgatgtt

SEQ ID NO: 25900 - DNA, 51 bp, Gossypium hirsutum
  Clone ID: LIB3147-040-Q1-K1-H8
gggcgttcctgcgacttaattgctcttttatagggccacctaaattcaatt

SEQ ID NO: 25901 - DNA, 437 bp, Gossypium hirsutum
  unsure (1)..(437): unsure at all n locations; Clone ID: LIB3147-040-Q1-K1-H9
gaatggtagaataattttttcggtccggcatggacaggaaacattaggtctaattaacatgtctttcaatctaaaacttgtgttttagtttcagtaatcctttgtgataatgtgttgttttgtctgtacgtgaagttataaaattatgtgcattaaagtaatatctacagttttacattttttagtaccccaatctatcattatcaatatacattgtaatatctaaaacacaaaaaaaatggggttggggtttgagcaagctttgttcttgctttggtcgaggttgttgtagatgtctggtgttggatgcaacaagcttgaccttccaaattttatatcatcggtgggaatatattttctgtggctagctagatatatatatttgatttcccatgtatttagagatttttaaaagaattacgtatngtcattttctt

SEQ ID NO: 25902 - DNA, 415 bp, Gossypium hirsutum
  Clone ID: LIB3147-041-Q1-K1-A10
acgagcaactcactaaacttagggttaaagccgataaggttgctgaggagaagcttggtgcccaggtgggagttattgctcctatcacatattgattcaaagatgattgaaacatactggttacgtttcactgcacttacataatgtgcttgagagttgctcataattctattcccgcaatcgcatcaagtagatgctatgctatatatgttcctctgttatctcggtgcttttccttctttgcttgagaaacattcctgattgctagattctgaatattgatatctaacgtttttcgggattggatcatgattttactagaactaagagtgcagtagtcttatcatttgagcaaacgactatgagccttttacatttttttgcctacacccatttcaaggtgggcattttaaca

SEQ ID NO: 25903 - DNA, 278 bp, Gossypium hirsutum
  Clone ID: LIB3147-041-Q1-K1-A11
gaacacaaacaatttcccgagtgagggtttattgctaatagacattaaccaacccctaatgattctttcattttgcctcttgactatttcactatccatcatctttttctaattaataatgtttacacatctctacgattcttagttcaaaactatcctcttttattaagatatattcacataaatctgccactgaatgagaaaataacctatcatgttcttttacaaataactactatatgccaacgtaccttgtaattctttaaccatctttattt

SEQ ID NO: 25904 - DNA, 463 bp, Gossypium hirsutum
  unsure (1)..(463): unsure at all n locations; Clone ID: LIB3147-041-Q1-K1-A12
acgcgcaaatcgaagaatacgctgaaatcttcaatctaaaatcgcctaaccagattcatgagatcagggactttcttctgactgacagaacgaaagatgcacgctctgtgaagatcaagatgagcaaagatgtcgtcaagttcaaggtccagtgctccaagtacttgtacacactgtgcgcgtcggatgctgagaatgctgacaagttgaagcagtcccttcctccaagtatgagtgttcaagacctgtgaaaatatggcacccctggctctgtcacctgatttatacgcgatgaaagctaggtttttagatctgggactattgcatntctggtcattctgcaacagtgagctcaattttctggaattggatctattgacttttggtgattaaggattttacagatatatgcacttttcaaatacaatgaatggtcattttaatgaaaaacaaaaaattttgg

SEQ ID NO: 25905 - DNA, 65 bp, Gossypium hirsutum
  Clone ID: LIB3147-041-Q1-K1-A2
ttgttttgagggacaaacaaaaaaaaaaaaaaaaaaaaaaaacttgtgcaaaaaaaaacaaaaag

SEQ ID NO: 25906 - DNA, 285 bp, Gossypium hirsutum
  Clone ID: LIB3147-041-Q1-K1-A5
aaaatggaaataaaattagctcaactgtacttatttgtagctacttgactttaaccacaccactttttgtgatgtaccttcaaaacctaacactattatttttccccaagtttttgtagcaaatcattgtcatgacttttgtttttaacaggctctctcatggaagctattaaatgacaaagctctcatcattctccaccatgtttagcagccaacactacctttcgagatcgagacattggcttattctgtagcttaaaactttatatagcatcaatgtgcggg

SEQ ID NO: 25907 - DNA, 317 bp, Gossypium hirsutum
  Clone ID: LIB3147-041-Q1-K1-A6
cagtgttcttaaccagaagcgaggacatgtgtttgaggagatgcagaggcctggtactccactatacaacatcaaagcttatcttcctggtatcgagtcatttggattctcgagcaccctgagggctgcaacatcaggacaggctttcccacaatgcgtgtttgaccactgggatatgatgtcatcagatccattggaacctggttcccaggcagccacccatgttgctgagatccgtaagaggaagggattgaaggagcagatgaccccgctctccgattacgaggacaagctgtaagctaagctacaaaataata

SEQ ID NO: 25908 - DNA, 399 bp, Gossypium hirsutum
  Clone ID: LIB3147-041-Q1-K1-A9
ggaaacatgtaacaagcttagctggactcgtcttcttggtctgcctgaaatctgatctgtgggtaatgacccacggaggtaactttgctaaattgattattggtgctagaaggtacatgggtcatcgtcaaaaatcaataaaacctgacaaaggacttatgtctaaatcttttggggatccttatatgggatgggctacattcgtagaagatgtagtcgttacccaccaaacccgaaccagaagaaaccttccctaattacgacctttgggagaaccccttaactccttgcatgtgtaaagcttgatagccacttttttcttctcgttacttgtttatgcacgttgagcttcatcgaaatgaaactgtatttaacaaatgaagatgcttttagtatctg

SEQ ID NO: 25909 - DNA, 376 bp, Gossypium hirsutum
  Clone ID: LIB3147-041-Q1-K1-B10
acggttaactactcctagctttggtgatttgaaccatctaatctctgcaaccatgagcggtgtggcatgctgccttaggttccctggccagctcaactctgacctccggaaacttgctgtcaacctcattcctttccctcggctccacttttttatggttggatttgctcctctcacctcacggagatcacagcagtatcgttctttaaccgtcccagaactcactcagcagatgtgggatgctaagaacatgatgtgtgctgcagaccctcgacatggttgttacctcacagcctcagccatgttcaggggtaagatgagcaccaaagaggttgatgagcaaatgattaacgttcaaaacaagaactcattctac

SEQ ID NO: 25910 - DNA, 336 bp, Gossypium hirsutum
  unsure (1)..(336): unsure at all n locations; Clone ID: LIB3147-041-Q1-K1-B11
tgtcgaccccggtgattctgacatcatcaagtctcttccaggtgaccactaagtcaatgaaggtctggttctctatcacaccagaatgatgatgtttctttacttcctcacgatattatttccctttgccctcaaccccatttgtttaagaatatttggtatttttcttaatgttaagttgtggatgttcttgctaaaatttgtagcttgagtcaagattttgttttggttaatgaatattctgagttgcttgtttacctaanaaacataaaagaatgctaaaagataaagcataaaccaataaaaatcccgagaaaacacactaaaaatgcaatt

SEQ ID NO: 25911 - DNA, 182 bp, Gossypium hirsutum
  Clone ID: LIB3147-041-Q1-K1-B12
tctggttctctatcacaccagaatgatgatgtttctttacttcctcacgatattatttccgtgtgccctcaaccccatttgtttaagaatatttggtatttttcttaatgttaagttgtggatgttcttgctaaaatttgtagcttgagtcaagattccgctttggttaatgaatattctga

SEQ ID NO: 25912 - DNA, 305 bp, Gossypium hirsutum
  Clone ID: LIB3147-041-Q1-K1-B2
tattccaatcagtgatggatcgaaagaaaaattcgctgaggcaacgaggtgaaacgatgtttaagctattgttcttactgcaagggaggaaggttttccggtggttttgatagcaatgttttcacgaaagttcatggaaccggtatgagtttattagttaggcaatttaatttgagtgtgaatttagtgattatcgagttaattacttaaatttagtgaggactggaaatttaaaatcctttattggtggttaaataggtgatgtgtcgggcatgcatgataactgttgatcttggcactaatgc

SEQ ID NO: 25913 - DNA, 304 bp, Gossypium hirsutum
  unsure (1)..(304): unsure at all n locations; Clone ID: LIB3147-041-Q1-K1-B5
ttctttttacaagttctcacagaacttggcgctgttaggggcattgctgttcttcattggcatgaagaactcaatccccacaagacaactgaagaaaaaggctccgaaaaccaaaacagtttgaagacgtaacacgtccggttaaaaccgaagagggtctggtttttctcgttcgatcttaatttgtatacctcggtgaaactagatctgtttctgtatgcttgtatcaaggctttgttgttctttggaagttcatagctatttaatttgagttccacanaaggatttcataattttgcccttc

SEQ ID NO: 25914 - DNA, 302 bp, Gossypium hirsutum
  Clone ID: LIB3147-041-Q1-K1-B6
tccaatcattgatggattgaaggagaaattcgctgaggcaacgaggtgaaacgatgttaaagctattgttcttacggcaagggaggaaggttttccggtggttttgatagcaatgttttcacgaaagttcatggaaccggtatgagtttattagttaggcaatttaatttgagtgtgaatttagtgattatcgagttaattacttaaatttagtgaggactggaaatttaaaatctctgattggtggttaaataggtgatgtgtcggtcatgcatgattaactgtgatcttgtcactaatgc

SEQ ID NO: 25915 - DNA, 205 bp, Gossypium hirsutum
  Clone ID: LIB3147-041-Q1-K1-B7
aaagtaataactctcatatagggtgacctaaattgcattttactagaaccgccgttttacaacaaactgactggaaaaacctctgttttccccaacttaatcagccttgtatcgcatgggggttttaccagttgggttattaaccaaaaggcccgccccaatcgaacttcccaacaattgcacaagctgaatggcaaaggggacg

SEQ ID NO: 25916 - DNA, 245 bp, Gossypium hirsutum
  unsure (1)..(245): unsure at all n locations; Clone ID: LIB3147-041-Q1-K1-B9
cccactcatactaagatttctttttttgtttttaatcacagaaagcttttaacaggaancggttgaattttcaaaagatcctgcccaacaaaggtggaaaggttgctgtgccctccaagaataaacaagataaggttgtcaattcgttgtttgaaaagcgtccaatgcatttcggcattggaggggctttacctcctaataaggatctgcatccatttttgaagtggcctaatgttttcgtattc

SEQ ID NO: 25917 - DNA, 83 bp, Gossypium hirsutum
  Clone ID: LIB3147-041-Q1-K1-C1
attgatttgggttgccttttgcaagcaaagccttaagaggatgatgatggtatgtacactattataagatgtgaatgtcctac

SEQ ID NO: 25918 - DNA, 264 bp, Gossypium hirsutum
  Clone ID: LIB3147-041-Q1-K1-C10
cacccgtccgccaccctttagtgacgtttaaattacacatacgacgcatctcttcaagactgggcaattcgatgcgcacctgctccctatgaactagctgacgctactacgactggcgcatcatacctgcacataataccatctgcagacaccaaggatcaaacccaaactagcgaaccctagggacctaaacaggcaatcaacatccacgaagatacactcgagcatcatattcgtgctgaacttgagcgcaagataccacct

SEQ ID NO: 25919 - DNA, 442 bp, Gossypium hirsutum
  Clone ID: LIB3147-041-Q1-K1-C11
cccacgcgtccgcttcttcgtcttcttcttcttccagtggaaatggaagggggcttatgcgggtgatacctgtctctccacagctggccaagttccttggagcctccgaagcttctcgcaccgacgccattaaaaagatttgggactacatcaagctccacaatctccagaaccctgcaaacaagaaggagattatttgtgatgagaagttgaagacgatattcgccgggaaggagtctgtcggaatgttagagattagcaaatatctctccccacattttctgaaatccaaataaactttgcctttgcctttgcctttgccttagcgttagccttttgttggaactttaagacttaagttgcattgtgatgaatctgaaaaaatgcttttgtcattagtctttttcagtacaaatgcttaaaccccttttttcccctcgat

SEQ ID NO: 25920 - DNA, 368 bp, Gossypium hirsutum
  unsure (1)..(368): unsure at all n locations; Clone ID: LIB3147-041-Q1-K1-C12
gaaaaatggtggaacctaagagcaagattgattcaataagggaatgggtcgttgatcacaagcttagaactgttgggtgtctgtggctgancggtattgcgggttctattgcctacaattggtctcaacctggtatgaaaaccagcgttaaaattattcacgctaggttgcatgcgcaagcccttacgttggcagcattagccggtgctgcagctgtggaatactatgatcataggaacagagccaaagctgatccatatgcaaagttccttcccgccgatggatactcgcacaaggattagaagactctggataggcgtntaaagtctgtaaacatactcggtttaataaaagttttttttaatttt

SEQ ID NO: 25921 - DNA, 216 bp, Gossypium hirsutum
  Clone ID: LIB3147-041-Q1-K1-C2
aaacttttagaaccgacaaaatggggtgatgtgaaggcccctaaatatgggatcttttcttttctgggggagaggcgaattgggaggcttggaactgtcctgaaggtgctaaatgacatgattcaggatgatggagagccacccaagaagaaaatctaccaaaagaagctgtcattgctggttgagaatggatggaatcatttttcaacgtatgaa

SEQ ID NO: 25922 - DNA, 300 bp, Gossypium hirsutum
  Clone ID: LIB3147-041-Q1-K1-C3
ctttgtgttcttgatccaaaaatagccgactaccggacccttcagccacttgatgtaggtttcggagccattgttgagcactgcaaggatctgagacgcctttccctatctggtctactcacagattgtgtgtttgaatatatcgggatgcatgcgaaaaagctagagatgctgtccgtggcatatgcaagagaaagcgatttggcacttgatcatgtgctttctgggagcgaaagcctacggatactggacattatcaactgcccctttggggacaaggctatattagcgaacgctgca

SEQ ID NO: 25923 - DNA, 319 bp, Gossypium hirsutum
  Clone ID: LIB3147-041-Q1-K1-C5
gttaagaccctcccggccgccccttcgaatgatgacatgctcattctctatggactgtacaagcaagctactgttggaccagtgaataccagccgtcctggaatgttcaacatgagggaaaagtacaagtgggatgcatggaaggctgttgaagggaaatcaaaggaggaagcaatgggggattatatcaccaaagtaaaacaactgtttgaggctgctggaagttcttgatgtgtgtgtgtatgaccaatgaaactggtgtaatttcaagcccttgtcggttacttggggttttcattactatgaataaattatgtac

SEQ ID NO: 25924 - DNA, 236 bp, Gossypium hirsutum
  Clone ID: LIB3147-041-Q1-K1-C6
aactttaaagaactgacaaaatgggtagatgtgaagtcctctaaatatggcactctctatgtactgcgggagaggcgatttgggaggcttggaactgcactgaaggtactaaatgacatgattcaggatgatggagagccaccaaagaagaaattctacgaaatgaagctgtcattgctggatgagattggatggaatcatttatcaacgtatgaaagacaatggatgcatgtgcg

SEQ ID NO: 25925 - DNA, 321 bp, Gossypium hirsutum
  Clone ID: LIB3147-041-Q1-K1-C7
ttttgaaaaagtggaccaaaagctgagaaaagccatccgataagaagccagccgaggagaagaaagccgtagctgagaaagccccggcagagaagaagcctaaggctggtaaaaagcttcccaaggaaggcggagcggctgccggagacaagaagaagaagagagttaagaagagcgtcgagacctacaagatctacatcttcaagggcctgaagcaagttcaccctgacatcgggatctctagcaaagctatggggatcatgaacaagttcatcaacgatatcttcgagaagcttgctcaggaagcctctaggctcgcga

SEQ ID NO: 25926 - DNA, 394 bp, Gossypium hirsutum
  Clone ID: LIB3147-041-Q1-K1-C9
cccacgcgtccgcccacgcgtccgcccacgcgtccgcccacgcgtccgccgcagctttgcagtgtcttgtgcagctcgagttggacgtgctctctattatatatcgaaagcttttacgactgctgcatcaaaactggagaaaatcggatatgttgacaccgaaaatgaaagcgaaactgttgaaccaaagggcggtaaagaggcaatcaacatcaaggaagttaaacgcgtggatcatattcttgcttccttgcagcgaaagttaccacctgcgcctctgccacccccgtttcccgatggctttgttccaccttcaacagcagaagcagagaaagatcccgaaaaccagcaaacagcagagccgcaaccttctgctgttgatcccatcattgat

SEQ ID NO: 25927 - DNA, 130 bp, Gossypium hirsutum
  Clone ID: LIB3147-041-Q1-K1-D1
gagagttaagaagaagcgtcgaggacctacaaagaactacatccttcaaaggtcctgaaagcaaagttcacccctgacaatcggggatcctctagcaaaagctttggggggatcattgaaaccagtttca

SEQ ID NO: 25928 - DNA, 211 bp, Gossypium hirsutum
  Clone ID: LIB3147-041-Q1-K1-D10
ggagatgtagagtactagtgtggtgcttctttttctttttactaggagagaactatttatgggagggacgtatacaggaatctgtatcattctaaattccacattttgtcgtttttgtattgcatgataatcccctgcgtttttaggtgaatttccagggctttgatggtatactcatttgctctcatgcaataagaaattggtttcaggt

SEQ ID NO: 25929 - DNA, 232 bp, Gossypium hirsutum
  Clone ID: LIB3147-041-Q1-K1-D11
cccacgcgtccgcccacgcgtccgggaaaaatttgctgcaatagtatttatagtcaactgttgtgactgaagaattctatttgccctttttcttattccttcgcagtagggcttaaggaagattctttttcccccttgttcaatggaaaggcatcattgcttgcgaagcttgtgccatcattttttttttattttcccggatcataaagaaaatactgttaccatttcccat

SEQ ID NO: 25930 - DNA, 288 bp, Gossypium hirsutum
  Clone ID: LIB3147-041-Q1-K1-D12
cccacgcgttcgttcacgaattcgagaaagttttgttttattctacaactgctcagactggtgtgcgtggacctacgtgagtccactatcaatcatcacattgatggcaaattaagtgctagctcggcaaaatagaaggctacttggaaacatcaggattctatgcgtcttttccaggctgcttgtactgttcttaaaaaacacttgaaattcaccatcgcctatatcactccgctattgcttgtactgtagaaagaaaacttttttcagttcatggaaattttgggt

SEQ ID NO: 25931 - DNA, 127 bp, Gossypium hirsutum
  Clone ID: LIB3147-041-Q1-K1-D3
tcgttgtccaaacagctgcttattgtatgagacaagtttaacgagacactggctagcattagatactaagggtacctggctgtcttctatcagccttcggggcctactgagaagatagctcaagagt

SEQ ID NO: 25932 - DNA, 314 bp, Gossypium hirsutum
  Clone ID: LIB3147-041-Q1-K1-D7
gggtctttgtgtgccggtggaggaaaagatggagtgattctgttgtgggatttggctgaaggaaagaagctttatagtcttgatgcaggttccgtcattcactcgctttgctttagtcctaataggtactggctttgcgcagccaccgagcagggtatcaagatctgggatctggagagtaagagcatagtggaggacttgaaggttgatcttaaggctgaggctgagaagtctgacgtcactgacatcggaaataagaagaaggtcatatactgcactagcttgaactggagtgccgatggaagcaccttgtt

SEQ ID NO: 25933 - DNA, 69 bp, Gossypium hirsutum
  Clone ID: LIB3147-041-Q1-K1-D8
gtatatcattttctgggattgtgaaagtactgtttttaaataatgaataaaatttgaaatgtttgcttt

SEQ ID NO: 25934 - DNA, 454 bp, Gossypium hirsutum
  unsure (1)..(454): unsure at all n locations; Clone ID: LIB3147-041-Q1-K1-D9
cggacgcgtggganaaattccaacaacagttgttatgaacaggnctgctgctcttcgagcccttgactgctgaccatcaatganggtacggattgaatcaagaancctcaatatncgatatnccaatcaagggaagaatcgggataacccagccccatagtgcgcgaaccctcgancgtgtccctagaatggatgatganttttcatgaaatcgtgagcaaccttctttggcaaaaccaaagagtgagcagcaacgagaacatttctttcatactcgctgccatgtacaagggaagctttgtagagttattattgatggtgaaagttgcacgaacgtagccagcacgacgatggtggaaaagctttgcttaaccactaccaagcatccacaaccttatcaactacaagagcttagcaacgaaggccgatttaaagtcactcaacaagtgcgcat

SEQ ID NO: 25935 - DNA, 168 bp, Gossypium hirsutum
  unsure (1)..(168): unsure at all n locations; Clone ID: LIB3147-041-Q1-K1-E1
tatttctcgcagacntgaagaatggggctgtctttacaaagctgttcagccggctttttgccaagaaggagatgcgtatattgatggctggacttgatgctgctggaaaaaccaccattctttacaagcttaagctgggagagattgttaccacaattccaaccattg

SEQ ID NO: 25936 - DNA, 457 bp, Gossypium hirsutum
  Clone ID: LIB3147-041-Q1-K1-E10
cccacgcgtccggagcccattttccaaataatcccagaagcctcacaaatgcaagtgctgagaagatagcatccatccaaagctctttaccaacccagtacatgtcaaacagagatacatggtgtacagggtgaggaagtcaaaaagggcacaaggatgatgcgataaattactggaacataccccttccagaaccccttgtgtcaaattaaggcggccatctgtttgcttcagctcattgagaggtttaagaagcatctgcaggccatttgaagaaaagtaaaaaagaaaaacaacatatttcgttgtttaagattgtcactgcatggaataggagagaactccaccttacacaattggtaggactgcgatcttgccctaagcatgtgttgtgtccagccattgcataatactgagcagcagtaaagaaagacaaaaaaattggaggtggatgggg

SEQ ID NO: 25937 - DNA, 308 bp, Gossypium hirsutum
  Clone ID: LIB3147-041-Q1-K1-E11
cccacgcgtacgtatcactgcagcggcagttggatctggcgccgaagagcttcgtgtataagaagatgccgctctcaaggatgcacgcctaaggtgcgctgagacagcgaaggcaagaatgagcgacgctggcggagaatgtgtaagacacgacctacttgctctgcatgcacacaacggacagctctcggctctcctccgaatggaacagaatgcgggagaggatgataaacgctctctacattctcatgatgatccacacaggctctgcatgcactatatgcggtcaaattgtaagaaatacttta

SEQ ID NO: 25938 - DNA, 381 bp, Gossypium hirsutum
  Clone ID: LIB3147-041-Q1-K1-E12
cggacgcgtgggccaaattcaccagtattgtattataatctcgatttctaatttcctaaagagtggggtcatccattcaaattctggggcattccatcaacgaacacagagtagtctcgtccagaacaaaaggttgtaaaagacggaaattttcgattcaagatatcgcggctatggagaagcttcaaatattcgcagtgcaagagcctgatgcagctgcctcttgcctcatcgctggttttggtctattcctaccagctgtggtacggtccattttacattccatggatacatcaaagcaagtcccacaacctgctttaagaaacacagtttcaggtgtgatcgggaaaaaacaaggttgctatgatctattgatccaaa

SEQ ID NO: 25939 - DNA, 305 bp, Gossypium hirsutum
  Clone ID: LIB3147-041-Q1-K1-E4
tggtctgaggatttaacggattggaatcgagaaatgcatgttaaatgcacttataatggtgttcaattatccgaaaccgaatttccaaaaaactggttaacagacggtattcagataaagatcctatttcctttttgcctgaaaccttggcacagatttaaactacaaccctctcataaagatccaatgaaaaaaaagaaaggtcaaaagaatgatttttgctttttaacaagttggggaatggaaactgaactacctttcggctctcctcgaaaacggcgttcgtttttgagcctattttaaag

SEQ ID NO: 25940 - DNA, 213 bp, Gossypium hirsutum
  Clone ID: LIB3147-041-Q1-K1-E7
gtggtcgccgcctacttccttgccttgctcggaggaaacacttctccttccgccgatgacttgaaggttattctcggatcagttggagctgaggctgatgatgaaaggatagagttgctattgtctgaagttaaaggcaaagatttcaccgtgctatttgccagtggaagggagaagctggctttggttccttctggggggggggctttgcgg

SEQ ID NO: 25941 - DNA, 130 bp, Gossypium hirsutum
  Clone ID: LIB3147-041-Q1-K1-E9
gcgcgatagagctctacttccaatgaataagttataataacacatagtgggttagtcaagactttttctttttcaataattttgacggaaattttgttccaaagaaacataaaattatgtcgacaacctc

SEQ ID NO: 25942 - DNA, 216 bp, Gossypium hirsutum
  Clone ID: LIB3147-041-Q1-K1-F1
atttgagttgccaccacctattccctcggatttctgcgggagcacccttcgaccatctggaagactgctctttcatgtacaacgactgtttttgtgggaaaccgcttatagcttgttgatgacatggggaataaaaatttatctattggttcatcggaacggtaatggaaaaccctactctaacacgaaattttttaaacatcttttgtgacgccc

SEQ ID NO: 25943 - DNA, 243 bp, Gossypium hirsutum
  Clone ID: LIB3147-041-Q1-K1-F10
ctatgatatgaattattttgtttttgccctaaaaacatggtatatgccattgcaagaacatgcatgtaccatgtttttagggcattgacactgtgaatctatgatatgaattattttgtttttgctacattttaatgcaatgatggataaatgaatcatgtggaaatcccaggttcagggaacaaattttcaatttgtaaaactttgccaaatgagaagtgacaagatttttctgatttgtgt

SEQ ID NO: 25944 - DNA, 263 bp, Gossypium hirsutum
  Clone ID: LIB3147-041-Q1-K1-F11
ctgtgaaactatatattaagattgtgcactataaacatgggatatgccgatgaaccatcgtgcgtgtgccatgttcttagggcggagacactgcgaacctatgataagatttatattgattatgctacatgcaatggccatgttgggcgaatgcatcatgacgcaatcccaggcgcagggaacaaattttgaattagacaaactttgacagacgagaagggacaagattgttctgatgcgtgtctctacagccgaagattatt

SEQ ID NO: 25945 - DNA, 453 bp, Gossypium hirsutum
  Clone ID: LIB3147-041-Q1-K1-F12
cccacgcgtccgcagttccagtagagaagtgcgatgagccagtagtccagccagagacgcgagagaagaaaggtttcctcgagaagatcaaggagaaactccctggacaacacaagaaagctgaagaggccagtagcccagctccagccccagcagctgagccccatcacgaaggggagtcaaaggaaaagaagggaattctggagaagatcaaggagaagcttcctggtaaacactccaaatcagatgaagaaaaagaaaaggcttgagattcaagttcacataaaaatactgatgggattgtgtgtttcttcaattgttaaaaaaatatctgtttttgttttgaggttgtatttgttgtatatttcatattaagtttcttcttttcccagcatttttagtacaaatcataagaaaaaaaaagtttgcttttcgtatgtaagaaatgacatg

SEQ ID NO: 25946 - DNA, 80 bp, Gossypium hirsutum
  Clone ID: LIB3147-041-Q1-K1-F2
gtcattttactcgagctatttgccgcaaaatctccaatacatgccaccagtggggaggagatcattcattgggagagatg

SEQ ID NO: 25947 - DNA, 251 bp, Gossypium hirsutum
  Clone ID: LIB3147-041-Q1-K1-F3
ctttaaagggatcccctaacgaggtccatttggcaccagttaccgcaactgactctggtcgggttagagtctgcctatgttaaagctgcattttgaagcttgtcagggcgaggttttgttcgaatggttttttaatgaaatccgaattgaaattttgggtgaaaaaaatgaaaataggaacactccattttcattgaaggagcattatgaactacaaactaactaaatcccagaaatactcttcttgtttt

SEQ ID NO: 25948 - DNA, 144 bp, Gossypium hirsutum
  Clone ID: LIB3147-041-Q1-K1-F5
cttattgcaaggcaaagttctgggacatgctgcaagctaagacgataccacagagtgcaagctgccagttgcctgctcatgaggattgcatagaggattacgcgcgcctaaaaggtgctatgctaagcatgtgcaccctagggc

SEQ ID NO: 25949 - DNA, 297 bp, Gossypium hirsutum
  Clone ID: LIB3147-041-Q1-K1-F7
aacaaacagaaaatggatcttcgagtcctttgaaagggatcccttaacgaggtcaatttggcaccagtaaccgcaactgattctggtcgggtaagagtctgcctatgttaaagctgcattttgaagcttgtcggggcgaggttttgttcgaatggttttttaatgaaatccgaattgaaattttgggtgaaaaaaatgaaaataggaacactccattttcattgaaggagcattatgaactacaaactaactaaatcccagaaatactcttcttgttttgtgtgttttgtttacaat

SEQ ID NO: 25950 - DNA, 398 bp, Gossypium hirsutum
  Clone ID: LIB3147-041-Q1-K1-F9
ggttgcattactaccaaggagctggggactgtgatgcgatcacttggtcagaaccctactgaggcagaactccaagatatgatcaatgaagttgatgctgatggaaatgggaccattgattttcctgaattccttaacctaatggcaaggaagatgaaggatactgattccgaggaagaacttaaagaggctttcagggtgtttgacaaggaccagaatggtttcatatctgctgctgagcttcgccatgtcatgacaaatctcggtgagaagcttacagatgaggaagttgatgagatgatccgtgaagctgatgttgatggtgatgggcagataaactatgaggagttcgtcaaagtcatgatggcccaagtaggataaaaaatgggtaaaaaggg

SEQ ID NO: 25951 - DNA, 274 bp, Gossypium hirsutum
  Clone ID: LIB3147-041-Q1-K1-G10
cccacgcgtccgaaaaaaaaaaaaaaaaatttataatataaaaaaaaaagaaaaaaaatccggagaatgagaacattacagcctattatatgcaaactagattaatatttcatgccataagctcaatttcccttatttggccatcgattttaaacaggaagactctgataaccatcgggtggcgctttttaatgagtctgaatttcatacccctttatcgagatcaatatatttttttattggccccaacaaatacattttcggcactgttgtt

SEQ ID NO: 25952 - DNA, 396 bp, Gossypium hirsutum
  unsure (1)..(396): unsure at all n locations; Clone ID: LIB3147-041-Q1-K1-G11
ggggaaggggttctctgctagggtttcgaccctagcaccctcatgccgccgccgtcgtgcccaccgtgaagccatcgcgaatggcgcccgaaaccaggtgcactggaggagacgtgcgtggcgtgcgtggagggcgataaccgctggcacacacgcgcggaaaggcctggtggttgcggcgctggctggggttgaatgctattagggtttggttttattttttggtgaaataagcttagggttagtggtttgggtctttataactattgggctaggtatcgggcctctgtaactgggtttgggattaggttgatatgttgagctaanaatttgtaatttggattgcgtttgacttacattttttttgggatttaattttaattaattaggttttgg

SEQ ID NO: 25953 - DNA, 441 bp, Gossypium hirsutum
  Clone ID: LIB3147-041-Q1-K1-G12
cggacgtggggaaatcctttatatctgggtgtcatctttgtcggtttcttaattattaaggctctatgggtgcagcttgacatttcgggtgaattccgcaatggcgctcttcctgggcttctttctttatctaccaagttccttcccaccgttatgaaccttctcagaaagttagctgaggaggggcaaatgcctgcaactaacagttctcagacaaaccaagcggtagcatccaagagcttccaaaatggaagctccacaagcaatatgtcatcgagtgcttcatccggaataactgcttcagaaaacagcaccacaaaaggagaatgagtaacttattagggaaaaaaatacgttatttgtgttctgaagatgcctgtgttgtgctggcttttatggtccggtgtttgcccgtgtattttatgataacatatacaactc

SEQ ID NO: 25954 - DNA, 115 bp, Gossypium hirsutum
  Clone ID: LIB3147-041-Q1-K1-G3
gggtatccgttatcataatatacttttatggatgtaacttgagaaaactaatttcattcctaaatatttgacattaactatgcataacctgaatatatcattgcttggaacctcg

SEQ ID NO: 25955 - DNA, 292 bp, Gossypium hirsutum
  unsure (1)..(292): unsure at all n locations; Clone ID: LIB3147-041-Q1-K1-G7
gcctatggatcanaatatttggctccggaatcgctctccaattcaatggggttgtttcttcagaaaacaaatattatccgagattatctagagatatcaatgaaataccgaagtcacgcatgttttggccacgccagatttggagtaaatacgtcaagaaacttgaggacttgaaagacgaggaaaactcggtcaaggcggtgcagtgcttgaatgacatggtcactaacgctttactacatgttgatgattgcctgaaatacatgtccagctttacgtgaccctgcaattt

SEQ ID NO: 25956 - DNA, 170 bp, Gossypium hirsutum
  unsure (1)..(170): unsure at all n locations; Clone ID: LIB3147-041-Q1-K1-G8
agatttttgtttgtaaaacttgtggtaatnaatattggctgcatgagaggcataataatagtctctatttgaacagcggngtatttgtccttcctctgatggccacaaatgctttgaaaatttcttcaaaaaattccttaaaaaaaaaataaaaaataaaaaaataaatg

SEQ ID NO: 25957 - DNA, 133 bp, Gossypium hirsutum
  Clone ID: LIB3147-041-Q1-K1-H1
ctaccatgctatggttttgctaaagcgcaaagatgtaaggactgaaactgtcctagaagttcttcggcgaagattctctcaatcgggtatagcggagaagcacagccgtgcatcaaccgagagttaaatgtaa

SEQ ID NO: 25958 - DNA, 423 bp, Gossypium hirsutum
  unsure (1)..(423): unsure at all n locations; Clone ID: LIB3147-041-Q1-K1-H10
gacccaatgtaataaaagcaacatcagcaaataaaaagaaaggcttcttccgaccgtaagagaaggagtggagttttacagcaatggagattttattgaaggtgattccataangggaagtgtaatgggagtggggtttataactattttgtgaatgggagatatgaaggggattgggttgaagggagatatgatgggtatggagtcagagttgcagcagaaggcagtcatatagacgccactatcgagagggtttatgacatggatttggagcttataggatttatacaggcgattcttatgctcgtgaatggtgtaatgaccaaagccatgccgatgttattcaaacttgtgctgatcggagttgctatgttggggagttcaagtctggggttaaacatgggcttggctactaccatttca

SEQ ID NO: 25959 - DNA, 163 bp, Gossypium hirsutum
  Clone ID: LIB3147-041-Q1-K1-H11
aaggaaattatgagacaaatcaaagaattaatggagggtcattagatttaggaaagagagatgaagatggtgaaactagttttgtttaaagatttttatatagctttgctgctctggtgttttttcaattttatttatttcatgaatgcattataataccttg

SEQ ID NO: 25960 - DNA, 219 bp, Gossypium hirsutum
  Clone ID: LIB3147-041-Q1-K1-H12
aaggaaattttatatacaatatctatgcacttatggtaatggacaggcatatttactaacgttgggcaagggtggttttctttttatctttaaacctatatatatttctgttctctcatgaggaatgatcaaggtgatgaattacctctattcatctttattccataatgaaataaataaatgtataaactggctaaaaaatacaaacatgactgcccg

SEQ ID NO: 25961 - DNA, 289 bp, Gossypium hirsutum
  Clone ID: LIB3147-041-Q1-K1-H4
ggctgctgtttagacgattcatccaaccttgcatctacctgcaaatagacaaccgtcgactcatgttgctggcttgtttgccagctcatcagctcctgctgcagtctatgccccacagacttctgcagcaacatcagcagcttcctcgggaggcggattgtctctttttagtacaccgtgctgtactcctgcttgttccatgtcatactttctgtatgcaactccaactacaggtgctgtcatacaaacataccttttcagttcttcatcaagatctctcctaggatct

SEQ ID NO: 25962 - DNA, 238 bp, Gossypium hirsutum
  Clone ID: LIB3147-041-Q1-K1-H5
ttggtactacattcgatcagacaaccatgcaactgtcaagacactactcgagtacaatgccgattgtagtgttgacgatgatgagggtatgacacctataaaacatatctcgaaaggccctggaagcgagaagctacaggaattattacataggcatcttgaagagcagcgaaagagatgggcattggaagcatgcggcgaggcataggctaagatggatgagctcgagaaagagctg

SEQ ID NO: 25963 - DNA, 333 bp, Gossypium hirsutum
  Clone ID: LIB3147-041-Q1-K1-H9
acgcacgaacttacgaccactcttacagcataattgtcaattccgtctacctagaatggtattggggaagagaaaaaactctctggatttaacatatttcaaaaagacactactgctttcatgtgatttaatgaatacaaaactgaaagaaatcaatatagacgatttaataacaaaagcaaatcacgccctggcaaggaaattcattatggctgaagaaaaagcagccaaagcatttctactagctcaacaggcagctgaaaagaatcccatcgatcgtgtaaagacagcagagacgaaggcagcttcagcatcaacaagcggttcatatgt

SEQ ID NO: 25964 - DNA, 374 bp, Gossypium hirsutum
  Clone ID: LIB3147-042-Q1-K1-A1
cccacgcgtccgagctggtggtgcctgggataatgcaaagaagtttattgagactggagcgcttggtggcaaaggcagcgaatctcataaagcagcaattactggagatacagtgggagatccattcaaagacacagttggaccatcacttcatgtgctcataaaaatgcttgctaccataacacttgtaatggcgccagtgtttctctgagactttcgtttgtttatatatatatatttgatggagagttgagtagcaggctgcataccaacatacaggcacccatcaccgagttattgttagggtattactattttgcacatacacaacagattgattgatagataggtagataggtatttgatgtctatca

SEQ ID NO: 25965 - DNA, 386 bp, Gossypium hirsutum
  Clone ID: LIB3147-042-Q1-K1-A10
tcaaatctcagagtcgaactcttcaaaacttacggcagcacccttgccggactgcgagcgggagggtgtgacatcgatgccgatgattaccacgggtacgtccatgggagattgtcatacgatgtgatcaagccagaccctaagctacgtactatgttacgtatcatctcccaaaggaaaattatatgtacgaattcggacagagttcatgcgattgacgtcatgaaaaggttaggaatagaagactgcttccaccaaatcatatgtttccagacactgaatgctaatttgacagatataaagtgcgtggttctgaatgcgtcgtcagatgccatcaagattgctctgtacgtcgcacgtgttgattccccacgcacgctatttct

SEQ ID NO: 25966 - DNA, 341 bp, Gossypium hirsutum
  Clone ID: LIB3147-042-Q1-K1-A11
gcagcgagctaacatgagtaagataacaacttggacagaccaaggtgcatctccacgaatgggaaactctgatgatacacacgactacatgtcttaaatggctgcacaattattgcttgattgttttggtgaccaagactctgagattggtatcatgtttgaatggcttttttttttttgtaaaataattatacatccctttagttacaatttcaattaagttctgcactttgtaatatgttagtatatagtccatttggtgagacccatccaatgaaattatttcacccttctgtacatgtttaacttgtaaagcatcctttttttctcaacacaataat

SEQ ID NO: 25967 - DNA, 200 bp, Gossypium hirsutum
  Clone ID: LIB3147-042-Q1-K1-A12
acgcccacgcgtccgaataaataaaaaaaaaactttataaaaaaaacaacaaaacatacaaaatcgtgaggtgtaatatttctgatgtgtgtccacctaaaaataagttcactggccattgctttacaaatatcgtgactgtggactcttttactggtaccattcttaatcgccttctttcacattaaaataatttttat

SEQ ID NO: 25968 - DNA, 88 bp, Gossypium hirsutum
  Clone ID: LIB3147-042-Q1-K1-A2
caacgaatggggttacagttcccgtgttatcgacttgatccgacacatgtctaaggcttaagtgagtgagtgattgtgctttgtgtat

SEQ ID NO: 25969 - DNA, 163 bp, Gossypium hirsutum
  Clone ID: LIB3147-042-Q1-K1-A3
ggaatattcaaggacaggttttataaattgtgttatggaagcacttattaaaccccataggtggatgccgtgaaagggcgacttttcatttaaaacactcttctatggagaatttgggaattctggtcttggatccattccattgaacagagttccatggagt

SEQ ID NO: 25970 - DNA, 364 bp, Gossypium hirsutum
  Clone ID: LIB3147-042-Q1-K1-A4
cccacgcgtccgggcaaatactacgccaagattttctgcttggagcccacttccttcactggcgaggctgagggtgttaacaagaatgcccctcctgagttccaaaacaccaagctcatgacccgtttaacctacacccttgacgaaatcgagggccctttcgaggtatccaccgatggcaccgtcaaattcgaggagaaagatgggattgattatgctgccgtcacagttcagcttcctggtggtgagcgtgtgcctttcctgttcaccatcaagcaattggttgcatcaggcaaacctgatagctttggaggagacttccttgtaccatcctaccgtggctaattttttttggacccaaagg

SEQ ID NO: 25971 - DNA, 442 bp, Gossypium hirsutum
  Clone ID: LIB3147-042-Q1-K1-A5
acgcggacctccacgcttatcaacgtcgttacctattctgagatcaacgccattcttggggtgggggctaactttatagggcgactgggatccattcgcttttggttaattcagaaattgatttctcggaccgattacttagtttggaaattttggggacaataagatggaacctaagatttgcttccaatacaaaattccagttaaagtcattggcggccaagctttggatagataattgggtcttttgcctcatccgtggccatttgaaactgttcataaagagatggataaaaagcctgttacagttaaaaccgaggaagacaaaaacataattaaatccaatgaggcgggaacgaccacttcaactcttgggaatctaaattagctgtttgaagagagctgcactatcacgctttaagaatttcatatactgaaggga

SEQ ID NO: 25972 - DNA, 195 bp, Gossypium hirsutum
  Clone ID: LIB3147-042-Q1-K1-A6
cccacgcgtacgggatgggaatgttcctactggtcgaaatattgttgcaacaaaacggtttcggatgtcttccacgtttatcaatttgaggacctgtttgctaaaaggaattcgccggtggctcatgctgttggattttgggattaccattcttttattttggctgcttccatttatgagcctttggggtttggg

SEQ ID NO: 25973 - DNA, 178 bp, Gossypium hirsutum
  Clone ID: LIB3147-042-Q1-K1-A7
aaaaaaagagagagaggaaaggatataagatgtaagagggagaaaggagaggggagaagggagagcaccggccaggggccggtcaccggccggcttctccgccaatgggcttgccgacgtgcacggctgccggagagggtattgaattgaacagattgttacaggtgggggagaagta

SEQ ID NO: 25974 - DNA, 295 bp, Gossypium hirsutum
  Clone ID: LIB3147-042-Q1-K1-A8
cggacgcgtgggcggacgcgtgggttaaaaataaagaagaaaactctgaaaagagttgagggtgaaccctcggagcgccgtggtgtctccgtcattgggttccctccgcgcctacgcgtcgacgcgccaccaccaacgccacccagtgcggtggccagaactcgaaaagtctcgactttctgatgtgattctaacgatctctcgcgagaaatccggtgatggaagagtcgctagcgttgatggaggcctgaagtctggtggtggtgtcgatgaggcgctgattagggaggcacag

SEQ ID NO: 25975 - DNA, 261 bp, Gossypium hirsutum
  Clone ID: LIB3147-042-Q1-K1-A9
gcttaccttgatcacacacaatcggttttagttcaacaaggattctcaactggacagaacaggacttcaactgtcatacgtcaggcaccgttctcatccggcgataggactgggcatgtgaacgctcaaaacggtaatcaacatgtcaactccctctttgttgacaatacagtaagggtcaaatctgagagagttgctgatgcaccccctgccaatctataccctgctccctttggacaaaaggacctaatgagtgttttt

SEQ ID NO: 25976 - DNA, 382 bp, Gossypium hirsutum
  Clone ID: LIB3147-042-Q1-K1-B1
cccacgcgtccgcccacgcgtccgatcaagatgcatgcagctagagaaagaagaagggaaagcgctgagctttcaaaggctcatcggcagagctctcaacctcaaccccaaaacaatgaacaacccaaattacaaggtggctcagcattaccgaacttacagcagcaagggataagaaacatacaaacagcgcaggccctgaattttagccatcaaagcttgatgacgggagcggcaatgtcagatgaatttaagtttggattcccatccgatggcttatcggtcactacaaacaaatggtggggcagtagcaagtctgactgtaatgaagtcagtgatgctgatggagctgaaactgagggagaagacaagcatcaaacta

SEQ ID NO: 25977 - DNA, 398 bp, Gossypium hirsutum
  Clone ID: LIB3147-042-Q1-K1-B10
cccacgcgtccgcccacgcgtccgacaatattctgcatccttgagaattaccagaaggaagagggtgttgaaataccagaagttttacggccattcataggtgggaagtccttccttcctttcaagaccaaaccaactgctgaaactaaagggaagaaatcaaaggcctagttatgtctcaccaaaccattggttaccattgaaggaacaagcgctcagattgcctgaaaactagttttgtttttcaaaaattgtggcctactgccatcacgacactgaatatataaattcaattgttttgtagtactttgcaaaaaaaaaccccagccatgatactgtgacagacattatagacttggtgttttaagttattggatatcctttacaaaatttgtcaa

SEQ ID NO: 25978 - DNA, 185 bp, Gossypium hirsutum
  Clone ID: LIB3147-042-Q1-K1-B11
cccacgcgtccgcccacacgtccgaagaagtttgtggaagatggaaaaatcaaatacataggtctaggtgaaactacacacgtgactctatcgattgcacactctaaaaatacccttactggcgtacaacatcaatggaccgctttatactcgagagaatgctgaagaactatttccgctttaca

SEQ ID NO: 25979 - DNA, 237 bp, Gossypium hirsutum
  Clone ID: LIB3147-042-Q1-K1-B12
acgcttacatttactttcaaacatacgactagcttatcgcactaggaacaccctaactacactggggcgcctgatattagccctgctggcttctttacccctatcagggagcgcaacacatgcgttcattataccacagtgctcagttgctcctagtgcacattattccaaacttactcccaccagcacattaatgggctctaaacatccaaccactcgagcctacatgctacaact

SEQ ID NO: 25980 - DNA, 233 bp, Gossypium hirsutum
  Clone ID: LIB3147-042-Q1-K1-B2
aaaaaataaatccacttggtttcagacttggtacaacccaaagtcatcattctctttggtttgcgacaagcgaaaaagtattccgagggtctacaagaagataaaaaaataagagactgtatcaagaattatgtacaaaaaatacgagactatcttctggtgtcgagggaattgcacgtatagagattcaaaaaagactggatctaattcaggtgataatctatatgggattt

SEQ ID NO: 25981 - DNA, 448 bp, Gossypium hirsutum
  Clone ID: LIB3147-042-Q1-K1-B3
cccacgcgtccgtcttttttttttttaatttcatcccctaattacagctttagtaaacatgggttctgcttcgaaatcgaaagattttcaagacggagttgatggtgatgcactgagatcaacaatggctactgatcaaaacgtgatgcaaaaacatgctgcgttcttcgataggaatcatgacggccttgtttatccatgggagacttttcaaggttttcgagcaattggagctggttatttattgtcaatggcgggtgctgtcttcatcaacctttctcttagtggcacaactcgaccaggaaaatttccatctcttctctttcctattgaggttaaaaacatccaaatgggaaaacatgggagtgactcttgtgtatacgaccgtgaaggaaggttcgtaccttccaaatttgatgaaatcttcagcaagtacgcacgaacacat

SEQ ID NO: 25982 - DNA, 420 bp, Gossypium hirsutum
  unsure (1)..(420): unsure at all n locations; Clone ID: LIB3147-042-Q1-K1-B4
gaggcatttcaacctttgggcatttcggattttaactcgctcttttggatcgctcaccccggtggtccagccatattggatcaggttgaggcgaanctagcccttaaacccgaaaaactccgagccacgaggcacgtgctttcagaatatgggaacatgtcaagtgcttgtgtgctgttcatattggatgagatgaggaagaaatcaaaggaagatggacttggaaccactggtgaagggctcgagtggggtgtcctgttttgtttcggaccacggctcacttgtgaaacccgggtgcttcatagtatctctgcttaaaacaaagtctaaatgtcatgttggctaacccaggcctgactaacaattgctttgcaattttaattaatttaatttcccttttaatactggaaattgggaatt

SEQ ID NO: 25983 - DNA, 299 bp, Gossypium hirsutum
  unsure (1)..(299): unsure at all n locations; Clone ID: LIB3147-042-Q1-K1-B5
agtacttcagcaaccaccgcaacgccgtctttcgcggcggataaaaccgatagcagatccaggggaaccaagcttggtccccacttcgtcggttccacggcggcgctactggttgctacagcggccgtgtttttccttgtattcccagctggatttgcttcaatagtttagggtttttgcatgggatttcgagatttgggggtttatttattgttgaagtccttttgtttttaaacagtctcagaaaaaagatggactgagttgacaatttagcaacacacaaaaaaaaatgtagagnt

SEQ ID NO: 25984 - DNA, 408 bp, Gossypium hirsutum
  Clone ID: LIB3147-042-Q1-K1-B6
gccaaatcgactccaaatcctgccacaacttctagtccaatttccatacggcaaaagatgacgacttcctggaatgacaaaggaagaacttattacagatattccatagtgatgaccaacaagtcttccaagacactaaaggatctaaagctgtctatatcaaagctttatggtccaatatggggtctcactaaatctggcaattcttatggtttcccaacatatctcaactctttacctgcagggaagagtctcgagtttgtatacatccatgctgcttctccggctgatgtctcagtttcaagttacaacgtggcttaacaacagaagaaaattgctacaacttggtgtaagatttgtgcagctatacagaatgcagtccaggggaaaagaaaagggtatttttca

SEQ ID NO: 25985 - DNA, 441 bp, Gossypium hirsutum
  Clone ID: LIB3147-042-Q1-K1-B7
cggacgcgtgggtgaatgcatctgatgtttgtagtgcatataaagatcagaaacgtgaccgtttcctgccttcaaatgcccaatccgcggctgccggagttgctggtctgatcgagagttcctcatccagactggtttatgccatcacagctccgccacaaaccacacagtcaagaatacctgcatcaacagtatcagattcaaatggaagccaggatcagctttcttaaggcaaggattaaagagaaattattttgagaggcatgaaagagtatattcagtgaagaattatacatgacagtcacacatttgtatagctcagtgtacaggctttaattatttttgtttttctttctcttggattcactccgtcagcgaacgtttgattgaagcagaggtggtagttggaatttttctagtgagaagaaggatgttttatat

SEQ ID NO: 25986 - DNA, 434 bp, Gossypium hirsutum
  Clone ID: LIB3147-042-Q1-K1-B8
gatgacttctggagaagcagtgaaatacaagagctcgatggcagcattttctcaaatgatcgggaatgaaggtgccaaatcgctgctcaagggtgctggtgcaaacattcttcgtgcagctgcaggggctggtgtgcttgctggctatgacaagctgcaagtccttttccttgggaagaaatatggatctggtggcggctaatgtggaaggtgattctgctgccttaaagaatgatctagcgtcccaagtttgaatgattttggaaggacaaagtgcttatgatggtccccgttcccagtaattaggaatttaatatgaaaaagttggtgacgaaaaatttacttgagcttttgagtgttacattacatgtgtttagttacaagaccatgtggtttttcttttggtttttggttgacaataattacaacactga

SEQ ID NO: 25987 - DNA, 240 bp, Gossypium hirsutum
  Clone ID: LIB3147-042-Q1-K1-B9
gccacgcgttcgtcaggatacaataaaagccattccaccaaaaaataagtcaatgaataaagcgagtggtgtccgtgtcacgaccaccactttattctatgtactttgaggcattgccggatactcagcattcggaaaccacgcaccacgaaatttccttacagggtccagttctacgaacccttttggctaatcgacttcaccaacgtctggcttgctgtccaccctatttgtgcatac

SEQ ID NO: 25988 - DNA, 434 bp, Gossypium hirsutum
  Clone ID: LIB3147-042-Q1-K1-C1
gagtggtcctccaaaatatacaggagatgatcttcaacatagtgccagtacctatcgatctggtgacagggacaatctgcttatgttcaaaaccagttcttcccttccatccagaggtgccatagattttgcatcagctgtcaggaaaatggcatctcaagattctggaatgtggaagtatgatagaaatggttctgctgattcaactgtggggtcaagtagaagttctaatgggtcagctaattcctacagtgctgcacctggaagaggggtttatgctaataggttgcagactcgtggttcagctcgttcagctcctgtttggcttgaaactggagatgcagtgggaaatttatactctgaactacgggaagaagctcgagaccatgcgcgtttacgtaatgcttattttgaacaggcacgtcaagcatttc

SEQ ID NO: 25989 - DNA, 311 bp, Gossypium hirsutum
  Clone ID: LIB3147-042-Q1-K1-C10
caggtatgaggaaccaagcaaagcctcaagatgaaactggaagccctgagatttttgtttggccttcgattttactcgcctgtgattggaagccctgatttagaatatagaaggtagctaaaatattaaacaactgtcattgttatacttctgttatacttttgtccttgatcccttcgcatatagatgtgttcaatgtaagaatttatgttaaatttccgttggatctgctttgttctttgtttcggggataacgaactcaaatcaaggaaatcgttcacaaaacttgggacatctaaacctacaaaaca

SEQ ID NO: 25990 - DNA, 278 bp, Gossypium hirsutum
  Clone ID: LIB3147-042-Q1-K1-C11
gccgaagctgcggcatatcctttatagtactctctactgtaaacatgaacaaggcgagggtgaccaaggtggtcggtgcagtgtgcaccgacctaaatggtatcatcagaccaaagaagaacgctgtcctcactacaactaccacagacgacaaacggttactaagcaccctcaacataatacgattcactgctgttcccgtaatcgaggaagtcaacactcttcacgactacgaagatatgcactttatgaatggcaaatgtcacgcatcctttggt

SEQ ID NO: 25991 - DNA, 417 bp, Gossypium hirsutum
  Clone ID: LIB3147-042-Q1-K1-C12
ggctggagcatgttgagggttacctcgaattatcagcaaagacaaagacatactttgccacggccgctgctctgagggatgctgatttctatgtaaaagttgatgatgatgtgcatgtaaatatagcgacactcggagcaactatggctagacatcggtccaagccaagggtccacataggttgcatgaaatctgagccacatcttgctcacaatggaggaagataccatgaacctgaatatgggaaataccgtgatgagggaaacaagtattcccgtcatgctactgagcacctatatgccatctctaaagatatggcatcatacatatccattaaccagtctgctcctgcatgctccgaaaaacagtatcatactatctgagcaagaaattcatccgtgggtacgtgggtcggct

SEQ ID NO: 25992 - DNA, 440 bp, Gossypium hirsutum
  Clone ID: LIB3147-042-Q1-K1-C2
atgatatgaacgacgattcacctcagccgcttaaaaagtcagctagtctcaatactggtaatggtggactgggtctctacttgaactcgagaagtccttcaggattcgatttgagtgatttgagtttgcccattgcctcaccggtaacaataacggggtctttggtgccttcaactcaaacagcatcctcggctactgatcctcctactttactcagcctctcgttacccggatcagatactagtgaaatcactgacttaggacccgtatccaactctttcccaagttctaccttggtggcagaaccagcaactgttccggctctgaagttgcagatggagaagcagtttttgaacgctgagttattggcagtgatgcaagagatgataagaaaagaagtacggaagtacatgagtgggagtgaatccaatgggctttgt

SEQ ID NO: 25993 - DNA, 343 bp, Gossypium hirsutum
  Clone ID: LIB3147-042-Q1-K1-C3
tactgctcaagaagttgagaaaattactcatatggatcttccatcaatcttgtgtgataaccgaactgctttagatgtgctaaatgcggccaagcatttcaagttgcatcagagagctgctcatgtctactccgaagccaagcgtgtttatgctttcaaggatactgtggcatcaaagttaagcgaggaggaaaagctcaagaaactcggcaatcttatgaatgaaagccaccacagctgtagtgttctctatgaatgcagctgcccggagttggaggaaattgtaaaagtatgccgagacaatggcgctatgggagcaaggcttaccggagctggatggggt

SEQ ID NO: 25994 - DNA, 436 bp, Gossypium hirsutum
  Clone ID: LIB3147-042-Q1-K1-C4
ggacacttaagctcaccactcccagctttggtgatctgaatcacctgatatctgcaacaatggctggggttacatgctgcttacgattccctggtcagctcaactctgatctaaggaaacttgctgtgaatctcatcccatttcctcggcttcatttcttcatggtgggttttgctccactcacttcaagaggctcccaacagtacagagccctgacagttcctgagctaacccagcaaatgtgggatgcaaagaacatgatgtgtgcagctgatccacgacatggcagatacttgactgcatcggctatgttccggggcaaaatgagcactaagggagtggatgagcaaatgttgaattgtcaaaacaagaactcttcctactttggtgagtggattcctaacaatgtgaagtcaacagtttgtgacattccacc

SEQ ID NO: 25995 - DNA, 206 bp, Gossypium hirsutum
  Clone ID: LIB3147-042-Q1-K1-C5
gcacgcgtgggtatgtattcaaccatggaaatgctatttaaaccaccaacggcgcggcatgtgatttgctcaaaggactgtatctatattgagtagtcagccggcccgtgaaacaaaaatatattattaaaaaaacaaaaaaaaggcaatctaagaatccccaatggcataaataaagaaaaaaaaggatcttggggtgtcccttt

SEQ ID NO: 25996 - DNA, 436 bp, Gossypium hirsutum
  Clone ID: LIB3147-042-Q1-K1-C6
agacagagcagagcagacagactagaaaagaatagaagatggagcaaacattcatcatgatcagagcctgatggggtccaaagaggcctggttggtgaaatcatcggcagatttgagaagaaaggcttcaatttgaaagggttgaagctcatcagtgtggatcgatcttttgccgagaagcactatgctgacctgtctgcaaaacccttctttaatgggctcgtagagtacattatctccggtccggtcgttgctatgatttgggaaggtaagaatgttgttaccacaggtcgcaagattatcggagccacaaacccagctgaatctgctccgggaacaatccgtggtgactttgcaattgacattgggaggaatgtgatccatgggagtgattccgtcgagagtgcaaggaaggaaatcgccctttggtccctga

SEQ ID NO: 25997 - DNA, 269 bp, Gossypium hirsutum
  Clone ID: LIB3147-042-Q1-K1-C7
cccacgcgtccgccagcaccagctttcggcattggcaaccataaacacaagtcaggtggaggaagttctgtgaagaagaaagcaaagaggcgaaaagattcggattttgttttaacatttctcatgtcccgaaatcggtttattcgaaccacatgatggtaagggggaattggttgagggtgtgcttttgaggtttgatgcgcatggagtagaggtgttgaaacggcgcattctcttattattcaaactatgataattctttaattgtt

SEQ ID NO: 25998 - DNA, 430 bp, Gossypium hirsutum
  Clone ID: LIB3147-042-Q1-K1-C8
acgaaattttctttgaaataccagcttttgactacaatgtcaggaaggggaaagggaggtaaggggctcgtaaagggaggagccaagaggcataggaaggtcttaagggacaacattcagggcattaccaaacctgcgattcgccgtctggctcgtaggggaggtgtgaaaagaatcatcggtttgatctactaagaaacccgaggcgtattgaagatcttcttgcagaacgtgattcgtgatgccgtgacatacactgaacacgccagaaggaagaccgttaccgccatggatgttgtttatgccttgaaaaggcaaggcatgactctctatggttttggaggttaagcttagtacactattgaattttacgcattgcagtattatgcttattatggtaaaatcatggatcttggctatagatccactg

SEQ ID NO: 25999 - DNA, 277 bp, Gossypium hirsutum
  Clone ID: LIB3147-042-Q1-K1-C9
acgccacgcgtacgtatagatctttatctcttttctttgctatccttttcaatgtctcgtcggtgcacaggaatagggaagaccaaggtcttgttatgaacttctacagggatccttgtcctaacgttgaaaccgttataacggtgcagtttcacctactgttcatcctacacaaaatccctgttttttcttggctgagaaacattttccatgactgtgctatccacccatgtgatgcttcattgctgctggactccacatgaacgagctcttctta

SEQ ID NO: 26000 - DNA, 397 bp, Gossypium hirsutum
  Clone ID: LIB3147-042-Q1-K1-D1
cggacgcgtgggggtgtatacagaacaacaaatactggtaacccacaactggttcaagtgcagaacagccagcatcaacaacaatatgcgggttattctcagattcatcatgcatcacaatctgttgcacctacctccagcacggctgccccatatgcatatgaattcactgatccaactcatgctcaaatgtattacactcagcctatggcacccaacatgcctcctcagtaccaaaccatgactgcagtagtcttgccagatgcacccacgcaacttccgactgacaacatcaagccacagatcagaacttcacagccaatatagatcagtcaagaaggaagcgacaaaaattttgaaagaagggggttggttatatctttatattctggtttaa

SEQ ID NO: 26001 - DNA, 463 bp, Gossypium hirsutum
  unsure (1)..(463): unsure at all n locations; Clone ID: LIB3147-042-Q1-K1-D10
cccacgcgtccggggatcccttaccataagtcttgcttcaaatgcagtcattgcaaagggacgctaaagttgggtaattactcctcgatggaaggtgtcgtttattgcaagcctcatttcgagcaactgttcaaggagtcggggaatttcaacaagaatttccagtcacctgcaaggtcagctgagaagttaactcccgagctgacaagatcacctagcaaagccgccagcatgttttccgggacacaagaaaaatgtgctacttgtggcaaaactgcttatccactcgagaaggtaacagtggaaggacagtcgtaccacaagtcatttttcaaatgctctcatggtggctgccctataactccatcaaattatgcagcacttgaaggcattntgtattgtaaacatcacttctcccaactttttaaggagagaggaagctancaccaccttatcaagtctg

SEQ ID NO: 26002 - DNA, 127 bp, Gossypium hirsutum
  Clone ID: LIB3147-042-Q1-K1-D11
acgcttaggctatatggactatacgctacacttttctgcagggacgcctgcgtcataggagaagagtgctcacgatagaacgctctgctaactctttgaacgaacacgcctaattcgactgacatac

SEQ ID NO: 26003 - DNA, 359 bp, Gossypium hirsutum
  Clone ID: LIB3147-042-Q1-K1-D12
gcgcaagcatgttcatgaaactgggctttcttagaaaatcgagttggttattgtgtcccctgtgctcaggactatgcaaactggagtgggagtctttggtagtgaagggtataaagatgggatagatgtacctccattgatggtggaaaatgcaggtgaaagtaaccgacctgcaatttcaagtttgaattgcccgccatttgtagctgttgaactttgtcgagaacatttgggagtccatccatgtgatagaagaaaaagcatcggcgagtatcggcctgtctttcctgcaattgatttttctctgatagcaagcgatgaggataatttgtgggaagcctacagtagagaaaagaatg

SEQ ID NO: 26004 - DNA, 373 bp, Gossypium hirsutum
  Clone ID: LIB3147-042-Q1-K1-D3
agggaaaggcaggaagaggatcctttggtgattaacagcaccaatgtttttgctgctcttgggagtttgaagaagaagaagaagaagggaggtgaaaaggaaaatctgggttcatcttctaagagcaaagggttgaaaggattgggaaaggaagcagagaaaaaagaggtgttttgggccccatcacctctaaaggttaagtcttgggctgatgttgatgaagaagatgatgatgattattacgcttcaatggctcctcctggttctgcttggggccctcctaaagaacctgaacctactttagaggaaagtgaaagcgaggaagatggtcttgaagaagtcgatgatgaagttgaagaagagcaatgaaacg

SEQ ID NO: 26005 - DNA, 292 bp, Gossypium hirsutum
  Clone ID: LIB3147-042-Q1-K1-D4
acaaactcgaacttgttatcataaatgcagctggtattcgccgggaatacatggaacttaggagagagtgattaatctccattctccaaactgggttaccacctcttatagatgtgtgagttcttgaaattgatggaatgactcttacaatgtgtctgatgcttgtactgcaactatttccttgcatttggatactttaaaatatggattgcagttgaattttatcttccgtctgttagacgaaaatagtctttcatggatggtatgttgcatgactagtctttggtgttct

SEQ ID NO: 26006 - DNA, 441 bp, Gossypium hirsutum
  Clone ID: LIB3147-042-Q1-K1-D5
cccacgcgtacgttcctttcgggaatggtagcaatgatcatgctaaggacactatgccgtggcatttctaggtataacgaacttgagactcacgaagaagcccaagaagagacaggatggaagctagtccatggggatgttttcaggcctccatctaattctgatctactctgtgtctatgatggcactggtgttcaattcttgggcatggtacttgttaccatgatctttgctgtttttggatttctttcccctacaaaccgaggtggtttgatgacagctatgcttttactatgggtcttcatgggcaattatgcgggctatgcttctgcccgtctgtacaaaatgtttaagggagcacaatggaagacattagcttctaggactgcgtgcatgttcccaggcattgcctttgccatcttttttgtcttaaaagcaatt

SEQ ID NO: 26007 - DNA, 52 bp, Gossypium hirsutum
  Clone ID: LIB3147-042-Q1-K1-D7
taaaaacataaaaaaactatggctattaacatttttaaaagatattacttct

SEQ ID NO: 26008 - DNA, 423 bp, Gossypium hirsutum
  Clone ID: LIB3147-042-Q1-K1-D8
cggacgcgtgggttctggatcaacttcagggcttacccatgtcgatgtgaaaatgggagaggtgcaagccaaggcgtgggaatatgaaatcactaatttggaggccttcttttctagctccgaatttagagctcattatgagttggacgaacaaagaagagctgttacgcatcaccttgtatatgatgacaaaccatagctgcagcatttctacatgagagataagctttagcggcggcaggcagcatattgcaagaagacataccccggcttcagcaatcctggcaggaatcgttggccactaacagatggatatatcatatgctaatttcttagcaccgacatacttttgtactaagtagccatattttacttgatgaccaaatttaaattgacattttgtctaatacaaaaattgtattg

SEQ ID NO: 26009 - DNA, 461 bp, Gossypium hirsutum
  Clone ID: LIB3147-042-Q1-K1-D9
acgccaaaacgcctctaaagatctaatcccttatcttgttctgaactcttcaaattaggcaacgggaagataacaccgaacagatgaaaatctgtttcctcgaattccgcgctggcgaattgctagccatcttgcgtggcaccaatgccccgtatggaactagatacccaatcgatcgagaagaaatgatgcctcacgatctttactatgaaagggatacaaactacatgtgtcgttggtggatctcaaggctatatccattttgacataacactcatgagggcgtcgatctggtggtgaagggacctaccggcgatcaaatacaacactcttgagacaagatatgtgagaaatttgcgtgtggtgctcatcaaaaaggaatccaccattcttgttctcagaataaatctccttactatgaaacggtcgactatgatgtacatgaaagtcattctacatac

SEQ ID NO: 26010 - DNA, 380 bp, Gossypium hirsutum
  Clone ID: LIB3147-042-Q1-K1-E1
caggcacttcggtttgagatcaaccgggcttttgctgtcctacgggatattgcatcaggaagagaactcaagaagttcctatctgtgatcgccggcttatgggtcttgtctattgtcggaagttggtgcaacttcttaacactgttttacatagtcttcgtacttcttcacacggtacccgtgctatacgagaaatacgaggacaaggtggacccatttgctgagaaagcaatgcatgagattaagaagcagtatgcagtgtttgatgcaaaggttctaagtaagattccaaggggaccattaaaggagaaaaagaaggattagatttaccggccaagatgtgcttttgctaggtttctgacatacatttggtagctgcc

SEQ ID NO: 26011 - DNA, 449 bp, Gossypium hirsutum
  Clone ID: LIB3147-042-Q1-K1-E10
aaaaatctctttttttttgttgtaatttcttggattctccaatatgggttttgaaaattgagatagggtatcggagccagggatgataatggaagtttggtcaaataatttggaatcggagttcgagttgatcagccaagtgatcgacaaatacccatttatttcaatggatactgagttttcgggtataattttccggccaaaagtggaccccacaagggcgtacaacggtcagttccgaccggccgatcattacaaggtactcaaatgtaacgttgatgctttgaattttatccaagtgggtctaaccctcaacgattcttcaggtaatctgcccggatccgaaaacggaacccggttcatctgggaattcaatttccgtgatttcgacgtggagcgagatgctcacgcgccggattccatcgagcttttaggaggcaagggattga

SEQ ID NO: 26012 - DNA, 237 bp, Gossypium hirsutum
  Clone ID: LIB3147-042-Q1-K1-E11
acgcccacccgtacggaatttccttgctattaattttacataaccaactgggctcgccttccgcgggctcgtaactatgcaacgaagagtgatcgtcccccccacatgctctagcagacgcagttgctaacaacaaacaacatcaactgcaacagaatctaccatcgcggtcaacattctctcaatgtgaaccctttcgcctacctacaaccaacacaacagctttcatataccacc

SEQ ID NO: 26013 - DNA, 123 bp, Gossypium hirsutum
  unsure (1)..(123): unsure at all n locations; Clone ID: LIB3147-042-Q1-K1-E12
ccgggtcgaccgagcgtacgcccacggtncgcccacgcgtccggcgacctacttacaccagtcttaaccgtcttgtctgggggtggtccctgttgatggtcacttagttcgagggcctgaacg

SEQ ID NO: 26014 - DNA, 335 bp, Gossypium hirsutum
  unsure (1)..(335): unsure at all n locations; Clone ID: LIB3147-042-Q1-K1-E2
cccacgcgtccgcaaagatttcgttaaaaattattcatatttagtggggagttgctctccagacaattgttctattttaccatgaaagttttgctttagaaaaaagctgataaaaagagcagtgacaaatgccattgccgcctctctgatttgttggtttttatgaattgaggggtactttatatttgaagttctaatttcaataattgcttctgtttcaagttgttaaaaaaaaaaccanannaaaaaacaaaattgaaagaaaacatacaaccggtttaagaaatattgctaggaaacgatggacacgagaaaaagaaagataaaaaatacaa

SEQ ID NO: 26015 - DNA, 424 bp, Gossypium hirsutum
  unsure (1)..(424): unsure at all n locations; Clone ID: LIB3147-042-Q1-K1-E3
gtgacactgatgaatgcttcctttttgaattataagtttgaattttcttatttatacaaggagatttgacctttttttttttggttcggaaaaaaaaaaaaaaaaaaaaaaaaaaanagaggnaaaaaaaaaaaaaaaaaaaaaaaaaaaaaaaaaaaaaaaaaaaaaaaaaaaaaaaaaaaaaaaaaaaaaaaaaaaaaaaaaaannnnggggggggggccctttaaaaaaaaaaaaattaaaaaaaccggtataggaaaaaaaaattttttaaaaagaggaaaaaaaaaaaaaaaaaagggccgggtaaaaaaaaaggggaaaaggaaaaaaaaggggggaaaacaaaaaaaaaagctttagaaaaaaacccttttttcaaaggggggaaaaaaaaaaaaaagcccaaaaaaattgcctttt

SEQ ID NO: 26016 - DNA, 338 bp, Gossypium hirsutum
  Clone ID: LIB3147-042-Q1-K1-E4
cccacgcgtccggcgaaaactccgcgcttcatttatctaagattaaaatgggttggaaagcggctgagaagcttattaggcactggaaaattcttaggggtgacaatgtaatgataatcaggggcaaagataaaggtgaaactggcattatcaaacgcgttgttcgctctcagaatcgtgtaattgttgaagggaaaaatctggtaaaaaagcacattaagcaaggtccaggtcatgaaggtggtatatttactgttgaggctccacttcatgcctcaaatgttcaagttcttgatcctgttactgggaagccttgtaaggttggagttaaatatcta

SEQ ID NO: 26017 - DNA, 192 bp, Gossypium hirsutum
  Clone ID: LIB3147-042-Q1-K1-E5
tcacgcgtacagcaactccagcttttgctttatgcctgtgaaagcttttaagaggagtcgtgctatatttttatttgggttttaaatggttgcattaaatttaagaacatggagacatgtaggaaggttttgattgcttaaaagtttaataccatttgatacctttttattaccgtgctatacaagaaatac

SEQ ID NO: 26018 - DNA, 73 bp, Gossypium hirsutum
  Clone ID: LIB3147-042-Q1-K1-E6
ataaagaaaaaaataaaaaaaaaattttatttttaaaaaaaaaaaaaaaaaaaaaaaagaaagagagcttgtt

SEQ ID NO: 26019 - DNA, 419 bp, Gossypium hirsutum
  unsure (1)..(419): unsure at all n locations; Clone ID: LIB3147-042-Q1-K1-E7
gtcggttttatgaaaaggagggtcttcctgtcttccctatgggtaaaattgatcagacacgggtgtggaaagttggtgagcgtgtccaancaactagagcgaaagatgatttaggtccactgtgccctttcacttctggggtttttgtggcgctaatgatggcacagatcgaggtcttgagaaagaagggccactcgtactcagaaatcatcaatgagagtttgattgaagctgttgattccttgaaccccttcatgcatgctcgaggagtttctttcatggttgataactgttccacaaccgcacgattgggatcaagaaaatgggctccacgttttgattacaaccttactcaacaagcattcgtagcagtggattcaagtgctcccatcaaccaggacctgataagcaacttctta

SEQ ID NO: 26020 - DNA, 250 bp, Gossypium hirsutum
  Clone ID: LIB3147-042-Q1-K1-E8
atggtaaagctcttctttttaccttctttcttcattttacttggattatggctaactagatggttcccatatgaagaagattaccactaatcctttgttttgttctgttttgaggttgttgtgacattgtgttggccaagaaagcaagtcctttaatgtaacctttgcagctcttttctgctaaaagggtataataaatgaaactcttaagttcctttggaaaagacatgaacgaggtatatttactgtt

SEQ ID NO: 26021 - DNA, 424 bp, Gossypium hirsutum
  Clone ID: LIB3147-042-Q1-K1-E9
cgaaatccaaaagaaacccacagattataaatttagtatcgattcgagtatttgaatacctgggattgcaagaatggcaggggaagtaggattgttggatttctggccaagtccatttgggatgagatccaagattgctttggctgagaaagggataccatacgagtacagagaagaagatttgacgaacacgagtgatttgttgctgcacatgaaccctgatcacaagaaaatgcctgttcttatgcataatggtaaacccgtctgggagtgtgtcattcaagttcacgatatttatcaggtctggcatgataaaacctcctttgatcccttctgatccttatcaaagagctgctgccagattttgggttgatttcggcgacaagaagatatatgacccggggagcaaaatatggaagacaaa

SEQ ID NO: 26022 - DNA, 341 bp, Gossypium hirsutum
  Clone ID: LIB3147-042-Q1-K1-F1
gctaaacagtacttgaatggaaaattttgaatcatggtaaaagattaataatttctgttgtgtggttaactatatgtagtagcttcatggatgacgatgcgttgaatatgcgtaattggggttactacgaaccgtcgtttaaaggacatctcggtctgcagctaatgtcgagcatggttgaacgggatgcaaagtcttttattcccggccgtgatcccaatctcatgattactaccaataccacctttcaccagcgggaccccattgtttccgaggcacatatccccatgaattatgttagggatagttggattgctgacagagataagtttttcaacatg

SEQ ID NO: 26023 - DNA, 413 bp, Gossypium hirsutum
  Clone ID: LIB3147-042-Q1-K1-F10
acgaaatgggtatggaatcagtacccaaggtatctccgactgcaacccttggcacccgcggggtgcacaacagtggtcaaacgggggcttaaacctggtgccgcaacgactttcaaatgccgctgcattacccaaggtacacccaagctgattacgaaaccatgccttaatggaaacttgattgtttgcttaaaaaataccgactacccatcaccggcgacgttgagcagaagagaagctctcccatggcagcttttctgttgcctacgtagctacaaaatgttgcttcatggatcccaattttcctccctttaaaaaaaaaattcattagtctgaaaaggcattgtgtttatgatcttttgcttaatttgactatgaaaatattgcgattttgagccatatgtattttaaat

SEQ ID NO: 26024 - DNA, 343 bp, Gossypium hirsutum
  unsure (1)..(343): unsure at all n locations; Clone ID: LIB3147-042-Q1-K1-F12
cacgcctcgttggaatgtaaatatattctggctctcttttcaaatcaaatggtttcaactagcaaaatatatgccttggtgctaaactatcaaatctgcttacctcacctaacaaaccacttacaaggggcctcattaagttctgatccatcgcaggatcttataggggatactacccagctggaagatctttatnaacaaccaaaacatggtctttcccaatacaatggtcatatgaactacaaacagaatgggagaacatggtatcaaaatgataggtgtaataaatccaacgttgactttgaaacctctgctgaactaacttgtggtccaagggccttaa

SEQ ID NO: 26025 - DNA, 354 bp, Gossypium hirsutum
  unsure (1)..(354): unsure at all n locations; Clone ID: LIB3147-042-Q1-K1-F2
ggatgaactcttacttgctggtgaacttcattagtcgagcaagaaaactgttgcacgtttagtagctgcacaggattcactggtggagaccgcgaaagagcaagccagttccattagcaatataattgcacaggccacaaagtaggttatgaccgagagtggttgcggattgccatttgtattggggttggttttggtgtctcatctgttgtgagaactctttctggattttagtttgagaacttaattgtatgtttatgaatgtagattcgggagccttttgtagaaatgatcacatataatcatcatattaattatgttaaaaaaaaaaaaatnaaaaaaatttacnnaant

SEQ ID NO: 26026 - DNA, 343 bp, Gossypium hirsutum
  Clone ID: LIB3147-042-Q1-K1-F3
aaaaaaattctatgaatcagcactcaggctgttaccaggttaccttggagctgcattagctggagctgagctccatgtcatcgagggacgaaatggggatgctgtatctcttcttgagcgttatctcaaagattgggctgatgactctcttcatgtcaaattggctcaagtatttgctgctacaaatatgcttcaagactctttgtcacattatcaatctgcattgagaataaatcctcaaaatgaagctgccaaaaaggggctagaacgcctggaaaagcagatgaagggggtggatccggatgcgcctgaagaagaagaaaatgaggttgatgatgcagat

SEQ ID NO: 26027 - DNA, 351 bp, Gossypium hirsutum
  Clone ID: LIB3147-042-Q1-K1-F4
tgaaaccttgcagccaagaaggtttcactggtagatgttggaatagtctgcggattaagtgatgtgggtgaaagagtgaaagggcctccaacttcattttatatggggagagcaatgggaactggctctggtcttggtaaaactgggttcgcatctacaccatcaactgatgaagatggtctattctcaagccttggcaaccaccaacagtatcaattcggtagctttaaaaagtaattttgttcattccccctttgcattcatttcctattttggtgctaaaaacaaagttatcgactgttgtgcattttggtgtgctactttcgtatcattctatggtacaactccccg

SEQ ID NO: 26028 - DNA, 202 bp, Gossypium hirsutum
  Clone ID: LIB3147-042-Q1-K1-F5
cccacgcgtacggacacaggcgtattatattgacgcaatagaattaatttttcaacggtagaggtaacttactttaggcgccaggcactaaaaaatagatattcatactaccagattatgctatatatactaacaaattgattgtcttcatcaaaaactgcatacattccatctatagtcgtatctagttgaaaggacccat

SEQ ID NO: 26029 - DNA, 433 bp, Gossypium hirsutum
  Clone ID: LIB3147-042-Q1-K1-F6
cccacgcgtccgcccacgcgtccgtttttttagttcttttactttggaaatctaaatcatagacagaatcatcggcgccaaccatgccgccgaagtttgacccgacccaagtcgtcgacgtctttgttcgagtcgccggcggtgaagttggagctgccagttcactggcacccaaaattggtccactgggtctctcgcccaaaaaaattggtgaagatatcgcgaaagaaaccgccaaggaatggaagggtttacgtgtcacagtcaaactgactgtccagaaccgtcaagccaaagttatggtggttccctctgccgccgctttggtcatcaaggcactgaaagagcctgagagggatcgtaagaagacaaagaatattaaacataatgggaacattagcctcgatgatgtgatagagattgcgaaagtgat

SEQ ID NO: 26030 - DNA, 259 bp, Gossypium hirsutum
  Clone ID: LIB3147-042-Q1-K1-F7
cggacgcgtgggcggacgcgtgggcttcgatttcttttaagtgattgtctgttagggctggggggtaggtgatggctccaaacgaacctaaaaactggcctttttggggcctaaaacaaagaaaatgtggtaacaaaaaaggaattggctcccaacccttctaataaaaggggaaaactagctagaaaattcactttttgaagaacctaaatccggaaggtggatggttcccttccgatgaaaagaagaatactggact

SEQ ID NO: 26031 - DNA, 253 bp, Gossypium hirsutum
  Clone ID: LIB3147-042-Q1-K1-F8
ataaggcaaacaaagctaacaaagtatccttttcgaaccacatgacaaataaatggcggtgggtcaatcttcaatgcgccaaggtttccttggaatctggtaaacgctatgtaaaactgctctcgtctaccaacgtgttgaataccatctacaccaacggactgtatgctgttgctaacaaagctggaattgatcttcgcaaggaatgataatgtaacctaatttttaaatatcatggtgtattacgaaaact

SEQ ID NO: 26032 - DNA, 418 bp, Gossypium hirsutum
  Clone ID: LIB3147-042-Q1-K1-F9
gcctccactctgtcctgagtctgatgatccttatgcggcatggaatgtgcccctgcaagcttgcatgcacaaagtgccagtagatgcttcataacatgggtctcaatggcctgagcgatggccagaaaggttggaaaaatcaccttattggttgagttcccaagttggagtttatggcaaagcagcaccagaggattttgctgcagacaatgagcactggaaacgggtagtaactaagtcatacctaaatgggatgggaataagctggtcatctgtcagaaatgtcatggacatgaatgctgtttatggaggatttgctgctgcactaaaaaatttgagtttatgggtcatgaatgtggtcccaattgactctccagatacgcttcccataatatatgaaagaaggtctattggcatg

SEQ ID NO: 26033 - DNA, 348 bp, Gossypium hirsutum
  Clone ID: LIB3147-042-Q1-K1-G1
cttttggtcactaacccaaagagggttgcgattgctattgctgaaaaaacttgcaatgcccggcttctcaaggtcaatcaaattggatctgttactgaaagtattgaagctgtgaaaatgtccaagcaagctggatggggtgtgatggccagccaccgcagtggtgaaacggaggatacttttattgctgatctttcagtcggtttggccacgggccaaattaagactggagctccatgcaggtctgagcgtttagccaagtacaatcagcttctgcgaattgaggaggagcttggtgcggaagctgtctatgccggagctagcttacgtgctccagatgcaccctat

SEQ ID NO: 26034 - DNA, 426 bp, Gossypium hirsutum
  Clone ID: LIB3147-042-Q1-K1-G11
cggacgcgtgggtttggctcagtgaatcaactcgacggaggaagtcgaacgtgcaacataacggatatgtcctgcagtacctcacgaagaccacaataagtgctcagaattctccaggtcaaatcatgcatagtggatacactttttcccccacacagagttcgacgcgccagattactataatgaggcaccaagttattaaacaacctccacacatgtattttaattttctcaggaatttttagcaaccacaaatctgtgtgaaaactcttgtaatcctcattgtcgaaacctttttttggaaaaacgggaatcgacttagattttgaaaatgaaaatgaatagaggagtcgccaccaatcctttttgatgaggtgcgatcgggtcacctcgaattaatcattctaataaaagttaagatttact

SEQ ID NO: 26035 - DNA, 296 bp, Gossypium hirsutum
  Clone ID: LIB3147-042-Q1-K1-G12
aggaaccttcgtcttcatggcagaactcagtttgaagtgtttttatttgcttttctttggtgacgaagactgtttcggcaggggcatttataacttgattcctacctttttcaagaacggtgtatttttaaaagcctaaatttttagttaggtccaaggaatatatatcctgttcactttgaactcgcagtaatatgttttatgtactcggtttccaaatttttttgttttaatgtctgattagattccattagctaaaaaaacacttaaaaaaaaaattagtgaaactttttttt

SEQ ID NO: 26036 - DNA, 264 bp, Gossypium hirsutum
  unsure (1)..(264): unsure at all n locations; Clone ID: LIB3147-042-Q1-K1-G2
cccacgcgtccgcccacgcgtccggggattattcgctgtgtttaagcatatcaataagcgggggaggatgcggaggaggatctccaggaatagtantagtgtgtgtttcttactgtttgctttcttaacgatttggattttttttttctgttctttcaacctgaattcctggtttgggtgttagaaatgtggtttcctggcttatgtttttttgtttacgaacatctttacatcagtagatagatactagactcgtacggatgc

SEQ ID NO: 26037 - DNA, 218 bp, Gossypium hirsutum
  unsure (1)..(218): unsure at all n locations; Clone ID: LIB3147-042-Q1-K1-G3
cccacgcgtccgcccacgcgtacgtgactcattgattttacatgcaatttattttcgttttggatgctatgaatttctgaagtggttgctacatgcttttcagaataactacttgccnnnaaaaaaaaagctataaaaagaatgataacaaaaccaaccnggagatncaaccggacaaanganaaaaaaaaaaaaataaaaaaaaatgtttaacaggg

SEQ ID NO: 26038 - DNA, 60 bp, Gossypium hirsutum
  Clone ID: LIB3147-042-Q1-K1-G4
acgcgtccggtagtttttcggactgatgctttttaatgtttattgtgaacttattatgct

SEQ ID NO: 26039 - DNA, 351 bp, Gossypium hirsutum
  unsure (1)..(351): unsure at all n locations; Clone ID: LIB3147-042-Q1-K1-G5
cgnntccggcagatctctgcagacacatgcgacgttggtgtaacttataacatcttataaagagtcgactggaatcgagagcagtgaacacaaagacaagggagttggatctgatccatcttccaagcacaaccaaaggcggagaaaaacataaaacgtctaatcaaaaatttgtagaacctttatgaactaatcacnagctggtttagggttggaatatcctcctcatgcacagattcaatagtcatcaaacatcaaccatacttgtattttaggtttcctttacccttttttgaatgctcataattatatatatcattattttcatttttcacaaatgccttgagtttt

SEQ ID NO: 26040 - DNA, 158 bp, Gossypium hirsutum
  Clone ID: LIB3147-042-Q1-K1-G6
cccacgcgtccgcccacgcgtccgtttacttttttgctggcaaaaaaaaaaccttgggaaggtttgaaaattattggtctctcaatattcattaaaaaattttatagtgaattaagaggaggatgaagccttaccagtaccatgattaacacaattgg

SEQ ID NO: 26041 - DNA, 339 bp, Gossypium hirsutum
  unsure (1)..(339): unsure at all n locations; Clone ID: LIB3147-042-Q1-K1-G7
acgcggacgcgtgggtgataaagaaagacttttaactgcttgctccccatgccaatatctaggttccgttaatggtttagagcccaccgtaaatcaattatggaattantggttccctcaagttttcaactttttaattaaaggaaatcgccagatttttgcctttccggattacttttttttgaataaagcggattttgttcgctttaattctaaaaaaaaaagattcatagccgttataaattttacccaatcttattttacaaaaagttaaaaataaaaatttaactcatttgggcgttccttttattatcaattatttgtaaaccttttaatttt

SEQ ID NO: 26042 - DNA, 264 bp, Gossypium hirsutum
  Clone ID: LIB3147-042-Q1-K1-G8
cccacgcgtccgggatgggaggattatacattattttatcgagcttggtacaaaggccaaggcgtgcggcttcagaggccatggacacttaacctgcccttggagatattcccgacgaatttctcgatccaattcaatatacattgatgaaggatccggtgatcttaccatcttcaagaataacaatagacagacctgttttccaaagacatcttctaagtgatagtactgatccattcaaccgatctcatattacctcggaga

SEQ ID NO: 26043 - DNA, 435 bp, Gossypium hirsutum
  Clone ID: LIB3147-042-Q1-K1-G9
gcataagcagcttaggcaaccagttcgcagttatggtgaagtattcgaaggagtcagataggcccaccaagtcctgcaaggcgaggggctctgatctcagggttcatttcaagaacacaagggagactgcgttcgctatcaggaagttgcctttgggtaacgctaacaggtatttggaggatgttatggctcacaaacaggccgtacccttcagacagctttgtggtggtgttggacgtacagctcacgcaaagaacaggcattctaactgacactgtcgctggcctgtaaaatctgccaaattcattctagatttgctgaagaatgctgaaagcaatgccgaggtcaagggtttggatgacgatgcactctatatttctcacatacaagttaaccaggctcataaacaaaggcgtcgtacataccgtgcccatg

SEQ ID NO: 26044 - DNA, 265 bp, Gossypium hirsutum
  Clone ID: LIB3147-042-Q1-K1-H1
cccacgcgtccgaggtcctgaagcaagtccattctgatatcggcatttccagcaaagctatgggtattatgaacagtttcatcaacgacatcttcgagaagctggctcaagaatcttcgaggcttgcacgctataacaagaaacccaccattacctcccgtgagattcagactgccgtaagattggtcctacctggggagttggccaagcatgctgtttcagaaggtaccaaggcggttacaaagttcaccagttcttagtttcc

SEQ ID NO: 26045 - DNA, 240 bp, Gossypium hirsutum
  Clone ID: LIB3147-042-Q1-K1-H10
cgcgtccgagacttccacacctactcccttctttggaactcctcaacgtattatcttctctgttgatggggctccgatcaaggaggtcaaggacttggaatctattggcgttgcgttcccaaagagccagccgatgagagtgtattcgagtctttggaacgccgataattgggccactcgaggtggcgttgttaagacagattggagcaaagctcctttcactgctgcttacaagaatta

SEQ ID NO: 26046 - DNA, 372 bp, Gossypium hirsutum
  Clone ID: LIB3147-042-Q1-K1-H11
cggaaccgcaaggccgggccaggcctacgcgttcgcgtttttcaatatacagggtgtaaattggtctgaggctaccgcacccattggcccgcgaaggtgttaacaaatcatgcgcaaaggcccatgcccttgaagccgtcacagcagtgaattctgtaaccgcatttaagaagatggacatgaagattcgaaccaatgcttcatttcacaggtcaaagacctttaagaaagataggacctcaaactacctacgcattaatgctccaccaaagaacaagcttgatcattatcagattctcaagtgtcccattacgactgagtctgctatgaagacgattgaagacaacaacactttggctatcattgttgaca

SEQ ID NO: 26047 - DNA, 413 bp, Gossypium hirsutum
  unsure (1)..(413): unsure at all n locations; Clone ID: LIB3147-042-Q1-K1-H12
tgctgatggaattttccggtcacttctctactaagggtgcatctccgagtgtgacatcaacgtcnagaggcggccgtaccaccggaactgccgttgtgctctccacgacaagtcgttgggaaggaactgttcacgttcattccctaagagcaagaatgtgtcttatcctatgagaagatcatggagtgagggatgcttggccatggtagcagctacgggttattcttccccgtcgtcttcgccgtctttggctggtgttcacggtgctgggaagcagcaactggaatcgtttaaagaagaggaagataaataatcgaaaatggaagggaacgaataattttttggccttcttttgtgatgtttgggatcatgttttagaataaatactgatcatagggtgagtgaaaggagat

SEQ ID NO: 26048 - DNA, 324 bp, Gossypium hirsutum
  Clone ID: LIB3147-042-Q1-K1-H2
cccacgcgtccgcaaaatttatcgtcttccactcaaaacaaaccagaagagaatctaccatggcgcccgaaagccgataagaagcctgctgagaagaagccggccgaggagaaaaagactaccgtcgctgagaaatcccttgccgagaagaagccgaaggccggtaagaagcttcccaaagaaggcggcgcggccggagacaagaagaagaagaaggccaagaagagcgtggagacctacaagatctacatcttcaaagtccttaagcaagtccatcctgatatcgggatctcaagcaaggctatggggatcatgaaacagttc

SEQ ID NO: 26049 - DNA, 423 bp, Gossypium hirsutum
  Clone ID: LIB3147-042-Q1-K1-H3
cccacgcgtccgcccacgcgtccgaaagttactcggaagatattgtaaaagctttgaagagtggtaatatcgacgacatcacaagaaatgtttcaagtttaactgattggatcaggagttggcccccaacatcttgaacgcttgctattttccgcaatctaccctctgcatatgctttgtttcaccatgcaaaagaagctctggtgagtgccttaatcaagtatgtctctatcaagtatcggtttaaatctctattgcttttaaagtttagctcgaacacgaaatcagttaattgtggtagttttggttattttcgtgggctaatctccaggtctgggttcgagttatgtgagaatggtatctttaattttagtatttttggtgatgaagtttgtaactgatagttcaaggatgtattgtgat

SEQ ID NO: 26050 - DNA, 360 bp, Gossypium hirsutum
  Clone ID: LIB3147-042-Q1-K1-H4
cccacgcgtccggaaacctccaatcaagttgtcaccgtttgttcctccaatagttaagccagccattgacctccctccggttacggtccctccaattaaccttcccccaggacggttcctccagtaactaagccaccaagtgggaaaccctgcccaacaccaccaaccaaggacacttgccccattgacacactgaaattgggtgcttgtgtggatctgctgggagggttggtgcacattggactaggtgacccggttgtgaaccaatgttgtccggttctttcaggactcgccgagctcgaagctgcggtctgcttgtgcaccaccctcaaacttaaggttctcaaccttaaaatttat

SEQ ID NO: 26051 - DNA, 412 bp, Gossypium hirsutum
  Clone ID: LIB3147-042-Q1-K1-H5
cccacgcgtccggcaacatcactgttaacaataatgctgtttttggtgacagcagtgcattggctcccggaggtgtacgaattggtacacctgccatgacttcaaggggtttggttgagaaggactttgaacagataggcgagttcctccaccgagccgtgacaatcactttgaacatccaaaagcaatatggtaagcttttgaaggacttcaacaaagggttggacaacaacaaggagatccaagagctgaaggttgatgttgagaagttcgcatactcattcgatatgcctggcttcaagatgtccgacatgaattacacggattagatctaaataaccatacgatctaattgatgttattatcagcatctgccactgtgtgggttgcccccatttgatgtcttatgagt

SEQ ID NO: 26052 - DNA, 247 bp, Gossypium hirsutum
  Clone ID: LIB3147-042-Q1-K1-H6
acctgacatccaaaagttgtgcactagcgcttaccacaacaatggttgccaacagtttacgggaggtcattccaaataaaagctccccaccattggattatatatgagtgtcttacactgtatacgacacacaaccaatcatgagtatggagagcgttggaaaaatcgaaggtagcatgtaagatacatacttttatctgatttacacccgagtacgagatgcatagctccgttattgtattatctc

SEQ ID NO: 26053 - DNA, 436 bp, Gossypium hirsutum
  Clone ID: LIB3147-042-Q1-K1-H7
cttgcagtcgcctttatcagaagcaaaaacactaagctttagcttctacatcgaagaaaatggtgaacggacgccaaggagagcgagtgagactctatgtaagaggaaccatcttgggttacaagaggtcaaagtcgaaccagtatccaaacacttcattgatccagattgagggagttaacaccaaggaggaagtagcttggtatgctggcaagcgtatggcttatatctacaaggccaaagtgaagaagaatggctcacactatcgctgcatttggggaaaagtttctagacctcatggtaacagtggggttgctcgtgctaagttcaagtctaaccttcccccaaagtctatgggagatagagtcagagtcttcatgtaccccagcaatatatgagtagtgtagatcgacgactcgaatgacgctctaccatt

SEQ ID NO: 26054 - DNA, 98 bp, Gossypium hirsutum
  Clone ID: LIB3147-042-Q1-K1-H8
atccgtcacgcgtccgtgttgtgacattgtccactgtttggattaaagtaacaatgttggtcaggcaaaattcaaaggggaaggggaataaaactttt

SEQ ID NO: 26055 - DNA, 238 bp, Gossypium hirsutum
  Clone ID: LIB3147-042-Q1-K1-H9
acgcggacgcgtgggcggacgcatgggcggacgcttgggcggacgcgtggggttcaatattcttgcaactgtggggtcgaattatgagcattattctccatgcaattgtaagtaccgtttcgtttcaagtgacgggtccatattatcaaatgaaatacaatttcactcttccattgtttcaatcatagcttgagcttgagacatcccacctctctaaccatctaggctcaaacaagcc

SEQ ID NO: 26056 - DNA, 334 bp, Gossypium hirsutum
  Clone ID: LIB3147-043-Q1-K1-A1
cccacgcgtccggcactccaagagcttgttcggattgaggctgccgttgtcagccccgatgagaaaaccaagtgccatacatcaggtaatattgagcttaaggaagagaagattattgttaatgaagagttcgaaccaagggccaacggttcaacttattggggtgacccttattttaaaaggaaataattattattttttggctgaaaattttgaaccgagacctaacgtttcggcttacgggggcgatgatgctggtcttaaaggacagaaagaatcattcactaaagatttcgatccagagccaaatgtctccgcttacaataactaatta

SEQ ID NO: 26057 - DNA, 423 bp, Gossypium hirsutum
  Clone ID: LIB3147-043-Q1-K1-A10
cttttgtgaaagacaaaagctttcaatccttctttgccaaaggctgcacggtcttgcatgtgatcgtggccatgtggaggttctggttcgagagaagagtggaggatttggcttgggattggcttagacaaactgttggcgacattttattgggtctctcttgggttttctttttggtttactcttggagagaaaagtatgactaggtttaggtctattttttttttcttttctgcttaaattaaatttactcttttctctttcctgtcgctgcttctgttctttgatttttatattttgtaatctgtgaaaagtggaagaaggcagcggccacgtgtttgcaaagattatagcttagcctaaatttcaccttcttcattattcatttttaaggttcatatttgaattaagggggttttgatg

SEQ ID NO: 26058 - DNA, 436 bp, Gossypium hirsutum
  Clone ID: LIB3147-043-Q1-K1-A11
cccacgcgtccggtcaatcagcagctactttgaatcttttgagagcctttgctactggaggttatgctgctatgcaaagggttactcagtggaatttggatttcaccgaacacagtgagcagggggataggtaccgtgaactagctagtcgtgtggatgaggcccttggattcatggctgcagctggacttacagttgaccatcctatcatgacaacaactgaattctggacttcccatgagtgcttgctcttaccttacgaacagtcacttacccggcttgattctacttctggccgttactatgattgttctgctcatttcctgtgggtcggggaacgaacaagacagttggatggtgctcatgttgagtttttgagaggagttgctaatccccttggaattaaggtgagcgataagatggatccgaatgaact

SEQ ID NO: 26059 - DNA, 196 bp, Gossypium hirsutum
  Clone ID: LIB3147-043-Q1-K1-A12
cccacgcgtccgcccactcatccgctcacttttacgtttacacatcctttatttctggcggtgcttcttttatgcagagggctgcacacatgcatttgaatctcacataacacatcttgccattggatattaaccttaaactaccattgctttatagaaaattgatccttgtagttcattatctgatatcttacac

SEQ ID NO: 26060 - DNA, 423 bp, Gossypium hirsutum
  Clone ID: LIB3147-043-Q1-K1-A2
gttgggagtcggctcactatggtttctactgaagagatccttcttgaacgacctagagcccctggtaccaaaccggaagaagcaaaggcttccggtgacggcttggctcagcttagcaaaggaggtgctgttctcatggtgtgccgaacatgcggtaagaaaggtgatcactggacctccaaatgtccttacaaggatcttgctgctccagtcgaatcctttgttgataaacccgcggcagccgagacctcggcagctgctcctggagctggaaagggagcctacgttccaccaagcatgagagccaatgcagagagaacaaccggatcagatatgagacgtaggaacgacgaaaactctgtgagggtaacaaacttatctgaggacactcgggaggctgacttgcacgaacttttccgatcg

SEQ ID NO: 26061 - DNA, 435 bp, Gossypium hirsutum
  Clone ID: LIB3147-043-Q1-K1-A3
cccacgcgtccgcccacgcgtccgcttttttatattactctcaattcccattgaaactttcagactttcagccataattaagcttcttcccttcagaaaacttcgactgaagctgctccaagattaaagaagcttcaatttataatactctgccccttaaactagcaagcctgatctgctgcataatcgtctaaagaaaatttgatggggataaataagttgctgtgttggtttgcagttttcttctttttgttgggtttctctgcttgcacttcgatttcggatggtgttttcgactctctcacttctactggaaggcacctccttcaagctaagaaagcttgccctgtgaactttgagtttctgaactacacaattatcacaagccaatgcaaaggaccaaagtatccgcctcaaagttgttgttctgcattc

SEQ ID NO: 26062 - DNA, 408 bp, Gossypium hirsutum
  Clone ID: LIB3147-043-Q1-K1-A4
caagttttgaggtagaaaacaagagaccatggcaagagggcgaaccattctgacttgtctcatgtgggctttactcggtttctccattactttgtgtgcaagtgcaactgccggttcttgtctgggaacatcccaacaagttgtttatccccaaggtacgtatatctattctgtattattataatatatttgattaagttcatatatttaagaatgcagctttaaaggcgatgataatgatgatatttgcagggtgtcgctgctgctatttcgttgggaaacctttcatgcttcggtgtggcaaagtatgctgcgatgatgattgctgttagctatgttagcatgagatttaaggttgaatcattatgtgcatcatcttttttcccctttgttgaatgtaatgtaatt

SEQ ID NO: 26063 - DNA, 425 bp, Gossypium hirsutum
  Clone ID: LIB3147-043-Q1-K1-A5
gtgaaagcgataccctaccctctctttgatcaagtggccaatgggggcttataagtgcgtgtcggagctatggaggaagaagcagtcggatgtgatgaggtttttacagagggtgaggtgctgggaataccgccagcatccgtcaattgttagggtcaaccatactactcggcctgacaaggcacgccgcttgggttataaggccaaacaaggttatgtggtttaccgtgtacgtgtttggaggggtggtcgcatgaggcctgttcctaagggtatcgtgtatggtaagcccacagaccaaggcgtcacccaattgaaactccagcgcagcaagcggtctgttgctgaggagcgtgctggcccacagttgagaggtctcagagttgttaactcgtactggatcaatgatgactctacttacaagt

SEQ ID NO: 26064 - DNA, 169 bp, Gossypium hirsutum
  Clone ID: LIB3147-043-Q1-K1-A7
aaggattgcaagtgcagccaatgctattgtttaggaagtcaaaatctgtgctttggactataatattatagtttgctgcttcaatattttgttgtatttctttttggatttgaagaaatgtactttatggacaggttttccgatataagagaagaaaatttttgttggc

SEQ ID NO: 26065 - DNA, 393 bp, Gossypium hirsutum
  Clone ID: LIB3147-043-Q1-K1-A8
aggatcacaacatggaacatcaccaccattaccataaccatgttgaaagtgcagagatgggcttgttcaccattgatgaactacatacctttaacgtacggaagaaattacccatctttttcccaataaaaaaccactctctttaccctcctttattgcctaaacaaattgctgacaccatccctttttcatcttcccaagtttctaatattctacgattcttctcagtttctccggactcccccaaaggcaaagctgttcaagatacactcgcaaaatgcgaactcggagcagcgcaaggggagaccaaaatctgtgctacctctttagaatctttacatggttttctaagcaatgcatttggaccccatgttgatttcaagttcataagca

SEQ ID NO: 26066 - DNA, 417 bp, Gossypium hirsutum
  Clone ID: LIB3147-043-Q1-K1-A9
gaagaaaatgatgaactgcataaaaggatataggaaaggaaaatgataccaaagagaaaactggatgaaatggggtcctcaagtagggttaagagtcaagaaatgaaacgttcacggtttgccaccatagggtcacccttgcctaattcttctcatgtcaatgggttgcatgagcaacgtgctactagtctcactgaaggcatgaggttgtacgaaagtgctatttgtggtcatgtcaccacttgttatcctgctgcctcagctgtaccacatggactaactgttggttctttgcctagaaatggagttacccagatggtaggaataaatggtgttggaagcagcagtatgatgacgagcataggtgccatctcaagaagttcttattccagggctcatggggagattgaagtcaat

SEQ ID NO: 26067 - DNA, 431 bp, Gossypium hirsutum
  Clone ID: LIB3147-043-Q1-K1-B1
cccacgcgtccggtttcgaacaacaagaaaaatcaccccaacccatcagatcccaaacagcggttcggctcctcccttggaatggaacacttctagatctactccttggaacaagttatgaaaatggctatatctcttgtactgagtcgactcattctcttcctcactctcacctgctttgcagccgtctcatcatctactacgaccacaacaactctaaaacggcactctgggtttctctactctagaacccgaggaaaatgcactcctcagttctggagcagcaggagagaggcgtggccaaggatggtcccacagggatcaacggtatcgaacgtgttcgggtcgagagcgagtgagcggtacagatcggatatgacattgttggaatcaagggctgtgaatgaagaagggaacgtgttcaatgagct

SEQ ID NO: 26068 - DNA, 372 bp, Gossypium hirsutum
  Clone ID: LIB3147-043-Q1-K1-B10
gtggtttactaggaggcaggggtttgcggaggcttttcactgttatctgggttccaaacagcaaagaaatggcagctacaattgcatcgagatcttcttttcttcgtccaattctccgaacagcaacaacatcgacaaaagcaagaaccaaaatcccattttcagctccaagttcttcacttcgatccaatttcagtcttcatcagacccggatttctcctccctctctttctcggttcgttcgacgagaactcagcactcttcaaccacttcacagtgcggttgcatcggcttgccttgtttccaagcttccttccgatgctaatagttgtgctgaaggtcgatttgctaactatatcagtcccatctagt

SEQ ID NO: 26069 - DNA, 422 bp, Gossypium hirsutum
  Clone ID: LIB3147-043-Q1-K1-B11
gaaagacgatcactctcgaggtcgagagctctgacacgatcgacaacgtgaaagccaaaagccaagacaaggaaggcatcccgccagaccaacaacgtctcatcttcgccggaaagcaactcgaggacgggcggactttagccgattacaatatccagaaggaatcgactcttcatctggttctacgtcttcgaggtgggatgcagatcttcgtcaagactttgaccggtaagaccattactttagaagtggagagctcggatacgattgataacgcgaaagcgaagattcatgacaaagaaggaattccaccagatcagcaaaggttgatttttgctgggaaacagctggaagatggaaggactctggctgattacaatattcaaaaggagtccactcttcaccttgttcttcgtcttcgt

SEQ ID NO: 26070 - DNA, 422 bp, Gossypium hirsutum
  unsure (1)..(422): unsure at all n locations; Clone ID: LIB3147-043-Q1-K1-B12
gcagcagcagcctctctttctcatcttgtgatttgagcttcgtgtttgtgttgggttaagcaattcgccaagatgcagaacgaagagggtcaaaacatggatctttatatccccagaaaatgttcggccactaataggctgatcacctcgaaggatcatgcttctgtccagattaatgttgggcatttggatgagcttggcagatacactggaactttctccacttttgctctttgtggctttgtccgtgcccagggtgatgctgacagtgcacttgacaggctttggcagaagaagaaagctgaagtccgacagcagtagtgggaggtggattgctttttactaattgcttggtctctgaantttggagggaaaatgtgttttttttttaatcagtgacctttaagttctagtttggtttt

SEQ ID NO: 26071 - DNA, 306 bp, Gossypium hirsutum
  Clone ID: LIB3147-043-Q1-K1-B2
gaaaagttggaggaaaattagaagacactgagctaatatatggaattactgttgataaagacatgagtcatcctcagatgccaaagcaaattgaagatgcaaaaattgccatattaacttgtccatttgagccacctaagccaaagactaaacataaagtagacattgatacggtggaaaagtttcagactctacgtcagcaagaacaaatgtattttgatgacatggttcagaaatgcaaggatgttggtgccacattggttatatgtcaatggcgaattgatgatgaggcgaatcatttattta

SEQ ID NO: 26072 - DNA, 436 bp, Gossypium hirsutum
  Clone ID: LIB3147-043-Q1-K1-B3
cccacgcgtccggaaacacaaggttggactgcgagctttgaattttaggtgttcctgcagagtgaggaagctcccctgaaaacttcagttgaaaatgcctaagcaaattcatgagatcaaggacttccttctcactgctagaaggaaagatgctccctctgtaaaaatcaagaaaagcagagatgttgtaaagttcaaggtccgctgctccaagtacttgtacaccctttgcgtgtctgatgctgagaaggccgacaagttgaagcagtctcttcctccaggtttgagcgtccaagacttgtgaaattacaactgcccttagcttctactaggcaatgaaaactagattttgacttttagtttattgcttgcatttcgtgtcgttttgcaacaatcaaaagtttttataatggatttttatttggtgtgtttttta

SEQ ID NO: 26073 - DNA, 419 bp, Gossypium hirsutum
  Clone ID: LIB3147-043-Q1-K1-B4
gctgagtttaagcatgcatggaatggaaaaaaagcaccaggatatttttatatttgtacattggcattgtaagaaaactgacattttcatttgctgcctttttttttgtgacaaacgagagggaattcacaaaaaaaaaaaaaaaaaaaaaaaaaaaaaaaaaaaaaaaaaaaaaaaaaaaaaaaaaaaaaaaaaaaaaaaaaaaaatataaaaaaaaaaaaaaaaactatatttattgacattaacaaaaaaagggggggcctttttaaagatccaaattttacttccggggggtggaaaggaaaaagtttttttttggggcccccaaattaaatttcctggcccgtgttttaaaaacgtggggatgggaaaaacccgggggtacccaaattaattggctttgaaaaaaatccccttt

SEQ ID NO: 26074 - DNA, 432 bp, Gossypium hirsutum
  Clone ID: LIB3147-043-Q1-K1-B5
cttgcaaaggagatttcaaaggactggagttctgttttcgaaagaagcataaacacgctgtttctaactgaaatggttcggggtctcatgctgacactcaagtacttctttgaaagaaaagttactattaactatccatttgagaagggtccattgagccctcgttttcgaggggagcatgctctccgccgatatccaactggagaggaacgttgcattgcctgtaaactttgtgaagcggtatgtcccgcacaggcaatcacgatagaggctgaggaacgagaggatggaagtcgtaggacaacgaggtatgacattgacatgaccaagtgtatctactgtgggctctgccaagaggcatgtcctgttgatgcaatcgttgaaggacccaactttgaatttgccaccgagactcatgaggagctgctgtat

SEQ ID NO: 26075 - DNA, 411 bp, Gossypium hirsutum
  Clone ID: LIB3147-043-Q1-K1-B6
gggatattattctatttctttttcctcagagtcattctcaaggatgatatcttcatttgacagcacagcaagcttagctctgaccattttcatgatccctggcttgagtgctgagaagatcctcaggttgtatctattatggtaatatgaagagataaaagtaacatttagtccttgaacctggtagcatttttcagttttggtccatgtgatgactcacctaaaaattatcacagggatcgaaattgagaaaagttgtcaagtttcaagtctaatatgaaactgggaagatagtatgaattgcatgtttaatctattggatagtattgttgcagatgcagcggctggtggtactatatatactattctttgatagaatggttcatgggactgaccaccgcccgagagcct

SEQ ID NO: 26076 - DNA, 273 bp, Gossypium hirsutum
  Clone ID: LIB3147-043-Q1-K1-B7
cacttttggtgactatgtaatcactgaagatgaaatcaaggctctcattaaagggagtgagggagtttacaaagctattgaagcttacctcttagctaaccccgatgcttgcaactaagatataggttgctttgaattttcatgcttcctttaaagacgggtcagattttaatgttgtgcttctgatattttctttttcatcttaaagcctaaactgtcatatgattgtttcaataagactggtggtgctggttgagctttgatcttatagtc

SEQ ID NO: 26077 - DNA, 413 bp, Gossypium hirsutum
  Clone ID: LIB3147-043-Q1-K1-B8
aatacttgcctaaactatatgatcctttcttgcatggaccctaccgcggaagaatcaaggaatggggttcccctttaagcataaatcaaacttataaaaaaaaaaacacggatccattttggataaataagattcatgctctacttcttactactgattatcacgaccttgaacagacactagatacactcaatataaaatcattagcaacagaaaaagaactctctttattgacattgacagaagatgaacagggaaatatcgattccgaggatcgagtcaaaattttgaaatttttattcaatatagttataactaatcccaacaatcaaacaattagaaaaaaatctattggaataaaagaaataagtaaaaaagttcctcgatggtcatacaaattaatcgacgattta

SEQ ID NO: 26078 - DNA, 433 bp, Gossypium hirsutum
  unsure (1)..(433): unsure at all n locations; Clone ID: LIB3147-043-Q1-K1-B9
cccacgcgtccgaagagacgcccaaaccaggttaaaaggacttgttacgctcagtccagccggattagacagatacgccgaaagatgagggaaataatgactgcccaggcaacatcttgtgatttgaaggaactggttcaaaagttcatccctgagatgattggaaaagaaatcgagaaggcaacatctagcatctatcctttgcagaatgtgtttattcgtaaggtcaaaatcttgaaggctcccaagtttgatcttgggaagttgatggaggttcatggtgactactcagaggatgttggtgtgaaactagagaggcctgctgatgagacaatggctgaggctcctgcagaggttgttggagcttgaacgaagaaaatagtccatgaatgtctngttttttatgcttctaggagttttgctgatcatttaa

SEQ ID NO: 26079 - DNA, 430 bp, Gossypium hirsutum
  Clone ID: LIB3147-043-Q1-K1-C1
ccgaaacagaatttgtaacttgctatcctcttgcctagcgggcaaggatttacctccgtggaaaagatgattcattcggatccgcatgaaagcccaactccattgcattgccagaatccatgttgtatatttgaaagaggttgacctccttgcttctctcatggtacaatcctcttcccgctgagccccctttctcctcggtccacagagacaaaatggaatgtaggactaggactggcgccaacagttaatcacggaagaaaggactcactgagccgggatcactaactaatactaatctaatctaactaatactaatctaatactaatagaatactaatctaatactctaatactaatagaatagaaaaaatagaatagaaaatactaatataatagaaagaactgtcttttctgtatactttccccg

SEQ ID NO: 26080 - DNA, 316 bp, Gossypium hirsutum
  Clone ID: LIB3147-043-Q1-K1-C10
gccacacttgcagccacgcgatctgccaaattgatgctgaatgctcaaggcgcaaaacttgtggctctactgatttcacttacatgataaatgaataagggagtgggattaccgcctatgatacggatgacccataagaccaatcatctgcagaatcttatgcaccgagataatgtatatggtcgatcaggtcgcatgcctttttatgcttagagagacacggaatggatgtgtccacgacacaacagctgagctcaactatattgcgctgaacaacttgcatatactaacacatgaagaactctggtaacttgat

SEQ ID NO: 26081 - DNA, 427 bp, Gossypium hirsutum
  Clone ID: LIB3147-043-Q1-K1-C11
gaaacaaagaagagaaagaatggcttggatatggttggaagcagcacttcccctcggaatgatagctggaatgctctgcgttatgggcaatgctcagtatttcatccacaaagcttatcacggccggcccaagcacatcgggaacgatatgtgggacgtcgccatggaaagaagggataagaagctcttcgagaacctctcttcctccgattgatccctttttagttttcttctggaaacttggtcgatgttgtgagagaagaaataaaaagtgctctatgatattctgtaatgctgaagaagactaaagagcagatgaactcgagtattttctttttcatggtaatgttaagcatgaacttctgaaatgttgcacttttgacacactttctaatgtttacgctggtggtgtattggagatttgttg

SEQ ID NO: 26082 - DNA, 385 bp, Gossypium hirsutum
  unsure (1)..(385): unsure at all n locations; Clone ID: LIB3147-043-Q1-K1-C12
cccacgcgtccgctccacaggggtctggttaataaggagaaggttaggatctcatgggcaggtttctgtgagccaccgaaggataagatcatccttaagccactcccggagactgtctctgagaccgaacctccactgttccctcctcgtacctttgctcagcatatcgagcataagctgttcaggaagacccaggataatctgtccaactgaaactagcatttttatttgtcgcgataacctatttctttctgtactctgatgaatgctatatttcgttggggggttaaacccttggttgtggcgtctgtctccactccttggctcctctttacctgttttatttgaataatgagagctgatttggtcttttattaannaaaaa

SEQ ID NO: 26083 - DNA, 414 bp, Gossypium hirsutum
  Clone ID: LIB3147-043-Q1-K1-C2
cggacgcgtgggcggacgcgtgggtttcaatatatggtcctttcatggtaagctactctaccggatactgaaggatcatttcttccagttcttgtggcgcccaaggcccccacccttcttgagcgctgagaaggaggaagagatattaaaatacttgaagaagtacagtaagaagtatgatgcagaggaccaggatgtttcgatgctattgagcgaacaggatagggagaagagaaggatgttgaaggaagaatgggagaagtggataagcgaatggaggcgggcaagtgaggaagagaagttggagaggcagaagttgagggatggagaagcaagtgatgaggaagaggagtacgaggccaaagaagttgaagttgaggaaatcttggacttctccgaagaagtcctttttga

SEQ ID NO: 26084 - DNA, 437 bp, Gossypium hirsutum
  Clone ID: LIB3147-043-Q1-K1-C3
cccacgcgtccgtagggtttttgattccttagtttctttctgtcatctttatattcgatcaatcaatcatgactggcaaagccaagccaaagaagcacacagccaaggaaatagcagcgaagatcgacgccgccacaaccaatagaggcggcggcaaggccggattagctgaccgttcaggtgtggagaaaggtggacatgctaagtacgagtgtcctcattgcaaaataacagctccagatttgaagtcgatgcagattcatcatgatgccaagcatcccaaggttccctttgaagagtcaaagcttgtgaatctacatgctgttcatgtggttgagccttccaagcctcgtcctggtgttaggggtagccttaaaaagtgataataaaaaaacccaaaaaatgtgtttttcgtcaagctttggtgttttgtgatg

SEQ ID NO: 26085 - DNA, 416 bp, Gossypium hirsutum
  Clone ID: LIB3147-043-Q1-K1-C4
cccacgcgtccgtgaaaaggctacagttttttacaaagacgaatcgacctcggcagcttggatgaccatgaagtctggcataaggaacatacttccaaactctgaaatatgcgattttgagttcgaaccttgcggctattctatgaattcaatcgaaaccgatgctatttcgaccattcatgttacacccgaagacggttttagttatgcaagcttcgaagctgtgggctatgatctgaaagagttgaatctggagcagttggtgcaaagggttttagtttgcttcaaaccaagtaatttctctgttgccgtgcatgtggatgttgattgtcactcatttgaacagacctgtctgctggatgttaaaggataccgttgccgggagagtagcatcgaagagcttggttcagggggtt

SEQ ID NO: 26086 - DNA, 381 bp, Gossypium hirsutum
  Clone ID: LIB3147-043-Q1-K1-C5
cccacgcgtacgtctaaacatcctgattttataaaacttactcattacaacctaaatagtggagcaaggggggaacacatgggttgtgtgctgttcgcacgttgttgaatcactgcaagcatgaatgacgaccttatatgacatacatttgctcttatgtttactacaaatggaagatggcatatttaagcccttaaatgctatatgaatttccatttaaataaaggagacgaggtttaccatggatactatgccatggtacaatttcctagatgtgaattgatcaatagacgggaagaagtactaaaggtttacgtccaaataataggactgtacactacattgacgacaatgatgatgcgtcgattgttctaatcgaac

SEQ ID NO: 26087 - DNA, 217 bp, Gossypium hirsutum
  Clone ID: LIB3147-043-Q1-K1-C6
ctttgatatttatgttactattatagtttgaagtggtgaaagctttgtagcattttgggtgtataggttaagtgggagttgtgttgaaagctcctattacaacgccacagtggaggtgaacagtgtttgaataatcaaagctattttgtgtgtttgacaaaaaacaaaaaaaaaaaaaaataaaaaaaaaaaaaaaaaaaaaaaaaaaatatataat

SEQ ID NO: 26088 - DNA, 399 bp, Gossypium hirsutum
  Clone ID: LIB3147-043-Q1-K1-C7
gcaagctcaaaggacaggttcaagagagagttggacggtattcaaatagagctgcaggcaactgacccgactgagatgggacttgatgttattcgaagccgtgccaactaaattggcatctccaaatggcaggaataatggagatggtaaaatgctttctgcttttgtttcaagtgaaatgttaatagtttggtggggtggtatgattttggtttgttgttcagatgttatatccaagtctttgtctagaacaagtttagcaatttccatttgaatcttatgattctgttatgcatgtctcaaagttatcggacggagtgtcttacagctgagtcgataaacaaaagtctcatcttcttgaagagtatatgaagcactcttttttgaggggttttttcc

SEQ ID NO: 26089 - DNA, 385 bp, Gossypium hirsutum
  Clone ID: LIB3147-043-Q1-K1-C8
cccacgcgtccgtttttttttaaacaaattcagtagaattatccactgtaaatgtgaaggaagaaaaaccaaaagtacctcactccacaaccttcatagtatccatcaaacaaaatacataaaaacaaagcaaagagatcataaaacataaccattacaaactttttccatgtaaatacgagtaatacggagacgcttcgatgcatgtttctttttttcgtatagaaaaaaacccaagaagaaatgcattcaaatcaggacacacaccggagagaatcaataaccctgatcgaggagataatcgccgagcctctcgacgatcatgttgcattggccgggtgacattcgttcatgatagattccgatgaacaacgccatattggtc

SEQ ID NO: 26090 - DNA, 429 bp, Gossypium hirsutum
  Clone ID: LIB3147-043-Q1-K1-C9
cccatgctttcaaacatgggagaatattcttttgcaatatgcatgatctttgatgactatggcgagaatgagcactcttatggccattatagttgaatctgcacagtccgaggacgcgataactgtctttattgcaaaaagtgcagttcttgctatgccattgacttgccatataatcatttgttcgttgagaactcgatgcgctatcattgtcccatattttatcagtacctattcgattctttgaaagataccactgtgatcaaatgttgtcacacaatgcactgcgaatgttactatgagatgatcattcgtatcatatattggtgtcctatgtgcgcaaactccgtaataattatgtgtataacctggaatacgatataccaagagatccaacctactgctttgtcttaggactaccggttcatt

SEQ ID NO: 26091 - DNA, 422 bp, Gossypium hirsutum
  Clone ID: LIB3147-043-Q1-K1-D1
ccttcttcctcgtctgtttgcttccataatctatttatttgtattttcatgctgcaaacactacttttcagtccttaataaattgcttcaaatgacatctgcttggtttatttgcttcaattgattcactcatttcgagctctgtaaatattggtttattataagcatcttggtgatcatccatgggttcaggaaactggcttagatcattcatttgtttaaagaaatataaaccaaacagatccaaacaagcaaagaccccatcaatacaggtacactcgagtaatgaaaaatcaaatggtgatgaaagggtagaagaacatgagggtcctgaagtggcagcggctgggagttcacaaagcagtcctggaattgccgttgaacaaagagcggctgctaaaattcagaaggcatttcggtct

SEQ ID NO: 26092 - DNA, 383 bp, Gossypium hirsutum
  Clone ID: LIB3147-043-Q1-K1-D10
aaaaaaaagagatgcgttcgaagaagatggtaggaacttcggcccccagtttgcgtcgaggtccttatgaagttttatgcgtttcaagggattcttctgatcaggagatcaaaactgcttatcgaaagctcgctctcaagtatcatcctgacaagaatgccaacaatcctgaggcttcagaactttttaaggaagttgcatattcttatagcattttatccgacccagaaaagaggagacaatatgacactgcagggtttgaggctgttgaagattcgatggatatggagattgatttgtccaatctaggaactgttaatacaatgtttgcagcattattcagcaagcttggtgtccctatcaagactactatctcagctaat

SEQ ID NO: 26093 - DNA, 331 bp, Gossypium hirsutum
  Clone ID: LIB3147-043-Q1-K1-D11
cccacgcatgcacccattctatggcgaacgttttgacggccgcatcactcaacgaggatcgacttttatcttaacgtactactatctctctcatttgtttccacaaccattgacatgatggccctatctatgtggtaatgttcaaactattgatgctctattcctttctttccatgtatcattcaactatgatgtttaatatgatgtttgcagctaaaaagtgattgtgatgcttattccttatattttctttattttcacattcaaggtattttttctccaccgaaaacatttattttcaataacatgttgaattgtaataaattattaa

SEQ ID NO: 26094 - DNA, 389 bp, Gossypium hirsutum
  Clone ID: LIB3147-043-Q1-K1-D12
cccacgcgtccgaaattttatagcaagactccttatttctccgatgtcgatcttcgaatacaacgggagtgccctaatagccatggtaggcaagaactgcttcgccattgccagcgatcggagactcggagttcaactccaaactatcgccaccgatttccagaggatttataaagtccacgatcgcctcttcctcggtctctccggcctcgccaccgatgctcaaaccttgtatcaaaggcttgtctttcggcacaaactgtatcagctaagagaagaagagacatgaaacctgagacttttgctaaccttgtttctgcgattctttacgagaaaaggtttggtccatacttctgccaacctgtaattgctggataggagatgaagac

SEQ ID NO: 26095 - DNA, 345 bp, Gossypium hirsutum
  Clone ID: LIB3147-043-Q1-K1-D2
ctatcgaagagcaaaaaaaaggaaaagaaaagaaaagaaaagaaagagatattgtttactcctgaactatcttcatataatctcagaaagcacgagctgtgtaaaatccgtcggctctacaaaagagtttaagatctaacattccgcctcttaaattctatcagatctgcgtcttgctgattccatcttacattttcattgatagactttttctttggttagatccgtgatggatttcatgaaggtctttgatcagacggttcgcgaaataaagagggaggttaatctaaaggtattgaaggttccggagatcgagcagaaggtactggatgctacagataatga

SEQ ID NO: 26096 - DNA, 433 bp, Gossypium hirsutum
  Clone ID: LIB3147-043-Q1-K1-D3
cccacgcgtccggaaaaaagaagcaaaaaaacatggccaaagttctgttgttcattgcactatgtgtgcttccagctttggttagtgctacacgcattctgaataatcaattggtggtagaaggctatgtgtactgtgatacttgccgtgctggttttgaaacccctaagactagaagcctagctgatgccatggttaggttggtatgctccgacaggaagagcggccaagttgtcttcaaaaaggagggatacaccgacaaaaccggaaaataccagattcgtgtatccgaggatcacttggatcagatctgtgatgcagttcttgtgaagagctcccagcttggttgtgccacaatgtcccccggtcgtgaacgtgcccgtgttatcttgaccaacttcaatggcatttcatccaccacccgttatgccaa

SEQ ID NO: 26097 - DNA, 372 bp, Gossypium hirsutum
  Clone ID: LIB3147-043-Q1-K1-D4
atccgaattccgagtcgactcaggaatggcaactggaacagcaccaccaagaggaagcgcagcagcagctgcaaacatgcggaggaggagaacgtcaagcggtgcaggtgcctcgggaggagctgctggcacaatgcttcagttttacacagatgatgccccagggctgaagatctctccaaatgtggtgcttgtcatgagcattggtttcattgcttttgttgccattctccatgtcatgggcaagttgtattttgttcgtaaggagtagggaggggctttcttcaatacctgtattaacaagtaccaaacaaagatcaatgttgtagttttcagttttgcttaataaatggattttgatttgatttctcc

SEQ ID NO: 26098 - DNA, 421 bp, Gossypium hirsutum
  Clone ID: LIB3147-043-Q1-K1-D5
caactctacaagtgtgatccagcgggccacttttacggtcacaaggcaactagtgctggatcgaaagaacaagaggcaattaatttcttggaaaagaagatgaagaatgacccagcttttacttacgaggaaacggtgcagacggccatttctgctctgcaatctgttcttcaggaggatttcaaggctactgagatagaggtgggagtggtgaaagctgataatcctgttttccgagtgatgtcaaccgaggaaatagatgaacatttgacagccattagcgagcgtgactagcgagctcagaccatcaagagccgctgcaaaaatctctgttatcaatcgaaaatgacaaatgtgctttagtttatcatatcatgtttgagagaggatagaaaaaggggtttgtagcttcaaattatgt

SEQ ID NO: 26099 - DNA, 398 bp, Gossypium hirsutum
  Clone ID: LIB3147-043-Q1-K1-D6
tcgcccacgcgtccggtgtaattcattgtcatatttcagatgagtactggaatggttgggggtttccaataggtgaatgatatacttggaaggggattgctaatgggggacatgatgctgttgttgaagttaattgtaatttggtttggccatgacctgactttgctcaattgcattgtgttcttgatgaataaatagccctaattatatcagatatcagtccaccatatatcaattctaataaaagtgaaggagtttcgattttgaaaaaaaaaaaaaaaattaaaaaaaaaaaaataaataaaaaaaaaaaaaaaaaaaaattttatttaaatattttatataataaatttatatatatttttttaaaagggggggcccttttaaagattcaaatt

SEQ ID NO: 26100 - DNA, 105 bp, Gossypium hirsutum
  unsure (1)..(105): unsure at all n locations; Clone ID: LIB3147-043-Q1-K1-D7
acccacgcgtccggnccgtcttcaactttccaatttcattattatcttaaacctaaactttgtaatcgccgtcaaaattattccatctttgacacatttcaatgt

SEQ ID NO: 26101 - DNA, 345 bp, Gossypium hirsutum
  unsure (1)..(345): unsure at all n locations; Clone ID: LIB3147-043-Q1-K1-D8
gtgagacattgttttgttgtgagatagttttttggtagagatgcaaataacctggtatgataatgataatgaaatagttacgtgtgatgagaatttatcgctgcagttgggaatagtagtttttaccttttttacgcatttaaagttttggattggttcaaaaaaaagaaagttctggattggttaaattctgaggatggtccctgtacttatctatttgtctggatttagtctgtccctgtacttatcgatttgtgcggatttagtcctctacttttatttgctccnnanaaaaaaaaaaaaaaaataatttaattataaatatttatattttaattaattttt

SEQ ID NO: 26102 - DNA, 321 bp, Gossypium hirsutum
  Clone ID: LIB3147-043-Q1-K1-D9
tgttgatggtggatttgacaacaatgaactataatatgaagaaactcacaaaatattcatgtggcctagctatgcaactcttccttttccatctgtggagttgcctgagaaggtgctgttgtttttattattagactagaaataatgagaacattgagaaattaaatatgtagccaaaattttgtcacctgtcagtagtagatactcgtagagttccatcaattcaacattgcaagaaaatggaatcgtatgtataataaccatattgttgtactgatttttgttatataataatgaaaagaatatatgttcttttctcgt

SEQ ID NO: 26103 - DNA, 212 bp, Gossypium hirsutum
  Clone ID: LIB3147-043-Q1-K1-E1
cccacgcgtccgcccacgcgtccggatacccagtttcatacaagaaccactgtggactttgactgagggatgatgcctcatctgccaacctgctctcctctttttgttaactgtagccgccgcggctttcgtttttttttttttttgaatatgaaaacatgtgtcgatgaataatgcaggatcagtagcctaatacaaattcgacttacatg

SEQ ID NO: 26104 - DNA, 302 bp, Gossypium hirsutum
  Clone ID: LIB3147-043-Q1-K1-E10
gctgtgtctttgcagagtatcgggtagtcctttcaatcctcagccatggcggaacagacggagaaagcatttctcaaacaacccaaggtgtttttaagctctaaaaaaaatgggaaaggaaagagacctggaaagggcgggaatcgcttctggaaaagcattgggttaggctttaagacacccagagaggccattgaaggaacatatattgataagaaatgcccatttactggcactgtttctattagaggccgtatccttgccggtacttgccatagtgcaaaaatggtaaggactattat

SEQ ID NO: 26105 - DNA, 444 bp, Gossypium hirsutum
  Clone ID: LIB3147-043-Q1-K1-E11
atccaagtcagatactaagagtgccaagctatccgtgaaatccaaagctggaaagaaatcggggaaggctgccaaggatccaaacaagccaaagaggcctgctagtgccttctttgttttcatggaggagttccgtgagcaatacaagaaggatcaccctaaaaacaaatccgttgcggctgtcggcaaagctggtggagataaatggaagagcttgtctgaagctgaaaaggcaccttatgtagctaaggcagaaaagcggaaggttgagtatgaaaagaacatgaaggcctacaataagagacaggctgagggtcccaaagacgaagatgttgagtctgacaaatcagtgtctgaggtgaatgatgaggatgatgatgaagaaggcagcggagacgaggaagatgatgagtaggaaggtccgtggtggatagcataatcaat

SEQ ID NO: 26106 - DNA, 176 bp, Gossypium hirsutum
  Clone ID: LIB3147-043-Q1-K1-E2
gcgtaccagcatgggctagagagagtcgtatcagggagactgccctatgcaatgctaaaacctgaccctgttttaaagaatctcttgcttatcataccaattcggaaaataattttcaccaatgcagtataataaccatgctgccagggtgctcaacaagttgggattggaggact

SEQ ID NO: 26107 - DNA, 434 bp, Gossypium hirsutum
  Clone ID: LIB3147-043-Q1-K1-E3
attcaaatgcactttttgatcagaatgatgagatagaggaagatgagagtgggtgggaaactgtcagccatctcgaggatcagggctcaagttactcaccaaaaaggagtgctgcatctgtcaccaggaatcaccgggacagcaatttctcgggtagtggaactgaatgggaagaaaatgcatgtggagataccccaatcactgaaattagcgaagtttgttcattacctgctaggcagtcgaagaaggcgtcgtccataacgaggctttggaggtcatgcccgaataatggagaaaattacaagacaatttcagtagaaggagcaaacggcagactttcaaatggaagaaagtctaatgggggtattgtatccccagatcgaggatccggtaaaggtgggctcagtccttcaatgggacagtggagttcacct

SEQ ID NO: 26108 - DNA, 411 bp, Gossypium hirsutum
  Clone ID: LIB3147-043-Q1-K1-E4
ggcgattcggtgacagggatggataccgtggaggtccacgaggaggcggtgatttcggtgataagggtggtgcgcctgctgattatcagccttcattcaggggccctggttcaaggcctgcttttggtcgtggaggcggtggttatggtggtgccggttctgcaagcggcgcaggtcttccatgagttttgtcagtttaggttgaatggcacttcctagttcattttggggtgtgcttttttgcactcaaatgattgagattatctatgttcttttttcccccttgtttttgatgcttttgttgcattgattttccttgtttgaattagacagtaaataccgaagttgtgcagctcaatttcggaagaaacattaattattataatatataatgaaatcagtatctttggc

SEQ ID NO: 26109 - DNA, 364 bp, Gossypium hirsutum
  Clone ID: LIB3147-043-Q1-K1-E5
cttgacaagaagaggaagcccatttctaaggaggaggcaacagcaatcaagtcagcaggcaaagcatggtatcagactatgatctccgacagtgattacacagagtttgagaacttctctaagtggttgggtgtgtctcagtaattttagtttttgatttagatatttgttgcagtcaatgttgtcaactttgttatggtgttgtctttttagttattttgatgttttgagttgtgggtggaaggaaaattagtgaaatatcatgctctaatacgcttctgttttgtcctcctcccctgttttcgcattctatggctagtggaatagtttctataatatgagaacaagaaattaatcagtttac

SEQ ID NO: 26110 - DNA, 365 bp, Gossypium hirsutum
  Clone ID: LIB3147-043-Q1-K1-E6
atggcacaacaatggctggtttaaaggctattggttataactttgagtatgatgattttcatagtttcgttcatgggagactgccctatgcaatgctaaaacctgaccctgttttaaggaatctcttgcttagcataccaattcggaaaataattttcaccaatgcagataagaaccatgctgccagggtgctcaacaggttgggattggaggactgcttcaaaggattatatggttcgagaactttaatccaataaacaaaaaaacccttcaacttgtgatgatatcaaaccagacactgccatttgtgacatcaatggatactgcagtgctgttcttgattctgagcttaagcttccaagtac

SEQ ID NO: 26111 - DNA, 431 bp, Gossypium hirsutum
  Clone ID: LIB3147-043-Q1-K1-E7
cggacgcgtgggcggacgcgtgggcggactcgtgggcccacccacaccaaactccacccgtcttcgtttccgtttccctactgctacttctattttctaaatcccaaaatgggaaggtctccttgctgtgagaaagctcatacaaacaaaggtgcatggaccaaagaagaagatgatcgcctcatcgcttacatccgagcccacggtgaaggttgctggcgttctctccctaaggctgctggccttctccgttgtggcaaaagttgcaggcttcgttggatcaactacttaagacctgacctcaaacgtggcaacttcactgaggaagaagatgaactcattatcaagctccatagccttctcggcaacaagtggtctcttatagccgggagattaccaggaagaacggataatgagataaagaattactg

SEQ ID NO: 26112 - DNA, 427 bp, Gossypium hirsutum
  Clone ID: LIB3147-043-Q1-K1-E8
gctgtgtctttgcagagtatcgggtagtcctttcaatcctcagccatggcggaacagacggagaaagcatttctcaaacaacccaaggtgtttttaagctctaaaaaaaatgggaaaggaaagagacctggaaagggcgggaatcgcttctggaaaagcattgggttaggctttaagacacccagagaggccattgaaggaacatatattgataagaaatgcccatttactggcactgtttctattagaggccgtatccttgccggtacttgccatagtgcaaaaatggtaaggactattatcgtccgaaggaactaccttcactacatcaagaaataccaaagatacgagaaaaggcacagcaatatcccagctcatatatccccctgctttcgtgttaaagaaggagatcatgttataatcgggc

SEQ ID NO: 26113 - DNA, 439 bp, Gossypium hirsutum
  Clone ID: LIB3147-043-Q1-K1-E9
cccacgcgtccgcccacgcgtccgcccactcttccgcccacgcgtccgggccttccagttgcctgaattgaagacactaaaaagctgtgatttgctatcttccagctggatttctgtttcatggtatccaatttacagaatacctactggacctacattaaaagatttagatgcttgctttctgacttaccattgtcttcatacacccataggaggtggagaaagtgctcaggcaccttttattacttgtcccaatgacatggatgatgttccaaagatgtcattgcctgtctttggtcttgcgtcatacaagttcaagggctccttgtggacacctaatggaacaactgattgtcacttggcaaacagcctctttcaggctgctgacaattggttgagacttcttcatgttaatcaaccacatttcacaatttttctg

SEQ ID NO: 26114 - DNA, 429 bp, Gossypium hirsutum
  Clone ID: LIB3147-043-Q1-K1-F1
gcgaaacttcgggcttaccaccacactgctcaaaccaaggctgataaaaaacatttttcaaacatgggtttggaccttttgaatggaaccgttcgtaacaacttagaagctggagtcattgagcctgcaatgagcaaagtgaagattattcagtttgcaactgaagcagccataacgattcttcgaattgatgatatgatcaagcttatgaaagatgaaagtcagaacgaagagtaggggagatgggacttctgttgataaggatgatggttgtaggttaatacaaaggaaggattgggatgcggttttaagaaaattgaagcaggttttcatgttttttttttgttgttgttatatatcgttttattgggtttaaaacgaatataatgtttgttttcagcgattaatagaccagcgttccgttttttg

SEQ ID NO: 26115 - DNA, 402 bp, Gossypium hirsutum
  Clone ID: LIB3147-043-Q1-K1-F10
cttcgctaaatcatgtgcagcttaaaaggggatcttttcattcaataccgcagcacataacaatgggcgtacatcttttgctcggacactacaactataatgtaacattgacacacatcataaaaatccctttaagactatctcagtgaattaaaaacagcttcatatcactccttaatgtcctaaatattctggacaaaaacccgttaaatatatattcatataacacttccctgctatatatataataatatagtttgtgagtgcagactcctaagattttatgtaatttctattaattatgtgtattaattaaaagtggagagcttgatgtaatatctttctttcttgtttaatactagcatataacagtttatagttaaaaaaactcaattctaaaaa

SEQ ID NO: 26116 - DNA, 399 bp, Gossypium hirsutum
  Clone ID: LIB3147-043-Q1-K1-F11
atcatcgtttgctttatacaaaatctggcaactactcatctacatttgtttacatggactggatattcggtactgacaagggttacagaaaattgaaagcactaaagcgtgatggagtcgaagaagaaagcaagcaaacataaccgagaagatgagttttcgaaggctttgaccggcagaaacaccggttaccgataaaatgtcatgttgaggaagggtttttctcattgtgagcttcttctgcatcttgtgtgcaaatccacctctgtttttttggttgtttaaattgctgttttatgttttgtagcatcataggattaagatttgtttgaacatttagcgacctggtcatctccgtgttcctcgcatgaatgaagttgctgtcttatttttattttt

SEQ ID NO: 26117 - DNA, 403 bp, Gossypium hirsutum
  Clone ID: LIB3147-043-Q1-K1-F12
gaaaaccggggcggaccacgccgtcgataggtcacctctgcagttcttctaaggtctagcggcgacaaagctgacacaaccacgggcgggtctctttatggggggacgactcaccatattaatcatgtcgtgcatcccccgtagacgaaaactcaggacaaagagttattatgacgaagcttttcggattattgcctacccagcatgctacactaaaatactgatacatttgatctgatgcatgctgcacttatctatagcatactatgcgactctgtctgagacatgaaagtatgattcagactcagatcagacctccctttgatcactatgtgcatccaaaaatacgagcacttcatctgcatccacattttgtttgttccatgctttaacaccatgaatg

SEQ ID NO: 26118 - DNA, 269 bp, Gossypium hirsutum
  Clone ID: LIB3147-043-Q1-K1-F3
cccacgcgtccgcccacgcgtccgtgatcaagccgctgaagttgatgctacggttgaggaaaacactgggtgaattcagcatcggaatttttgtttttgttctttttttttccttctaaaacttcatccttttgctgctagaatttaagaaaaaaaaaagactgaaggctttgcttctttattaggtatacgaggaactggcatttttgcctgctgcttccgttatttgatagtttaattttataagtactattctattcgtggcttct

SEQ ID NO: 26119 - DNA, 172 bp, Gossypium hirsutum
  Clone ID: LIB3147-043-Q1-K1-F4
gatttcttgtagtgtcttcgtttgtaatcctagaagctatgaacttgtcaaatagttttaattaaacatataactgaagataaataagtagtatatattaagttcccttttgttctcgttaaggaaattgtatgttctaagcagaatgtaagcctaatatatgtttatattt

SEQ ID NO: 26120 - DNA, 389 bp, Gossypium hirsutum
  Clone ID: LIB3147-043-Q1-K1-F5
aatcacaccaacgtgcggtttattaacttgccaatatttagaacacatcaaaacagtaaacataacctcgattgaagtttaagtaacagaaaacaagcactaatcctaaccaactgaaactaaaaaaattctttaattgtacatgcccatttcattaatacattgccccctatgtatgccaaaaactaagctgccaaaacggcaaccaaatctcagaacctcagaagcatttgtgtgtcaatacctttctatatgaaaaaccagcacaaataccaaaattaagctgtccgccaaagaatgcaagtacaacaccacagcaaaaaacaaagtgttgtaatgttcattcatttctaaatgagacttaaaaaccggaaatacctcgcgggtgt

SEQ ID NO: 26121 - DNA, 321 bp, Gossypium hirsutum
  Clone ID: LIB3147-043-Q1-K1-F6
tacccacctcgaaaaaaaaaaaaaaaaaaaaaaaaaattaaaaaaagggcgacatataagggcgagttacaaccatcatgcacaatactctttatagggccctattaatcctgccgcgttttacacgcaactggaaaacctgcttcccaacttatgcttggcaatccctttgcactggcgaatacaaaggccccccgtccccttccaacattccatctgaatgcaatggaccccctgacggtcattaaccgcggtgtggggttacccaggtaccgtaccttccaggcctaccccgtcctttgtttttcttcttttcgcacg

SEQ ID NO: 26122 - DNA, 366 bp, Gossypium hirsutum
  Clone ID: LIB3147-043-Q1-K1-F7
cccacgcgtccggggcatttggactgcctgcatgctttgtagatggaattcattgctcagagttaattgacgaattcattgttgacatttcatagtaacatgttacattttatgagttttacttgttccattatcaatactatgttgattcttgtttgtccaagaaaaaaaaaaaaaaaaaaaaaaaaaaaaaaaaaaaaaaaaaaaaaaaaaaaaaaaaaaaaaaaaatggggggggctctttaaaagatccattttttcctgcgcgtatatgacaatatatattcttttttattgtgcccccaaattaaaatattgtggcccgtgtttaaacaccgagatacttgaaaaaccctggggacccaa

SEQ ID NO: 26123 - DNA, 433 bp, Gossypium hirsutum
  unsure (1)..(433): unsure at all n locations; Clone ID: LIB3147-043-Q1-K1-F8
ggccaagatccaagacaaggaaggcatcctcaccagaccagcaaaggctcatctttgccgggaaacaactcgaggacggtcgcaccttggccgattacaacatccagaaggagtcgaccctccatttggtattgaggcttcgtggtgggatgcagattttcgtcaagacgttgactgggaaaaccataactttggaggtggagagttccgatacgatcgacaatgttaaggcgaagattcaggacaaagaagggattccaccagatcagcaaaggttgattttcgctgggaaacagttggaagatggaaggactttggctgattacaatattcagaaggaatccactctccaccttgtcttgcgtcttcgtggtggtttctaagctctcctatgaaaatgaggtttctggattntatgtgaatgattgtgatg

SEQ ID NO: 26124 - DNA, 400 bp, Gossypium hirsutum
  Clone ID: LIB3147-043-Q1-K1-F9
atcctccctagtcatcattcaggcttcagtttcatcatctgattttggtaaccttctgccggggagattaaagcacttggctcacaccatcacagagtctcctgctaacaatcttggtcttaataactcagtctttggcaaagttaaaagcattactttatcatcttatctcaagggtacacttcatgctactgctcccactgcttcaccagctccatctccagatccatctatttccccacatccttcttttaggcctactcatgctgcagcatcatcacccaagagtcatcatccccaaccttgccgtaagtgtaaagctgcttctccatctggtaatactcccctgcattcaccaggtcctgaaagtggtccctacccttatgttcctcctatgatt

SEQ ID NO: 26125 - DNA, 431 bp, Gossypium hirsutum
  Clone ID: LIB3147-043-Q1-K1-G1
caaggaactcttttgagagtgcagtaacaaagcttagagcaagtggggagaggaagtcagccttctttggggttgtcttgaaccagatgggcttggcttgtgtccaattattcaagattgacgaggctgccgagttgtttgaagaagcacgagcaatactcgaacaagaatgcggcccatgtcatcaagataccctgggagtatacagcaatcttgcagcaacttatgatgctatgggaagggtcgaagatgcaatcgagatattggagtatgtactaaaattacgagaagaaaaacttggaatagcaaatcctgattttgaagacgaaaagaataggctggctgagctcctgaaagaagcgggcaggccacgcaacagaaaagcaaaatcactggaaaatctcatcgatccgaactcaaagaggacggcg

SEQ ID NO: 26126 - DNA, 199 bp, Gossypium hirsutum
  Clone ID: LIB3147-043-Q1-K1-G11
gatcaataggctcaatgaaagtcgtggtattcaccgttgaatctttgatgatgatgatggggaataatggatggttgtgatttatctagcttattatggttcttaaatatagtttttattttgattttggttgcaagctgtatatgtaatgttttctatttatatattaagcataaggtgatatgcgtttttttcttgt

SEQ ID NO: 26127 - DNA, 461 bp, Gossypium hirsutum
  unsure (1)..(461): unsure at all n locations; Clone ID: LIB3147-043-Q1-K1-G12
gaanncccgcggcgaggcacgcgtccgcaactagcaacatagaaagcacaatagtttaccaacaatggcagccaaaatattttgcggccttatgctccttggtctttctgcaaattcttctacggcgaccattttccttcaatgctcgcaagctactatatcttcccttcttcccccgtacctctcaccagcggtgtcttcgataagagaaaacccaattcttcaaccctacaagatccaacaagcaataccatctgacatcttacctttatcacccttgtccctccaacaatcatcagccctattacaacaattaccttagatgcattcattggcgcaaaacatcatggctcaacaactacaacaacttgtgctagcaaaacttgctgcctactctcagcaacagcagtttcttacattcaaacaactaagatcattgaactcctgcttcttatttcaac

SEQ ID NO: 26128 - DNA, 417 bp, Gossypium hirsutum
  Clone ID: LIB3147-043-Q1-K1-G2
aaactgctatgatgtacaaactggaaaaggtggcaactggggcagctacttttactacggtggtccgggtcgaaatgctaactgcccttgactcatttaaatccttaagaaaatgaaagctaagtaaccatcaactgttgccgaaatgaatattcatcaagccaagtgcatgcccttcttcaagctaagtttagactagtaaatttgtgaatcatggattcaccattagatggtagcaatacaggttaaatcaccttattaactctgccaaagatttgttgtgagaaagtgagggatctctagctgatattctttgtttggacatatgagtgtatattttgattttgctttttttttttggcgtgtatgcgtcattaaattctgcttaagcaatataagcacttgggtttgatattc

SEQ ID NO: 26129 - DNA, 431 bp, Gossypium hirsutum
  Clone ID: LIB3147-043-Q1-K1-G3
ttgttttctctgtttgccatttgccttaatcatcttcctctttctttaaaacttcttcctatttaatttctgactaaacttgcgctgaattccatggctactgcagaggttgtaacagctcaaactgcaatccatgaggagaaacctgaagaagtggtcaaggttgaagaaattgcaacagaagaggtagtggctgttgctcctgcaacagaacctgttgctgaagaaccaaaggaagcagtgcctgaagcagcatccgaagaaccccaggctccagaaactgaagccacagttgaaactgaatcaaaggaggtggttgaagagcccaaggctgtgactgaggagccagaagttgagaaaaaagaagaagagactcctgaggaaacagtagcagagccagttgcggaggagtccaaggagactactgagcc

SEQ ID NO: 26130 - DNA, 186 bp, Gossypium hirsutum
  Clone ID: LIB3147-043-Q1-K1-G4
cccacgcgtgcgcccactcgttcggagaaagctatgcagctaataaaaagcattgagaggccagtcctagcacctgcattggatcctgtcaataagctaaaccatgttgagctactcctgaatgaacatgagagaaagtcccagcagagtgatcctgaacgattgagaacaattgttccttcatat

SEQ ID NO: 26131 - DNA, 429 bp, Gossypium hirsutum
  Clone ID: LIB3147-043-Q1-K1-G5
cccacgcgtccggggcggctcagttgagagtttacaacttggggaacacatcgccggtcccagtggggcgattggtatcgatcctggaagggttgctgagcacaaaggccaagaaacatgtgatcacgatgccaagaaatggggacgtgcccttcacacatgccaacgtgacgttagccttcaaggactttgggtacaagcccaccacggatttgtccactgggttgaggaaatttgtgaaatggtacatcagttattatgggattcaatcaaaaacaaggaaggaaagtcaagctaccggtgaatccggctaaagaacattgagcttcatcatcaagcacatggttggttgggtgtttttttttttttttgaattttgggtttttggtcctacgaaaaaaaaaaggatcaaagtgttggaggtgttgt

SEQ ID NO: 26132 - DNA, 328 bp, Gossypium hirsutum
  Clone ID: LIB3147-043-Q1-K1-G6
cccacacatccgcttttagtagttatatttgtacttaaaagagcacctataacagagcgtgatcctaaacttgcttaaattctgactgcttttcttttttcttttcctttatttaatcctttatttttggaaacgcggctgacatttgctttgaacattgtttaaataaggctgaactgtttcacttctttcttgtttccatgcgaggacgttatatacattttcttttccccgttggaaagagtttatggatgctttcttgcgatcttttattcctggtatcaaacctttaagcttattgtaaaattttcccttccgatgatgcttt

SEQ ID NO: 26133 - DNA, 381 bp, Gossypium hirsutum
  Clone ID: LIB3147-043-Q1-K1-G7
tgttgaatggtacgggaagaatgctaagttgcgtgaattggttaaccttgtagttgtcggtggagatcggagaaaagagtccaaggatttggaagagaaggctgagatgaagaagatgttcgagctcattgagaagtacaagctgaacggtcagttcagatggatatcatcccaaatgaacagagttaggaacggtgaactttaccgttacatttgcgacacatagggtgcctttgtgcaacccgcattatatgaagcctttgggttgactgtcgttgaggccatgacttgtgggtttgccgacattcgcaacttgcaatggtggacctgccgagattatcgttcatggtaaatccggcttcaacattgatccttaccacg

SEQ ID NO: 26134 - DNA, 353 bp, Gossypium hirsutum
  Clone ID: LIB3147-043-Q1-K1-G8
aaatcgttgggctttttctttcctcttcttattggcctaaccctccaatgggggggggggcccacttaagcaagggtttgccagtcacaaagccataagttccacggtgcatgtgtgagtagccacaactgtgcgatggtgtgcaaggaccaaagtttcttccgcggcagatatttatgattccgtcgtcgctgcttttgcactaaactttgctaatgcaagcttgcccttatctcatattttaaggatttttcttgagtaaaagacccttatatttttcgtgcactcctatgattgtgttaataaggaatttcctaattacttttgttttggaagacaattttctgttcttt

SEQ ID NO: 26135 - DNA, 432 bp, Gossypium hirsutum
  Clone ID: LIB3147-043-Q1-K1-G9
aacaaatccataatctctgagtcctgtgtttcagttggaaaataccatgtgaaagaaagcgtctcctcaactctacagtcaattttcgataaatatggagacatagcagctaactgtcagttggaatcgtcttccatgcgtgcatattatttagagtgcttgtgtgctgtggttcaagagttgcaatccactccattcaatgaactgaccaaatcaaaagtaaaagaaattttttctgttcttaaggatgtagaatctgcaaacattgatgttagttggctgcgtgctctgctcaatgaaatctcagaagccatcaatcttgctagtcaacgacaaacttttgaagccaaaaaggttaagtatgaaagttcgttagagtctgtaaagaacgaactggaatctcgaatggaaaatctatctcagaaagaaaag

SEQ ID NO: 26136 - DNA, 309 bp, Gossypium hirsutum
  Clone ID: LIB3147-043-Q1-K1-H1
cgatgatggacagcctaggaccggtagggttcataggggagctctgcaacgggttccggctggtgatggactgccaaagaggattgatcacgttctacagcttgaataacaatcgcattatgtcggggttacatgacatgcgggacgatgaaattctttgcatgttgagcgaagggcatttagatggacatggcgctccgaaccaagatgactttcgtatcctgatgcttacgatacgccctgggtccatggatcacatgggatcaccataatgtgtgcaagaacatgatgttctataccactatatat

SEQ ID NO: 26137 - DNA, 399 bp, Gossypium hirsutum
  unsure (1)..(399): unsure at all n locations; Clone ID: LIB3147-043-Q1-K1-H11
atgttactgaattccttcaacgtgggagtttgttccgattgctacagaggaatgctgcgaaattagagaggaaacggcgtgttcatatggctctggatattgcacgaggcatgaattatcttcaccattgcaatccgactatcgttcatcgtgatctgaagtcttcaaatctcctagttgataagaattggactgtgaaggttggcgattttggtttgtcacgtctcaagcatgcaacgtttctcactactaagactgggaaaggaacgcctcaatggatggcgccagaagttcttcgcaatgaaccctccgatgagaagtccgatatttatagttttggagtcatattatgggaacttgctactgggaagatcccttgngagaatctcaactcaatgc

SEQ ID NO: 26138 - DNA, 439 bp, Gossypium hirsutum
  Clone ID: LIB3147-043-Q1-K1-H12
tttcagcattcagaaacacaccaagcgtttcgcactatcaacaacctaacaacaatgtcgagccaatatattagccctccttgcgcttcttgcccttttagtgagcgcatcaaatgcgttcattattccacagtgctcacttgctcctagtgccattattccacagttcctcccaccagttacttcaatgggcttcgaacatccagccgtgcaagcctacaggctacaactagcgcttgcggcgagcgtcttacaacaaccaattgcccaattgcaacaacaattcttggcacaatctaaacctacaaaccatcgtaacgcaacatcaacaacagtttctgtcatcactgagccacctaaccgtggtgaacccttgtccctacttgcaacagcaactactttcattcaacccactttctctggcaaacgtatcttcata

SEQ ID NO: 26139 - DNA, 410 bp, Gossypium hirsutum
  Clone ID: LIB3147-043-Q1-K1-H2
ggatatattaaacagggcagtacaggtaggcgtctcctaaaacttactggatctgaattccgactccactcagagatggcaacgggaacagctccaccaagaggaagtgcagcagcagcagcaagcctgcgcaggaggagaacaacaagcggtgggggtgcctcgggaggggctgctggtactatgcttcagttctacaccgatgatgctccaggactcaagatctctccaaatgtggtgcttgtaatgagcattggtttcattgcttttgttgcagttctccatatcatgggcaagtttgttcgtagggactaagaagtattccaagcgtgtagcaaacactttttctttttttttggtcttaacaggagcaaacacttcccattgttataatttttcaagtttcctct

SEQ ID NO: 26140 - DNA, 288 bp, Gossypium hirsutum
  Clone ID: LIB3147-043-Q1-K1-H3
ctgacacaaggatcacttacagaaagttcactggttcataagttcaaagaaaatggtggccatgtaatggtctttgaggctagatcaatctagagatcaatgactatggatgtgataaagcacacttctttttgcgccacttgcctgaatctaacatagtctgaaattcctgatctcgatgaatattacagaaaggtgatgaaggaatttgccgtggaataggagaaactttcagagcaacttttggaccatgtgtgtgagaatctttggttggagcctggttacctg

SEQ ID NO: 26141 - DNA, 427 bp, Gossypium hirsutum
  Clone ID: LIB3147-043-Q1-K1-H4
gcaagcgatggcaatggctgctctcagacgcgatgggaggcgtttcgcccctctgatctctccccgtccaattactgctgtccgatcctctcctatcgttcccactcacgaagatgagggtccgattggtgttcgttatatttcaacccaagtcgttagaaaccggatgaagagtgttaagaatattcagaaaattacaaaggctatgaagatggttgctgcctcaaagttgagagcagttcaaactaaagctgagaattcccgaggcctctggcagccatttactgcacttcttggtgatcttcccagtgttgatgtcaagaagaacgttgttgtaaccatctcttctgacaaaggtctctgtggtggaattaactctacatcagtcaagataagcaaagggatctataagttgaactctggccct

SEQ ID NO: 26142 - DNA, 422 bp, Gossypium hirsutum
  Clone ID: LIB3147-043-Q1-K1-H5
cccacgcgttcgcccacgcgtccggagagtgcagccgccatggaaatgatcaaagatgcgtgtgagaattggggtttctttgagttggtgaaccatggaatatctcatgagctgatggacactgtggagaggctgacaaaggagcactacagaaagtgcatggagcaaaggttcaaagaaatggtggccagtaagggtcttgaggctgttcaatctgagatcaatgacatggattgggaaagcaccttctttttgcgccacttgcctgaatctaacatgtctgaaattcctgatctcgaagaagattacagaaaggtgatgaaggaatttgcagtggagttggagaagcttgcagagcaacttttggacctgttgtgtgagaatctggggttggagcctggttacctgaaaaaagtgtttat

SEQ ID NO: 26143 - DNA, 395 bp, Gossypium hirsutum
  unsure (1)..(395): unsure at all n locations; Clone ID: LIB3147-043-Q1-K1-H6
ggcaaatatttcagagtgtgctgcctcatcattattgaccctggtgactctgatgttggtaagagcatgcctagtgatcactaagctacagcggatgacatatcttcataggttttgttctgatatagtttcttctattttttgggtagtttgaaacattaatgatactctgaaattcagaactttctttgttgccatcttgatgttcgacttgtgatgatgatattattggtctatgttctggaaattntgtgagtcaatttcgttttaagactattgccatctttgtattttgttctggtttacttctgcatctggataatctgttctatcttgctatcaatttgctcatttgtagtgttggaaaaaaaaataacaaaatatattttttattt

SEQ ID NO: 26144 - DNA, 423 bp, Gossypium hirsutum
  unsure (1)..(423): unsure at all n locations; Clone ID: LIB3147-043-Q1-K1-H7
accgccttttcaccgtcaatgtccgcggcatggctgcttgtgtgaaacacgccgcacgagccatggtggaactgaacgtgagaggaagcatcatttgtacggcgagcacgactgctagctgcggtagtgaaagggacactgattataacatgtcgaagcatgcggtgattggattgatgagatcggcaagcaaacaacttggagagcatgggattagggtgaacagtgtgtcgccgttcattgtgggaaccccattactctatcattacctgnggacggaggcggaggtggagcagttgtttgagccctacgcacggttgaaaggggtggtgctgaaagcgaagcatgttgctgatgctgtggtgtttcttgcgtcacaggactccgaacttattaccggacatgacttggtggtggatgctg

SEQ ID NO: 26145 - DNA, 304 bp, Gossypium hirsutum
  unsure (1)..(304): unsure at all n locations; Clone ID: LIB3147-043-Q1-K1-H9
ccggnctggaaaacccgggcccgacgactgctgcagctcatcaacattgatataactgtttggctataaacaggaaaggaaaatttagatatacagagctcttcaatctatgactttgggtgtatgattgattcattttatgaaatcaaagtttttgaacaagaatacatgtaaagaggactatatgatagaagaatatgaaaggagatccaaaaataaatatataaattttacggtttgaaaaaaaaaaaatataattcataaaaaatgaatcaataaatatataatatatttaatttggggt

SEQ ID NO: 26146 - DNA, 417 bp, Gossypium hirsutum
  Clone ID: LIB3147-044-Q1-K1-A1
cccacgcgtccgcccacgcgtccggttgatatgagcacaaatgctattaggagagctggggcaaggcttttggcccaggtggttgtgaaaatacctggatttaagttgctgaatatcaatggaaatttcatatctgatgaagggatagatgagattaaagaattgtttaaaagttcccctgacatgcttggttctttggaggacaatgatccagaaggagaagattatgaggatgaagacgaagatgaggagaatgcagaagaagggaatgaattggagtccaagcttaaggatctcaagatcgagcaaggagagtagtcatatgctatgcatcccagctgcttttgcggcatctgaaaagcctgtctattttctattttgatttattataaggtactatagctgtgcaacattagt

SEQ ID NO: 26147 - DNA, 283 bp, Gossypium hirsutum
  Clone ID: LIB3147-044-Q1-K1-A10
cccacgcgtccgcccacgcgtccgaatgcttacatgcctggaaaaggttatactcttcttttagactaaattaagccatggtgggtttgggcttcatggctatcaccattacagtatgcgcaaagagcagcttccattaatgaattcacagctgcaaggtggaaaaagatatctgctattggaaacaatacaatcggatacaatgtgcttcatcaacatggtttaccttccgctaaatattggggtttgcagaaagtcgaagttttggaagttcaggtcaggt

SEQ ID NO: 26148 - DNA, 334 bp, Gossypium hirsutum
  Clone ID: LIB3147-044-Q1-K1-A11
aataatattacatataatccaacacttgatctgagatattcattatcgagtgatgttcaaaccattgcttctgaatctgcttaactatgattttaaagatttcaattgagtatttttcagtgtattttttttatttcaatcttgaaaagaatctagtaggcttgcaatgtcttgataatcatcaaatgatgaatttggaaaagaaatcttaggacaccttcctacatagctttaatattaaagctatggatgagaagaacatttcctttctgatgatgagtgatgaccattatgcaagtaatgtcccctgtaattattctgtttttggtaacgt

SEQ ID NO: 26149 - DNA, 232 bp, Gossypium hirsutum
  Clone ID: LIB3147-044-Q1-K1-A12
cccacgcgtccgtgcaaaaaaaaaattattttaaaaaaaaaaaaataaaataaaaatggaggaaaaaaaaataaatattatataaaaaaaaaaaaaaaaaaataaaatgaaaaaaaaataaaaaaaaaaataaaatgaaaaaaaaataaaaaaaagggggggggctttttttggggtaaattttttttttcgggggttttggaaattataattttttttttggggatcctaa

SEQ ID NO: 26150 - DNA, 469 bp, Gossypium hirsutum
  Clone ID: LIB3147-044-Q1-K1-A2
accggaacggaatggccggacccgacccacgcggtttctataaacaaacagaaactgggtgtgaaacaatggcgtcctcggatcttattggcaagctcgagactgatgtcgagatcgatatttcttccgaaaaggtccaccatatgtggtgccacaagccgcaccatgttcaccacactagctctgaaaaagtacaaagatgcgatttacatgaaggtgaatttggaactcccggcgtcgttatctgctggagatatgtgcatgatggaaaggctaaaactgcaaagcaagtagttgaagttatggaccatgagaaaaagtcaataactttcaaaatgcttgaaggagatctgatggaggaatacaaaagcttcgtgattacaatccaaacttcccccaagagcgacggtaaaagcagtatagtgcactggactctggattatgaaaagctgcacgagggtattggaca

SEQ ID NO: 26151 - DNA, 311 bp, Gossypium hirsutum
  Clone ID: LIB3147-044-Q1-K1-A3
gagagatttaaaagaaaaatggctgacaagcgtcttgtattttatcatttgcataaccttgttggttgctggaaaatatggtacatgcccctgggggcccttttatttgcctatttttgggggtttttttattttacaataacacaccgttttcggcatattctgtgaacagaagcagaaaaacatgcgggagcgctctaacgcttaagagccttacgccagggcgggcgtcgctctgacgcctctgtgcctgcttacttgggggggctcgatttaccggggtccagattactgcgctgaagatgcttacc

SEQ ID NO: 26152 - DNA, 373 bp, Gossypium hirsutum
  Clone ID: LIB3147-044-Q1-K1-A4
cccacgcgtccgaatctttcggaggaagactacaaatgtttcatggagtcactaagtgatgaagattatgaaactaagcagaatatcacagccccaacaaatcatagcaatggcaatgaaattcgtgtgggtataaaggactggtggacaaagagcaagtatgcatacctaaaccaaccagccattgagtctacagacaaaccaaggcgacgagcatccacttatataccaaactttctcaattataaacctgctcctttatatcctacatcacttggtgtcttttagaccactgagatcgaggagctttttcaacttccaattgattgcattacctccatatcagggcaatatattgatacgcatttacttt

SEQ ID NO: 26153 - DNA, 284 bp, Gossypium hirsutum
  Clone ID: LIB3147-044-Q1-K1-A5
cccacgcgtccgccaagtcaccgccgtcttctaaccctactccggctcccaaggtttctccaaccatgtctccaaccactacaccaaccgcatctccgccgtcaacatacactcccccgtcttcagcccctgaatcttcaccaacttcctctcccaccacttctcccccagctcctcccgctggttctcccgctggttctcccgctggctctcccgctggctctcccgctagcgctgtttctcccacaaactgcatcagcgatacaccaagcagctctcccact

SEQ ID NO: 26154 - DNA, 195 bp, Gossypium hirsutum
  Clone ID: LIB3147-044-Q1-K1-A7
tcgcccacgcgtacggcggaggtatggcataagtctgcacttctggtgttaaagaattgcgaggagactggtcttgcattgggcttttcttttctgttagttttgtagggaaactgatgatatatttactagagatatgcttacgttgtgaaatgttcggaatttgaataagacctcccctttctttgtctggtc

SEQ ID NO: 26155 - DNA, 395 bp, Gossypium hirsutum
  Clone ID: LIB3147-044-Q1-K1-A8
gtgggagaaacgttccttattacccacaaatcatcaatgagattattagtggccgcttgggaataacaaactgtcatttttaggtttggggaaaagtgtattgggcctcttaaaactgtccctggtggggagaacattcccccccttccatgtgggaaaaaacacttggagacatttttgtctttgggcgcgaactattattactttcttcaaggggggtctctccctctttcttgcttttctgtgttctgatttgaaagaaggattgaatggtggcgaggggtcagaatatctcaatataaggcagtacacttgctgtttatgtctaggatggatgtggactggataatcttggatgtttgaaattcaaatctaaaatctacttaatttaggac

SEQ ID NO: 26156 - DNA, 433 bp, Gossypium hirsutum
  Clone ID: LIB3147-044-Q1-K1-A9
gcctgaccttaacattgtctccaatgctagctgcaccaccaactgtcttgctccattggctaaggtgatcaacgataaatttggcattgttgagggtcttatgaccactgttcattctattactgctacacaaaagactgttgatggtccttccatgaaggactggagaggtggtagagctgcttccttcaatatcattcctagcagcactggagctgccaaggccgtcggcaaagttttgccagcactgaatggcaagctgactggaatggctttccgtgttcccactgttgatgtctctgtggttgacctcactgtgagacttgagaagaaggctacatatgatgaaattaaagctgctatcaaggcggaatctgaaggcaacttgaaaggaattctggttatgtggacgaagattagtctcaactgactt

SEQ ID NO: 26157 - DNA, 439 bp, Gossypium hirsutum
  Clone ID: LIB3147-044-Q1-K1-B1
aggggatagacgaagacaaaggtacacaaatcagaaagttgtatgtcgagcttgcagaattgtggccaaatgggatcatgggcaaacatggtataaaaagcgcaatttgtagggcaaaggaacgtagaagggcattgtgtgaacatgataaggttagagagaacaggagaaagaagtcggcacagaaaacaaagaccggtgttgtaaaagcttgttcagtttctcaattgcaggctgagcaagagaatcaagcttctgcgtctagtggtcacgtattagctttgccttgtatgacaatttattgtaaagaaaccctggaccagcaccttgctgcaccacttgaaagttgcagtgtgccaccaaattcgagtctggatatttctgaagaagagaagaatgagaaaatgattatcccaatgctgaaaaagcaaatgaagca

SEQ ID NO: 26158 - DNA, 337 bp, Gossypium hirsutum
  Clone ID: LIB3147-044-Q1-K1-B10
gtgaataccaggcgtaaggtcgactggttaactgacaagatgcgaagccgtgaccacacagtgtctgccacccatggagacatggaccagaatactcgtgacgttatcatgcgtgaattccgctctggttcatctcgtgttctcatcaccaccgatctccttgctcgaggtattgacgtgcagcaagtctctctagtcataaactatgatctgcctactcaaccagaaaactacctccaccgtattggtcgaagtggaaggtttgggagaaaaggtgtggccatcaactttgtgactacagatgatgagaggatgctttttgacatccaaaaagttc

SEQ ID NO: 26159 - DNA, 357 bp, Gossypium hirsutum
  unsure (1)..(357): unsure at all n locations; Clone ID: LIB3147-044-Q1-K1-B11
gttatataatttttgctatggcttggctatctcatgcatgattgggacatttttgctcatgtttttatgagccgagccaagctttcactaatgtctagaaatcgttgcccagaaagttttggactgatactgctactgtattcttgctctggatatatgtatatacatacgtatagatataagcacaatatttgaaacgttactaattcatattagatattctttatgcatatattttcttggccangacaaaagcaatgggccgggtgaacaggcagatgaacttgccgtcgttgcagaaaattatgcaagaattcgagatgcaaaacgagaagatggagatgggtagtgaagtaa

SEQ ID NO: 26160 - DNA, 433 bp, Gossypium hirsutum
  Clone ID: LIB3147-044-Q1-K1-B2
cttggtgtcggccttgttgaattcttctaaattgcagttgaagaaggtgttctcttcattcaaggatgtcaaagtcattcagttctcttcaatgcaggatgcttttcttggtttcactgacaagacaagagaggagaaattcaggaaacgtgtaaagcagtatgtaggtatatggtgctgtgttgagaaccacattcctggacacatatattatgacatgtattgggacgagaaaccgggttggaaacctgttccacctaaaaccccagaggacgatcatccacctttctgaagccctctcttcaccctcttatcaaaaaggttgcccaagttctggccttgggaggtagaaaaagagacagagacagtggcggggacagtgacagtcacagcgtttcaaagctgctatggttcctaacacatcgtcaaaaac

SEQ ID NO: 26161 - DNA, 434 bp, Gossypium hirsutum
  Clone ID: LIB3147-044-Q1-K1-B3
cccacgcgtccgcccacgcgtccggaaaaacccagagccaaaaaaatggccaaattattgctgttcattgcactatttgtggttccatgtcttgttagtgctacacgcatggtgaagaacccgttggtggttcaaggtcaagtttactgtgaccattgccgtgctgggtttgaaacaccaaagactagaaacatggctggtgccaaggttaaggtggtatgttccaaccggaagaccggtgatgtcgtgtacgagaaggaaggacacacggattcaaccggacaatacaagatcgctgtctccgaggatcatttggatgagatctgcgacgctgttctcgttaagagctcgcagccggagtgcgctgaaatgtcaccgggacgtgaacgtgcacgcgtggtcttgaccaacttcaacggcatttcatccaacac

SEQ ID NO: 26162 - DNA, 331 bp, Gossypium hirsutum
  Clone ID: LIB3147-044-Q1-K1-B4
cccacgcgtccgaaaagccacagcagtagtgagagactgagagtcagccgggctcttactttcaattatataatttgccaatttagggtttcaattcaaaatgaaacttctaccgatttgatgtgtttgatagaagaagatttggtgctacttacgcaattcttgcctttgttttaactcgatcgtccatgtactcagtttttttttcttttcttttttaaaattttattttagcttctttgtgctcctgaatgctctatactatctgctctgagcatatatccgcttttactcttcacattgtggaatggaaatgaatgatttggaagtc

SEQ ID NO: 26163 - DNA, 395 bp, Gossypium hirsutum
  Clone ID: LIB3147-044-Q1-K1-B5
cccacgcgtccgcccacgcgtccgcccacgcgtccgcccacgcgtccgggagctcaacatattgggtaataccagggggaaggctattgatagggttccccttccccctcctctttatggagctggttcttttagcaactcgaaactttcgtggtcgagcagttttcgtccaagtgcaccttcttccgctagacgtgaagcaccagtccaaaccgctcctcctgcaagttctgcttcagataatcatctttgccctatttgcatttgcaatgcaaaagatatggcctttggttgtgacatcagacctgttgtgagtgcggacaagaccttcagttgtgtcccatctgccgaggcacaatcgatacgagaataagactctattaagcataatatgc

SEQ ID NO: 26164 - DNA, 390 bp, Gossypium hirsutum
  Clone ID: LIB3147-044-Q1-K1-B6
cccacgcgtccgattagagagatagagagggagaggcaaggtcttcagaaccaagagaagaaactgattgcagagataaagaaaactgcaaagcaagggcagatggagctgtaaaggtgatggcgaaagaccttatccgaactcgacatcaaattgaaaagttctataagctgaaatcacagctccaaggcgtatctcttcgaattcaaacattgaaatcaacacaagcaatgggagaagcaatgaaaggcgtgacaaaggcaatgggccggatgaacaggcagatgaacttgccgtcgttgcagaaaattatgcaagaattcgagatgcagaacgagaagatggagatggttagtgaggtaatgggtgacgctattgatgatgctctgg

SEQ ID NO: 26165 - DNA, 436 bp, Gossypium hirsutum
  Clone ID: LIB3147-044-Q1-K1-B7
gattcttgacgacaagtattcgcttggcaaatcactcaaaaacaaacaaatcgttgagctagcttcaatgggtgaccaaaagaatgctatcaacgttgttttaacagcatctgatgttgctgttgaagggttctgcatgagccgctgtgggactcatggctctgccttgggctccaccgatggtctcgtcaaggccaagaagcactccaagttcgcttacatttgggtgggtaactcccagacccagtgccccggtcaatgtgcctggccgttccaccagccaatctacggaccacaaagcgcgcctttgattgcaccaaacaacaacgtgggtcttgatggcatggttataaacttggctagcctctttgccgggaccgtcacgaaccctttcggaaatggttacttccaaggcccagctgaggcaccattggag

SEQ ID NO: 26166 - DNA, 436 bp, Gossypium hirsutum
  Clone ID: LIB3147-044-Q1-K1-B8
ggaatttcaacaagaatttccagtcacctgcaaggtcagctgagaagttaactcccgagctgacaagatcacctagcaaagccgccagcatgttttccgggacacaagaaaaatgtgctacttgtggcaaaactgcttatccactcgagaaggtaacagtggaaggacagtcgtaccacaagtcatgtttcaaatgctctcatggtggctgccctataactccatcaaattatgcagcacttgaaggcattttgtattgtaaacatcacttctcccaactttttaaggagaaaggaagctacaaccaccttatcaagtctgcatcgattaagcgcgcagctgcctccgttccagaagcttaaatccgtgtgttaatatccatatcatttcgattttttccttctttcctcgtgattgccggtgtgtttgatttatg

SEQ ID NO: 26167 - DNA, 414 bp, Gossypium hirsutum
  Clone ID: LIB3147-044-Q1-K1-B9
cccacgcgtccggttctagatcgcgagcgccgccctttttttttttttttttttttttttttttttttttttttttttttttttttttttttttttttttttttttttttttttttttttttttttttttttttttttttttttttttttttttttttttttttttaaaaaaaaaatgttttttttttaaaaactttttttgggggttaaaaataaattttttgcccaagcaaaaataaaaaaaattttgaaaaaaaaaaaggagtttttttgaattaaaaaaatttttttttcaaaggaaatattttgaagggggggtggatacccttgaccttttgggggttgggaaaaaattttatccaaaaatttgtttttataaaattggaaaaattcccttaccgccttttatttttt

SEQ ID NO: 26168 - DNA, 399 bp, Gossypium hirsutum
  Clone ID: LIB3147-044-Q1-K1-C1
ggatgaatgagtcaatcgtaaggagagccattctaatcatgcaccagagaggtgaagttgaatatcaacgagaaaggcatattatcgttcgtaaagtataaatcttgcggttgtaatgtttggaaccgaaattatcagggcagcagtttaattgcaagattaagttccaaattccagttgtagtggtggtcttgataatgaatgaccggactaacaaaaacttgtgtaatgttatgttgtacgtctctgcaacttgttttgatcttacattttaatggattcagtggatggattgtctcgagactgaattattttttttcaacaattaagaaaaaaagtaattgagggcaaaaacctgaaaaggacaaaccaacctcaagatccaccaagggcggaaag

SEQ ID NO: 26169 - DNA, 361 bp, Gossypium hirsutum
  unsure (1)..(361): unsure at all n locations; Clone ID: LIB3147-044-Q1-K1-C10
cccacgcgtccgcccacgcgtccgcccacgcgtccggattaaataagctgtttgctttctaaagcctgacattattcctattctcactaatgttgattttttggtacattttctttttctggtgctgcataaaactaagaatgtgttgtttttcattaccgactgtctttcacctttgaatttgacgagaaatatgatatgattcaacagatgatactttttcttctgtttgaagctaattaatgatagacaggattttagatgtgagtccnccaaacaaagctctaaaaaatcaaaatttaccatttcaatggaaaacaaataatgatccttggaactgtttgtgggaaaaaccttcccg

SEQ ID NO: 26170 - DNA, 204 bp, Gossypium hirsutum
  unsure (1)..(204): unsure at all n locations; Clone ID: LIB3147-044-Q1-K1-C11
gaaaaaagagccgacccacgcgtgcgnccacgcgtnncgtcaatggttaaaccctttctttttttgataagggtctggctgatggggttggcaaatttgtccgaatcgaacgttcttatttgattggacaaaggtattctttcttttttgggccgaccgattacatataccatgatgaaattttctttatttgaaactattctt

SEQ ID NO: 26171 - DNA, 347 bp, Gossypium hirsutum
  Clone ID: LIB3147-044-Q1-K1-C12
gttttaaaggtggaaggtttgttgctgttggattgagcttcttggtagtgtttttgttgctctaagttttctagtttcttttttgtttgtttcattttcagtttaatttatatagatactggagaataagtaaaggcttcagtgtggttatatttttttatattgtcttttttttttccttcttttaattgtgattatgttgtttttctcttggatagataaaggaaaggtttgtgattttctttttcttttttgcttggaagtttgattattgatgaaaaggcaaatgctatagatattggaatagacaaagttgtggttataaagtgatttacaggcaatttaat

SEQ ID NO: 26172 - DNA, 319 bp, Gossypium hirsutum
  Clone ID: LIB3147-044-Q1-K1-C2
cccacgcgtccgcccacgcgtccgaaaaattaatttaaaaaaaaaaaaaaaaaaaaaaaggggggggaaaaagaaaaaaaagagaagggtggggggggtataggggggtgggataaggaagggtgggaggtggagcaattgaggatatttgtggtgggattaattttgttttggttgggcgggcattagatggcggtaaatgtgtttgacttgctgtgctctgaaaaatttgttatgttttataaatatgcatgttgctaggggttgatcgttttggtgggcacggacacatggggattttttttatttttccctattt

SEQ ID NO: 26173 - DNA, 431 bp, Gossypium hirsutum
  Clone ID: LIB3147-044-Q1-K1-C3
caatcgtcgaacctgaaattcttgttgacggatcacatgacattcaaaagtgtgctgcagtgacagagcgtgttcttgctacctgctacaaggctctaaatgaccaccatgtcatgcttgagggtactcttttgaagcctaacatggtgacccctggttcggactccccgaaggttgccccagatgttattgctgagtatactgtccgtgccttgcagcgaactgtccctgctgcagtcccagctattgtattcttgtctggtgggcaaagtgaggaggaggctaccctaaaccttaatgccatgaacaagctccagaccaagaaaccatggtcactctcattctcattcggacgcgcccttcagcagagcactctcaagacctgggcaggaaaagaggagaatgtgaagaaggcacaagatgctttgctc

SEQ ID NO: 26174 - DNA, 393 bp, Gossypium hirsutum
  Clone ID: LIB3147-044-Q1-K1-C4
tgctgaagaaagagagattgtggatggagaagtgcagggttgaaacttgaagaagtttgtttgttagtttgtggtggtcagttcttattgtcactgtatggttaaatgttaaggcaattttggtttcttacacattgtaggtgttgagttatcttggtttgtttcaaatgttcaatttttttatctgattaaaaaaaaaaaaacaaaaaaaaaaaaataaaaaaaaattatattttaaacaaatgaattattaacaaaaaattaaaaaataagtcgcccttacaaaaaaataaaaaaaccttgaatggaaaaagaaaaaaaaccattaaggggggggtcttttaaaaaaatcaaaatttttttacccggttttttgaaaagtaaatttttttt

SEQ ID NO: 26175 - DNA, 335 bp, Gossypium hirsutum
  Clone ID: LIB3147-044-Q1-K1-C5
cccacgcgtccgcaacatcgttgtttgaagaaccctgagcagccgaccccccccccccccaaaaaaaaagaccaactaaactcaccaataaaaatggtggccagcaagaaaacgaagaagacccatgagagcatcaacaacaggttggctctcgttatgaagagtgggaaatacactcttggttataaaacagtgcttaagtccctcaggagctccaaagggaaactgattatcatttcgaacaattgtccaccgctgaggaaatctgagattgagtactatgcaatgctctgtaaagtcggagttcaccattacaatggaaacaataatgatct

SEQ ID NO: 26176 - DNA, 376 bp, Gossypium hirsutum
  Clone ID: LIB3147-044-Q1-K1-C6
cccacgcgtccggtcagggttcaaacccagcctgggtttgctaggggtctgtctgatggtcttcccaagtttgtcagatcagaaggtgctgttggattgtacaagggtattgttcctctttggggccgacagattccatataccatgatgaaatttgctttttttgaaactattgttgagatgatctacaagtatggtattcccactcccaaggagcagtgcagcaaaagtctgcagcttggtgttagttttgctggtggttatgtcgctggtgtcttctgtgctattgtttcgcatcctgctgacaaccttgtctccttccttaacaatgccaaaagagcaactgttggggatgctgtgaaaaagcttggattat

SEQ ID NO: 26177 - DNA, 380 bp, Gossypium hirsutum
  unsure (1)..(380): unsure at all n locations; Clone ID: LIB3147-044-Q1-K1-C7
aaggaatgtcatgtctaccacatctgtggtgacaacaggacttgtttcacaaaggtatggagaaaaggcaggaaaggttacaaatgaagggcttgatgcggcaggacatgcaattgggacagcttgggctgtgtttaagattagaaaggctcttaatcccaagagtgtcttcaaacccacaactcttgcaaaagctgctgcacaggctaatgctgctgaattgaagtccaaaaataacaagtaaacagagttgctttttagtttgaacaggaagacaaaaacagagatgcttgtaggactgcagttttccaaaggttgagaattctcaagtggattgtatttgtactttgcaattgatgtgaattactatgcatcttang

SEQ ID NO: 26178 - DNA, 454 bp, Gossypium hirsutum
  Clone ID: LIB3147-044-Q1-K1-C8
gaaagacgtaattaaatttctctctactaatgaggtagcatctcgcgaaaataagttgcgcttattgatgattctagctgccatttaccctgagaagtttgagggtgaaaagggtcttaatttaatgaagttagcaagactaccacttgaggatatgactgctgtgaataacatggcattgcttgcacctccatcagaggccaaaaaaagttcaggaagtgctttctctttgaaatttgatatgcataagaagaagcatgcaactaggaaagaccgcagtggtgggcaagaaacatggcaattatctcgcttttaccctataatagaggagcttgttgaaaagcttggcaaaggagaactatcaaaggatgattatccttgcatgaatgatcctagtccaacttcccatggcacatctcacactgcatctgtatatgaagctccagttgctcat

SEQ ID NO: 26179 - DNA, 436 bp, Gossypium hirsutum
  Clone ID: LIB3147-044-Q1-K1-C9
gaaaatggccgatcagcttaccgacgaacagatctctgagttcaaggaggcctttagcctcttcgacaaggatggcgatgggtgcattactaccaaggagctgggaaccgtgatgcgatcacttgggcagaacccaactgaggcagaacttcaagatatgataaacgaagttgacgccgatggaaatgggaccattgatttcccggaattccttaacctgatggcaagaaagatgaaagataccgactcagaagaggaacttaaagaagcattcagggtgttcgacaaggaccagaatggtttcatatctgctgccgagctccgtcatgtcatgacaaatcttggtgaaaagcttacagatgaggaagttgatgagatgatccgtgaagctgatgttgatggtgatgggcaaatcaactacgatgagttcgtcaag

SEQ ID NO: 26180 - DNA, 434 bp, Gossypium hirsutum
  Clone ID: LIB3147-044-Q1-K1-D1
cccacgcgttcgcgatcatgcctaatgccgcaccttgggcaggctatacaacatcaggtcctgctgccactggagtcatgactggttccgcctcattaaagaagtcaaactctggacccctgaatagacatgggggtcctgctaagaaatcatctggtccacagtctggaggagtaacaacaagtggacgccaaaattctggtcctattcctcccgttctccctgcaactggccttattacgtccgggcccatctcttcaggcccattgaattcctctggggctcctcggaaattgtctggtcctttggactctatgggatcaatgaaagtaaaaagttctgttgttaatagtcaggctgtgaatgttcttagccaagatgatgacttttctttcaagaggaacttcccaaagctaatattttgggcactgata

SEQ ID NO: 26181 - DNA, 359 bp, Gossypium hirsutum
  Clone ID: LIB3147-044-Q1-K1-D10
ctagcgccaagatttagtgttgaaaatctcgagaacaatggccaccggtgaactcgcctgtacttacgccgcgttgattctccacgacgatggaatctcaatcaccgccgagaagattgctacattggtgaaggcagcgaacttgagcgttgaatcttactggccaagccttttcgccaagctcctcgagaaagtcaacgtcgatgatctcatcaccagcgttggctccggtggtggtgctgcccctgttgccgttgctgctgcttctggtgcagctggcggtggtgctgctgcggcagcccctgctgttgaggagaaaaaggaagaagagaacgaagagagtgatgatgacatgggat

SEQ ID NO: 26182 - DNA, 314 bp, Gossypium hirsutum
  Clone ID: LIB3147-044-Q1-K1-D11
cgtcaatgaaagaagattaaaggagttgagagagaagcaccgatcagctgtaataactgcagttgaggaaagatcaaagggacttcaagattggaaggattgtcagggcctagcaactaagctatataattttaagcatgaccctaaatcagtgcttaccgaaacaaataagacagtgcagcttgttgattcacaaaaaaatgtggatcgctcttgttccgagtctgggtctgggaatgagaacaaagttcttatcagtctgaatggggatgctgagctagatgcagttccagatcttcaagatcaggttgtat

SEQ ID NO: 26183 - DNA, 292 bp, Gossypium hirsutum
  Clone ID: LIB3147-044-Q1-K1-D12
gctgagtttaagcatatcaataagcggaggagcgactgatgttgtttgtttatcagatgatgactaaccataaccagaaaaggtaattttgtataacatagatgcagttatatgcaatgcccgatccattttgagtcaagaggtagtagttgaaggtcagaaattgaagtgggaatttgcggtgaatagttattcaatttgtaatatatatattaatttagttgaaaaaaaaaaaaaagagaacaaaaaaaaaaaaaaacaaaaaaaaaaaaggggggggagaacctaaaag

SEQ ID NO: 26184 - DNA, 387 bp, Gossypium hirsutum
  Clone ID: LIB3147-044-Q1-K1-D2
gcgatagctgagttggatactctaggcgaggaatcgtacaaagacagcaccctcatcatgcaactcctccgtgacaatctcactctctggacctccgacatgcaggatgacggggctgatgatattaaagaagcaccgaagcgtgacgagcaggagcaacaacaaaagccagagcagtagtgagggtcagccgggctcttactttcaattatataatttgccaatttagggtttcaattcaaaacgaaacttctaccgatttgatgtgtttttgatagaagaagatttggtgctacttaagcaattcttgcctttgttttaactcgatcgtccatgtactcagttttttgcttcttttctttttttaaattttattttagcttcttt

SEQ ID NO: 26185 - DNA, 344 bp, Gossypium hirsutum
  Clone ID: LIB3147-044-Q1-K1-D3
cggctatggttcagacaagaagacacgtcactatctacctaatggctttaagaaatttgttgtacacaatgttggagagctcgaattgttgatgatgcacaacaggacatactgtgcagagattgcacatgatgtttcaacaaagaagagaaaagagatcgttgaacgagcagtccagcttgatgttgtggttactaacaagcttgcgaggttgcgcagccaagaggatgaatgaacatggaacttgggatcttgtacaccattcccattgcaaaattagcttgttattgaaagattattatttgtcaaaaaaaaagaggaaaaatttatcaggattttttcgc

SEQ ID NO: 26186 - DNA, 333 bp, Gossypium hirsutum
  Clone ID: LIB3147-044-Q1-K1-D4
aggaaattggggctggtgaccaaggtcacatgtttggctatgccacagacgaaacccctgagttaatgcctctaacccatgtgcttgcgactaaacttggtgccaggctcaccgaagtgagaaagaacaagacatgtcaatggttaaggcctgatggtaagacccaagtgactgttgaatatcgcaatgatggtggagccatggtccccatacgtgttcacactgttcttatttcaacccaacatgatgagaccgtcaccaatgagaagattgcagctgacttgagagagcatgtcattaagcctgtcattccagcaaagtatctcgatgaca

SEQ ID NO: 26187 - DNA, 356 bp, Gossypium hirsutum
  unsure (1)..(356): unsure at all n locations; Clone ID: LIB3147-044-Q1-K1-D5
caagagtctttcaagaagaacatcgagggggctactaaatttttgatgtcgaagcttaaagatctccaattttttgtgggtgagagcatgcatgatgatggtagcctagtgtttgcatactacaaggacggtgccaccgatccaaccttcctctactttgcctatggcttgaaggaaatcaagtgctaaatggagttttcacccgataccggaccggctttgttatacctaaagacttagttgtaattctagatataaggagttcttaactatctattttagnctttgttatctcttttaagtcatatttataatgtttggtttttgagggttatgaactattggttaaggatatg

SEQ ID NO: 26188 - DNA, 316 bp, Gossypium hirsutum
  Clone ID: LIB3147-044-Q1-K1-D6
cccacgcgtccgcttttaaactctctctccctctcctcttgtctccgaccgaaggaaccctcagcagtcccccgtgctgctgtcggggccaaaggctggagttgcgcgaaagggactctttagtcccattccaggtgaacccgaaaggccacgttctccaagctccgaaaataaaaaggtaaaagtccctctcttcctttttaggaaacgaccacggcgacggagatgagaactccgacgatgcggccacgagataaatccgacgtgtggaaggccggtggttgatgccctgagcgatggtggtggcgcgcgtgat

SEQ ID NO: 26189 - DNA, 414 bp, Gossypium hirsutum
  Clone ID: LIB3147-044-Q1-K1-D7
cccacgcgtccggttctagatcgcgagcgccgcccttttttttttttttttttttttttttttttttttttttttttttttttttttttttaaaaaattttttttttttttttatattttttttttttttttaaattttttttttttttttttttttttttttttaaaaaaaaaaaaggggtttaaaaaaaaatttttttaaagggttaaaaaaaaaattttttccccaccaatgaaaaaaaaaatttttaaaaaaaaagggaaatttttagggggtaaaaaaaaaattttttattacgaaaaaaataaaagggggtgggagccccttttgttttttcggggaatgggaaaacgttttaccacaatttttttttaacaaaatttaaaaaacccccgccaagccagattttttat

SEQ ID NO: 26190 - DNA, 439 bp, Gossypium hirsutum
  Clone ID: LIB3147-044-Q1-K1-D8
cttgaagcaaggtgttcttggtgctgtacttatcccctcggaagatgcaggaaaagagagggtgattgcttctttggtggctaatgtcgaagcaatgataaaagctgatcgaaaaattactgccttaaagcaattgcaaggtcatatatggcgtactggatttgagaataacgagcttgaaggagtagtttttgatgatgtaccagaagctctcgaaaagtggcatgcactgggtataaaggtatacatatattctagtggtagcagattggctcagaggcttatattcggaaatacaaactacggtgatttgaggaagtatttatctggatttttcgacaccgcagtaggatataaaagagaaacacgaagttatgtcgaaatcactgagtcattgggagttgataagccatccgatatgctatttgtgaccgatgtc

SEQ ID NO: 26191 - DNA, 416 bp, Gossypium hirsutum
  Clone ID: LIB3147-044-Q1-K1-D9
gagcaacttccgtgatcctgaaacctctgcagagttggaagttcaagaaaaaatgcccctgctcgaatggtttgccaacgagtacaagcgcttcggttgctctcttgaattcgtcacaaacaaatcccaagaaggatcacagttttgcagaggcttcggtggcattggaggtatcctccgctatcagcttgacataagatcattcgatgagctatctgatggagaagtttacgaggattctgaatgataaagcactgcttaaagatggtatgatggcttgagagcctatagagcccagatgtaatgcttcgtctttttacttatttcaccttttgattcaaaagtaactataaacacttgtggtttggtttttgctgaattgtgctgtctctgtcaattggattgtgattgcttgt

SEQ ID NO: 26192 - DNA, 428 bp, Gossypium hirsutum
  Clone ID: LIB3147-044-Q1-K1-E1
cccacgcgtccgccccggtattgcagatagaatgagcaaggaaatcactgcattggccccgagcagcatgaaaattaaggtggtggctccacctgaaaggaaatacagtgtctggattggaggctctatcttagcatccctcagtactttccagcagatgtggattgctaaggcagagtatgatgaatctggcccatctattgtgcacaggaagtgcttctagttcttcacaacgcatgaggtcctacaagcaaagcttaagaaagaatggagatgatgataagagcttcaacattcattcgtttttatttttatttcttccaatttagcagatgttttaacgattttcattcaatgaaacggcaacggatttgtgatttattatttctctagcttttctcccgtttgttatgtactcctcaaggaca

SEQ ID NO: 26193 - DNA, 313 bp, Gossypium hirsutum
  Clone ID: LIB3147-044-Q1-K1-E10
agcacaaaccaaaagccaaacaacgagtcaacctccagctttgagattggacagcttgaattgagatccataaagcgaaattgcaagctttgtgatcaaaagctggcatatggatatggaacagccaacaggtcattggtgtacaggcctgcaatgctttcaatggtagcagttgccgcagtatgtgtctgtgttgccctactatttaagagctgtcccgaagttctatacatcttccgtcccttcaagtgggaattgttggactacggaacaagctgaagtccaagtcgccctaagttggtaaccttcaata

SEQ ID NO: 26194 - DNA, 259 bp, Gossypium hirsutum
  Clone ID: LIB3147-044-Q1-K1-E11
gaaaaaagggaaaaaaaacgtacattgagagagggagcaaacagagagacccaattgaacaggctgaaaccagtgatatggaggagagggcttggagacctttgccttggagaaagctcaagttaggcgttcagagaagtttgaaatatggttatcatttaatgatcccaaaaagattgtttggcctgaaaaggacttgatgagcagtgctatgtgtatggttgcaatgctaacgtgcaaagattgataaggcttactg

SEQ ID NO: 26195 - DNA, 134 bp, Gossypium hirsutum
  Clone ID: LIB3147-044-Q1-K1-E12
tctactagtgttcagcgggtactcgctgtgaagaacgagggttggaggatgtaatgcgctatcgccgactggtcatagagcgcaagggagcttcatggctgagcttgaagggaaagaaaaatcgcttgacagat

SEQ ID NO: 26196 - DNA, 465 bp, Gossypium hirsutum
  unsure (1)..(465): unsure at all n locations; Clone ID: LIB3147-044-Q1-K1-E2
cacgcccgtccggacctttccaactccannaatttcaaatccctttgattctctttttggtcaacacaagacattcccacctcggacctggttagttacgccggtttcattcaatttcaccaacacttcccttttttggtttaaattgtcctaccaccgaatttgtcgccacccaaatctaatcccaaaatgagcctggttggtgggctcggtgcccattggagcctgcttaagaaagaaatttgagggaagatgaagcactccgagaagcttccagagcgttggtcttgatcaattggagcccaccggcattagtcggcaaccagcttggctgaaatcctcccgttatccgacacccccggtggcccatggaaagtatacggggtggctcgtcggcccagacccaactggaacgtcgaccatccaatcgagtacattcagtgcgacgtatccgacccgaatgac

SEQ ID NO: 26197 - DNA, 427 bp, Gossypium hirsutum
  Clone ID: LIB3147-044-Q1-K1-E3
cgaagttgatatccaactatcactctttaggtttattgcattaaataaatcatgaaatctttccttcctttctttgcattcctctcacttctcctgtttgtagacaccattgcagcagctaggaaagatgctggagagtactggggagctgtaatgaaagatcagcctatgcctgaggcactccaagagcttgttcggattgaggctgccgttgccaaccccgatgagaaaaccaagtgccatacatcaggtaacattgagcttaaggaagagaagattattgttaatgaggagttcgaaccaaggccaaacatttcagcttacggtgatgacgctaatctaaaaggagataaatcatcatcttttgcagaagattttgaaccgagacctaacatttcggcttacgggggcgatgatgctggtctta

SEQ ID NO: 26198 - DNA, 350 bp, Gossypium hirsutum
  Clone ID: LIB3147-044-Q1-K1-E4
gagcttctttctatctatatccttatcagctttcaaagatggcaggaatcgcctttggtcgcttcgatgattccttcagtttggggtctgtcaaggcctaccttgctgagtttatctcaactttggtgtttgttttcgccggcgttggctctgccattgcttacaacaagttgacaactgatgcagccctagatcccgatgggctagtcgccattgctgtttgccacggatttgctctctttgttgcagtggctatcggtgccaacatctcaggtggccatgtcaaccctgcagtaacttttgggttagctcttggtggccaaatcaccatactcactggcatcttttac

SEQ ID NO: 26199 - DNA, 346 bp, Gossypium hirsutum
  Clone ID: LIB3147-044-Q1-K1-E5
agaacatgttggaccttttaatcttggaaacccgggcgaattcaccatgcttgagcttgctgaggtggtacaagaaacaatagacccgaatgcgaagatagagttcaggccaaacacagaagatgacccgcacaagaggaagcctgatatctcaagagccaaagagttacttggttggcaacccaaggtctccctccgaaagggtctccctctaatggtttcagacttccgacaacgtatctttggtgatcacaaggtcggcagcagcaccaccaccaccaacgactcatcatcttaagatggcctatatactcttctcacagacagagcgataaaaatatattat

SEQ ID NO: 26200 - DNA, 307 bp, Gossypium hirsutum
  Clone ID: LIB3147-044-Q1-K1-E6
cccacgcgtacggagaaccggagctactgtcgtcgccgccgccatggtgaagtttctgaaatccaacaaggccgtgatagtcctccaaggccgatacgctgggcgcaaagcggtgatcgttagatccttcgacgatggaacacgtgatcgcccctatggccactgtttggttgcagggataaagaagtacccgagcaaggtcatccgcaaggattccgccaagaaaacagcaaagaaatcgcgcgtcaagtgcttcgtcaagctcgtcaactaccagcagctgatgcccacccgctacaccctcgac

SEQ ID NO: 26201 - DNA, 437 bp, Gossypium hirsutum
  Clone ID: LIB3147-044-Q1-K1-E7
ctctcttccaaaaaattttccccagggagtgaaaaggaacaaaaaatcttctactcaagaaaagagagaaagatcttccttagcaaaactatttgcaggaaaatcaaaaagaacagggatgagttattacaatcaacaacagcctccagttggtgttcctcctactcaaggttatccaccggaaggatatccgaaggatgcttatccaccaccgggatatcctccacaaggatatcctcaaggttatcctcctcaaggatatcctcctccttacgcccctcaatatcctgctcagcctcctcctcagcaacagcaaagtactggtttcttagaaggctgtttggctgctctgtgctgttgttgcctgctggatgcttgcttttgagaatccaactatgccaaatgcctcaaatgttgaaaaatcaaatgttcttact

SEQ ID NO: 26202 - DNA, 428 bp, Gossypium hirsutum
  Clone ID: LIB3147-044-Q1-K1-E8
gcagcatcgacgcctactccgctgcagttgttaaagttggtccctgtagcttacgtggatctcgagtaggaggttttggcagtcaagttatacttcccctggctcatactgtcgaacatgaagagttcttagaggtcattaaattggagggaattgcacaatctcctgaagatgcactaatgccaagagatgttttcctcctgcaactatgcagtggaatggatgaaaatgctgtgggcacctgtgccgagcttatatttgctccgatcgatgcttcttttgctgatgatgcacctcttttgccttctggttttcgtataattcctctcgattctgggaaggaagcctctagtcccaatcggactcttgaccttgcttctgctcttgagattgggccagctggaaataaagcatctaatgattactct

SEQ ID NO: 26203 - DNA, 386 bp, Gossypium hirsutum
  Clone ID: LIB3147-044-Q1-K1-E9
ggaaaagcagcgtcgccgtcgaaggagtgctgtaattcagtggcggggattaaagagaataaacccaaatgtttgtgttatattttgcaacaaacacaaacctctggtgctcaaaatctcaaaagcttaggtgttcaagaagataagctgtttcagttaccatcggcttgtcaattgaagaacgctagcgtcagtgattgcccaaagcttcttgggttatctccgagctcaccagacgccgccatcttcaccaactcctcctctaaagcaacgacacccagtacttcagcaaccaccgcaacgccgtcttccgcggcggataaaaccgatagcaaatccagtggaaccaagcttggtccccacttcgtcggttccacggcggcgct

SEQ ID NO: 26204 - DNA, 210 bp, Gossypium hirsutum
  Clone ID: LIB3147-044-Q1-K1-F1
cccacgcgtccgagaaattattgagaactgaaattaatttgtaaagtaaaatctgaccttttaaactgcagatatgagtagatcactgcagaaggattttgcaacttaagagtgcatcaggattaataattatagtggatatcaacagtttgttggcgcattcatagaccaaaaatagaataatcaccgaggccttgttaaaaaaaacaa

SEQ ID NO: 26205 - DNA, 253 bp, Gossypium hirsutum
  unsure (1)..(253): unsure at all n locations; Clone ID: LIB3147-044-Q1-K1-F10
ctaagatgtaccaaggtgccggcggtgacatgggtggtggcatggatgaggatgttccggctggtggaagtggtgctggtcctaagattgaggaagttgactaaatcattgattttcttcacctggtttctctattgttctcttatgttttttgggatttaaactgtttggttttgttgtttggtttctaatcggattgaaatgaacttttatagggtttgttccttttttgggatactatcagtngcnnnnc

SEQ ID NO: 26206 - DNA, 319 bp, Gossypium hirsutum
  Clone ID: LIB3147-044-Q1-K1-F11
gactccttttgttatcatataatctgccatgtctaggagaaccggtggggagccaacaggagatactacaaacctcgggcctgctgtacgacacaccgagcatgtttatggaggagatcacatttcagaatctattaatgacactgacattcatgtgactgatctgactggaagagagactatgattcttattacaagaggtatcatggtgaacaccaccagggatcaataaatagctcatgatactatggttacactacatgatgttgccctgagatgtaaggaacttctgatgactgccatgaacatcaaattacgt

SEQ ID NO: 26207 - DNA, 359 bp, Gossypium hirsutum
  Clone ID: LIB3147-044-Q1-K1-F12
ggcaagttgcttgaagttgcatgcataatgcttgtggcaattggtcaagattctcattttagcacatgccaaatataaaaatcacaatcatcatttccccatatcataaacaaaaaacttcaaagaattggaaggtgaagcagcatagtttaaaactcttcgaatatggtgtgatgcattgctctctacaataggattttaggtttttctttttaaagttgggatcatgcagctaaacatgggaagatatggaaaatggttaccaaaatatatataatattttccattcccacatgctgaaattcaatgattcaccctggttagttgctgataccctctaaatgtacaagttttttttt

SEQ ID NO: 26208 - DNA, 326 bp, Gossypium hirsutum
  Clone ID: LIB3147-044-Q1-K1-F2
gaaggttgaaaagcaaagaagcaagttaggagaagaagaacaagctgctgttcttttaatggctctttcttatggctctgtttatgcttagtgttttcttacttttattttaatttaaaaatatatatttagaacagaaataatacgatctttaatgggtatctaaccattttgaaatgtaatctttggttaatttgtagttttctttttagtgctaactttgttgttaattgtgggtgtttggagagaaggatttgaaggaaggaaagtgtaagaagatggaagttctattctatttttcttgaatcaacttgtattagtaattc

SEQ ID NO: 26209 - DNA, 401 bp, Gossypium hirsutum
  unsure (1)..(401): unsure at all n locations; Clone ID: LIB3147-044-Q1-K1-F3
attaaggagctcaccaaaacaggaggtgctattaaggaatttgttaaccccaagtataaagatgctagtaaaacatcatttaagtcctcaactcgactagagtgtatgatgcaagactatcctaaaacattgcctccatcagcaagagtcggatttacggtaatggatacgtggcttgcttatgcaccagtgaaaaacaaccctgaagatgctgctaaggtaccaaaagggaacccatatcacagtgcaacttctggagaaatggccatatatcgtgcgaacagtctcatccttcaaaaggcggnggtccaagtggaggatcctgtgcaacaagttttcaacggccaagangtggaagtgtggccacgggttacttgaaagcctaaatgggggatcacttt

SEQ ID NO: 26210 - DNA, 58 bp, Gossypium hirsutum
  Clone ID: LIB3147-044-Q1-K1-F4
aaaaaaaaaaaaaaaaaaaaaaaaaaaaattaaataaaaaaaaaaaaaaaaaaaaaaa

SEQ ID NO: 26211 - DNA, 362 bp, Gossypium hirsutum
  Clone ID: LIB3147-044-Q1-K1-F5
gaagacgagaacgacgtgcctgaacagctagaaccagatgtcataagtagtttaacttcactgattgatcatgacgaagaatgggatccaaacgactaactggatttatagacagtacgtttctatcttcatatatatcatcaacgggtgggaattcatttgctggagaactttcgacacggagagtagcaagtaaacatcattctttgatttccatagttacagtctctaatgtttttgaggtgaataaagtagtcaatttatttgtctttttcttttcttttattttatttttactagattcatagaaaccaaaagaattattccaatgtctttatacatcaaatagttgttctaacatg

SEQ ID NO: 26212 - DNA, 391 bp, Gossypium hirsutum
  Clone ID: LIB3147-044-Q1-K1-F6
cccacgcgtacggcagatatggccaagtcaaagaaccacaccgctcacaatcagtcttacaaggctcacaagaatggcatcaagaaacccaagagtcaacgccatacttccaccaaagggatggatccaaagttcttgaggaaccagaggtatgcaaggaagcacaacaagaagaatggagagtctgccgctgaggaagagtaaatttaaatggaaaagaaaattatcctttattaaagtttttctagttagggctgttttactatcttctatggaatttagtgttaaatttacgctcctttagtttttatattggtgatttatgggattgttgattatatttgctagaaaagatctgaagttgtgagcttattaatatcatgaacatgtt

SEQ ID NO: 26213 - DNA, 436 bp, Gossypium hirsutum
  Clone ID: LIB3147-044-Q1-K1-F7
cccacgcgtccgaagcgagatcaaaagccagcagcgcagcagctaaaagagcagtcttttgacaattattcgccatgggtaaggttcacggatctctagctcgtgccgggaaggtgagaggccaaactcctaaagtggccaagcaagacaagaagaagaagccccgtggccgcgcttacaagcggatgcaatacaaccgacgcttcgtcacagcagtggttggatttggcaaaaagaggggacctaactcatctgagaagtaagagatctatgtaggtgaagaaggcaagaagccttgttgaaagctttgatggattttaagtctttgttttcttttgataatgtttttatgatattggtttcaaggattggattgaactgccattttgtttgctagatattatgtgatattggtatcaaatatcttaatttttgg

SEQ ID NO: 26214 - DNA, 278 bp, Gossypium hirsutum
  Clone ID: LIB3147-044-Q1-K1-F8
cccacgcgtccggctttaccgtctttgctcccacagataatgccttcaacaacctcaaacctggtaccgtcaataacctggacccacaacagaaagtacaactagttctataccacgttattcccaaatactactccttgaacgatctccaatttgttagcaaccccgttagaacccaagctggtcaggatttcggcctcaacgtcactggcctgaacaaccaggttaacgtctcaagcggggttgtcgagactcagattaacaacgcattatatcaa

SEQ ID NO: 26215 - DNA, 279 bp, Gossypium hirsutum
  Clone ID: LIB3147-044-Q1-K1-F9
cccacgcgtccgtcgcgagggccgccctttttttttttttttattacatgttaaaatgagatggcagtgtttagattttaaaatttcgaccatctcgtaatctcacattacggctatcctgtaatatagggtgtaatctcttgttatagcttttgataattaacaagtccttggctgttgcacctctagagttatacatacattatatgattctgttggatgctaatggctttctaacgcttctaattaatgtcacaaaaataatataattggactctc

SEQ ID NO: 26216 - DNA, 163 bp, Gossypium hirsutum
  Clone ID: LIB3147-044-Q1-K1-G1
ggacattgtatttgtactctagtataatcatgtggataagaggcaacttacaagtccgagctgggatatggaattactgttgataaaaacatgaataatactaaaaatgacaaagcaaattgaagatgcaaaaattggcataattaacttgtacatttaaacc

SEQ ID NO: 26217 - DNA, 253 bp, Gossypium hirsutum
  Clone ID: LIB3147-044-Q1-K1-G10
cccacgcgtgcgaaaaaaaaaaaagtaaataacataaaaacaaaaagcgccggctgtgatgtattgttaaagcgtagctagatcataaatgcttgtggctgctcgattctttggttggctaatcttatggagtagaacgcgaatggaaatgcaatgtggggaaatggaaaaagatttcgtgtcgcaatgttgtaacagaacgaggctaagatgtttcatcagacttaaaaaatagagccagcgccagtttggc

SEQ ID NO: 26218 - DNA, 374 bp, Gossypium hirsutum
  Clone ID: LIB3147-044-Q1-K1-G11
gggagaaggtttataatctgttcttggagtacgctcataaaggaagcttggccgatcaggtcaagagaaatggtggaaacttgacggaacccgatgttcgaagatacgttaggtccatacttagagggctaagcttcgttcacgccaaagggttcgctcactgtgacattaagcttcaaaatattcttttgtctgggaatggcgatgtgaagatagctgattttggattagcaaagagaagaggagaaaaacaggggaggatggaaatcaggggaactccttcgaatattgcaccagagtctgttaaaggaaacgattatgattcagcagtggatatatgggcacttggatgcgccattgttgagatgtttact

SEQ ID NO: 26219 - DNA, 341 bp, Gossypium hirsutum
  Clone ID: LIB3147-044-Q1-K1-G12
cccacgcgtccggaaaaaggtaaatgcacctaaagcatctaccgagggaaagatagccttgcctaaagcaataaatgaagaattatctccaacccaactgcagccagcagtttctgctgctggttcagatgaaagtcagcgagacattgatcaagtggacttggttcaagagccgattgcactggagcattaagcatggcaatggtttcaagtggatgttcatatacaaagttcttgacctgaatttgcctaaataaggacgtctaagactgaattatttgatgatcaaggcataaaaaagattatacattaccggttatgatgttgtcttctccgatatc

SEQ ID NO: 26220 - DNA, 216 bp, Gossypium hirsutum
  Clone ID: LIB3147-044-Q1-K1-G2
cccacgcgtccgaggacataaagtgtgtgatcaactacgattttccttcgagtctggaggattatgtacataagattggtagaactggtcgagcaagagctaaaggaactgcttttaccttcttcacacaagcaaatgcaaagtatgctaaggaccttatcaagctcctgcaagatgctgggcaagttgtctcccccgcattgtctacattggctc

SEQ ID NO: 26221 - DNA, 228 bp, Gossypium hirsutum
  Clone ID: LIB3147-044-Q1-K1-G3
cccacgcgtccgcaaccagtttgtgtgtccgtcgtgctgtctattataaccctgagaccggaaaggaggatccgtcgaaaagtggtgtttgtagcaatttcctatgcaattgtaagcctggagataaagttcagatcactggcccttctggcaagataatgcttttgcctgaagataacccaaaagccaaccacataatgatagccactggaactggtgtagcttcct

SEQ ID NO: 26222 - DNA, 438 bp, Gossypium hirsutum
  unsure (1)..(438): unsure at all n locations; Clone ID: LIB3147-044-Q1-K1-G4
gagcgggtgggtgggtgagtgttttggggaagaaaacataaaaacaaaagcgccgtatttgattatagttttggagttgagagatcataaatgcttttgctgaagcgatacattggttggcagatcttggggagaagaaagtgaatggaaatgcaaggtgggaaaatggagaaagatttcgtgttgcaatggggaaacagaaagaggctaagatgtttcaacaaacttaaaaaacagcaccagcaccagtttggcgacagcggcggcggcacctctaccacgccgcactccttacctctgcccaacaagaagatgggctcctcgcctgttgccaatcgtctcanaatgaattcggatttgggaacaaataagtcaagatcggcattgacatctncggagaaggaagatangtactatgcaacaaggggatcggggttc

SEQ ID NO: 26223 - DNA, 450 bp, Gossypium hirsutum
  Clone ID: LIB3147-044-Q1-K1-G5
tgagctaaaagtcatcacaactatggaggcaatggtgcaagacatcatgaataagttgatgaaggctcgtgaaatggagtatgaagcagaggagaagagatttgagaagaagaaagctaatgttagaaaagacaaactgaagctggagaaggatgaagctgacttaaaagagaagaatttcgtgggcgcctagtgggagaaggtcacaagagagtagaggtttagggcgtgtttttcggagttttgtttctttctttgggaggtttaggagttcgtcacgttcaggttcagattctggatttacaaggagaagtagatcgagttcagtgttcggtagatcatcgagaacggatagcgactgggatttcgaggattgagtgatggtcgaatgtatcttttggtcattttgatgttagccttcctgtccccattactctgatactacaaata

SEQ ID NO: 26224 - DNA, 407 bp, Gossypium hirsutum
  Clone ID: LIB3147-044-Q1-K1-G6
cccacgcgtccgcggacgcgtgggcggacgcgtgggcaagatcgtgttcactttgtgaacaaaactctaacagtagctccatatttagctgccgtagatgttcttgttcagaattctcagggacggggagaatgctttggacggataacaatcgaagcaatggcatttcagttgcctgtgctgacagggaacagctgccgggggcacaacggaaatagtagtgaacggcacaacaggtttattgcaccctgctgggaaagaaggggtgacaactctggcgaaacatattgtgaaactagctacgcatgtagagaggaggcttacaatatgaaagagagggtacgaaagggtgaaagaaagatttctagaacatcacatggcagagagaattggtgaagtacttaaag

SEQ ID NO: 26225 - DNA, 408 bp, Gossypium hirsutum
  unsure (1)..(408): unsure at all n locations; Clone ID: LIB3147-044-Q1-K1-G7
cccacgcgtgcgcccacgcgtccggaaaagttggaggaaaattagaagacactgagctaatatatggaattactgttgataaagacatgagtcatcctcagatgccaaagcaaattgaagatgcaaaaattgccatattaacttgtccatttgagccacctaagccaaagactaaacataaagtagacattgatacggtggaaaagtttcagactctacgtcagcaagaacaaatgtattttgatgacatggttcagaaatgcaaggatgttggtgccacattggttatatgtcaatggcgatttgatgatgaggcaaatcatttattaatgcaccaaaacttgcctgctgtcagatgggtaggtggtgtggaatnggaattgatagcaatagctacaggtggaagga

SEQ ID NO: 26226 - DNA, 246 bp, Gossypium hirsutum
  Clone ID: LIB3147-044-Q1-K1-G8
ggattggcctcgacatgcgtgtgacagctttggtcaatgacacaattggcacattggctggtggaagatataacaaccccgatgttgttgctgctgtgatattgggtacaagcaccaatgcagcttatgtaaaacgtgctcatgcaattcccaaatggcacggtcttctaactaaagctggggacatgggtatcaacatggaatgggggaactttcgggcttctcaactttcaatattaaaatatg

SEQ ID NO: 26227 - DNA, 196 bp, Gossypium hirsutum
  Clone ID: LIB3147-044-Q1-K1-G9
gttgcagtagaaacatctgtgacagcttagatcatgttatatgttttttatgtcttttttttctattataggaaaaaaagaaaaaaggccatcaatgcctagtgggatcatattgtccacattcctttgttcatatgatgtaaatatattggtctcatcttcattatataatatatatacatatatctattttttt

SEQ ID NO: 26228 - DNA, 267 bp, Gossypium hirsutum
  unsure (1)..(267): unsure at all n locations; Clone ID: LIB3147-044-Q1-K1-H1
cggacgcgtgggcttgcaatcacaattgtaatagacaaagaattgctttgctccttggtgttgggggcccttatttctcccaagttgttcctatggtaagggccttccttgaccaattttcctgtcctggttttagtgggagttttgcattttcagctccactgttgtagagagattggaatgcctctggacatcaattgtctattcaatgtgtacaatgaaagataaccttttcttttcaaannaaaacactnggatgagaatttg

SEQ ID NO: 26229 - DNA, 424 bp, Gossypium hirsutum
  Clone ID: LIB3147-044-Q1-K1-H10
gaaggatgctgagaaggcagtatttgtggaggaagagaagaagaaagaggaagaggaatcgaaagatgagccagttgattccgatgctgaggacgacgatgatgatactgatgatggtgaaggaagtgagtcggattcaagcaaagatagtgctgaggaagatgcagtacaacatgatgagctataaagcaagaggaatacagtatttcgctggcaatttggttgagagctttaaacacaagtgcttaaattttcctttagtatctttttaagatgtagtcttattagtttttatttagataaaaaaagaattgaatgctggcaagagaaaagtttgagtgacgcgttttaatatgatttcattaactctgcctaaacgaagcgggcgttttatgacgaaaccaaattaatcaatgttttgaac

SEQ ID NO: 26230 - DNA, 399 bp, Gossypium hirsutum
  Clone ID: LIB3147-044-Q1-K1-H11
atttagcttcagctgttccgggcaaatctttcaatgcaccacctttgcttcagtgtacgagccatatgtgtccagttcgaattcactggcatgttaagctcaactacaaggaatactggcgtgtgaagatcacgatcaccaatttcaattacgcattgaactacagtgagtggaatctagttgtgcaacaccccaactttgacaatcttacacaacttttcagcttcaattacaaaccattaactccttatgctggcttaaatgatactgccatgttatggggacttaagttttataatgatttcctcaacgaagctggtcctcttgggaatgtgcagtcagaactattattcagaaaagatgcatcaacttttacttttgaaagggatgggcttttca

SEQ ID NO: 26231 - DNA, 379 bp, Gossypium hirsutum
  Clone ID: LIB3147-044-Q1-K1-H12
gcccctaagaagttgctagcatcagactctcgtctccggcctgatagatttgcacttgagaagggtgatttatccaaggccggttctgagaagagcaggttggaagagaggcagagagcggaaaagaggacacgagaggccaagggacatcagtttactcctagatggtttgatttgacagatgaaatctcagccacaccttggggtgacctggaaatctatcgcttcaatggcaaatacactgagcatcgggctactgtagatagctcagacggcattgatgaggttgacttggcttcaatcgagttcaacccatggcagtatggtaacttgtcaactgaataggtattggtgttctaatgtatacttctaaaacttg

SEQ ID NO: 26232 - DNA, 330 bp, Gossypium hirsutum
  Clone ID: LIB3147-044-Q1-K1-H2
cccacgcgtccgactggatccatggctcaaggacatgcctgcagtagcataaatgtctatcgattacagatggagtccgggtcagtttgattcatacctattgatttttgttttcgatgaagagttgtgttgtaccttgtttttcccccagccacaacataattggaattttaccatcataatgaagatttaaaaggctctgcgttgtgcctttaattcttgtcgtctgttaggaaacttaaattgagttcgatcagaacttgtgtcatttgtagaatgttgaaatttcataaacgatttgtctctttaatggaatacctttttattctc

SEQ ID NO: 26233 - DNA, 356 bp, Gossypium hirsutum
  Clone ID: LIB3147-044-Q1-K1-H3
gtgattacaaagtaataaacttggaccagtggataaattttctacgtttttgccaagagattagttttccagatcttggaaattatgattcagccctagcttggccgttgattcttgacaatttcgttgaatggatgagacaaaagcatggctagagttggcatctttttgtgtttcttgcagtttgctgattttataaggaccttgcaagaaccctaaccagtcaccatggagctggctcatttaactgattaaaccgaattgtgctgaaactgtgttttttttctgtgcatgataaacccctacaatcgtgttatactgagatcattttatacattctgcattcagtaaaatac

SEQ ID NO: 26234 - DNA, 375 bp, Gossypium hirsutum
  Clone ID: LIB3147-044-Q1-K1-H4
cgaattcccggggtttcctgacaagaagctgtttcttttcaattcccttagttatatactttcttttttacctttggtttgtgtacttgattatttgagtttctattaaggggtcccttcccctcaaaaaaaaaaaaaaaaaaaaaaaaaaaaaaaaaaaaaaaaagaaaaaaaaaaaaaaaaaaaaaaaagtaaatcaaaaaagggggcccggtctaacgtatacaataatcccacctaaaaccggctacctggacaccattttataaagctgagtgtggcaaaacactgagcggccggactgaaataaccgtgggggaaatcccctaaacgaccatacgtaaaatcctgataaggcccccacctttcaccctt

SEQ ID NO: 26235 - DNA, 222 bp, Gossypium hirsutum
  Clone ID: LIB3147-044-Q1-K1-H5
cccacgcgtccgcagcagcagcgtctgttgttggtattgatgaggatgaaactgaagatgatgtgacaattgatccggacttatgcggaacctggaataagaatcacaatactgaaaatcataaagcagatatacacatacaaataaagatcatgtatacgaagatcctgctccacatgtttagctataacgcaagaagaattcactatttcactggcaatt

SEQ ID NO: 26236 - DNA, 389 bp, Gossypium hirsutum
  Clone ID: LIB3147-044-Q1-K1-H6
catcaatgctgtgggcttcaagggcggcttcttatctcaggatctctgtcttccacagaggcttttccactgttctaaaggatctgaaatatgcggattctcatgagtgggtgaaggttgagggtgactctgccactattggtattactgatcatgctcaagatcatttaggtgatgttgtgtatgttgaattacccgaagtgggagctgctgtaaagcaaggtgaaagttttggagcagttgaaagtgtcaaggctacaagtgatgttaattctcctgtttcaggaaaagtggttgaagttaatgatgagctcagtggctctcctgctaaggttaactcaagtccatatgaggatggatgggatataaaggttgagatgaaagatgct

SEQ ID NO: 26237 - DNA, 268 bp, Gossypium hirsutum
  Clone ID: LIB3147-044-Q1-K1-H7
aaaaaatgactaccctttcaaattctttggttttatcggcaaatcctccccttcaactattttctggctctcatgggagtgccagctccaccaacttggtattcaattctagtcatttgaggaaactgcatatttctacctctagaaggcctctcaccgttcaagcttcgtacagtgatggcgaaaggtcaagcagtgctaatgcctttgttggaggttttgttttgggagggctcgtggttggtgcacttggttgtgtatttgcccc

SEQ ID NO: 26238 - DNA, 294 bp, Gossypium hirsutum
  Clone ID: LIB3147-044-Q1-K1-H8
cccacgcgtccgattgaaactgtgaaaagaacaggatgcaaatatactggcatcactctatcagaacagcaactgaaatatgctcaagaaaaagtgaaggaagctggactccaggataacatcaaaatacttctctgtgactatcgccagttacctaaggaacaccaatttgacagaatcatatctgtagagatggtagaacatgttggtgaagaatatattgaggaggtttacagatgctgtgaccaattactgaaagaagatgggctttttgttcttcagttcatatctatc

SEQ ID NO: 26239 - DNA, 272 bp, Gossypium hirsutum
  unsure (1)..(272): unsure at all n locations; Clone ID: LIB3147-044-Q1-K1-H9
cggacgcgtgggcggacgcgtgggcggacgcgtgggcggacgcgtggggcgtgagtgccataagttttcagttccacaaagggaatggaacaacaaacaaccgagctgctcaatctcatcagcgaactactactgccttagggaagccaacaacaccttcaaaatgggatgatgcgcanaaatggcttgtgggactgtcgagaagtagagacaaaaagacccactccaaagccaaacctcgaaactccaacgccgatgatagaagactaata

SEQ ID NO: 26240 - DNA, 251 bp, Gossypium hirsutum
  Clone ID: LIB3147-045-Q1-K1-A1
tgcgttggggacaattgctttgtggtgtggggaatattgtgtcactgccggcaactgtgcgacgtgttgagattttggtgggtaaaagatacgtcaataaagttggaataggacggtggctgtgcggcggttcctgccaatcccgataaggccaataatgttttcatcatattatcactcacaaacctttactgaattgcaactgtatgttctgtggattttattgaatcatatttctcatcattaggaac

SEQ ID NO: 26241 - DNA, 464 bp, Gossypium hirsutum
  Clone ID: LIB3147-045-Q1-K1-A10
cttacagaaaaacaccatcactgctcaaaaccgaaaagacccgaatcaaaatacgggcatggggatccatgcatgtcggattctaccagcatcggatctcgtcgcatccaatggtagctttgagacgtacttgggccgtccgtggaaattgtactctagggttgtgttcatgttatcatacatgaataatcacgtacaccccaagggatggctcgagtggaacaccacattcgccctggatacactatattatggtgaatacatgaattactggccaggagcggttatcgggcaacgaatcatgtggccgggatataaggttattactttctagattgaagcaagtaaatttacagtccaacaatatatctactgatcatcatggtaccatcaactggagttgctttcttggttggtttacaagtttaaagcttgaatgttgtatacattatgaattatttaat

SEQ ID NO: 26242 - DNA, 455 bp, Gossypium hirsutum
  Clone ID: LIB3147-045-Q1-K1-A11
ctcggagactcaccaaagcacgaaagccaggatctttcagaaaatggattcctattcgaagagtgcataaccgcatggataagctcacactaacccgtcaattttggatccaattcgggattttccttggggggtatcagtaaggaattggaatgtaataatattgattcatataggaggaaaaggttctctattgattcaaatgctgtacctatgggatagggatagagaaagaggaaaaaccgaagatttcacatagtgcttttgatcgaaaaatcaatctgatttatttcgtacccctcgctcaatgagaaaatgggtcagattctataggatcaaacctatgggacttagggaatgatggtaggcgactaaattaatgaaaaaacgcagtcctatcccaaattaatcgtcttgcagaacataccctttttgtcattttgtttaaaacaaaa

SEQ ID NO: 26243 - DNA, 241 bp, Gossypium hirsutum
  Clone ID: LIB3147-045-Q1-K1-A12
ctcaagcgaacggtacgaaaagtacgcgggtgcttgtatggaatcccgacggaatagtaagagcagtctatctcctggggctgagacctacccaccgatcgagatctatccacgatgaatatgtgctgctagattggcctttactgtgtctgagacaacatttgcacactttttttatgttaaactttactcaacgtaatattctgataatcccatcgggtaagcggattaaacttttttt

SEQ ID NO: 26244 - DNA, 101 bp, Gossypium hirsutum
  Clone ID: LIB3147-045-Q1-K1-A2
agaagccgactctccatggttacgacattttttgccgcccctttgggaagacctagggggagccactatgacctggtgagaagtaactattgtttgctgtt

SEQ ID NO: 26245 - DNA, 341 bp, Gossypium hirsutum
  Clone ID: LIB3147-045-Q1-K1-A3
cccacgcgtccggttgatacccttatagaggagtgcctcacgacagagccacgcaatgaatacattcaaagctgtgacattgttgcattcaacaagatttagaggacacagtttttttccacggctgttgagagtgccattggccatgttatcaccttttgccccttgctttcccctcgaatatatatatttttgcttgaactgtgctttgctagtgcttctgctctatagtgagcatagatgaaaggggatttcaagtatttaatgatgttctatgttttgatttagttaaagcttgcccaaagaattttagtgacattgcaaattgcttaagcggaaat

SEQ ID NO: 26246 - DNA, 320 bp, Gossypium hirsutum
  unsure (1)..(320): unsure at all n locations; Clone ID: LIB3147-045-Q1-K1-A4
cgcacgccttccgagttgctggcatattggtggcgaaccctccagatactcagtgctgctcagcgctaggggggcttgtggatttggaagctgcagtgtgtctttgcactgccattaaagctaatgttcttggcattaacattgatattcccattgcattgagtttgcttatcaacacttgtgggaagaacctaccttctgacttcatttgtgcttaaccaatgttttgtagttaatttcaacaaattaactctgctggaatgtagccttttttttctcccattcagtactttataattntcctaattggacaattgttc

SEQ ID NO: 26247 - DNA, 253 bp, Gossypium hirsutum
  Clone ID: LIB3147-045-Q1-K1-A5
tctaccacgcgtccgcccacgcgtccggccatttcgtggattaagggatttttttcattcgtttcggggggacgctcgattaccttacaaaaagagaaaatgaccaagtgttacccaactgtgagcgaggaataccagatgtcagtgaaaaggtcaagaggaagctcatagtgtttatcgttgagaagaactgtgctccactcatgctccgttagcgtggctcttatctggaacttttgatgttaagaccaat

SEQ ID NO: 26248 - DNA, 244 bp, Gossypium hirsutum
  Clone ID: LIB3147-045-Q1-K1-A6
cggaaacaaagattattgaagtctgcctggggctgttgatggagtaccgatggcatatcagagcagcctatgatctgtatttgagaccctttcaccgatttagctttcttcgtgatcaataagttgtgcttgttttgccttcactgtgttattgacaaattttgaagttgatttttttttcaaactgaatcaacttaatatctgtttattccatcggttaagtggattaaatcattttttttcc

SEQ ID NO: 26249 - DNA, 327 bp, Gossypium hirsutum
  Clone ID: LIB3147-045-Q1-K1-A7
gctattattgctgctatgagaactggtaggctcactggacaagccgctgctcctgctgccggggctgttaacgctgatgctaaggatattacttgctgtaatactagctcttatggcattcatattggacattcaaaagtacataagaccttaatgctggaaaatgtgcttgaataaccagatataggtactgatttgagttctgtgagcaatgattttggcattgatacggattttaactcatgtatttgctattggttgtgataggtgtttaccccagatttaatctccgagtttatttgaaccgtatttatcaaggttggaatt

SEQ ID NO: 26250 - DNA, 246 bp, Gossypium hirsutum
  Clone ID: LIB3147-045-Q1-K1-B1
cagcaatgtggccttgttccaatcgtcgaacctgaaattcttgttgacggatcacatgacattcaaaagtgtgctgcagtgacagagcgtgttcttgctacctgctacaaggctctaaatgaccaccatgtcatgcttgagggtactcttttgaagcctaacatggtgacccctggttcggactccccgaaggttgccccagatgttattgctgagtatactgtccgtgccttgcagcgaactgtc

SEQ ID NO: 26251 - DNA, 414 bp, Gossypium hirsutum
  Clone ID: LIB3147-045-Q1-K1-B10
actggactggctattgatgcttatggtcctatcattgacaatgctggaggtattgctgagggggctggcatgagccacagaagacgagagagaacggatgctcttgatgctgctggaaacaccactgctgctattggaaagggtttcgccttagtgtcagcagcccttgcgatcctagcactctttggtgcttttgtgagccgtgctgctatttcaacagttgatgtattgacccctaaagtttttattggcttgcttgtcggggcaatgcttccttactggttttctgctatgaccatgaagagtgtgggaagtgcatctttgaagattgttgaggaagtgcgcatgcaattcaacacaatcccaggtctcatggaaggtactgctaaacctgactatgctacctgtgttaag

SEQ ID NO: 26252 - DNA, 217 bp, Gossypium hirsutum
  Clone ID: LIB3147-045-Q1-K1-B11
cttaatgtttataagaatttaaaagatgttctccatggttgtcagctcgttttttcttgcgggaccgaaagggagaaatttgttagcgtccataaaagttccatagcttttgtaatttgaatcctattaatgttatttatggtctttttcccttgtcaaaattatattattttattttttctattaaaaaataatattaataattttatatttatat

SEQ ID NO: 26253 - DNA, 491 bp, Gossypium hirsutum
  Clone ID: LIB3147-045-Q1-K1-B12
cccacgcgtccgggcaaagatgtcttcattagtgcaaatactcaaagaatgcacaacgattgggttagtgaccctcgagcctttggattcgtaacatcacagatagcctgttgtggacaaggaccttataatggacttggtctctgtactcagctgtcaaatttatgtcccaacagagctctctatgcattttgggatccattccatccatcagagaaggctaacagattgattgtggaacaaataatgactggatccaatgagtacatgcaccccatgaatctcagcaccatcatggccatggattccgggatctgacatcagctctatcttcttctttttcatcatctgggtgtttcgtaataatatgtttctttcaactgtcataaatgttatatttcgagccggtttgccttttgtttgtgttgaatgtaatggggaattcaaatgatgcacatgcatttgtaatgaattgatgatgagcattaatg

SEQ ID NO: 26254 - DNA, 417 bp, Gossypium hirsutum
  Clone ID: LIB3147-045-Q1-K1-B2
cccacgcgtccgggtttggagacgctgaaaagctcaccaaggcccttttctcttttgctagcaagctggcgccagtcattatttttgttgacgaggttgatagtttgctgggtgctcgtggtggtggttttgagcatgaggcaactaggagaatgagaaacgagttcatggcagcttgggatggattaaggtcaaaagatagccaaagaatcctcatccttggtgccacaaataggccctttgatcttgatgatgctgttattcgtcgcttaccaagaaggatatatgttgacttaccagatgctggaaaccgcatgaagatactgaaaatatttcttgcacaagagaatataggctgtaatttttcatttgaagaacttgcaaatgcaactgaggggtattctggcagtgatttga

SEQ ID NO: 26255 - DNA, 423 bp, Gossypium hirsutum
  Clone ID: LIB3147-045-Q1-K1-B3
cggagatctagcccgtgccctcaaattcctcaccaaagctcgtcgtctcgacccatctctagctatcgagaatctcttatctgcggcggaaggagggaaatctgacaatcgcccggtttcggaacctgttgggtctgctaaagatccgtctggctctactacatctaaaccttctgatcaaccctcgattcgtcagaggaatataccgaatggatcggctgcgtgtgctagtgcttcttctccggcgtccgcgttagcgacagcgtcagcgtgagccgctggcggtacctacaccgtataacaaatcgtactcttgaagcatatcatgataaagactgattattatgagattctggggttagagaaatcgcgttccgttgatgatattccaatagcttatcggaaactgtctttgaaagttca

SEQ ID NO: 26256 - DNA, 423 bp, Gossypium hirsutum
  unsure (1)..(423): unsure at all n locations; Clone ID: LIB3147-045-Q1-K1-B4
cccacgcttccgaggacgcgtgggttttgcatatactttcagccactaagcaatagcagccagtactgcaaatggcttccaacaaaacctgtgctgtccttacagttttctctcttcttcttttcaacttatcattcaccaatgcttgccattcatgcaagccaccaaagcccattccaccacctgctgcatgccctccaccaccagcaaagcctgcttcttgccctaaggacacattgaagctaggtgtttgtgctgacctacttggactggtaaacatagtggtgggaacacctccttcgagcaaatgctgtgctttgctccaaggcttggctgatttagaagctgccctttgcctttgcaccgccattaaagccaatgtgcttggngccaacctcaacatccctattacccttagcttac

SEQ ID NO: 26257 - DNA, 338 bp, Gossypium hirsutum
  Clone ID: LIB3147-045-Q1-K1-B5
atttgcttctaaattagactgttatttttaacaaataatgatgatttaaagttgataggtattggactcttaccagttcacaagttaagcttttgcataatcaacagcacaagaaatatgtgtatatatattgagtagtttattttgctgagtgtttgtgtagataaacaagcgggcaatagcagggacctctacagcatcccaagttcgtagtttgcgtaaagtcaatactgatcaagttgctattcctattgatgcggatgattgcaacaatagttggttagaagatgaagattgattataagttcatggtttcaaatcacttaccacatcaagag

SEQ ID NO: 26258 - DNA, 176 bp, Gossypium hirsutum
  Clone ID: LIB3147-045-Q1-K1-B7
cggtaggaattcccgctggtgtggatttttccagttttgagtgatgtttgtttgataattttttatgtgattttgctgtatttgcttagtaaatacactctatataattataaaaatgttaagttgaaaaggtaagtgggtttccatgccatttggccactgtccttttatacctt

SEQ ID NO: 26259 - DNA, 437 bp, Gossypium hirsutum
  Clone ID: LIB3147-045-Q1-K1-B8
cttagcgctgaaaatgaagcaatgtacgggaagttgttggccaaatatgtagatgatcctgataatttcttctccgtgtcatcagatttttgtcactggggttctcggttcaattatatgtactatgacaagaagtacggggccatacacaaatcaattgaggcgctagacaagatgggtatggatataatagaaactggagatgcagatgcattcaaacaatatttatctgagtatgacaacacgatctgcggacgtcatcctattagtgtatttgttcatatgctgagcaacagctcgacgaaaataaagataaaattcttacgttacgagcaatcgagtcagtgcaaaagtacacgagacagtagtgtaagttatgcatctgcagcaacaaaagtgggatcctggaagattgaaaaagaaaaaaaaaggtgggg

SEQ ID NO: 26260 - DNA, 472 bp, Gossypium hirsutum
  Clone ID: LIB3147-045-Q1-K1-B9
atggattgataacccagagttcgaagatgatccggacctctatgtgctgagaccaatagagtatgtgggtattgaagtctggcaggtaaaggctggttcggtttttgacaacatattgatttgtgatgacccacaatatgcaagagaagttgtagaagatatatgggccaggaatagggaggccgaaaaggaagcctttgaagaagcagagaaagaacgaagagcccgggaagaggaggaagccaaaagagctagagaggaaggtgaaaagcggagaatagagagggaccaccgacatagagacaggaggcaccgtagaaggcacgatcctcgtgattatctggacgattaccatgatgaactatgaggttgtccaccacaatttcgcgagttttaggatcccatttcaattacgaaaaagagaaaaattgaacaaggttccatgctgtgagagatggggttaccgtgtact

SEQ ID NO: 26261 - DNA, 505 bp, Gossypium hirsutum
  Clone ID: LIB3147-045-Q1-K1-C1
taccgcctttgaatcaaattacaggccccagttttatctgaggacagcagatgtgactggaaaagtggaattacccgaaagtgttaagatggttctgccaggggacaatgttactgcaacttttgagctcatctcacctgtgcctcttgaagcaggacaaagatttgccttgagggaaggaggtagaaccgtaggtgctggtgtagtatcaaaagtactgacctaagaagttgccattcccatagcaatgcctggttttctccatcttgttgatcgcagaaatggagaaattgatagaacaatcagttggtgatattttctgttctagaattactaaagagattgttagtgatatgaaaaatgagggctgttattgaaattattttgattcaatttcgctggtggttggtaagcagacagcatgtttttccctgtttccacccaaaaaatcacgattgaacagctttttaatgtcattgaaaataatagtcctgttgaacagtgc

SEQ ID NO: 26262 - DNA, 430 bp, Gossypium hirsutum
  Clone ID: LIB3147-045-Q1-K1-C10
cccacgcgtccgcccacgcgtccgcccacgcgtccggcaggtgaatcagaggtagagacagaggttgagtcaccaaagacaaaaccagagaatcttctgcttgtatcagagggtcaaggtcaacatcatgatgtgtgctttcagaacccagagataacttctcaactgcatttcttgggtgtaggagatgaccatatgtctgctaaaagaatggggggaagctaccacatttatgaccaagcatggcagggtgagtgagtgaatgagtgaggcaaagaaactacatagcatgcatgctttgacatagtaaagctaatacataagctttgaatcttacactgccctttaggcttttggctttcttttgtttttgattaatatttgttaatatgaagaagtgaaaggaatgtgcttgggcaggtttttgatg

SEQ ID NO: 26263 - DNA, 339 bp, Gossypium hirsutum
  Clone ID: LIB3147-045-Q1-K1-C11
cccacgcgtacaagcagcatgagaagaaaagaggcatggacatcgatgaagcacaggaaagggggtgtatacttaggtctctcctcatgaacatctttaaaaaaaattcaaagacaaagattacattgaatatcctgctgctgtgcctgctcacttataatatttattatttacatcaattttctttaattagtatcccacaaccatgactaattttcaagccatcagtactgactgaaaataatgtatgatcacacctacttttctctccaacgagaaaaaataaacggcagattcttatggtgactgattttgcggtttacttggttggccctccca

SEQ ID NO: 26264 - DNA, 473 bp, Gossypium hirsutum
  unsure (1)..(473): unsure at all n locations; Clone ID: LIB3147-045-Q1-K1-C12
cccacgcgtccgggacaaacgagatggcatgttcggtccacaacccatggccattccccctgttcagcagatgtctcgccttgatcaaccaataccccctgcagctggctatccaccagcagcatatggacagccttatccaccacctcaaggttacccgccggccgcatatcctcctcatcagtaccctccagctggttatccagcacctggttaccctaagtgatctttctatggtttaccttttggtttcaattgcctgaatctggattactgactactgagtcatggatgaagctggtattctttataaaatttgactttgcatgctgttgggatttatatatagnngttatattatattatattgggtgaattactttttttatagctgatttaaacagcaaaaagtgttaaatattaaaactgtcagcttgtttattctcaaataatttcttttacttcattgttct

SEQ ID NO: 26265 - DNA, 379 bp, Gossypium hirsutum
  Clone ID: LIB3147-045-Q1-K1-C2
cggacgcgtggggtttctgtatcttccacaaaaacacacttgcaagttgcaacaatcttttggaggaaaaaaaataattggttttacaataaaaactgcatcagatttccaatccaactaagaaacaaagagaaaagctcgacatcctctcatgtccattccatcatatagagtccatcaacctagcaaccttggttttagagagagcaagtgtaaccaggagggggtgttttcccacatgtgacaaggagttgaagagccagtggcacataaattttaaggttgggaaccctaagtgtgagggtggtgcacaagcagaccggagcttggagcttcgcgaggtctgaaagaacctgacaacattggttcacaaccgggt

SEQ ID NO: 26266 - DNA, 506 bp, Gossypium hirsutum
  Clone ID: LIB3147-045-Q1-K1-C3
actgaagcaaataattggcgaggggaacttggtggaggaatctaacattacttgtttaccttatttgcaagcaattgtcaaggaaacgatgaggttgcatccatcgtttcctttgttactccccagaaaagctgaagcagatatcgagattcacagcttcgtcattccaaaaggtacacaactgttgatcaacgcatgggctataggcagagatcctaagttctgggacgagcctgacttgtttcgtccagagaggttcataagatcagaaatggatgttaaaggaagggattttggactgattccgtttggaggtgggcgacgaatttgccctggattaccattggccatgagaatgttgcacttaatgttgggtggactcattcattcatttgattggaaacttgaaaataacatcacaccagggagtttagatatgaaggataagtatggtctttttctgcataaagctcaaccattaagaatcatcccgatttcaaattaac

SEQ ID NO: 26267 - DNA, 286 bp, Gossypium hirsutum
  Clone ID: LIB3147-045-Q1-K1-C4
cccacgcgtccgcccacgcgtccgcccacgcgtccgcccacgcgtccgtttggatacgaaccgtgtcctggttttcagatgcgcgtaaatgcaaagatcaaagccgaaatcaaggagtggcaggacaagaaactgaaaaaggtttcttaggttacattgttgtaagttgtatgtttggtaacgagtaaatttaggtttaagtataatgtactgttgtggtataagtgttgtaaggcaacattgcatggattttaattatccgtgaaagcattgctatgaattgaac

SEQ ID NO: 26268 - DNA, 477 bp, Gossypium hirsutum
  unsure (1)..(477): unsure at all n locations; Clone ID: LIB3147-045-Q1-K1-C5
cccacgcgtccgcccacgcgtccgtgctccgtccgatgaagcttttaaagctgaaggtgtccgtggtttgagcaagctcaccaatgcagaacaagtctcacttctagagtatcacgcctcgccggattacaaacctaagggaacgttgaagacgacgaaagacccgatcagtacattggcgactaacggcgctggaaagtacgatctgacagttacaaccgccggcgactcgatgacactacacacaggggttggcccatccagggtcgccgaagcagtttttgactcaccgccggtcgccattttcaccgttgacaacgatttgctcccttctgagctgttcggcaagtcaccgtcgccagcactcagccccggaaccagtttcttcgccttcaccgacaccatctntatctccagcccattcccatgtctgaagcaccgcaccacttgcagcttcaccaccagctccaccaactg

SEQ ID NO: 26269 - DNA, 422 bp, Gossypium hirsutum
  Clone ID: LIB3147-045-Q1-K1-C6
gattttctgggattactagtaaatgcttatcatgatttggacgataaaaacagggtttcatggggagacttggtaggtgaatgcaaaacaatctactatgctggacgggaaaatgttaattcattgcttgcatggatagtcttgcatttggcaatccatggagattggcaagaaaaagcgagaagagaggtgattgacatatttggtaaccaaaatccgcatctcgaaggcattgctaaactcaaaataatgaccatgatcatcaatgaaactctaagattgtatggtccttcacatggcctgcccagaactgtcgcaagagaaggacaattgggaaagtttatcttgcctgctgatatagatattctgtctctaaatattggaccccaccgtgaccctcacttgtggggggatgatgtgca

SEQ ID NO: 26270 - DNA, 403 bp, Gossypium hirsutum
  Clone ID: LIB3147-045-Q1-K1-C7
ctcaaccaaaaatgactgctcaggccgacaaagagatcgaagagattctggcagcccatggggaccaacaaaaaatcgattccgagaaaccagagcaacctgttgttgaagatgacgacgaggaagatgacgatgacgatgatgatgaagatgatgccgaaggtcatcatgagggagaaggagatggaactgttaggtcaaagcaaagccgaagtgaaaagaagagtcgcaaagctatgttgaagcttgggatgaaaccgatctctggtgtcagccgggtcactgtgaagaagagcaagaatatcttatttgtcatctcaaaaccagacgtgttcaagagcccagcatcagatacttatgtaatatttggagaggctaagattgaggacttaagcttacaact

SEQ ID NO: 26271 - DNA, 390 bp, Gossypium hirsutum
  Clone ID: LIB3147-045-Q1-K1-C8
ctcaaccaaaaatgactgctcaggccgacaaatatatcgaagagattctggcagcccagggggaccaacaaaaaatcgagggcgcgaaaccagagcaacctgttgttgaagatgacgactaggaagatgacgatgactatgatgatgaagatgatgcctaaggtcattatgagggagaaggtgatggaactgttaggtcaaagcaaagccgaagtgaaaagaagagtcgcacagctttgtttagcttgggatgaaaccgatctttggagtcagccgtgtcactgtgaataagagcaagaatatcttttttgtgatttcaaaaccagacgtgtttatgagcccagcatcagatacttatgtaatattttggagaggctaagattgaggact

SEQ ID NO: 26272 - DNA, 427 bp, Gossypium hirsutum
  Clone ID: LIB3147-045-Q1-K1-C9
cccacgcgtccgcgaaactgttacaaatgatgaatttgctgctgacctcaaagagcatggggtcaagcctgtcatccctgaaaagtacctatatgagaaaacaatcttccaccttaacccatctggccgctttgtcattggtggtcctcacggtgatgcaggtctcactggtcgtaagatcattattgacacctatggtggctggggagcccatggtggtggtgctttctctggaaaggaccctaccaaggtggacaggagtggtgcttacattgttaggcaggctgccaagagcattgtggctaatgggcttgcccgaaggtgcattgtgcaggtctcttatgctattggtgtgcctgaacccttgtttgtctttgtagacatctttggaactggtaagattcctgacatagaaatccttctaatt

SEQ ID NO: 26273 - DNA, 392 bp, Gossypium hirsutum
  Clone ID: LIB3147-045-Q1-K1-D1
ccacgcgtccgcggacgcgtgggcagggatccgaatttcaaacaccaagatctaaatgacggatccgaatctggatctgcaagaatcgggttgggaggaactcaggagagaggctcgaaagatcgagggtgatctcgatgtcaaactctcttcttatgctaagctcggtgctaggttcacccaaggagatactgggtcgccaaccgttgggtcaagtagatcatggaagtctatggaaatggaaattcagtcattgctcgagaaactgctggacataaatgatgccatgagcagatgtgctgcgtctgctgcttcaactacttcagtaacccaaaagcttgcaaggcatagagacatactacatgagtttactcaggagtttagaagaatca

SEQ ID NO: 26274 - DNA, 103 bp, Gossypium hirsutum
  Clone ID: LIB3147-045-Q1-K1-D10
ggaatattaatatatttaacgttgctcttttaatttataaaaaaaaaaaataaaaaaaaagggggtaaattaaaaaaaagatggaataatcaaattattaatt

SEQ ID NO: 26275 - DNA, 450 bp, Gossypium hirsutum
  Clone ID: LIB3147-045-Q1-K1-D11
ctcgaacaagggatttgttcgccagaccctttagaaagaagggttacattcccttgtctacggacctcaggacctacaagatcggcgactacgtcgacgtcaaggtaaacggtgccgttcacaagggtatgccccacaagttctaccatggtcgtactggtcgaagttggaatgtcacaaaacgtgccatcggtgtcgaagtcaacaagcaggtgggaaacaggattatcaggaagaggattcatgtacgtgttgagcatgtacagccttcgaggtgcgctgaggaattcaagctcaggaaggtgaagaatgatcaactcaaggcagaggctaaagcaaagggtgaggtcattagcacaaagaggcagccagaagggcctagacctggtttcatggtggatggtgctacacttgaaactgttacgcccatcccatacatgttgttaatga

SEQ ID NO: 26276 - DNA, 352 bp, Gossypium hirsutum
  unsure (1)..(352): unsure at all n locations; Clone ID: LIB3147-045-Q1-K1-D2
cggacgcgtgggcggacgcgtgggcggacgcgtgggcggacgcgtgggctcaaagtatatgcagatcgaatgtctcagccatgtcgtgctgtcatcatcttctgcaaggtaaatggtatagactatgaggagatcaaagtacacatatcgaagggtcagcattcattcatgtaagtttgtcaagttttattgttttttggagttgcaatgcaaataacaaattgggatattgctaatgtgttttaaagagaattcatttgtatatgtaatttggttctaagttaattgtagggattgaacttttctttgctaaaaaaaaagaataaaaatataaaaaatatatnttatattc

SEQ ID NO: 26277 - DNA, 452 bp, Gossypium hirsutum
  Clone ID: LIB3147-045-Q1-K1-D3
cccacgcgtccgggaatttgcaccttcaatccctgcaaagaacattacctgtttgacaaggctggatcataacagggcactaggtcaaatctcagagaaactaaatgtccaagtttctgatgttaagaatgtgattatttggggtaatcattcatcatctcaatatcctgatgtcaaccatgcaactgttatgactccatctggagaaaagccggttcgcgagcttgttaaggatgatgcatggttgaatggagaattcataaccactgtccaacaacgtggtgctgcaatcatcaaagctaggaaactctcaagtgcactatctgctgctagtgctgcttgtgatcacattcgtgattgggtccttggaactcccgagggtacatgggtttccatgggggtttactctgatggttcatacaatgcaccagctggggtcatctattctttcc

SEQ ID NO: 26278 - DNA, 443 bp, Gossypium hirsutum
  Clone ID: LIB3147-045-Q1-K1-D4
gcccttaaaaatattagtagaactgatcccaacccatagcagaaagaatcaaagacagctaagagggtttcttccaacaatttcccttccaatgtcaaaagtttgttgtcaactggtatgcttgatggggttgttgtgaagtatgtttcctggtcgcgggagaaaagtcttaaagggtacatacaagggactgggtatatgtgtggctgtaaagactgcaactttaagaaagctttgaatgcatatgagtttgagcaccatgctaattgcaagaccaaacaccccaacaatcatatttactttgagaatggaaagaccatctatgctgttgttcaagagctcaagaacactccacaggagaggctttttgatgtaattcaaaatgtgacagggtctcaaatcaatcagaagaactttcgcatcttgaaagcatcatatcaagc

SEQ ID NO: 26279 - DNA, 481 bp, Gossypium hirsutum
  Clone ID: LIB3147-045-Q1-K1-D5
cccacgcgtccgcccacgcgtccgggccgcccttttttttttttttttttagttctttaaaaatgggctcaaaaaacgaacgccgttttcgaggagagccgaaaggtagttcagtttccattccccaaactgttaaaaagcaaaaatcattcttttgacctttctttttttcattggatctttatgagagggttgtagtttaaatctgtgccaaggtttcaggcaaaaaggaaataggatctttatctgaataccgtctgttaaccagttttttggaaattcggtttcggataattgaacaccattataagtgcatttaacatgcatttctcgattccaatccgttaaatcctcagaccactcaggaaattgaaataataacatacgggcaatgtttttaactattatcagtgaaggtaatataatatattttctaagaattgattgggttattaacacggagccccttattacttgagca

SEQ ID NO: 26280 - DNA, 126 bp, Gossypium hirsutum
  Clone ID: LIB3147-045-Q1-K1-D6
ttccggaaaactattccgaaccaaatagacttcaaagtgtgtttcaaggtgttggaggaaccttattaagtagcatccctatccctactccctctgagtcaacttctcatccggtaatatcatcac

SEQ ID NO: 26281 - DNA, 215 bp, Gossypium hirsutum
  Clone ID: LIB3147-045-Q1-K1-D7
tgggctcaaattatcggggtctgggagaatctggttgggagtctccttcatctatctttctcaatgttaatggtatagactatgaggagatcaaagtacacatatcgaagggtcagcattcattcatgtaagtttgtcaagttttattgctttttggagttgcaatgcaaataacaaattgggatattgttaatgtgttttatagagaattcatt

SEQ ID NO: 26282 - DNA, 495 bp, Gossypium hirsutum
  unsure (1)..(495): unsure at all n locations; Clone ID: LIB3147-045-Q1-K1-D8
cttttatttgtaatctttttgggattatatataagatcttatggatgtaatataactaaggggcaattgtgtcctaccagctggtttcttgacaagggcttcacgtgcagttgtaaggaaaaagccagggaaggcaaaagcgaggaagagcttccaatgggtcaagcgttgatggtcatttatgttgttgctcagatttttcctcaaaggggcttcttttctttccttttttttgcattggatgaaaagcaaacctttattttgacaatgctgcaataatatctttcacaaggtttggtgttagttatgtaatgtgcttgtaatttctagcttcccctacatgattattagccagttgttaggaagatttgtttagcaagaattacttttaaaaatattccactataacaagggagaaattggctctttatttttatatttatttttggngaaagaaggaaaaccggttggcacctcattgactctaattttgct

SEQ ID NO: 26283 - DNA, 498 bp, Gossypium hirsutum
  unsure (1)..(498): unsure at all n locations; Clone ID: LIB3147-045-Q1-K1-E11
agttctagatcgcgacggccgccttttttttttttttttttttttttttgccttaaaaagctgtatattatttattttaaaaaagttataattaagaaacaaagaaagatacattcaaactttgctaaattaatgctagatacatacatacatgcatacatacaacttcataattacacaattcttttttctatattatatatatatatatattagccctttgtattgtatatttatggatcattaataataattctaaggcttatgattttgagtataaatataatccaaatgagcatctgccatcatcctccttttcacacattcttcatctttctcataacactcttctgctcccatcaactctgagaaatcatcttttgtatcagctagaatcatcatcatctcgtttgctttaaactccttttcaccatggntgtggatttgcagcagcaaacgagcagattctgaggaacaacaaagaagaagaaaagctta

SEQ ID NO: 26284 - DNA, 384 bp, Gossypium hirsutum
  Clone ID: LIB3147-045-Q1-K1-E12
ccccttgttcgttgactgccatgaataacaatggcttctactattgcaatgaggaagattacgagatgctgctgtcgattctggggctagtgaggacgagcagtggtcctattgctacgcctgaggcagtgttctactatttgctttattgcatggtttgccagtccttgaatgtctagttattttagttttttgttccctttttaatgttcttcttttactgttaatttccatcgcttgtaagcagtgattgttagcatgcatacaaggtgtttagcaccttgtcgggtagaagggatgagaaccgaatccaatcctttctgtaaatccgggattttatgccctctccatgcttcttttaagccgactttattagtttttttt

SEQ ID NO: 26285 - DNA, 284 bp, Gossypium hirsutum
  Clone ID: LIB3147-045-Q1-K1-E2
aggaaacttgggtcacatgtgtgagattataatcttatgatcattatttaatcacccacagtgcgactaaacgtgggttttagaaaccgtcagggaaccctccttttctaatacccacgtttagtgggattgtgggtgatgaaattcacgtcgcatgtgtgagattataatcttatgatcattatttaatcaaaataattgagaacgaaatatatactatctccaacaaccatttcatattaatataatccataaaattttatattttttaaatttaaaataat

SEQ ID NO: 26286 - DNA, 347 bp, Gossypium hirsutum
  Clone ID: LIB3147-045-Q1-K1-E3
cccacgcgtccgcccacgcgtccgaggaaacttcaaaacctggggattgttttaaaaattgaagcaaaaagtgggtttgaaaagttgcccctcttacttttggaagcaatgaaatcttcaaatcctttaggggttatgattgccaggggagatcttgctgtggagtgcgggtggtatagattggctgatatacaagaagaaatattatctttttgtggtgctgctcacttaccagatatttgtgcaactcaggtcctctaatcactcgtcaaatcccgagttcctaccagagctgtgatttctgatgttgcaagtggttggttggcatagtttgttttattttttca

SEQ ID NO: 26287 - DNA, 378 bp, Gossypium hirsutum
  Clone ID: LIB3147-045-Q1-K1-E4
ccgggacactgaagccaaagcagcttaaggacccttgtaaccatggatgctctacaagaggtttacctacgagaaaaggtatatccaagttttataatggcaaatcaaagtccttcactagtcttgctgatgctgtcactgcttcctctgttaaagaatttgcaaaaccggacaatccttataatagaaaacgcaagaacttattaactcgtggttcaaagcgattaggcaactcatatggaagtgcaatggctttcggaactactatgagtagctcagacttgaacttgatgtcatcatcaccgtctagttgtcttccacctctacatccacagtataaaaaatcaactatgattagttcatcatcgatagctgctc

SEQ ID NO: 26288 - DNA, 443 bp, Gossypium hirsutum
  Clone ID: LIB3147-045-Q1-K1-E5
gtttaacttgatttcaaactcgaagtctccgccactactaccagctttctattcatcgctcaacccaatggcagtcgcttccaactcgctcgtttctttcatccacggctcattgagtcaacccggaaggacctcccactttcttccttcaccttctctttctttccccggatctcgctcgctctctctgaaactcacccgccgctccaactcgccccttctttgctctttagatgcaaccaacgccacagataaggacaccccaatcgaaacaaggttcccagcttatccaactgtgatggacatcaatcaaataagagagatattaccacacagattcccattcttgttagtggatagagtgatagaatataatccaggggtatcggctggtggtataaagaacgtgaccataaatgataactttttccctgaaaatttcc

SEQ ID NO: 26289 - DNA, 463 bp, Gossypium hirsutum
  Clone ID: LIB3147-045-Q1-K1-E8
ccaaaaccctcaccacaaaagaaatctcttctatttttccccactctactgcaaaaatgtggggatccgttgctagatcggccgccggtaagagcctcctccgacgaggatatgcaaccgccgtacctgaacggaaagtcgctgtcttgggcgcagctggagggatcggccaacccttggctctcctcatgaagcttaaccctcttgtttctcaactggctctctatgatatcgctaacactcccggtgttgccgctgatgtcagccacatcaactctagatctgaggttgccggatatgtaggtgaagagcagttggggaaagcttaggagggatgtgatgttgtcattattccagccggggtgcctagaaagcccggtatgactcgtgatgattctttcaacattaatgccggaatcgtcaagggtctatgttctgcaattgctaaatattgccccaatgc

SEQ ID NO: 26290 - DNA, 495 bp, Gossypium hirsutum
  Clone ID: LIB3147-045-Q1-K1-E9
cccacgcgtccggcgattgcgaaagagaaacgcgagacggaagccatgaaactctttgaagaggagcataaacaaaagacagcaatggagttactggaacaatacttgcagttcaaggaagaagctgagaaagaaaccaagataaaaaccaagaaagaaagggatcctttaaagcctaagcaacccatgtcggctttctttttgttctccaacgagagaagggcggctttacttgccgataacggaaacaagaacgttttggaagcggcgaaaatcgcgggcgaagaatggaagaacatgactgcagaacaaaaaaagccttatgaagagatagcaaagaagaacaaggaaaaatacatggaagaaatggaggtttacaagcagaaaatggaagaagaagctttgaatgttaaaaaacatgaagaagagatgttgaaactactgatacaagaagcactttaattgctttaaaagaaagagaaaactgatcatatt

SEQ ID NO: 26291 - DNA, 506 bp, Gossypium hirsutum
  Clone ID: LIB3147-045-Q1-K1-F1
ccttaatttcattcccttctcaaaaccctaactctttcccttttaaatctctcattgcttcccctaaaacctttagtttcgctaaacccataatctctttacaagtcaaagcaaattctcctgctctttcagatgaactgccactggatgcttccccttctcaatcttcttctggtaaagagaagcttggagtggtggtgaagccattagagaagccacgggtagtattgaagttcatatggatggaaaaagatatagggatggctcttgatcaagtgataccaggccatggttcaatccctttgagtccatattacttttggcctagaaaagatgcttgggaagagctcaaggttttgcttgaaagcaagccatggatatctcacatgcaaaggattcaccttctcaaccaagctactgatatcatcaatttatggcagacaagtggtggtaatttaacctaaagtgtttcaacttacaaagttttgttgcaatctcttcatgtt

SEQ ID NO: 26292 - DNA, 431 bp, Gossypium hirsutum
  Clone ID: LIB3147-045-Q1-K1-F10
tccgattctcagaatgcaacaatgaatgctactgaaaaagcttctgacccaatggatgaggatgacgctttgctaaagcaggcccttgcattgtcgatgaatatccccggatctgattcttctgcaggtgatgctcaaatgtcagaggcaactaatgacgaccaggaattcgccttggcacttcagatgtctatgcaggacggttcaaaagattcgtcagctcaatcagatgtcagcaaggtgttgggggatcagtcttttatgtcatccattctttcatcgcttccgggagttgacccaaacgatccgaaagtgaaagatctgctagcatctttgcccagccaatctgagccgcaagaaaagaaagacgaagatgaacaacccaaagatgacaagtgaagatctacattccttctaacaatcgatgtgtg

SEQ ID NO: 26293 - DNA, 415 bp, Gossypium hirsutum
  Clone ID: LIB3147-045-Q1-K1-F11
cccacgcgtccgaagagatggaaaggtttgctctcggtacgaatagtattcttaacgaaatgagacagagggttgaggacttggtcgaagaaacttcgagacagaggcaacgagctgctgaaaacgaacaggagcttactcgtgtgaagcaggatttcgagtccttgaaatcttatgttagtagtctcattagtgtaagagaaactcttctttcatcggagaagcagtttcaaaccatcgagcggctctttgaacgactagttgcaaagacaacgcagctcgagggcgagaaaaagcagaaagagactgaagttcagaagcttatggaagagaatgtgaggttgaccgcacttctcgacaagaaagaagcttaacttttggccatgaatgaacaatgcaaagtaatggccttaag

SEQ ID NO: 26294 - DNA, 450 bp, Gossypium hirsutum
  Clone ID: LIB3147-045-Q1-K1-F2
tgattgtcgatatgctgtgtacgattttgattttctaacggccgagaacgtcccgaagagcagaatctttttcatcgcatggtctcccgacacgtcaaggatcaggagcaagatgatttacgccagctccaaagacagattcaagcgagaactggacggaattcaggtggaattgcaagcaacagatccaactgagatgggtctcgatgtgttcaaaagccgtgctaactgaatacggttcttttaggcatctgcaaccgggaagcttccttccttcctacctacagtatgtctttacttaagtgaaatgtttataggtttcgaaacggcaaactcgggatttccgagttatgccataagacttttatcagtctcgatgatgataaacccgtagtttcgggtatatgtgatttgttatctatagaacctatgtgttgagtgcctttgtgt

SEQ ID NO: 26295 - DNA, 428 bp, Gossypium hirsutum
  Clone ID: LIB3147-045-Q1-K1-F3
ccctaggattgacaagacggggacagatctaattggagaccctataattattgacgatctgctgaactcgtaagacgccacatgagcatcaagaggaaaattatacgatgctgtcgtatccacactcgggcatcaactgctgaacttgaaagtgaaagacgacaaatgagcgctcgagcaatctatccgattagaaaaccatctcaaagatggcgcagaacgagcagtcaatatattgcaccaggtagatgtggatccatttgggtcaggaagccatgaatatattaggtatgaatcctcggtagaagaaaccctaacgacgctgaatgctatgagtcccgaagaagccgctgcacatgtttatacgagaatgggatattcttgtgaaagccggattggttcaaggattctcaggtatatggatccca

SEQ ID NO: 26296 - DNA, 402 bp, Gossypium hirsutum
  unsure (1)..(402): unsure at all n locations; Clone ID: LIB3147-045-Q1-K1-F4
ccaacgcgtccgcggacgcgtgggattaaatatgaaggtgcgagcatcagtgaaaaagatgtgggagttctgtagaaccgttaagcgccgcggacgggtatatgtactatgcacttccaaccctaagcataagcaacgacaaggcatttccacatttgcttttgaaggcacactgccccctgcgtatgcctctctcattgcagttacttaatcttttcgtttttttttttcagcctagatttcagtcctgttaactgccattgttctgcagatacttcaagcagtttaaattttaaacaaatatgatatttgttatctgaatttgaatgctggtatttttcagttggtgttatgnttactgggtagggtcattttgatgaaaatacacataatttttgtttc

SEQ ID NO: 26297 - DNA, 401 bp, Gossypium hirsutum
  Clone ID: LIB3147-045-Q1-K1-F6
ttcgatgagactatactagaggacaatgcgcggcctttgccatcaactgaagttgatgaaagccaagaagttatatccgatgagccaatggcttcagaagaacatgatgctgaaaaagccaagtcaaaatctactacaagcaagcaaaacgagaagttatatgcagtagaaggtatgtttaacccaaaaatgaagagggcagagaaaaagagaaagaaaaaagccaaaaacaaatcaacattagggggtgatgccatggatgatgaaggcgactatgactttggtgtggattatgtgaaggggaagggtcaaaatacttgtggggtgccaatgtcaggtattgaagttgatgagtagtaaaaaactaaacatacctggaaatctcaaaatggctcatcttt

SEQ ID NO: 26298 - DNA, 401 bp, Gossypium hirsutum
  Clone ID: LIB3147-045-Q1-K1-F7
ctgatatcgttatttcgagcaaggccatggggattatgaacagtttcattaatgacattggggagaagcttgctcaggaagcttctaggctcgctcgttacatcaagaagcctacaattacattttgggagattcaaacagctgttgaggcttggtttttccttgggagttgcctaatcattctgtttcttaagggactaatgctgtcactaagtttactagttcataggttttggatattatgaattggttgtaaatattagttcttttaaggattatcaatctgtgggactttgtgttttttgagctcaattgtaggcttttatcttcttttttattattttctattttttaatttcgtttaatattttttatattttattatatttttatattttttt

SEQ ID NO: 26299 - DNA, 441 bp, Gossypium hirsutum
  Clone ID: LIB3147-045-Q1-K1-G1
gaacgttgctgttaaggatctcaagcgtggtttcgttgcttcaaactctaaggatgatcctgcaaaggaggctgccagcttcacctctcaggtcatcatcatgaaccaccctgggcagattggaaacggatatgccccagtccttgactgccatacctcccacattgctgtgaagttttctgaattgctgaccaagatcgacaggcgatctggaaaggagcttgagaaggagcccaagttcttgaagaatggtgatgcagggatgataaagatggttcccaccaagcctatggttgtggagactttctttgagtacccaccccttggacggtttgctgtcagggacatgcgttagactgtggctgttggtgtcatcaagagcgttgagaagaatgatccaaccggtgctaaggtcaccaaatctgctgccaagaagaaatg

SEQ ID NO: 26300 - DNA, 347 bp, Gossypium hirsutum
  Clone ID: LIB3147-045-Q1-K1-G10
ggcgtgtaatccgttccttcgaacatcgagctcaaaaatcaagccggcctttaatttttcgggccaatgcaaatccggttgaagcactgggtgtcattcgtcaagcaaaggataatttctagggcttgtttagacatcatttctgtatgtgtataggtgatgttagctcttccatatgtgaaataaaaaaccacaaatgtttaccaatgttcatatgctttgatttttctttttggttctttcgaaattctcttgagctaatctcaaaatattattttgcttatttcctcataacaattttttattcctttgcctcttatatatatgtaattgtttaacattaaaat

SEQ ID NO: 26301 - DNA, 321 bp, Gossypium hirsutum
  unsure (1)..(321): unsure at all n locations; Clone ID: LIB3147-045-Q1-K1-G11
cgttttcaatgagcttcctgatgaatttggtgctgaggtgaaccaactcatgagtctgaagctcgagggatccgtgggttaagtatgatgaaggttttattcaaccgaggtcaagttggacaatgaaataattttgtcaatgaaatcaataaagttcaagctcttagcatctttttacaaatgactagttagctgtaatgtactttgctgttcctgaagtgctgtttagtgtatttcctggaatatacctctgtgtatatatttgatctcttaaaccatgaaaaactgtgttacatgcantaaataaaaaataaaatataa

SEQ ID NO: 26302 - DNA, 486 bp, Gossypium hirsutum
  Clone ID: LIB3147-045-Q1-K1-G12
acgcccactcttatcgagctcaacatgcctgaacagagtgatagcgtgagatcgaaatggaacaaagtggggaaggcatcagtcgctgccgctccaccatcatgagttcagtttcgaactcgatgttcatccataattttcattcattcagaaatggttattttatgaaaccaagatttgtttccacttgcagtccattcaagtcattcattgtttcatacggtctagaaggtgatcaaaaccccaaaaaggtcaaggttcatatccatcgaaattttttgtgtataaagtactctttatccgcaaaacactgtgtttagggaactcctagtttgccatttttggctattcttgggagtcctgcccaactcatacatcagtttctgtttttcattttttcacgctatccatcatagttattcccagttagttgtttccggagtcggatcttctcctcgtcatgactggtccaggaccattcatata

SEQ ID NO: 26303 - DNA, 211 bp, Gossypium hirsutum
  unsure (1)..(211): unsure at all n locations; Clone ID: LIB3147-045-Q1-K1-G2
aaaaaaaaaaaaaaaaaaaannntataataaataaattttaaaaaataaaatatattaaaaaggagtgaaataaatataagaaaaagggtctctccttctaaagtttccaactttcccttcccgttcttgcaacttcatattttttctatattgttacctaatttaaattcacagtccgtttttttacaaccaccttaactgtaaaaacct

SEQ ID NO: 26304 - DNA, 339 bp, Gossypium hirsutum
  Clone ID: LIB3147-045-Q1-K1-G4
cgtaaaccctttctggaaaaataatcaacaccacgctcaacaacaacagaggaataatgggttccttgtaggtgaagttcaaaacacaggtattcaagaactgtatcaaaggctcaaatcatcatcaagttattactctgatacttcagcagtaattctaagcaatgtcgcttcttcttcatcaacatccattttggagtcagctccagttgctgggggagaattgggttactggaatccggcattttcatcatcgtggtctgatcttccaacaactaatggtgcatatccttaaaataaccctttacctttcgtttaatctcaccttttttttttata

SEQ ID NO: 26305 - DNA, 496 bp, Gossypium hirsutum
  unsure (1)..(496): unsure at all n locations; Clone ID: LIB3147-045-Q1-K1-G6
ggcgtccgcccacgcgtccgcgagtcccctgttaccaacaccacagcagcagcagcagcagcagcaacagcgacagcttagtggtaacttaatgcagaagaaccatccacagtctcctcagggtaaccaggttttacaacaacaaatgatgcaacagctgtaccatgatatgtctaataacaatactgcagttcaacagcaacagcagtccctgagtgggcagaatgggaatgctagtgtgggaagaaatggaatgggatacggtaacaacactgctgctccagctgtagctacctctaatgtatccggaagtgtagcagggcctgctccgagtcgaagcaacagttttaaaggtgcttcgaacagtgattcctcagcagcaggtggcaacactggattcaaccacagagcacctgatttgtctcagactcttcattngcaggacgatatagtttcggatatagctcaagagttcctcgacaatgtggtttttaac

SEQ ID NO: 26306 - DNA, 255 bp, Gossypium hirsutum
  Clone ID: LIB3147-045-Q1-K1-G8
tcccggtcgcgcacgcgtccgcaaatctcaaggaaatcctcctacaattgccaacgcttctaccctctccttggtatcgggcgtttcttgcttttttatacacagaacaaaaattacaatttgataatttatggcagaaagaagtgtagtgaagtaggcttcagcaactatggttttactctgcatttttatatatcggattttcagctgtagatcccatgttcctgaaatgttgaaactgaatttttatttttt

SEQ ID NO: 26307 - DNA, 264 bp, Gossypium hirsutum
  unsure (1)..(264): unsure at all n locations; Clone ID: LIB3147-045-Q1-K1-G9
cggacgcgtggggtttgtaatgcttgttgatctttaaagaaaatagtggggaatgccccagagaagcttctccaattactttcccttggtttcatcttcattatccttttcttatcaaactctgtttaaggaatgctgtttaattaatgggactntatccgtatgtctaatataaaaaaacccgtttgatttatataatatattataattatttctaaaattatataaatattaaaaataatttataaatttataaaaattttt

SEQ ID NO: 26308 - DNA, 506 bp, Gossypium hirsutum
  Clone ID: LIB3147-045-Q1-K1-H1
ttcctccgtccttaacgacgagttcattgcccatcgcctcggtctcatccctctcaccagcgaaggcgccatgtctatgcgcttctcccgtgactgtgacgcttgcgacggtgacggtcagtgcgagttctgctccgttgagttccatcttcgcgccaaattcatttccgatcaaaccctcgacgttaccagcaaggatctctatagttccgaccatactgttgttcccgtcgatttcaccgataacgctggctacgattccactgagcctagagggattattatagtgaagttacggcgagggcaagagctgaggctgagggcaattgcgaggaaagggatagggaaagatcacgccaaatggtcacctgctgcgacagtgacttttatgtatgaacctgagattcatattaatgaggatttgatggaaagcttgacgcttgaagagaagctaagctttgttgagaagcagccaactaaagtctttgacattgacccaaataccc

SEQ ID NO: 26309 - DNA, 316 bp, Gossypium hirsutum
  unsure (1)..(316): unsure at all n locations; Clone ID: LIB3147-045-Q1-K1-H10
cccacgcgtccgctttatggtcttattgtcggcattatcttgtcatctcgggctggacaatggggagcagaataagataactcaagtgctgcatagtattctcttattgattttatctgtagcactagaccgaaaaccatttcgatcaatatcaggttagttatggttggacagcangtgccgtgttcgcacacaaatattgatgnaacaattttttttggtggatgctcttttcctctttgtagtagtagaaattgagtttctctttaagtcttaataaaatgtnttggagcttttccttgtttgattctttttc

SEQ ID NO: 26310 - DNA, 494 bp, Gossypium hirsutum
  unsure (1)..(494): unsure at all n locations; Clone ID: LIB3147-045-Q1-K1-H11
cccacgcgtccggcttagcttaaaaaatcttgaatccgtactctcctacttccctcgttatcgtcaatggcttcggacaagaagattaagatcgggattaacggatttggaagaatcggacgtttggttgccagagttgctcttcagaggaacgatgttgaactcgtcgccgttaacgatcccttcatttccaccgattatatgacatacatgttcaaatacgacagcgttcacggtcaatggaagcaccatgatcttaaggtcaaagactctaaaaccctcctcttcggcgaaaaacccgtcactgttttcggaatcaggaaccctgaggagattccatgggctgaagccggggctgagttcgttgttgagtcaactggagtgttcactgacaaagacaaggctgctgctcacttgaagggtggtgctaagaaagttgtgatatctgcccctagcanagatgcacccatgtttgtaatgggtgtaaacgagaa

SEQ ID NO: 26311 - DNA, 219 bp, Gossypium hirsutum
  Clone ID: LIB3147-045-Q1-K1-H2
tagtaaaggggttgaaatactgcaatgactcatatatagtgtctctcagccctctatgatataggcttgatactcaatcatctccacacccaaaaaaactatattaatgcctttatatatgtattcttatttgattgactataattttattaatgcctttattacatttgttgaggttgaatccttatttcattaactagaagctgctggtttttggct

SEQ ID NO: 26312 - DNA, 410 bp, Gossypium hirsutum
  Clone ID: LIB3147-045-Q1-K1-H3
aagcagcttaggcaaccagttcgcagccatggtgaagtattcgaaggagtcagataatcccacgcgagtcctgcaaggcaaggggctctgatctcagggttcatttcaagaacacaagggagactgcgtttgctatcaggaagttggctttgggtaaggctaagacgtatttggaggatgttatggctcacaaacaggccatacccttcagacgcttctgtggtggtgttggacgtacagctcatgcaaagaacaggcattctaatggacaaggtcgctggcctgtaaaatctgccaaattcattctagatttgctgaagaatgctgagagcaatgctgaggttaagggtttggatgtggattcactctatatttctcacaatccagttaaaccaggctcagaaacaaag

SEQ ID NO: 26313 - DNA, 319 bp, Gossypium hirsutum
  Clone ID: LIB3147-045-Q1-K1-H4
taaaaaaaaaaaaaccaaataaaaaattaaaaaaaaaaataaaaaaaaaaaaaaaataaaaaaatggggaaaattttaactaacagtattgcattctttcttaataaattccatttttcttcccctatttttactaattttaccccttttattcgccccccctctttcattatcttaaatcttccttcccctacttcccccctctaatccctttaattttgcccccttaaataaatttaccttcccccctcttaacaactacttcccgtaaaaccccctttccccccccaattaaacccttttaacccaaacccctttt

SEQ ID NO: 26314 - DNA, 422 bp, Gossypium hirsutum
  unsure (1)..(422): unsure at all n locations; Clone ID: LIB3147-045-Q1-K1-H6
cccttcgcaactttttaagctatcttaaatgcttgcagccgctgtgattcattcgaggatgcttcaatgttgttggaagagctccggttgtttgataatcaggtgtacggtgttgcccatgggcttcttatgggttatagggagaatgnttggatccaggctcaatccctgttcgatgaagtaaagtcaatggactcgtcaactgcttctgccttttataatgccctgactgacatgctgtggcactttggtcagaaacggcgagcccaactggttgttctcgaagggaaacgccggcaagtatgggagaatgtatggtctaattcttgcctagatttgcatcttatgtcatctggtgctgctcgagcaatggtgcatgcatggttgctaaacatacgttctgttgttttcgaagtcacgaa

SEQ ID NO: 26315 - DNA, 451 bp, Gossypium hirsutum
  Clone ID: LIB3147-045-Q1-K1-H8
ctgcgacgctgttctcgttaagagctcgcagccggagtgcgctgaaatgtcaccgggacgtgagacgtgcacgcgtggtcttgaccaacttcaacggcatttcatccaacacccgttttgccaacgcaatggggttcatggccaacaaggttgaagctggctgtgctgaggtaatgaaggtgtacctggaggaggatgattagagtggcggtctgtgaagtctaatttacttactagtttggcatatatgaatatgaacatgaatacgacatgcgtgctgttttctctgaattctattgaatttctaatataaaatatgcgatttcttctgtcaggatctttgtatttttttaattatttatttggaagacctgtgttcaatatttgtatttgaatacaaatatatgatattatttttattcaaattaatggaaaatgtgaagacaattga

SEQ ID NO: 26316 - DNA, 420 bp, Gossypium hirsutum
  Clone ID: LIB3147-045-Q1-K1-H9
gtgcaccggaactagccaagcttctttattggctcatggtggttggatacagccttcggagcgtggaagttcgatttgacatgcaaagggtacttggcactcctccaaaacttgccgagttgcctgcaggtgaaaatatatatgtgctggtgggcaactgcaaatatactcgatagcaaatttggatcacattaacctgctattatttatgtgtgagaaggggttcattcaaagtgatttactgcttgagaaaacttgaaaattttcgcgcatgccttacatttttggcttctatagtagctttaaaacttattatgaaacaagtgcttgcaacagtgacttctacctttaaatacaactgaatttggtttacgtgccgaaaataactgttttaaaggtattattaaatgatttgtttcc

SEQ ID NO: 26317 - DNA, 224 bp, Gossypium hirsutum
  Clone ID: LIB3147-046-Q1-K1-A1
attggtgagatggaatgtttatttaatcaaaattcctttgcagtgggcacaaatagttaacttttaatctattaaaaaaaaaaacttacctgtttattttttaaaaatgggggaatgggatttttttccgttttgtaggaaaatgattgtgcctgaaatcatctaagttgcgacgttgaatctatatgaccttgttgatattcatatatatttttttatttaga

SEQ ID NO: 26318 - DNA, 399 bp, Gossypium hirsutum
  Clone ID: LIB3147-046-Q1-K1-A10
agacatttcaagaacaatgctgcagaacagggttggaggatgtcggactcgcttcttaatccgggtcgggctcgactgcattgatgggctaaattggatgaacaagtttgaactctactgtttacccaaaattggttgttgagatccaatttctgaccatacattgcaattaaatagaggagcggaacgcgcatatacatgacacaaggggttctgaagtcagttagccctataccaatggaaggatgcgtctttgtgcaagccctcgattttctacactcgggcctttatttgtggaaaatgcattttcatagaatttatatatggtgtaattccatggtgtttaatattgtcagatttaaaataaattaatttctaatgcattgcatattatttaca

SEQ ID NO: 26319 - DNA, 383 bp, Gossypium hirsutum
  Clone ID: LIB3147-046-Q1-K1-A11
aatctctcccatactagtctctttgagccacgcccacgccattgtcaagttcagatgggccgatgagattgaaggatgtttgcggcggcataagggacccttccatgggagatgtggagatagtggagttggaaatttgatgagtaggggaagcattcatctcttgctgctgggcattggatttggagctggtagaccctgactccttttgctcacttttgtttatattttcttcaccacccttcctttcatgttccttcatttcctccaaatacatctcttcaaccattggcttgcacaggcggactcgagcatttataaatcaggttgacacctgcgaaccaacgtgccctatgttttttaatacaaatagagaattaaga

SEQ ID NO: 26320 - DNA, 374 bp, Gossypium hirsutum
  Clone ID: LIB3147-046-Q1-K1-A2
atttaggtgctgctacctgcactgttttagcgatttataatctatcaaaaggtcatcccgaccatgaagagcctcctgcatacccatatttgcacattcgcaataaggagttcccatggggtccggatggtctgtttgagacaaaggagcatcactagggatggccagacagatgcatatctttccgagttcggcgcatttttatcatttctctgagaaatcaatcagataattctgtggatcttttgtaattttagcactcgatttccagtttctggactttgaattgcaagttcatcaggttttctatatggttgtgcctgcctaccatactctgtttcgaaataataagattactgaatggttttgtgtgg

SEQ ID NO: 26321 - DNA, 347 bp, Gossypium hirsutum
  Clone ID: LIB3147-046-Q1-K1-A3
cccacgcgtccgcccacgcgtccgggattctcctcgaggtttcttgcatgccggttgatgttcctatcgacatgcttaatgatgatgacatctcaaaggaagaatgcatagatctgcaacagaggataaaagatggtattatcaaaagacctactgttgtggagctcgaagagaaagccaaaagtctgcatgaagatataacaaagcattggattcagcgagaattagttcaattgcagggtaaaattgattttgcgcatgagaagggacggaaatacatgttggaacgatttctgtatgaaagggaaatgctgcagaaaccgtttgaacagcagcgactacttcaa

SEQ ID NO: 26322 - DNA, 388 bp, Gossypium hirsutum
  Clone ID: LIB3147-046-Q1-K1-A4
gattttcaatgaaaagcaatctggtttggaagccccacagtcctttacctccattaagggggaggttacctccctctgttactcctagaggaagtgctcttaagcaaggaattcctccaggtcctataaaggaaattgctcctatgactaagaagggaaagaaagctaaatctgtgaagaaggctcggaaagtgataaagagtatgtatcctctagtcaaacgcacaaagaaattgaaatctacttcctcttagcagagtctgctcaagggaaatgcctcctatgtataagatggcgaagaaaactaaatttgggaagaatgctcagaaagtggataagaatgtgttttctctagtcaaacgaacgaaaaaaattgaaatccatgccc

SEQ ID NO: 26323 - DNA, 267 bp, Gossypium hirsutum
  Clone ID: LIB3147-046-Q1-K1-A5
ccacgcgtccggccacacattcaaatacaagttcgctaacacatcaatctactcctttgcttgttacagggggagttgattctcgaattcgctaatacatattctgaaggtgagaacagtctacgtgatctacgaaattttccagagattaatcatgtgaacaaatacatcatgttctcattaaatgcttttgtggatagttaacacaaccacttgacagtgttaatgttagaaatcatgaaattgaaccttttgagattaatacac

SEQ ID NO: 26324 - DNA, 265 bp, Gossypium hirsutum
  unsure (1)..(265): unsure at all n locations; Clone ID: LIB3147-046-Q1-K1-A6
ggcaaagtagacaggaaattatgactcaaatctttttctttattttacttcgttcatgtgagacatgaaactgcattggataattccctaatttcctcgcctggacaaatgcctgtagtatcgaggaggaacatatttactagttatatcatttgcaatcgcctgaattttgaggtactcttcgaaccaaaaaaaaaaaaaaaaaaaaaaaaaaaaaaaaaaaaaaaaaaaaaaaaaaaaanaaaaaaaaaaanaaannnnnaag

SEQ ID NO: 26325 - DNA, 280 bp, Gossypium hirsutum
  Clone ID: LIB3147-046-Q1-K1-A7
cccacgcgtccgctcttctcttattctaatataatctctatctcttaagaaagtagaaaatggcgagcagcaggacttccacaccattactttcattacttctttgccttgtgctactgtgtgaggtgggaatgctgatggctcaactttctgcagcacaagccccaggcccccaggacgcatgccccaacaagtgtgcaaagcggtgcaacctttcatggaagccaaaagatgtgcaataaaacatgcatagcctggtgccacaagtgtcccgatcact

SEQ ID NO: 26326 - DNA, 215 bp, Gossypium hirsutum
  Clone ID: LIB3147-046-Q1-K1-A8
atatttttgtgtgaagaagggttgtttcagttttattacccaagtacttgaatggtggaggttcattgcaattggttttctactttaatgcatacgtggtgattatggtttctctacttaaattgatatcttgtgattatgttaaaaaaaaaaaaaaaaaaaaaaaaacaaaaaaaacacatacaaaaacaaaaaaacaaaaaaaaaataaaaat

SEQ ID NO: 26327 - DNA, 309 bp, Gossypium hirsutum
  Clone ID: LIB3147-046-Q1-K1-B1
cccacgcgtccgcccacgcgtccggcagtggtagggaacgaagtcgaactgtttcacacgagcagccatggtgaagtattcaagagaaccggacaaccctactaaatcttgcaaagctaggggttctgatcttcgtgttcattttaagaatacacgagaaactgcattcgcaatccgaaagctacctttgacaaaggcaaaaaggtacttggaggatgttattgcccataagcaagcaattccattccgccgcttctgtggaggagttgggcgaaccgcacaggctaagaatcgacattctaatggaca

SEQ ID NO: 26328 - DNA, 319 bp, Gossypium hirsutum
  Clone ID: LIB3147-046-Q1-K1-B11
cccacgcgtccgatcagctcaaggcagaggccaaggcaaagggtgaggtgattagcggaaagaggcagcctgagggcccaaaacctggtttcatggtcgagggtgcgatgttggaaacggttactcccattccatatgatgttgttaatgatctcaagggtggctactagatctactctgttttttggtttattcttggcataacttaagtaagctttgttagttattttggatgtgttgtttacgttttgtagtttattttgaagagttactgcttctgcaaagattttaatcttatcaatcattttattttagagat

SEQ ID NO: 26329 - DNA, 425 bp, Gossypium hirsutum
  unsure (1)..(425): unsure at all n locations; Clone ID: LIB3147-046-Q1-K1-B12
cccacgcgtccgccccaaaccaccttgttctcccccctcctctgtctttctggcgggaggggttcaccaccactttggattctgcttctgggtgtgttgtttatggcttctggaacaatcgcagctccccctaggaagcctgtagatgtcccattctccagaaactatatgcctacttgggcttttgatcacattaagtatttcaatggtggctctgagattcagctccaccttgacaaatacactggtactggtttccagtccaaaggatcatacttgttcggacacttcagtatgcaaataaagctagtccctggagattctgcggngactgtcactgccttttatttgtcttctcaaaactcagagcatgatgagatagattttgagttcttgggcaacagaacagggcaaccatacattct

SEQ ID NO: 26330 - DNA, 378 bp, Gossypium hirsutum
  unsure (1)..(378): unsure at all n locations; Clone ID: LIB3147-046-Q1-K1-B2
gctcttcccgcttccgctctactcacgcgccgtctcctangcccatcgccgcttccttctccgccgttgaatctaccacctccaccgacggtcttggcaactccaagacgcctcttctcgaagtcagaggtttaactgccgtgattgctgaaaccaagcaggaaatcctcaaaggcgtcaacctcgtcgttcaccatggagagattcatgctataatgggaaagaatggctctgggaagagtacgttttctaaggttcttgtcggtcatccagattatgaggtgactggaggagatgttgttttcaagggagagaatttgcttgacatggaaccggaggaaagatctcttgccggactttttatgagtttccagtccc

SEQ ID NO: 26331 - DNA, 374 bp, Gossypium hirsutum
  Clone ID: LIB3147-046-Q1-K1-B3
ctttggtgttgtagctttctgctttgctcttttttggggggtttcaaaaatggttgagggggcaaggggaagaaaggaagaggttgtttccagagaatacaccatcaaccttcacaagcgtctccatggctgcacattcaagaagaaagctcccaaggcaataaaagagatcaggagatttgcagaaaaagccatgggaaccaaggatgtgagagttgatgttaaactgaacaagcatatatggagccgagggattcgaagtgtccccagacggataagggttcgcattgctcggaagagaaatgatgatgaagatgcaaaggaggagctttactctctggtaacggttgccgaaatcccaaccgaaggactca

SEQ ID NO: 26332 - DNA, 415 bp, Gossypium hirsutum
  Clone ID: LIB3147-046-Q1-K1-B4
cggacgcgtgggcggacgcgtgggttcatgtacacccgaggaagttcaacagcattttcggtcttgtgggactgtaaatagggttactatccgtactgataaatatggccagccaaagggttatgcttacgtggagttccttgaagctgaggctgttcaagaggctcttcttttaaatgaatctgaactgcatggcaggcagttgaaggttactgctaagcggaccaatatacctgggatgaaacaatatcggcctcgccggtccaacccttttatgcaacccagggacccatttatggctccatatttcttttctccttatggatatgggaaggttccaaggttgagaatggcaacacgatatagcccctattattagagacattaagggccatactataagctccaaatactt

SEQ ID NO: 26333 - DNA, 333 bp, Gossypium hirsutum
  Clone ID: LIB3147-046-Q1-K1-B5
cccacgcgtccgagatttttaattagggaagcttggaagaaggaggttcaaaaaaatgggccctaagagaggtggaaaggttgtggctcctgccaagaagaaacagccggagaaggttgttaatccattgtttgagaagcgtcccaaacagttcggtatcggaggagctttaccttcaaagaaggatctgcatcgattcgtgaagtggccgaaggttgttcgaatccaaaggaagaagaggatccttaagcagagattgaaggtcccaccagcgttgaaccagtttaccaagactcttgataagaaccttgcaacaagtttgttcaagttgct

SEQ ID NO: 26334 - DNA, 424 bp, Gossypium hirsutum
  Clone ID: LIB3147-046-Q1-K1-B6
tgtaggaattgatgactggtggagaaacgaacaattctgggtgattggaggtgtatcatggcacctctttgccctctttcagggtttactgaaggttctggctggtgtcagcacaagcttcaccgtgacctctaaagcagctgacgacggtgaattttctgagctttacctcttcaagtggacatcgttactcatccctcccaccaccttattgatcataaacatagtcggcgtcgtggttggaatctcagatgccattaataatgggtatgattcatggggcccattgtttgggcgactatttttcgccttttgggttattatccacctctaccccttcctcaagggtctgcttgggaaacaagaccgaatgccaaccattattttggtttggtcaatcctgctggcctcgatcttgacactt

SEQ ID NO: 26335 - DNA, 364 bp, Gossypium hirsutum
  Clone ID: LIB3147-046-Q1-K1-B7
cccacgcgtccggcaatgttgatatttgtgtaataactaagggtggcaaagaatactggaggaaccatttacaacctaatcctcgaacttacaccagctccaaaggctattcttttcccaagaagacagaggtcctcttgacaaaaatcataccccttaaggagaaagtggagatcatcgaaagaggcgacgccatggaagaatgaagcacttacgcaactgatgattagtatatcaactctctagcgttcatttatgctctatcaaagaactattttctgatcagtattgtgcaattgctcatctgtttgaccaaagattttgttggtaatcaaaccttttgagtttgttttaacattgcaca

SEQ ID NO: 26336 - DNA, 250 bp, Gossypium hirsutum
  Clone ID: LIB3147-046-Q1-K1-B8
aaaaataaccggcgccacccactcatccgcccacacttacttctatactcatatttgagtaataactaacgatgacaaataatgcgtgttcttccaattacaacctactcctccaacttacaccatcttcaaaaactattctttttccaataaaacataaaaacccttgacaaatatcataccccataaatacaattgtaatatcatcctaacatgctactcctattaaaaatcaaccattttctcaact

SEQ ID NO: 26337 - DNA, 308 bp, Gossypium hirsutum
  Clone ID: LIB3147-046-Q1-K1-B9
cccacgcgtccgaaaaaaaaaaaaaataaaaaaaaaaaaaaaaaaaaaaaaacattggggaatatacaaaaaataaaaacactaacatacaacaaaataaaataaaaaaataataaaaaataaattcggctccctttttaatggttcaacatttacttccctgttaatcccacttcataactttttttaatctcccttaattacaatcccctttccccagttttccaactatcaaattggaaaaaccctatcgtccctcaatttaattgcttttcctaaattcccttttttacccgtcctttttttat

SEQ ID NO: 26338 - DNA, 351 bp, Gossypium hirsutum
  Clone ID: LIB3147-046-Q1-K1-C1
cggacgcgtgggcggacgcgtgggcggacgcgtgggcggacgcgtgggggacatatagggggagtgtgaaggctatccgaagaaagacaaccggaacaggtaggatgaggtatcttcgccatgttcctcgcagtttcaagacgggtttcagggaaggtactgaagcagcaccaaggaagaaggttgcagcagcttctgcttaaaaggcaaaattgtaatggtatgaagttttgttttggatgaagccatgtttatgaggaaacatttagtgatgaagagtgaaattatgttccattggatgctttaagtgatatttagtttctatctgaatgtagctggcgtatattttga

SEQ ID NO: 26339 - DNA, 415 bp, Gossypium hirsutum
  Clone ID: LIB3147-046-Q1-K1-C10
cttctggcatgccttggcctggagatgaaggtgagcagaggtgggagcaagcatggactgctataaagaaggtatgggcttcaaaatggaatgagagagcatatttcagcaccaggaaagtcaaactagatcacgactacctctgtatggctgtcctggttcaggaagtaatcaatgctgactatgcatttgttattcatactactaatccatcgtcaggggacacttcagagatctatgctgaggttgtcaagggacttggagaaactcttgttggagcttatccaggtcgtgctttgagttttgtttgcaagaaaaacaatctcaactctcctcaagttttgggatatccaagcaaaccaattggtctcttcataaggcgttccattatcttccgatctgattctaatggtga

SEQ ID NO: 26340 - DNA, 382 bp, Gossypium hirsutum
  Clone ID: LIB3147-046-Q1-K1-C12
cccacgcgtccgcccacgcgtccgctatggatggagaataagccatagaactcacgggcaaaaccatggaaatgtggagaaggatgagtcttgggttccgatgtccgaagatctttataatagtttgagcagcaggaccaagtttctgagattcaaaatcccattccccctatttgcataccctgtctatttgtggcacagaagtccaggaaagacaggatctcacttcaacccatacagcaacttgtttgctccccaagaacggaaacatataatgacatcaacaacctgttggatagcaatggtggttttccttgtgtatttatcctttgtaatcgggccatccatgacattcaagctctacggcgttccctacttgatt

SEQ ID NO: 26341 - DNA, 398 bp, Gossypium hirsutum
  Clone ID: LIB3147-046-Q1-K1-C2
gttcttcaggcatatctgaacttgacagccaaccacctcaaggaacttacaaatgccaagggtcaagaagccctacgagtgtgcaatctacaacacaaaccgagcaaaaaccaaacatcatcaaccccggaaagatatcaactcagaaatccgaaaagttagccggaatcacagcaaagaatcaacataatcaaccaggagtagatgaaaaaagacttcgggcaagtttgaagaacataatggaagacatgccatgtgtgtcaacaacaggagatggtcctaatgggaaaagaatagaaggatttctttacagatatagaaaaggtgaagaagtgagaatagtatgtgtttgtcatggcagtttcctttctccggccgagttcgtcaaacatgctggc

SEQ ID NO: 26342 - DNA, 406 bp, Gossypium hirsutum
  Clone ID: LIB3147-046-Q1-K1-C3
aaacaaaccactcccatattaaacattgttggtgaaacaatgacgtcttcagctctgacaggtaagcttgaggcagatgtagagattaaggcttctcctgagcagttccatgaaatgtttgcccacaaaccgcaccatgtgcaccatacttgctatgacaagattcaaggatgcgatttacatgaaggtgaatgggggaaagtcggtaccattgtccattggagttatgtgcatgatggaaaggctaaaaaggcaaaggaagtagtggaagcagtagaccctgataagaatttggtcactttcagagtgatcgaaggagatctaatggaagagtataagagctttgtaatcacgattcaagtttcgcccaagagcgagggtagtggcagcgtaatgcacttgactt

SEQ ID NO: 26343 - DNA, 321 bp, Gossypium hirsutum
  Clone ID: LIB3147-046-Q1-K1-C4
tttaaaaaacgtatgggcttcaaaatggaatgagagaacatatttcatcaccaggaaagtcaaactagatcacgactacctctgtatggctgtcctggttcaagaagtaatcaatgctgactatgcatttgttattcatactactaatccatcgtcaggggacacttcatagatctatactcacgttgtcaagggactagtagaaactcttgttggatcttatccacttcttgctttgtattttgttttcaagaaaaacaatcttcaactctcctcacgtttttgggatattccaagcaaaccaatttggtctttttcata

SEQ ID NO: 26344 - DNA, 422 bp, Gossypium hirsutum
  Clone ID: LIB3147-046-Q1-K1-C5
cccacgcgtccgcttacagcatatcagaggttagcccatgtttagagttgcagcagagtgactgttgccttgggtccggccagattctatccatcacattagatttgcatcttgacccaggagaggaagtactattcgtctgcattgctcattttggaactagtggaatatgttgtttccagtcctggtttcccagccaaccttgcattctctgcactgagagatagaaaagccatagggaaagtgatgattgtatttgatgatatgggaaggcctaagctttaagcgattaggatttaactgggaggagatatgcattccttgctcaagcgccgaatctagaaataatataatatggaaaataatgaggatgtcaatggatggcactcctttgtttactttcaggatgcagatgattggca

SEQ ID NO: 26345 - DNA, 393 bp, Gossypium hirsutum
  Clone ID: LIB3147-046-Q1-K1-C6
gtttgaagatgacgatgaatttgaagaatttgaaatcgatggagagtgggatgacaaggaagaaggaaaggaagaaggaaaggaagtaacacagcagtgggaagatgaatgggatgacgatgatgtcagtgacgacttctcactgcaactgaggaaggaactcgagaataacaccaagaactgaaccagagttgtgcttctctattgacttgcttcctcgtttgaatttattttggtttcttgcaaaactgatgtttgagctttaactctttatgattgggatgtttgataaaaacaatgtgcagaagctggtctttatggttatctgaaatataaattgtgtgggtgtttgccttgtttaaactgggcccatgttttgcttttttttttttt

SEQ ID NO: 26346 - DNA, 404 bp, Gossypium hirsutum
  Clone ID: LIB3147-046-Q1-K1-C7
ctcattctctgtatcatctatcatttccttatttctactgtttcctcgctttccggggtcacatccttctcaggtgaacggagatggcaggaaaaggtggaaaggggcttttggcggcaaaaacaaccgccgctaacaaggacaaggacaaagataaggacaagaagcgcccggtttctcgttcatctcgtgccggaattcagttcccagtgggccgaatccaccgtcacctaaagactaggacttccgcaaatgggagagttggtgccacagctgctgtttacttggcctccatccttgagtacctaactgcaaaggttcttgaattggctgggaatgcaagcaaggatctgaaagtgaagagaatcaccccgagacatctgcagcttgctattaagggtgat

SEQ ID NO: 26347 - DNA, 75 bp, Gossypium hirsutum
  Clone ID: LIB3147-046-Q1-K1-C8
acccgcctcgacccacacattcgcacataaattttattaacaaacattttcttacatatacttactcctcattta

SEQ ID NO: 26348 - DNA, 157 bp, Gossypium hirsutum
  Clone ID: LIB3147-046-Q1-K1-C9
ttttttttttggaaataagtaaaagaaaatattgagaaatagaaatgtcaaactcggggagattgcgacacgtgtttcagtgttggtccccatacctttaaaaattgggcttggataaaaatattttatcttataaaataagtcttctatttttatt

SEQ ID NO: 26349 - DNA, 251 bp, Gossypium hirsutum
  Clone ID: LIB3147-046-Q1-K1-D1
cccacgcgtccgcccacgcgtccgaaattgatgaacatctgacagctattattgagctcgcactagtgatcatggacgaatattagctgctgcaaaaacctttctattatttaaaacaacatacatgctttagttgatcattatgtttgatagggattgaaagagggttagaagtatttacattttattttttctttatattacgtgttattaatctttatattataaattttttttatttttttttttat

SEQ ID NO: 26350 - DNA, 413 bp, Gossypium hirsutum
  unsure (1)..(413): unsure at all n locations; Clone ID: LIB3147-046-Q1-K1-D10
cccacgcgtccgcggacgcgtgggtactggccagaagaacaagattacgatcacaaacgacaagggtcggttgtctaaggaagaaatcgagaagatggttcaagaagcggagaagtacaagtccgaggatgaggagcacaagaagaaggttgaagccaagaacgcattggagaattatgcctacaacatgaggaacactgtcaaggatgagaagattggttcaaagcttgacccggccgacaagaagaagattgaagatgccattgatggagcaatccaatggttggatggcaaccagctagccgaggccgatgaattcgaggataagatgaaggagctcgagagcatctgcaatcctatcattgccaagatgtaccaaggtgcangggctgacatgggtggtggcatggatg

SEQ ID NO: 26351 - DNA, 392 bp, Gossypium hirsutum
  Clone ID: LIB3147-046-Q1-K1-D11
cccacgcgtccggaggaaaaaggacatttggctgctactgtaaagcactaaaagaggggaatacaaaaaacccaagcatttcttcctcctcgagtctctcaatcaagcccttccaacactcttcagcttgaactctccgcaacaatgtttcgatcagtagctcgatcggccgccggaaagcacctcctccgccgaggatatgccactgaatctgttcccgaccggaatgtcccggttttgggcgctgccggaggtattggccagcccttggctctcctcatgaagcttaaccctcttgtttctcggctggctctctatgatatcactaacactcccggcgttgcaactgatgtcagtcatgttaacaccatatctgaggtgcttgatttgtt

SEQ ID NO: 26352 - DNA, 220 bp, Gossypium hirsutum
  Clone ID: LIB3147-046-Q1-K1-D2
aggtttgcatgtaatgaagtatgaactaagaagattatggtctggtaaggtaatttgtggatatatgtatatgtagtcaaactaatagagactggcagcagatggctgaatacttgtgaattcccaagtggatacactattatattgtaatttcaagtaagattccatgtgagtaattttttttttatctaataaaaaaaataataaaaaaattaaataa

SEQ ID NO: 26353 - DNA, 119 bp, Gossypium hirsutum
  Clone ID: LIB3147-046-Q1-K1-D3
cggttttattatgatgtgcccttaactatccataaactactaactgaactatcaatcggggatatatcactaaccaaagcggaagatcattccaattaccttgattggacattttttat

SEQ ID NO: 26354 - DNA, 161 bp, Gossypium hirsutum
  Clone ID: LIB3147-046-Q1-K1-D4
cccacgcgtccgcccacgcgtccggcttatttggagttaaaaacatattatctatttgagtttctgtttgtattgtggcttggagacgaacgggaattcagtttcatttgaatgggcactaaaactatttgtgtcaaaaataaatatttttatattaaaaa

SEQ ID NO: 26355 - DNA, 258 bp, Gossypium hirsutum
  Clone ID: LIB3147-046-Q1-K1-D6
gttccactcttgaaggatacagagatacgggaccttatggatgcagctgatgtcgacaggggcgggaccatcgattatggtgaatttatagctgcaaccgctcacctcaataaactagaacgcgtggaacatttcgttgcagcattccgatattttgataaggataatagtggctatattacggttgatgagcttcatcaagcttgtactgagcataacatgaccgatgttttactcgaggatataatccgagaagtc

SEQ ID NO: 26356 - DNA, 260 bp, Gossypium hirsutum
  Clone ID: LIB3147-046-Q1-K1-D7
gaaaaagcaagagatgtactttacgatgaggaaaaatgccattaaggtataagcttgaaatatgacttaagatggatacctttatgttaatttcaaagggactactataggttatagttgaagcattgagttgaagaatattcgattacttcataacattccctataatgcaaaagcatcttacaattatgaattatagaatataaagagcggtgaatactcctttcttttataaaaaaaaaaataaacaaggcggacta

SEQ ID NO: 26357 - DNA, 65 bp, Gossypium hirsutum
  Clone ID: LIB3147-046-Q1-K1-D8
cgatcaaccaaccaaaaaagataaacaagatggtttcagggtcagggatctgcgccgggagagtg

SEQ ID NO: 26358 - DNA, 403 bp, Gossypium hirsutum
  Clone ID: LIB3147-046-Q1-K1-D9
gtatggtcaggtcttatggccatcaccatatccctcctttgggttgcaatcaatccggcatccaccactaaccaaatcggaggatcattccagttcccttgattggacattttttatgttaaaggtgaaacacttctattatcgtattcctttatttattccttttttcttcctcctccaagctgatatgctggtgaaaaaactaggcatgttctatgttatcatgtgccaattggaatatacttttagcagcatttttagtgagttttcatgggatagatccaacaaaaaactggtttccctgctcttttgttcttattggatgatgtttacgtgtactcactgaatagataaacttttttctttaactttttctggtggatcgccatctatatttatgctt

SEQ ID NO: 26359 - DNA, 385 bp, Gossypium hirsutum
  Clone ID: LIB3147-046-Q1-K1-E1
ctcaggatgcttcaaggtcggaatcttcttcaaggctgcatgcttcaaggcctgatgcggcgccaatggactttgttgtgcgcccccagtctaagattgatccagatgaaattagggcccgtgtgaaacaagttattcaagatcagcgccgtttaaagatgaataagaagttgcaacagttgaaagcaccaaaaaagaagaatttgcaggcgactaaacttagtgttgatggccgtggtatgctgaagtacctgtaaatgataccctagatgcccaaattggctatggtgtggagcttactttgccgttattagagatgcaaaggccagtataaaaagtgtcttgatgcaaatgtttgtgtattacaattcagctggaataatta

SEQ ID NO: 26360 - DNA, 425 bp, Gossypium hirsutum
  Clone ID: LIB3147-046-Q1-K1-E10
ctttgaagttcaaggacgcttccatagtcgaagagttccgtgttgctgtaatggcacgacaaaggtaacacagctactgttctgaagacacctgaacattccccttaagctgcagaagcttgaaaggtatctccgttagatctgatctatcctgaacttgccatttccagtagtcctctttcgttattgaggaagtatcgttgcttgggcatatgcttttataatgcctatgctcttgtatgtagcagagtccgagtcaaccgagaccagttcaatctgtttttgattgttataaatcgtgtatgttggagagtcggtcaatagagaccgatcaaatcttttatcggtttgttataaactatgtaacctgccggagaatgtttcaacctctcttgtttttcatggttcccgtcatggaattaaac

SEQ ID NO: 26361 - DNA, 308 bp, Gossypium hirsutum
  Clone ID: LIB3147-046-Q1-K1-E11
tgatgcctgttggaaaacagagaggagctggtcttggaggaggaaatgatgagagagggcagacaatcaataattgttgacttaaaatgattgattttcaaggaattcttgtgtcattgttttggcagcaaccaacagacaccatgttctttataccgctttgttgcggccgggtatgttttaccggcaggttacacattatatgcctcatttttcttggaaagtgaaaattcttcaagtgcacttcaaaagaaaagcacttgcaaaggatttttattttgaaaagatctctatgaggaaccccagtt

SEQ ID NO: 26362 - DNA, 387 bp, Gossypium hirsutum
  unsure (1)..(387): unsure at all n locations; Clone ID: LIB3147-046-Q1-K1-E12
ggagatcaaaggttcccaatatggagtgcagctagagagtgctgtgagggaccgattggcagctgacgacaaatacgaagaggaagaggaagaagccttggaaaaagttgttgaattcttccagtctaaatatttcaagaaggattcagtcatcacttaccattttccagcaaattcagccactgctgagattgcattcacgacggagggaaaggaggaagcaaaaatcaaagtagagaatgcgaatgtggtcgagatgatcaagaaatggtacttangaggaacaaggggagtgtctgcaactaccatttcctccttagctaataccctctccgctgagctttgcaaatgaacccatgccgttttgttaccaagtcttttctacta

SEQ ID NO: 26363 - DNA, 401 bp, Gossypium hirsutum
  Clone ID: LIB3147-046-Q1-K1-E3
aggaagtgtagttggtgcaaaactttgatatgggtgtttcttttgttgtcttcccttggtgtttctttcttttttctcttatatattttagctcaggatcagaagttgttaccattcatgttaatgaagcaaaaaacttgctgcagtcaggctaccgttacatcgatgtcaggacagtggaagaattcgagaagggacatgtggaagcagagaatattcttaacatcccatacttgttcatcacaccagaaggtagggtgaagaatcctgagttcttgaaggaggtttcatctctttgcaaggaggatgatcgtctcatagtgggctgccaaagtggggtgagatcccttgctgcaaccgctgatcttcttaaaattggttttaagaatgtgcacgacatg

SEQ ID NO: 26364 - DNA, 379 bp, Gossypium hirsutum
  Clone ID: LIB3147-046-Q1-K1-E4
gaataaccgggcaaaagaagctgtcgaaggtgatcgtgccggataagtggaaggaaggtgccagcaacacaaacgaaagcggtgggcggaaaattaacgagaataaactcctctctaaaaagcgaaggtggactccttatggaaatactaagtgcatcatttgcaagcagcaagtgcaccaagacggcaagtattgtcacacttgtgcttattccaaaggtgtatgtgcgatgtgtggcaagcaagtgctcgacaccaagctttacaagcagagcaatgtataataaggaaggggcattagctgttcttcaagtagataccttaattgctcgttgtcattgacaacacatgaacatgatcgcgaaggctgtataagatt

SEQ ID NO: 26365 - DNA, 219 bp, Gossypium hirsutum
  Clone ID: LIB3147-046-Q1-K1-E6
gaggctattgtctccctggtttaggaaagacgtttccttttttctcagttccagattgagcaaaaacattcttggtcttgcttattttaccacagtcgtttccaaaatgtctctcaaaaagatgtctttcacttcaaaagttgataactttgatgaggtttgaattttgtcgccatgtcaattttttacctaccatattttttctttttatgcaatttt

SEQ ID NO: 26366 - DNA, 378 bp, Gossypium hirsutum
  Clone ID: LIB3147-046-Q1-K1-E7
cccacgcgtccgcccacgcgtccgctacttgatttggccacattggcaacaactttatgggttatttatatgatccgtttcaaactaaagtccagctacatggaagacaaggacaactttgctttatattatgttcttgtcccatgtgctgcacttgccctatttattcacccctctacttctcataatctagtgaaccggattttctgggcattctgtgtatatttagaagctgtttcagttctaccccagctgcgagtgatgcaaaataccaagattgttgagcctttcacagctcattatgtatttgcactgggtgttgcaaggttcctcagctgtgctcactgggttctccaggttttagacagtcgaggacac

SEQ ID NO: 26367 - DNA, 392 bp, Gossypium hirsutum
  Clone ID: LIB3147-046-Q1-K1-E8
cccacgcgtccggggcgcttgccattgcactccttgccactatcctccatgcaagtgggagaacacctaacctgaaggctcgtcttaacactttccgtgaggagttccgtgcagtttggcgcaattacagtgagctgtagctcatatagcctatagcatcctcaggcagtgaaggaaggttgtgataatgtggaaactcgtacaacatgttattgtaaggttggatgggtgctgttgatgtttctaaaaagatagcttgtttggctgaaggctgctaatctttgcaatagtggagaagttgtaaattgtcaattccttatttgtttgtgtaaagcagaccatttatggttgacttcttattggaaaaaatttttactcaatacccctttctt

SEQ ID NO: 26368 - DNA, 362 bp, Gossypium hirsutum
  Clone ID: LIB3147-046-Q1-K1-E9
cggacgcgtggggttagcctgcatgtaccatggtttagcttactttattcaactgggggttaaatccctatgtttgcaaggcataattagcgatgttaggagaagttgatcttcattaataaactgatttgaggatgaaaacgtctttatccaatcctttaaattcaataattgaaaaatacccaaagaagaagaagctctcaatagggaatagtcctccacccaatggtggtagagccaccaataaagtgcaattcagggaaaaagatggggtgatgaaggtggaaattctaagatgcatcaaactgagaagcctttttttttttaggacaagctgatggatgcaaatttgggcaatgaaa

SEQ ID NO: 26369 - DNA, 422 bp, Gossypium hirsutum
  Clone ID: LIB3147-046-Q1-K1-F10
taagccgaatcctgctgaagtggacactgtgttcgacgttccactggaaatgttcattaaggatgaaaatcgaattgctgaagagagagaaatgatggaagaaaagtatcttcttcacttctttgactatgaaactgagaataagaagtatctaatttggggtttaactgctggcattttaatcagagctgcttcagtggtctaccagcaaccaccggccttcccggaacagagtcccaagtatgaatttcttagggatgtgggcaaaattaccgacgcacattgaatatagtctaagaattttaagcttgccttgtattgcaatggggcatcttcaaaagtaataatcttgcaaaaaatctaaacagagattcattcaaagcaatctttcccttcgtttactcttctttaacaagattaga

SEQ ID NO: 26370 - DNA, 260 bp, Gossypium hirsutum
  Clone ID: LIB3147-046-Q1-K1-F11
cccacgcgtccggctgaatattcaaaaccattgattcaatatctagaggcccttcccgaagacgagaaggttattttggtgggtcatagcagtggaggtgcttgcctttcttatgcattagaaaatttcccagaaaagatctccaaagcaatcttcctttgtgctacaatggtgtctaatggtcagagacctttcgatgtgtttgcagaagagcttggttctgctgaacgtttcatgcaagagtcagaggttttgattta

SEQ ID NO: 26371 - DNA, 326 bp, Gossypium hirsutum
  Clone ID: LIB3147-046-Q1-K1-F12
cccacgcgtccgcccacgcgtccgcccacgcgtccgcccacgcgtacgatgacgaaggcgtttgattatagtacttaggcatatatttttgttattgtattgttacattttaaaaaaaaatcttaattagtgtttatgattgtatggtaaactttgattatcttgactgattagagtttggtttacgtttaaatgtgtacatagatagtggtttccacagaaaaacatatagattaaaagtttgaatgggaaaagaaaattgacatggatgaatattaatccaatacaccgataatcgttttaaaaaattttactgaattatatat

SEQ ID NO: 26372 - DNA, 421 bp, Gossypium hirsutum
  Clone ID: LIB3147-046-Q1-K1-F2
cccacgcgtccgcccacgcgtccgggttcagtcggttgttaagccgattaagaaggagagcgaagagggcacctttgaagaagaatccactcaagaacttgaatgctatgctgaagttgaacccttacgcaaagactgctagaaggatgtctcttttggctgaggcacagcgtgttaaggccaagaaggagaagcttgacaagaagaggaagcctatatctaaggaggaagcaaccgcaatcaagtcagctggcaaagcatggtatcaaactatgatctccgacagcgattacacagagttcgaaaacttctccaagtggttgggtgtgtcgcaataaaatttatttttctgcgggagggtttgaatcaattttggttttcggtggtttttgacattttaattcaatttcgatgaatggtt

SEQ ID NO: 26373 - DNA, 335 bp, Gossypium hirsutum
  Clone ID: LIB3147-046-Q1-K1-F3
aaaaaaggtcgcccacgcgtccctgcgcttgttatcctcaatagtcatattcaaactgcctacgtttgaaagttcgggcatttttagacaagtatgaattctcaaatcccaccataattcataattcggtgaataattattcccagtttgcttctttcccaatctacatttatggatcctacagcacatttgaatcctgaattatttaataatatggttgctttgttatacattggacattttgtggtctatgaaaattggttagatgattcgcttccaaattaatgtttgcaagctactatttaatcaatttattgttcctttgacttatattg

SEQ ID NO: 26374 - DNA, 212 bp, Gossypium hirsutum
  Clone ID: LIB3147-046-Q1-K1-F4
tcctccaagaaataaaacgcttcatcatttgatcactcttacacacttcttcaccggaacctggggttcttttcaacccctcagtgtaggaatacaaacacgcctttaccaacatctctgaattctttccaccttaatatttcaagaacgattcactcattacttaccattttaacacccattattcccctagtaaaatattctttacgaca

SEQ ID NO: 26375 - DNA, 274 bp, Gossypium hirsutum
  Clone ID: LIB3147-046-Q1-K1-F5
cccacgcgtccgcccacgcgtacgcaaatttctagaagggaatcaaccttcactcccggggggatgattgctcgaaatcagaattctagaaaaaaatcaaccttcacctctgataggatcattaccataaattgaatttctagaaaggaatcaacctctacttctgatggggtcattaataaaaaccaaattactcgaaacgaatcgacttccatttctgatggaatcatttctagaaatcaacattctaaaaaggaagctgtgtgtgctaatg

SEQ ID NO: 26376 - DNA, 346 bp, Gossypium hirsutum
  Clone ID: LIB3147-046-Q1-K1-F6
cccacgcgtccgcaaatgcctacgggaacgctgagcagcaaagtgaagccaagttcaatgggaaaggatgggccaccaaagaaaccaacaactacaatgtcaactattacaatggtaacaatgaggccttgttcactgagaaagggtggagtaccaaggaaaaccagaatagcaacaactattacaatggtaacaatgaggccttgttcactgagaaagggtggagtactaatgaaaaccagaatcgcaacaactattacaatggtaacaatgaggccatgttcactgataaaggatggagttctaatgaaaaccataacaacaacaactattacaatggtaacaa

SEQ ID NO: 26377 - DNA, 346 bp, Gossypium hirsutum
  Clone ID: LIB3147-046-Q1-K1-F8
ctgctctagaattatatctagttaatagaagaacataatctgttttgttttgagtctgcttggctgattggctataataatctctttaatgtgcacaaaatactattgattgaagtcatgcatgaggcaacacaaggaaaacaaaatttgtatctaagaataattgaagatattgatattgaaaaaaaaaaaaaataagaaaataattattataaattaataaatatataataaaataaaataaaaataaaaatataaataataataaaaaaataaatataaaaagggcgggccgtttaaaaggaccaaagtttattaccccttcctttccgaaataaataacttt

SEQ ID NO: 26378 - DNA, 250 bp, Gossypium hirsutum
  Clone ID: LIB3147-046-Q1-K1-F9
tatgactataaaaaagtgtgaaccttgtatcatgtgttcatctttactcctgttgtggaacctatgtttgtaagaatgttcggagaacatacacgaataacatgtctttgtattatgtgttaacctcttggaatacagtgcagacctttggaatttacagtgctatagatttatgtttgacggcgaataaaataataaataattttatatttaaatttataatattttaatttttttaaattttttttta

SEQ ID NO: 26379 - DNA, 154 bp, Gossypium hirsutum
  unsure (1)..(154): unsure at all n locations; Clone ID: LIB3147-046-Q1-K1-G1
gcggcgcgagaaaaaannggaaggagaacgagggcaaagcagaagggggagaaacacacggagcgcggcggcagcancnacagggagaggcaaaccaaaangcacaaagaanagaggaggggcaacaggccacggaacaacgaaacaggggaaa

SEQ ID NO: 26380 - DNA, 410 bp, Gossypium hirsutum
  Clone ID: LIB3147-046-Q1-K1-G10
accactctatctaagaacagacttgtttgatggccgagcagagaatggctgcagagggttgtaaacactgtaatgaaacgatttagatggggatttgtgcttgctggttttattgcactagccatggcagcaataagctggaatcttgaaagcagtcaaagttactggatttggcacagtgtttggcatgttgccatatattcatcttctttcttcttcctctgttcaaaagtaataaccataaatagtgggaacagaacacccaccgacgcaaactatcagttgactcagcaggattctctctctcaaggtgcataagaagaaggaagaattttcagagaattaaagttcacataaggaaaataagttactattaaaacatgcaggaaaaaagttttatctggcaatat

SEQ ID NO: 26381 - DNA, 425 bp, Gossypium hirsutum
  Clone ID: LIB3147-046-Q1-K1-G11
ggaaaaacggggtcctacttttggcttcaccatgaacgttctctacggagattacagttgcgggcaaggcgatattgatcccatgaacatcatcatctcccattaccttcattaccttgacttactaggtgtcgggcgagaggaagcagggccacacgaggagcttagctgtgccgaacagaaagcattcaacccaaccccagctccacctgctgccagtgctttctaatatttggttcagccaatttcattgttaaaatgtagttgtcaatgaacggtaatttaataagagagctgggcaattatgttgttgtaaaatcatggtctatgtcggtgtgagaaaagggcccatcaatttcatgatattatatataagtatatacgtttgattttgtgctgttaggcggtctttattatttgcattt

SEQ ID NO: 26382 - DNA, 130 bp, Gossypium hirsutum
  unsure (1)..(130): unsure at all n locations; Clone ID: LIB3147-046-Q1-K1-G12
gagaaaaaaggagtcagatggaggtggaacgagtccaagccattgtttcttcatctggggctaaagacaatatcccactagagtttgttcgacccgaaaatgaacaaccngcaattacaacatttcatgg

SEQ ID NO: 26383 - DNA, 247 bp, Gossypium hirsutum
  Clone ID: LIB3147-046-Q1-K1-G2
ggggcgacgccacgcgtccgcccacgcgtacgtgttctccccctttcctcttggtgcctggtttcagttccatctattgggccatggatcttacacctcagcaacttatccaattcaacggatacgacccatacaagcccatctacattgcaatcaatggacgcatctactacatcaccgtcgggaaatacttatacggacctggcggagcctactccatcatcacaggcgaaaattccaacgtagc

SEQ ID NO: 26384 - DNA, 272 bp, Gossypium hirsutum
  Clone ID: LIB3147-046-Q1-K1-G3
caacttgtgcatcatacccaattgttgcttgatccagtcgatgaaccgtgttggatgatgtcattcctttgtgttatagaaggcgtctagttatggtctacaaatgttgtagttgttcagggttatggtctagttgaaacccatgggttcatgtacaataaggatccaaagacatgtaagatgcaaatcttatgtacactttttctgtttaatttttaattatttcatgttagtgtgttttttattttttttttttcttttgtttattattt

SEQ ID NO: 26385 - DNA, 374 bp, Gossypium hirsutum
  Clone ID: LIB3147-046-Q1-K1-G4
gttactggggctgaaaatgaaaatgagctcattctggtaactgttcttcgggggttttttgatgcagttggccttcttctaagagggactgtggacaagaaagaggcactggagaacttagatctcattttgttatgccttgatgagattgtcgacggcggcatcatcctagaaaccgatgcgaatgtcattgcggggaaggttgctagtcatagcatagatgcggctgctcctttatctgagcagacaataagtcaagcattggcaactgctcgggaacatttagcaagatctctcctcaagtgatgattacaaggggaaggagcaaagcaaagagtttcgaattgttattatttctagctttttattattct

SEQ ID NO: 26386 - DNA, 322 bp, Gossypium hirsutum
  Clone ID: LIB3147-046-Q1-K1-G5
gtgggttcaatattctgtggctcacccgttcgatttgagtgaggtcctgaagctgtcatgttagatgaaattcccattgcatgctattgctgtggaaagagaggatacccttttgccttatcctacggttttaattttctagggtttaactgttatcatcgttcttggttttatttaatgtgttcttttttgtttctgtttttttgagattgtctatgtgaaactgtatatttagtatagtgggtaaacgaattttctgcatgtatttgatatttaggctttggtattggaatgagtttttttgggctccttaattataatt

SEQ ID NO: 26387 - DNA, 188 bp, Gossypium hirsutum
  Clone ID: LIB3147-046-Q1-K1-G6
gattgattgatgtttcacacttaaaaaatcatagagcaaatgttattgtaattacttttggtttgatttttgtatgcatgcatagcatgcaaagattatcgcaagctcctagactgcgtaaattgggtgattaacttatgagacgggacgagctttactcgaagtaatataaccagcttagttgcact

SEQ ID NO: 26388 - DNA, 374 bp, Gossypium hirsutum
  unsure (1)..(374): unsure at all n locations; Clone ID: LIB3147-046-Q1-K1-G7
cccacgcgtccggctttcagcatatgggatgtaggaggtgacagtaactcacttgatgttcttccaattgcttgtaaaaatgctgtagcaattttgtttatgtttgatctaactagccgatgcactcttaacggtgttgttggatggtatagtcaagcaagaaagtggaatcagacagcaattccaatattggtaggaccaaatttgatgattttgttggtcttcccccagatttgcaatggactatagtgactcangcaagagcatatgccagagcaatgaatgcaacccttttcttctcaagtgctacacataatatcaatgtgaacaagatctcaaattcatcatggctaaactctttaacttgccatgga

SEQ ID NO: 26389 - DNA, 240 bp, Gossypium hirsutum
  Clone ID: LIB3147-046-Q1-K1-G8
actgtaatgaaacgatttacatggggatttgtgcttgctggttttattgcactagccatggcagcaataagctggaatcttgaaagcagtcaaagttactggatttggcacagtgtttggcatgttgccatatattcatcttctttcttcttcctctgttcaaaagtaataaccataaatagtgggaacagaacacccaccgacgcaaactatcagttgactcagcaggattctctctct

SEQ ID NO: 26390 - DNA, 355 bp, Gossypium hirsutum
  unsure (1)..(355): unsure at all n locations; Clone ID: LIB3147-046-Q1-K1-G9
atggatttatgtttgaacagacttgatagatggccgagcagagaatggctgcagaatgttgtaaacactgtaatgaaacgatttagatggggatttgtgcttgctggttttattgcactagccatggcagcaataagctggaatcttgaaagcagtcaaagttactggatttggcacagtgtttggcatgttgccatatattcatcttctttcttcttcctctgttcaaaagtaataaccataaatagtgggaacagaacacccaccgacgcaaactatcagttgactcagcaggattctctctctcaaggtgcataagaagaaagaagaattntcagagaattaaagttcacat

SEQ ID NO: 26391 - DNA, 318 bp, Gossypium hirsutum
  Clone ID: LIB3147-046-Q1-K1-H2
gctcactgtctgatatgggtaacaagtagaagttaaaggttttgtgacacatttagatgtgcttaagtagttctacaacgttatgcagcatcgttgacatgcaggtaaatctccggattccccaacaggaaattgaaagtataaacagtattttggaataagttagcaattaggatctgtttccatgttatcatgtattgtaatacagaactcatctaaaattatcatgccctttgccttgtaagagttttggtcatgttcacggtcacgtttatataatggttatggtaacatcttggaaaaaaaaaaataaatagg

SEQ ID NO: 26392 - DNA, 320 bp, Gossypium hirsutum
  unsure (1)..(320): unsure at all n locations; Clone ID: LIB3147-046-Q1-K1-H3
gaggaccatnttggaaccgtccaacacgaagaagagagggcggataccaatatcaccggggcacttgccaacattccaagcgctctcagcaactttactactctcctttcacagttcaataacctaggacttaacacaactgacatggttctcctgtccggtggtcacaccatcggcatatcccattgcccggctgtttctcctcgattgtacaattccaccggccctggcggaatcgacccaaccatggacagtgagtacgctgaaaacctcaatgtcaacaatggtaaaaccgtgagcgataacaccacaatatttga

SEQ ID NO: 26393 - DNA, 413 bp, Gossypium hirsutum
  Clone ID: LIB3147-046-Q1-K1-H7
cggcaggtcatgatcaggccatcctcaaaagtgatcatcaagttccttttggtcatgcagaagcacggttacattggagagtttgagtacgttgatgatcacagatctggtaaaattgtagttgaactgaacggaaggctgaacaagtgcggggtgatcagtcctcgcttcgacgtaggagtgaaggagatcgagggttggactgccaggctgcttccatcaagacagtttgggtacatagtgctgacaacatcagctggaataatggaccatgaagaagccagaagaaagaatgtaggtgggaaagtacttgggttcttctattgaggggatttcattagaattaaaacttttatgaattatgtttttttcctttaaacctcttaattagcaatgcctattttctaaatttt

SEQ ID NO: 26394 - DNA, 416 bp, Gossypium hirsutum
  Clone ID: LIB3147-046-Q1-K1-H8
cagagccgcatcttcttcttagcctcagtcggggtgaacagaaatggcgaagtcaaagaaccacactgcccacaatcaatcttacaaggctcacaagaatggcatcaagaaacccaagaggcaccgccacacttccaccaaagggatggatcccaagttcttgaggaaccagaggtatgcaaggaagcacaacaagaagagcggtgagtctgctactgaagaagagtaaatttttaatggcaaaagatctagctttgattagtgttttccaattgttgtttttccccccggtggaattgagtgttcgtttactataatcaccttagttgaaatgttattttgggattgttgaatctcattttcaaaagagatttgaagcttggagcttattaatattaaaaacatgttttgagctt

SEQ ID NO: 26395 - DNA, 423 bp, Gossypium hirsutum
  Clone ID: LIB3147-047-Q1-K1-A4
gatttcaacaaccatgagtggagtcacatgctgccttcgcttccctggccaactcagttccgatcttcgaaaactagcagtaaacttgatcccattcccacgcctccattttttcatggttggttttgcacctttaacatcccggggttcacaacaataccgagctttaacgatccccgagctaactcaacaaatgtgggattccaaaaacatgatgtgcgcggctgatcctcgtcatggaaggtacttaacagcctcggcaatgtttcgaggcaaaatgagcaccaaggaagttgatgaacaaatgatcaatgtccaaaacaagaactcttcgtactttgtggagtggattccgaacaaggttaattaagtggttgcgacattccaccaactgggttgacgatgtcatcgacgtttatgggg

SEQ ID NO: 26396 - DNA, 245 bp, Gossypium hirsutum
  Clone ID: LIB3147-047-Q1-K1-A6
tcacaacgattgaattaaccaaactggggtgtagtgctaaaaaacaaatggcagatgggggtgtaggttaattttgtgagggactttgatgagaatttgtgctggaaggatgaatcacttttttggtgatagtagacctctagatatttttgctattgagttgaccctgttataactcgtgactgatagctttctcaaaggtcttttgggttatagattattactaatatggtatttattagttc

SEQ ID NO: 26397 - DNA, 300 bp, Gossypium hirsutum
  Clone ID: LIB3147-047-Q1-K1-A7
cccacgcgtccgcagagttttttttccatagaaagcgaagaaacttgaaaacgacgacgtagtgaaaaaaaaaaaaacatgtcttacgattatcttttcaagtacatcatcatcggtgacactggcgtgggaaaatcatgtttgctcttgcagtttactgacaagagattccaaccggttcatgatctaaccatcggtgttgaattcggtgctcggatggtcaccattgatggcagacccatcaagcttcaaatctggatactgctgggcaagaatccttcaggtccatcaccagatctt

SEQ ID NO: 26398 - DNA, 169 bp, Gossypium hirsutum
  Clone ID: LIB3147-047-Q1-K1-A8
ggcagctgtcggattggctttagtgttaatggtgccacatgccgattctacaaggtgggttgtttgatggggaggcatcggttttactactaatgtcaattacactgtcttggctcgaggtaagcactgctacaatgggtacggtcttgcatttgtttaacatcggatc

SEQ ID NO: 26399 - DNA, 305 bp, Gossypium hirsutum
  Clone ID: LIB3147-047-Q1-K1-A9
aacatcgagagtaacaatgtcctgaatgagagacaagtttctgaagtgccttttaaggggggtaatgaatgacccaaagaagaacctttggttgtacggctgaaggtttgatcctgtaccgacttttaagcaccgtatcttcggtctgacttcagttatccattgtcttcactcgacttctgggccatagactgttctaagattttgtaacagcatgtttgttcccgtttcaaaactaaagtcggtctacacttgcaggctcaatgcaatagatgaagggaaaaagagcttaatgtccttggaaa

SEQ ID NO: 26400 - DNA, 421 bp, Gossypium hirsutum
  Clone ID: LIB3147-047-Q1-K1-B12
ggggaaatgccatcgtgaaagaaataatcaaggatcaggatggaaacataactcagggggtaggtgttttgcatcttcaaggatctgtcaagacaacaaaattgaagctcacgtggcttgcagaaactagtgaacttgtaaacctttccttggtggagtttgattatctaataacaaagaagaagctggaagaaggggaggatttcctagatgcactaaacccatgtacgaaaaaggagacagcagcaattggagattccaacatccgcaattgaaacaaggagagatattgcagctggagaggaaaggctacttcagatgtgatgttccctttgttagaccttcgaaaccagtggtgttgatcgcaattccagatgggcggcacaaagcatgttgaagtatgtcttttaccctatcttta

SEQ ID NO: 26401 - DNA, 250 bp, Gossypium hirsutum
  Clone ID: LIB3147-047-Q1-K1-B2
accattctacaatggtgacaatccctttctttgtcctaaacatcctccttttccgggggagctcctctgctacaccaaatagcggtgcttatcactacctggtccgttcattatgtgtccacgccagctatccaagcctttgttttctcaccctttcttccttacttcggcccatccaacaccccacttgagttagcccaatccgtcgtataattcatcctgttctcgtcccttatagtgttctactact

SEQ ID NO: 26402 - DNA, 414 bp, Gossypium hirsutum
  Clone ID: LIB3147-047-Q1-K1-B7
cccacgcgtccgacctgctgaagctgcaacccctgcttctgcaaaaaaggctaaatgtgcggttacacctcagaagacagatggtaagaagggtggacacacagcaacaccgcatccagcaaagcaatctgggaaaaattctgcaaagtctccaaagtctggtggtcaattctcttgtggttcttgtaacaagtcgttcgggtctgagggcggtttagagtctcacaagaaggccaagcatggtggcaaatgaggtcgggtttactgctctaatgtgcatgtttaattttgggggagagatgtttggcttgtggttttggttctttttattcttactagtaaaatgagtgaattatggattaaaaaagacttcgggaaagtccttatgattagaaactatcataatattgggat

SEQ ID NO: 26403 - DNA, 415 bp, Gossypium hirsutum
  Clone ID: LIB3147-047-Q1-K1-C10
cccacgcgtccggaaaatcaggagtaactgaagaagatgcagatattcgtcaaaaccggggcagggaagactatcactctcgaggttgaaagcagcgataccatcgacaatgtcaaggccaagattcaggataaagaaggcatccctcctgatcagcagaggttgatttttgctggtaagcaactggaagatggccgaaccctcgctgattataacatccaaaaggagtccactcttcacctagttttaaggcttaggggaggaaccatgtcaaggtgaagactctcaccgggaaagaaattgaaattgacattgaaccaactgataccattgatcgtatcaaggaacgggtcgaagagaaagaaggaattcctccagttcagcataggcttatatacgccgggaagcaacttgc

SEQ ID NO: 26404 - DNA, 393 bp, Gossypium hirsutum
  Clone ID: LIB3147-047-Q1-K1-C4
gatatgggaaatattgacccatacagtatcttcactccctcctgctctgctaatgcgggtcagacgaagtggctgctgaaaagaaggcttatggttagccagctcattgaaaagtacgatccttgcactgagaagcactcagaagtatacttcaatctacctgaggttcaaaagtcacttcatgttttacccgaagctgcaccatctaaatgggagacgtgcagtgatatcttaaataccaactggaaggattctccaataacgatgcggatgtttaccgtgagcttatacatgaaggacttcgcatatggttattcagtggtgacacagatgctgttaatccaattacatccacccgcttacatatagatgctctcaagcttgcaactatta

SEQ ID NO: 26405 - DNA, 413 bp, Gossypium hirsutum
  unsure (1)..(413): unsure at all n locations; Clone ID: LIB3147-047-Q1-K1-C7
attcaggacatcatttataaatctgcaaagaagaaagggtcgggggcaggtgctttagggtggcagttctttgtagaaggaatgcaggaatatagtgatgatttcgggatggtaccatggcagtccccgccaatttacaaactcaccatagaacactcgtgcaaattggctagaatccaaggacttattcaagaaaacggaaacctcaaacaactgtgttccaagagaaagtaaagctagggcttgctatcagaaaattcaattcttctggtgaggtaatttgtgcgagatatatattggtattggatcaattnttttcttctaatatccatacaaattactatgtattaagtagagagccatatatatatatagcacatgattgcaagttcgtgcaaaaacttgggtgaatc

SEQ ID NO: 26406 - DNA, 367 bp, Gossypium hirsutum
  Clone ID: LIB3147-047-Q1-K1-C8
cccacgcgtccgaacgcagcaaagcaatagcagcagggattgaaagcgagaattcgaaatggcgcccagggccaccaagcgaaaggcgatggagggggacggcgactgctaccaacccaagccccaagttaaggaaacgttgaaaagagtgactaggagcatggcaaagcagccgcaccccgagtctctgcccaccaaggagaagccaaaagcgaaggccaagaagcataataaatctgcagatgaggatggagccaaagccgaattgcgcctgaagagttggccgtcacttacggtggttctcacatcaagactgtagtggttgaacactgcaagcaatgcaattcattcaagacaagggcccttt

SEQ ID NO: 26407 - DNA, 392 bp, Gossypium hirsutum
  Clone ID: LIB3147-047-Q1-K1-C9
gaattgggtgactccaattctttctataaaaaaaaaaatctaggaaagcatcaagaatggaggcattgaggatggaagtattttgggtgatgctgattgtgttggttgccgtatttaaggtccaaaatgtggcggcagctgaagctccggcccctagtcccacctccgatgccacaatcttcgtgccgacggtgcttgcttccctcgttgctcttgcatttgggcttcttttttaaaatgctggtgttttatgagacctataatatttttaaaattcttttttattttttacttgtgactacagttcaatgtattcatatttttggtattgttggaatttcaatatgtaatttggtgtgatttggttcctaatgacctaaaaaaataattgg

SEQ ID NO: 26408 - DNA, 277 bp, Gossypium hirsutum
  Clone ID: LIB3147-047-Q1-K1-D1
tcgcccactcgttcgtccacgcgtccgcccacgcgtccgggtcaagcgatagttctccgggggtaatcaacatgaaaattgccaaggctgttggagactggtattatgagcggagcctcatcaaaaagcttgtctgtccttatccttgcaaccctacctgcccaaaagttgactctgattcataaatcctatgcatataatcatggactacagtttatttattagatggatattagttcattgtttatgtctatttatccatttataatttctcttg

SEQ ID NO: 26409 - DNA, 384 bp, Gossypium hirsutum
  unsure (1)..(384): unsure at all n locations; Clone ID: LIB3147-047-Q1-K1-D10
ctcggcatagcatcccagttgttgggttgatagtgaaaaatgatgcatggttgccatgcacgggaccggaataatatattgtagttttgtggtctttctcgctaatccaacttactctgattaatttccaagttagctgagggataagattacatctttcgggagctgcaactgtacaagttctcgtgaatacagttttattcaatggaacactctgtttcactatttacagtatagctatagaaacttacatgcaaccatcaaacagtggtacataaaatttgtctctgttaatttgctttaacattgtttatgattnaataatattttattattttatataattttttttatttttttttttttattattattttttttttt

SEQ ID NO: 26410 - DNA, 133 bp, Gossypium hirsutum
  unsure (1)..(133): unsure at all n locations; Clone ID: LIB3147-047-Q1-K1-D2
ccggggcgacccacgcggccgccgccaccgacganaaanccacgagagcgacgccgacgcggacacaggacaaccggagggacaccgcaccgccaacaacagcngcaacaacggcaacagcaacagcaacgac

SEQ ID NO: 26411 - DNA, 188 bp, Gossypium hirsutum
  Clone ID: LIB3147-047-Q1-K1-D3
atggagagtcatgaagagaaattgcacaagctggtgttgcagagcaagattaatgaagctaaggatgccatgaagcgtaaagctagttagaattgaatgagcaagattgatttgaataaaggtgattaaggagggtacatgtttaatgggctttttaagtatataaagatactttatttttattatca

SEQ ID NO: 26412 - DNA, 384 bp, Gossypium hirsutum
  Clone ID: LIB3147-047-Q1-K1-D4
cccacgcgttcggtgtgccaagccccagaagcccccattctttgtatcaacaactgtgggggcttcggcagtgcagctaccatgaatatgtgctccaagtgtcacaaagcgatgatcctgaagcaggaacaggcgcaacttgcagcatcatcaatcggaagcatcgtgaatggcagctcaactgggaacggtaaggaaccagccgtggctactgctttggatgtacaatctggaaacgccgacaccaaaatggtctcaacagagctacccttgacccatccggaacgacttcatgtgggatgaaaatgaaagagggtcctaacaggtgtaccaaatgctgtaaacgtgttggtttgacaggatttaactgcaagtgtggaaacc

SEQ ID NO: 26413 - DNA, 369 bp, Gossypium hirsutum
  Clone ID: LIB3147-047-Q1-K1-D5
actttaaccgattactatatccagaaggaatcgactcttcatctgggtgtacgtcttcgaggtgggatgcagatcttcttcaagactttgaccggttagaccattactttagaagtggagagctcggatacgattgattacgtgaaagcgaatattcaggacaaagaatgaattccaccagatcagcaatggttgatttttgctgggaaacagctggaagatggaaggactttggctgattacaatattcaaaaggttccactcttcaccttgttcttcgtcttcgtggagggttctaaaccttaaggtcttccttaatggtgttttctggttttacgtgaatgaatgttcccttttgatggcctttta

SEQ ID NO: 26414 - DNA, 76 bp, Gossypium hirsutum
  unsure (1)..(76): unsure at all n locations; Clone ID: LIB3147-047-Q1-K1-D9
cccacgcgnccgcccacgcgnccgcccacgcgnccgcccacgcgaccgcccacgcgggcggggagaacancanggg

SEQ ID NO: 26415 - DNA, 290 bp, Gossypium hirsutum
  Clone ID: LIB3147-047-Q1-K1-E10
aatccactccccacctcctccatatgtccataaatctccacccccacctattctggtgggcacctgcaccttatgtctacaagtccccttcatcaccatcacatcccaaacctcattctcatccttatactaagccttattcccccacaaccgtatactccactctcaatacccaagcctcatccttcacattcaaagactccactcccataacccaagtatttttacaagtcgtcaccaccttcgaaggctatctaagctaattgttttttgacatcattattttaatc

SEQ ID NO: 26416 - DNA, 143 bp, Gossypium hirsutum
  Clone ID: LIB3147-047-Q1-K1-E11
cggaaaccaggcggagccagcggccgaaaaaaaagaaaagaaaaaaagaaaaaaaaagaaggacgaaaaaaaagaaagggggagaaaacgaaaaggagagagacaaacagcgaaaagagaaaacaaaagaaaagggaaaagga

SEQ ID NO: 26417 - DNA, 160 bp, Gossypium hirsutum
  Clone ID: LIB3147-047-Q1-K1-E4
atgaactcatgttcactgaaattagcgaagagaagagaagaaatttggtataagaggggaattcgaaggaagaaattggttgtcgtggtgcttcagacagagaatacttattcctctgcctagagatgagccaaatataaaaaaaaaaaatatattttag

SEQ ID NO: 26418 - DNA, 406 bp, Gossypium hirsutum
  Clone ID: LIB3147-047-Q1-K1-E6
gctactcttgcccccagaaatctttgtttttatcttctccctttcatatcttaagccagggatggcaacatcctctcaagactcttcctcttccaagagacacttccattggactaacaaagttgcaaccgaagataccgaagcctcttcaacaacacctaatgaggatgacaagaatggaagatcaggtattaaaacccatgtttctttgtccacaccaaggaagaaaaagcttccggctgctgctgtttccatcgcaaggctccgatcgctgtttcatcttttaggaagagccgatcgagccttccttttggcctcgggtcacgagtgatcggtactctttttggttacaggcgaggacacgttcacttcgccttgcagaaagaagccggttccccaccagctt

SEQ ID NO: 26419 - DNA, 199 bp, Gossypium hirsutum
  Clone ID: LIB3147-047-Q1-K1-E7
aggacgcgtgggacggctacagggctgaaaacaacgatggaaatatcgatgctgttggagggaagagcgtagcagagatgccttacaaaatctgaggcttacaaatcagacagggtgagaattcagctgaagctgaagccccaacgggggagccaagcaagcttaatctaacaaagaaaatgacaaagcaaggatgcaa

SEQ ID NO: 26420 - DNA, 357 bp, Gossypium hirsutum
  Clone ID: LIB3147-047-Q1-K1-E8
caacatctcgaggaatggtcatgctaatgaaaatggtgctggtaggcggaagaaaaagggcaatcaaggtaaaaggagattgaacaatatgacaagtatggcccatagagaagaggttatccgtaggactgtttatgtctctgatattgaccaacaggtcactgaagagcagcttgcagtttatttgtgagctgcgggcatgtggttgattgccgcatatgtggtgatcctaattctgtgcttcgttttgcctttgttgagttcactactaataatgttcgctagcttctctgaatcttgcatggactatgcttgtattctacccagtttgggggctaccttttaaaacagctattt

SEQ ID NO: 26421 - DNA, 382 bp, Gossypium hirsutum
  Clone ID: LIB3147-047-Q1-K1-E9
gaagagtgtactggacttgatacggaaactgcgtggggaacttgacaagcttttgaacagaaaggttgaagaacctggatttgatatatctgttgaaggaaagggagttgtgtctgctgtggttgagttattgcacagccaaaatggtcgggactgaattcgtattcttttaagttctttatggtaggatggattgctcttcattttgtgagataatataagcaaaatgcaactttttaggggtgatttaatctattcgacattccgttaggatgttgaaagcttttttcgtagcataataagggaaaaatgggaaggcatgaacctaagtttgggtagacctaatcccattgggtacccattgggagacatattgattcct

SEQ ID NO: 26422 - DNA, 291 bp, Gossypium hirsutum
  Clone ID: LIB3147-047-Q1-K1-F2
ctggatccccgtcggatcctggcgttgctctaatcggatccgtaaggccatactgtgggtcaccttaaaaaaccgacctgtccaaactacttgtttacactccccttagttgtaaaccccgtctggagcaccgttttgacctacgccggtgaaccgttcgatgtgtatttcatcaatatgacctccatcaacgttatcggcaatccaattcagatatactcctcgttattagctgtcgtcgtgaactgttccggtgggacaaatttttcacggtcgttccttactctgttt

SEQ ID NO: 26423 - DNA, 379 bp, Gossypium hirsutum
  Clone ID: LIB3147-047-Q1-K1-F3
gtcgtttgttatgttattaggtgaaggctgagagattgaaagctcgggcaaaagaaaggtgtgcatacaaagtagcagccgcaaggagaatagctgatgagaaacgtgcaaatgctgaatcaaagcttaacgagaaagctataaggacatctcaaagggcggattatataaggagaactggtcattttccttcttccttctttttcaagttgccttccctttgctggtagtaagcaactctgcagccaaatctggcttcttcttatccaatagagatataacgtacgtatgtatgtatgatgttactttgggattaatttttatatgcattgtgatttactgctgaaaagtatcagtttatggtgattatttctcattt

SEQ ID NO: 26424 - DNA, 391 bp, Gossypium hirsutum
  Clone ID: LIB3147-047-Q1-K1-F4
gccacccgtccggccacgcgttcgcctgaaccatctatgaaatgctggatatatagagggagaatctaagaacatggaggcaatcaacagcattctatgctagatgacactggcagggcccctgaagtaagctatctcaagaagaactggatgaaagaagcgaaaatagattagtgggactttgcacaaggcttctcgggtacacatataaaggggaaatcagcattccacaaaaaaattggtttctggaaatctgggaaaacaagtccaaagactcacgtggtttccagaaaggaaactgggaatgacagaaaggcgaaactgtaacagctttcgtctctactaatgcatgcagctgggttggagagcaaaaaacgggaggaatttgtct

SEQ ID NO: 26425 - DNA, 372 bp, Gossypium hirsutum
  Clone ID: LIB3147-047-Q1-K1-F6
cccacgcgttcgctaaaacccctgctcaagaaagatgcagtctctgcgcaatttcaacggcgagaaaaaatggcagcggagctaccaaaaccggcaaccgaagacgtaaagtttgatttgtttgaagatgatgatgagtttgaagaacttgagattgatgaagagtgggagttaaaggaagaaggaaaggagattacacagcgatgggaagatgactgggatgatgatgatgtcactgacgatttttctctacaactgaggagggatcttggaataacactgtgaacaacatcttagctggacttatgcatttctctgcactgtacttgtctgaatcggggttattttgtttttagattttctttgccattg

SEQ ID NO: 26426 - DNA, 343 bp, Gossypium hirsutum
  unsure (1)..(343): unsure at all n locations; Clone ID: LIB3147-047-Q1-K1-F7
cacgcgaccgaaatgtnagaacgagaagggagccagggagatctggtactcctatatcatatacctgtgggtggagacgatttaacgatatggtagcttcttactaattcttaattgtctaaatgagcatagatttggactcaagctagaccacagtataataaacaaggtcgagttgggtcaagctctaccactttaatgcctttatctatgcctaatgcgattttcaagcatcaaaaggatgtaattgaatttgctatgacataaacattattattcatataatgatattctttagaggaaaatgaacaattttgtatcacttatagtttaattcattgcc

SEQ ID NO: 26427 - DNA, 217 bp, Gossypium hirsutum
  Clone ID: LIB3147-047-Q1-K1-F8
tccacgcgtccgtccacgcgttcggcttcttttgtacatataaagtgagatttatatatgggtactataaaaggaaaaaaaagttgttttgaatttaataaaaataatttagattaaaaaaaaaaaattaataattaaaaaaaaaaaaatatattaataaaaataaataaaaataaaaaattaaaaatattatatagttattaaaaaaaattggggt

SEQ ID NO: 26428 - DNA, 317 bp, Gossypium hirsutum
  Clone ID: LIB3147-047-Q1-K1-G11
cgtagttggaattactcgcctcaagttggatcttttacggtgcaccctaccctttgtggccgttgttttaatgttgttggtattcaaccaacacctgcaatggcagcagccatcatctgagacctaaactcaaacaaatccggctgaaaatgaggttaacctggaagttggccgatctttcgtttcaagctttccagtgtagccaatttcacgtccaagctaaaatattacccattctttgcagaagagtgttaagtcaatcaattttttgcgttacatgtgacctttctgcataaattactatactttgcacacaa

SEQ ID NO: 26429 - DNA, 275 bp, Gossypium hirsutum
  Clone ID: LIB3147-047-Q1-K1-G12
cttccgcagatccattggctctcaagcaactctccttcttttaaagtctacgcctgcggtcttcctcacattaagatttcaaatcccccttttttgcggcggttaacgtttgctgatcgttgctcggtttccgaggatcaatcatgactcatatccttttgtgtaagtgaacgcggtaaccatagagagcgagatcgagaaagggctcatgcccgagcggtcaaaggcagcatgaacaatgacgatggcttaaccccagaacatcgccttgaaag

SEQ ID NO: 26430 - DNA, 442 bp, Gossypium hirsutum
  Clone ID: LIB3147-047-Q1-K1-G2
tcgttccgtgtgacgtcgtgtgtgtggtaggtagcagtctgtgtagctatcttccctatcttttatgatctacatcctgggggattatgcgtcagaaccacgtctttgccaaatgatgctaataggctgcataagaataggagtgaggagaggctaattcaattggcgcttgtatgattgtctacaggtatgacacttaaaatcatgattggtattgcttggtctttaccgtggtttacaatatttcatgtgttaggaatcatcagtttaccgtggtctatacttttggaatgtttagactcctctgaagccaagtgcttctcacttggagattctgcaaggatagttatctttgcttagctattgctttttggtttggttcatcacaaaatggttgctgggtttttgcaatcgtaccccaaattgattactggtgcttttg

SEQ ID NO: 26431 - DNA, 327 bp, Gossypium hirsutum
  Clone ID: LIB3147-047-Q1-K1-G5
ggaaaaggtgatttgattatcagaattgttatgtgatctactttcttatcaaatttggtgggaaagaagggatcattttattcatttcccaaatccaaatccaaatctattcatcctacatattcggggtattcttcaagcaacatttaactccaatggggaatcttcttatgccgtacgattaggagtatatgaggatggctatcttaaaacatgaataaactttcaaagaactagtgtacgaactgcatcgtctatatcgaatccagagacattgatgtaaagcatggaaagcgaccgtcctaaaggaaactttagcctgaagaa

SEQ ID NO: 26432 - DNA, 350 bp, Gossypium hirsutum
  Clone ID: LIB3147-047-Q1-K1-G7
cacgcgtccggtagtcccgtatcggtttatttgttaacaaaggaaagctgcaccggtgggaagcacagcatgaggaactcggataaaactcatgcccatttgcaagtcaactcagcgattctgatgggtggagctagagggattcggagactaaccaatgcaatgttgacggagatcgtcagagctacaatgcaacataagaagaagaaaaactcgatatcggagtcagaaatcttgagtcaactcgtttggaacgggtatttactaaaaatgtggatttgttcacatcgacggggtcaattcatgtaagcgtagtcactcatgagttcgggctccaacttctcttggag

SEQ ID NO: 26433 - DNA, 345 bp, Gossypium hirsutum
  Clone ID: LIB3147-047-Q1-K1-G9
attagtttcaattctagttgaataaggatgtgatagtattaaggtggatgaggcttgggactggggcatggaaatgacccaccaatgatagcttgcctattggctaaactaacatgcaattggcatatggcagggagagagagtttagagaaggttcaagcaggcattttggggggggggggcatttttcatgttcaatctgttctctggaatgggtggttcctgggtcccaagcaggtcgtttaaatttagtgtttgtgcttgtatgttttattagaagaggcagtttgcatggttgcttttacaagttataataatatatcatagttgcggttggttaacatt

SEQ ID NO: 26434 - DNA, 369 bp, Gossypium hirsutum
  Clone ID: LIB3147-047-Q1-K1-H1
ctcaatttctgtggtgggattttcaattaacaatggcctccaaagcaagcagctccctgttccaaagcctgagacgctacatcaagaagccatgggagataactggaccctgcgccgacccagagtacaaaaacgcagtgcccaaagccacggagtatcgtgttcgctgccccgccaccactttgcaaaagcccatcgtccctacctccgaccctgaaaccgtcttcgacatcaaatactacagccgtgatcaacgccggaaccgtctccgatccgccgtaccatcttgaagaaagatgacgtggtgaagatgatgagagagaaaacatttgatgtcaactgatttttcaaaaggttactttgactggt

SEQ ID NO: 26435 - DNA, 65 bp, Gossypium hirsutum
  Clone ID: LIB3147-047-Q1-K1-H11
cccacgcgtccgctggggttggacctgttcctgaaaaaatgttttatgggtccaaagggccaacc

SEQ ID NO: 26436 - DNA, 279 bp, Gossypium hirsutum
  Clone ID: LIB3147-047-Q1-K1-H2
gggaagggaaggggggggaagggaaggaggggggggaggggggggggggggggaggggaggggaggggggggaaggggggagaaggggggggggggggggggaggagagggggggggggggggggggagggggagggggggaaggggaaggaggggggggggggagaagggggggggggagggggaggagggggggggggggaggggggggggggggaggaaaggggggggggaggaggagagggaaagagaggaaggggagggggggggagggggggg

SEQ ID NO: 26437 - DNA, 410 bp, Gossypium hirsutum
  Clone ID: LIB3147-047-Q1-K1-H4
cccacgcgtccgtgaaagagtaaaaagtgggtcaagggtagtcatgggcaatttccaggctcctggtgaaggaaattacaacttgactgcattctgcttgtgcgactcttggatcggttgtgataagaagactaacctaatgataaaaattttgaaacgaagtcgtgccggtacaaggactggtgccttgtcagaagagggagctggtatggaagaggggattgatgatgtagagcatgtataagatgttgaatattaggattttgagaggaatacagtgtagatgaagaggatgaataagattctaagaggaatggagttttgccccgctgctggtgcttgtgctgctgctgaaagttcgtgacaatgagtgaaattcttaattttttcattttcactttgggggaaca

SEQ ID NO: 26438 - DNA, 274 bp, Gossypium hirsutum
  unsure (1)..(274): unsure at all n locations; Clone ID: LIB3147-047-Q1-K1-H5
gagggaaagcgaaggcagcncaacaaaaccgggaggcagcagagagaagaagagccggaaccgaaggaagacctgaaccaggcgacaaaaggaggggaccagaaaacagngcaggcgtaagcatgggcagagacacaaaccacngaagaagaagaagaagaagaagaaaacgacgaggacgaacaaaaagaagataggcaggcacaggagtaaagtaacacagcaaaaagaaggtttgtagggtagacagcaaggacatggaaattactaatga

SEQ ID NO: 26439 - DNA, 306 bp, Gossypium hirsutum
  Clone ID: LIB3147-047-Q1-K1-H7
cacgattcctgcgttcaagctatgaacattgactatctgagtcaaaagtgcagccaaggcggcatatattgcatgaaggatttccagaaaggaggaggatggagtttcaagggttataaatgcctagtctatcaagtctttgatgtcatctctattgtcatgaattctgttctgttcgctggatgaattcttcatattcttttatcttttacccatctcttctctgtattatttatttttttttgctatctgcatttctttttttgttgtttcatttttttatctctttttttatatttttcattt

SEQ ID NO: 26440 - DNA, 411 bp, Gossypium hirsutum
  unsure (1)..(411): unsure at all n locations; Clone ID: LIB3147-048-Q1-K1-A1
tccttaatgattggcctaatgtggcacctggtaaattcttgatggaagaggcaaatcttctaaatatcttacagcttggaactattgaacctctaagtctatggaagtttttattgcaaaaatttttttttaaacacgtaactttgttgttcttttactctgctccatggatgaaatggttgactcgtaagttgtgttgtttatagctaagctccactccactctggactntaagcaacgaacattctcggaaaggatgaacttaatagttggtgagaggagcaacatanagctgaataggatttacttttcattgtctttcatgttgcatangaaatactgaacattaatgaatcggtcaatgagcacgataattttgggatataagccaagtgtaatacggcattctta

SEQ ID NO: 26441 - DNA, 383 bp, Gossypium hirsutum
  Clone ID: LIB3147-049-Q1-K1-A1
cccacgcgtccgcccacgcgtccgggggatgaacatgggcatgaatccaggcatggggatgaacaacatgggcatgaatccaggcatggagatgaacaatatgggcatgagcgcaggcatggggatgaacatgggaatggggcaggcaacccacatgcaatctcaaagtgggatgcctggcggttacaaccctatgatgggttccagtggctactctcaacagcaacatggtggtggtggtggttaccgatgagaaatcattgtcaagtagagtaacggaagttacatccctgcttgtgatgcaagattaaaagaggttgaaatagcaagacccaggtgtcgccatcgaattccagagtttagtggcagcggcctgatgatgc

SEQ ID NO: 26442 - DNA, 447 bp, Gossypium hirsutum
  unsure (1)..(447): unsure at all n locations; Clone ID: LIB3147-049-Q1-K1-A11
gtggctccgtcgtctcttctccacctctccttcaaccaggatcatggctgctttgccgccggcactgaccatggcttccgaatctacaattgcgatccatttcgcgagatctttcgccgagacttcgatcgcggtggcggtatcggggttgttgagatgctttttcggtgtaatattttggctcttgttggtggtggacccgatccgcagtacccgcctaataaggttatgatctgggacgatcaccaaagccggtgcatcagcgagctttcgtttcgttcggaagtgagatcggttcggcttcggagggaccgaatcatagtcgttttggaacagaaaattttcgtttacaattttgtggatttaaagctcctacaccagattgagaccatcgcgaatccaaaaggactctgcgcggtgtctcnaggagcagcatcattggttttg

SEQ ID NO: 26443 - DNA, 407 bp, Gossypium hirsutum
  Clone ID: LIB3147-049-Q1-K1-A12
cccacgcttccgagaggatataaagaaagcacctgctgtgaggaaagcttctgctcctgccggcaataaggatgaggatttcagcaatgactcctatgatgacagcgagtctgatgatgaagagactcctaacaaagaggctaaacttgctaaagaagcaagcactagtgaagaggaacaatctgaggaatcagatgatgacgaagaaagtgacgaaaaaaaagctccaaataaaaaagacacagatgttgaaatggtccatgctacaacacctgctaagcacgacttgcagactgcaaagaaagctccccaaacacctgcaactactcaaacccaatgcacaggatcgaagacactgtttgttggaaacttatcctttcaaattgaagatgctcatgtaaggcatt

SEQ ID NO: 26444 - DNA, 224 bp, Gossypium hirsutum
  unsure (1)..(224): unsure at all n locations; Clone ID: LIB3147-049-Q1-K1-A2
agggcaggaagccaggcacgcaaangaacaanacgggcangagcgcaggcacggggaggaacanggnaanggggcaggcaacccacangcaancncaaagggggangccaggcggnnacaacccgaagaagggagccaggggcnacacncaacagcaacagggnggggggggaggcnaccgaagagaaaacaagggcaaggagaggaacggaagggacaccccc

SEQ ID NO: 26445 - DNA, 334 bp, Gossypium hirsutum
  unsure (1)..(334): unsure at all n locations; Clone ID: LIB3147-049-Q1-K1-A3
cggacgcgtgggtttgcacagaagcagggatgtttgctttgagggaaaggagggtccacgtaacacaggaagattttgagatggcagtggcgaaggtgatgaagaaggagactgagaaaaacatgtccttacaaaagctgtggaagtgattaagctntattttcattattgtgctttgctttctttgttacgggcaaaaatggatggaacatgtaaaactagacttatacaatgacattataataccgtgcgcctgttttctttgacaaanaaaaaaaaaaaaaaaaaaaaaaatataaaaataaaaaaataaataaatatttatttataaaaa

SEQ ID NO: 26446 - DNA, 108 bp, Gossypium hirsutum
  Clone ID: LIB3147-049-Q1-K1-A4
ttgaatttatctactcctttattatgcgttactcaaatggtgtgatttgtatcttttaacaagaattagaaaagaaatggaagcgatttttgtttaagaggaaaaaaa

SEQ ID NO: 26447 - DNA, 119 bp, Gossypium hirsutum
  Clone ID: LIB3147-049-Q1-K1-A5
agtttgtaggcgcttctggctgaaaattcaccagatagttctccctgccacacttgaaaatcgtcggtaagagtttccgtaagagggatctgcaaaatcatttgagcaatatttgctgg

SEQ ID NO: 26448 - DNA, 325 bp, Gossypium hirsutum
  Clone ID: LIB3147-049-Q1-K1-A6
acttaatgttcttggtgggagagtattaatggagaactctttagggaaacttaggtgcgggtcttcgagtccgagccaaaggtctaatatgcctcattttaaatgttccaccaactcccatagcgttagtccgtatcaaaataaagacccttttctgaatatgcacccagaagtttcgatgcttagaggtgaagggaatcctatagtaacaaacccgagaaaggatagctccagtcccaagagcttagggggcatgacaggttcaagtaattatagtgaagctaagatcaaagtcattggtgtcggaggtggtgggtcaaatgct

SEQ ID NO: 26449 - DNA, 309 bp, Gossypium hirsutum
  Clone ID: LIB3147-049-Q1-K1-A7
cccacgcgtccggtgccatgattgggcaggttgctggaggtggtaggactgagaaacctctgcttaaggctggtaatgctttccacaagtatagagtgaagaggaactgctggcctaaggtacgcggtgtggctatgaacccagctgagcatccccacggaggtggtaaccatcaacacattggtcttgctagtacagctagacgtgatgctccaactggacaaaaggttggtcttattgctgcaaggaggactggtaggcttagaggaccagctgctgccactgttgtcgaggccgatgaggcataat

SEQ ID NO: 26450 - DNA, 468 bp, Gossypium hirsutum
  unsure (1)..(468): unsure at all n locations; Clone ID: LIB3147-049-Q1-K1-A8
cccacgcgtccggagaaagtgttgcaattgctcgtactgtcggtcatctttccaagagtgctgaagtcatgaaacttgtaaacaacctcatgaaagctccacaaatggctaccacaatgcaagaatttagcaaagaaatgaccaaggctggggtgattgaagaaatagtaaatgatgctgttggcacggcattggattcagaagatatagaagaagagacagaagaagaagtcaataaggttctttcggaaatagctggtgaaactgctgcacggcttcctgaagctgttcggaaggaaagagcgagggtacctacccaaagagaaaccacttcacatcaagaagaagcgattgcagagggtgcagatgatgaagaaaaattggaagagattagggcgcgactcgctcgagttagatcgtaaacctttaacttccattttggntgttcttttgctatctatcaactaa

SEQ ID NO: 26451 - DNA, 289 bp, Gossypium hirsutum
  Clone ID: LIB3147-049-Q1-K1-A9
acttcttcaaggggttctaccaagactcttggtaactttgtaaaggccaccttcgagtgtcttttgaaaacttagggggtcttgactcctgatttctggaaagagactcgattcacaagatctcctttccaagagtatactgatctgatgggaaagccatcaaagacgctcgtactctatgatgccgagagagtggatttatgatgttccaacagggccttagaattgcaatatatctagctccccttggggttcttaagtacaatagatgctttctttagtgcacttg

SEQ ID NO: 26452 - DNA, 505 bp, Gossypium hirsutum
  unsure (1)..(505): unsure at all n locations; Clone ID: LIB3147-049-Q1-K1-B1
gtttttctcgtccttaaagctcatcttctaatttggtgccatctttggatctctcacttttctacctttcagatttcgtgacggagaggagatatctttatttttctgaacttgcaactgagtaatcccggtttatttggtcttttgatccaacggctaagagggctctttttagaattttccctaatacgacgactgcaatttctttttaatagaagaggaaattttcattacagcaactggtccaggccttttcgttcgtctttacaatacttccctccgtttgagcacttccagatctgaagaaaaatgcctnccgccgctcctcgatccggagatgnnancttcgccagcgtagaacgcgtgaatgcagaactattcactttgacttatggagcaatagtgcgtcaattgcttactgacttggaggaggttgaggaggttaacaaacagcttgatcaaatgggctataatataggaattagactaattgatgagtttctag

SEQ ID NO: 26453 - DNA, 417 bp, Gossypium hirsutum
  Clone ID: LIB3147-049-Q1-K1-B10
agagaaagtcctccgtatttatgacttgaatcgcccagatgcacctccaagagaagtggacggatctcccggttcagtcagaactgttacatggatgcatagtgatcagacaatattaagttcttgcactgatatgggaggtgtcagattatgggatgtaaggagtggtaaaatagttcaaacactagagaccaagtcatctgtgaccagtgcagaagtgagtcaagatggtcgatatatcacaactgctgatggatctaccgataagttctgggatgccaaccactatgggttggtaaagagctacaacatgccatgcacagttgaatcagctttattggaaccgtagtatggaatataaattctttgccggaggagaggatatgtgggttcgtgtttttgaatttcacacttgag

SEQ ID NO: 26454 - DNA, 483 bp, Gossypium hirsutum
  Clone ID: LIB3147-049-Q1-K1-B11
attatgggcattaacatggatcttaatttcaatctccttgaaactggctctctcgctctatgcattattgctgttgccttcactttacaggatggcacttctcactacatgaaaggcctggttcttctactgctctacattgttattggagcttgctttttcgtatctaaaacacctctaaaccaagtaaacatcacaaactcgggagctgaacttgccacaatcctcagagcttgataagctttgccgtcccgggggatgtcgttactccaccccccccccttttgatgatgaaatgtttgaaacttgaacagagatttcatgcattggttattctttcatatctggggcctggcggaaagctgacaatttgcagttactaggccgcatacaagttgtcatgcctttaaagttgagatggatactatctataagtataccgttgaagcttgatgaagacaggctatacaatacacagcacat

SEQ ID NO: 26455 - DNA, 456 bp, Gossypium hirsutum
  Clone ID: LIB3147-049-Q1-K1-B12
tggatgccgatgtcataaccattgagaactcacgttcagatgagaagctcctgtcagtcttgcgtgaaggagtgaagtatggtgctggaattggacccggtgtctatgacatccactctcccagaataccatcaaccgaagagattgctgacagaattaacaagatgcttgccgtgctcgagaccaacatcttgtgggttaaccctgactgtgggctcaagactcgcaagtacgctgaggtgaaaccagccctgagcaacatggttgctgctgccaagctgctccgcacccaactcgccagcgccaagtgataggctcccgagatattggaaatcctaatcccataccactccagagagattaaaaagaaaaatggcaaagaagtttcttctatcttatcatttgaataactttgtttgttgctgaaatatttgttacatgcccttgggcgtcctt

SEQ ID NO: 26456 - DNA, 90 bp, Gossypium hirsutum
  Clone ID: LIB3147-049-Q1-K1-B2
cccacgcgtccgaataaaaaaaaaaaaaataaaaaaaaaaaaaaaaaaaaaaaaaaaactaagatacgttaaaaaaaaaaaagaacggag

SEQ ID NO: 26457 - DNA, 171 bp, Gossypium hirsutum
  Clone ID: LIB3147-049-Q1-K1-B4
cccaagtgtcctcgaagcttcttaataatctgccatgtatggatagtattattaccagctagggtgtagctagtttgcaaactcaacctgcaatttgtattattaatgtcattaatctcactacccaagatttgacacatgaaaaacatcaaatctggatttttatttatc

SEQ ID NO: 26458 - DNA, 405 bp, Gossypium hirsutum
  Clone ID: LIB3147-049-Q1-K1-B7
cccacgcgtccgaacttggtgtaaattgtatgcttattgttcttttcattttgggctattagtatccttctattgaattcccaacatattcttttgaaagaatcaatgagaaagttcaaggtaacctggtgtaaatttcttatattatatctgcagatttcttgagggagaagaaaggcaggttatggagattgaatgattggggtcttcggagactagcatacaagataaagaaagctaagaatgcccactacatcttgatgaactttgagttggaagctagatggattaatgagcttaagaccatgttagaccaagatgaaagagtcattcggcatctggtgataaaaagagacgaggcaatcactgaggattgtccaccttcacccgactggcacactgttc

SEQ ID NO: 26459 - DNA, 476 bp, Gossypium hirsutum
  Clone ID: LIB3147-049-Q1-K1-B8
attagacgatgcagagattatgtacgaagctccgctttttgggtctccaatcaacccaaactcttccctctctttctgcttctcgtcgccttctgcatcattcgtttcctccaatccacattatttcaaccaaatggagccttgaaccctttctcaataacagtgtcgcatcacctcctctcgccgtcaactccttttcttcttccccactgcttctctctttggtccaagtccggcatgtttcgtcaagagaacgagcaaagaggaggaagcccatgactccacgtacttccaaactcaagaagattaagatgaaatcttattcgtcctataagtcccgatttaggacaatgaatgatgggaatattcgtcgctggagggaaggcaaaaatcataatgcacatttgaagtccaagaaatcaagacgaagactgcggcaaccagctatagtacccgccgcatatgcaaaggtgatg

SEQ ID NO: 26460 - DNA, 468 bp, Gossypium hirsutum
  Clone ID: LIB3147-049-Q1-K1-B9
cgaatcttaaccgccttgtctctcaggttatctcatctcttaccgcatctttgaggtttgatggagccctgaatgtggatgtgactgagttccagactaacctggtcccatatcccaggatccactttatgctttcttcttatgcccctgtcatttcagctgagaaggcttaccatgagcagctatcggtggctgagataaccaacagtgcttttgaaccctcttcaatgatggccaaatgtgacccacgccatgggaagtacatggcttgctgccttatgtaccgaggagatgttgtgcccaaagatgtgaatgcggctgtggccaccatcaagaccaaacgcacaatccaatttgtggattggtgccctactggattcaagtgcggtatcaactaccaaccaccaactgttgttccaggaggggaccttgccaaggttcagagagctgtctgcatgatcttcaact

SEQ ID NO: 26461 - DNA, 367 bp, Gossypium hirsutum
  Clone ID: LIB3147-049-Q1-K1-C10
cccacgcgtccggaaacaaggcattgctaaagagaaagaaaagatgaaaataaacagaagcagaacacatggtgatgaggcagagaacatggcaccctctaatatctcactaaatttggaggatgtgaagcacaaaaacaaaggggaagaaaggttactgcaaatacggaccaatccaccctctcctcagtgcttttctgcccctaccaaaacaactgccaccccttccaaggcttccagatccagacttatggagaggggaatcctttaagaagtgtagcaaaacatggatattaatactgaataagcatgtagtcatgtatctccttgttcttttgttattaataatgttaatgttacggatgga

SEQ ID NO: 26462 - DNA, 390 bp, Gossypium hirsutum
  Clone ID: LIB3147-049-Q1-K1-C12
aaatgaatgcattgcaattgaaacaaggaaggaatttcgcaaaaggctgcgtggaaaggatgccttagttagaagtagtaagagagcaaagcagatgatgacgaagacgaagaaacagcagaagattattatccaggatttacgttccaggatgataagtagaaagttttgcaacttcatcacttgtagtgtatagccattcaaggataataacttaatttttttggccaagagaaagcatttttattaagcttgaaaaactcaataccaagaacatttgaaaactgaatacccccattcggagaaaattttggggaagttaaaggttcttatggagattagaagaaagaatcagatttaaacttaataattcaaagtaatattcccctc

SEQ ID NO: 26463 - DNA, 513 bp, Gossypium hirsutum
  Clone ID: LIB3147-049-Q1-K1-C2
gggttttgctttttgcttctgcctttgctttttgcttcttactctcaaccaaaaatgactgctcaggccgacaaagagatcgaagagatcctggcagctcatctcgaccaacaaaaaatcgattccgagataccagagcaacctgttgttgaagatgacgacgaggaagatgacgatgacgatgatgatgaagatgatgccgaaggtcatcatgagggagaaggagatggaactggtaggtcaaagcaaagccgaagtgaaaagaagagtcgcaaagctatgttgaagcttgggatgaaaccgatccctggtgttagccgggtcactgtgaagaagagcaagaatattttatttgtcatctcaaaaccagacgtgttcaagagcccagcatcagatacttatgtaatatttggagaggctaagattgaggacttaagctcacaactgcagactcgagctgcagagcaattcaaggctcctgatctaagccaagtgatatcaaaaccagagtca

SEQ ID NO: 26464 - DNA, 366 bp, Gossypium hirsutum
  Clone ID: LIB3147-049-Q1-K1-C3
cccacgcgtccgcaaggctatcaatgatgagggtatgccccaccatcagagacctttcatgaagggcaagctagtcatccagttccatgttattttcccagaatctggggtattttcacctgagcaatgccggaagattgagagtgtattgcccatgaggcctagtaagcatttgacagacatggagcttgatgactgtgaggagactactttgcatgatgtcagtgctgaggaggtaaagaggcggaaggaacaacgacagcataggcaccgtgaaggttacgatgaagatgacgatgacgatgagtcagcaccaagagtgcaatgtgcccagcagtaagaaatgtttgcgttcaatgttttgcc

SEQ ID NO: 26465 - DNA, 436 bp, Gossypium hirsutum
  Clone ID: LIB3147-049-Q1-K1-C7
accacacgtactatattatcacgtattcattcacatacctataatatgatctaagatgtggcgaaggaagctaaaactcaagctacagctgatacaacggcggctgcaccggcgccagaggctgtatctgaagctgaatctgtggatacaactgcatctgcagcgacagctgaggagaaccctgctcaggccgaagctgttgatgctcctgagactgctccagagactgtatcaagtggaacacctggtggatcacatgatctagataatgcccttgcagaggatgggaaggcattcatgatggcattcgtcgaaggttgggaagacagtgcaaagaccaaagcccagaataagctctatgataaggtctcttgtgtagacacctgggaaaactgtctggaagcatatctggaagcaaatgtggaacaaattgaag

SEQ ID NO: 26466 - DNA, 511 bp, Gossypium hirsutum
  Clone ID: LIB3147-049-Q1-K1-C8
ctggttcttgctaaagcgtttgctactagctgttaactctaaaccaacaataactgggcaggccgacacatagatcgaagagatcctgccagctcatctcgaccagcataacatcctccccaatattccagaaccaccagttattttacattacaaccaggaacatcacgatgacaatgatgatgaagatgatgccgaaggtcatcatgagggaaaaggagatggaactggtaggtcaaagcaaagccgaactgaaaagaagagtcacaaagctatgttgaagcttgtgatgaaaccgatccctggtgttagccgggtcactgtgcacaagagcaagaatattttatttgtcatctcaaaaccagacgtgttcaagagcccagcatcagatacttatgtaatatttggagaggctaagattgaggacttaagctcacaactgcagactcgagctgcagagcaattcatggcttctgatctaagccaagtgatatcaaaaccagagtcatca

SEQ ID NO: 26467 - DNA, 222 bp, Gossypium hirsutum
  Clone ID: LIB3147-049-Q1-K1-C9
cccacgcgtccggccacctttatcagatatcaaaaggagtaaacctcagattccagggggggaaaaagaaaatggtgaagggactccaaggtgtgcgagtcatactctatgtaagaggaaccatcttgggttacaagaggttgtagtcaaaccagtattcgtacacttttattaatccaaattgggggagttacaccaaagagtgatttgctggtttgcctg

SEQ ID NO: 26468 - DNA, 419 bp, Gossypium hirsutum
  Clone ID: LIB3147-049-Q1-K1-D1
cccacgcgtccgctaagtttgaggttgagaaagaaaaacagaaggctgaggatgagtccactgattcagatggattttcagccgtccagaagaaggtctttgatgtcctttacaaggttgctgatattcctttcttaagtgaatacaagcttcaaatccttgatctcattgagaaggctgagaaacagccaaacatcaccattggtgtcatcgtctccattttggtgattatggtcacagttctcttcagacttcttttcggtggcaagaagcaaccaaaagtagagaagaaaccggaggttgctgagacatcaaacaatcaatcaaccagtggagaaaaggctgaagaagaagaagaagaagaagagaaagaaggaaccgctgctgctcctcgcaggaggaggcgtgacacttaaaac

SEQ ID NO: 26469 - DNA, 473 bp, Gossypium hirsutum
  Clone ID: LIB3147-049-Q1-K1-D10
acccacgcgtccgcttatccatggcgtctacatttttggcactacccaaaaccttcactgcaggcaagcctaccttcccttctctttcaacccacaaacttctcgggactcgaagaaattcacttagaatcaatgctgtggccactaaatgggaacccaccaaggttgttcctcaagctgacagagttcttatccgtctccaagaattacctgagaaatcagctggtggagttttgttgcccaaatcagctgtcaagtttgagaggtacctgatgggggagatagtttcggtcggtgccgaagtaggaaacgtggaaactggaaagaaggttcttttctcggatataaatgcttatgaggtggatttgggaacagatactatgcatgtgttttgtaaagagagtgacttgttagcttgaattgattgaagtttttctggtcctttgtttaagatgaaaagtcaattgtatttc

SEQ ID NO: 26470 - DNA, 507 bp, Gossypium hirsutum
  Clone ID: LIB3147-049-Q1-K1-D2
tcgggtcttgaacatgaggtggtgcctggtgttgttgaaagccttaaggttataacgaagttttgttccgagcggattgcgaaatatgctttcgagtatgcttatttgaacaatcgaaagaaggttactgctgttcataaggccaatattatgaaacttgcagatggattgttcttagagtcttgccgtgaagttgcaactaagtatccaagtatcaagtataacgaaatcattgtggacaattgttgtatgcaactcgtttcgaagcccgagcaatttgatgtcatggttacccctaatctttatggaaatctggttgcaaatacagcagccggtattgctggaggcaccggtgtcatgccaggaggcaatgtgggagctgaatatgccgtgttcgagcaaggtgcttcagccggaaatgttggaaaagaaaagatagtagagcaaaagacggcaaatcccgtggcattgcttctctcctctgccatgatgttgagacatctccag

SEQ ID NO: 26471 - DNA, 422 bp, Gossypium hirsutum
  unsure (1)..(422): unsure at all n locations; Clone ID: LIB3147-049-Q1-K1-D3
cccacgcgtccgcccacgcgtccgcaattttgtgctacatcttcgttgtttttcacttccaattacagctcgtcacaaatgcgatgagcatcttctttcacttactgatcatgatgataacagttattcagaacatcatcattgtgatatctgcgaagaaagtcgagatccaaatcgttggttttataattgtgcaacatgtgatacttctgctgatcgtaattgtgttcttggagaatatccattcctcanactcaggagcattcaagaaggaaatgatcatccacatccactcacctttgtgaagaagaagtattactacccagattgtgataaatgcggtaagccttgtgaaggtgtggctcttgaatgctcaaagtcggaatgcaaatatattgtccactggaaatgtgtaggagaca

SEQ ID NO: 26472 - DNA, 446 bp, Gossypium hirsutum
  Clone ID: LIB3147-049-Q1-K1-D4
cccacgcgtccgcccacgcgtccgcccacgcgtccgagatagttgacctggcaacactaaccggggcttgtgttgttgctcttggaccctcaattgcacgcgtcttcacacccaatgatgatctagcaaaggagttatttcaagcatcacatgccagtggtgagaaattttggaggatgccattagaggaacgctattgtgaatcaatgaaatcaggagttgctgatatggtaaataccggcggtcgtcaaggcggtgctatcaatgcagctctggtcttgaaacaatctgttgatgaaaaagtaaagtggatgcacattgacatggctgggcctgtcttgaatgataagaagcatgtggcaacttaatatggcatcttaactttggtggaatgggttctgaataactcttcttcttaaatgaaaagcttgcacatgctctgttgt

SEQ ID NO: 26473 - DNA, 215 bp, Gossypium hirsutum
  Clone ID: LIB3147-049-Q1-K1-D6
agaatggttcgaaatccatgaatccgttattcatggatatgaacaatccgacatggggttggagttggttagaacgggggatggccgttcgaccatgggaaggacatgtcagtgactgtaatatgaacctatcatctaccatgtcatcggttatgatatgcacatttttgaagagaaattagcttagcttacgctcgttaccaactcaatttgta

SEQ ID NO: 26474 - DNA, 449 bp, Gossypium hirsutum
  Clone ID: LIB3147-049-Q1-K1-D7
aaaaaaaaaaaccaactaaaaagatggcgaggagaccggacgaggaatacgattacttgtttaaggtagtgctaatcggcgattctggtgttggaaaatctaatttgctttctcgatttactcggaacgagttttgcttagaatctaaatctaccatcggcgtcgaattcgccacccgcactctccaagttgaagggaggactgtgaaagctcagatatgggacactgctggtcaggaacggtacagagcaataaccagtgcttactatagaggtgctcttggagctcttctggtgtacgatgttaccaagccaacgacttttgaaaatgtgagccgatggctgaaagaactcagggaccatgcagattctaacattgtaattatgatgattgggaacaagactgatctgaagcatctccgagcagttgccacagaggatggtcaaagc

SEQ ID NO: 26475 - DNA, 195 bp, Gossypium hirsutum
  Clone ID: LIB3147-049-Q1-K1-D8
ggaagtatgcttccattatctacgatagctcttcaaaagctacgtttatagctgcgggggctgatggaagggtgccaaactattcttgtactgatgcttattgcaacacatgtacagacagttcccacggagtctagcgcgcattgtataaaacctgcagatggattgttcttagagtcttgccgtgaagttgca

SEQ ID NO: 26476 - DNA, 263 bp, Gossypium hirsutum
  Clone ID: LIB3147-049-Q1-K1-D9
gccacgcgtccgagattaacacccatgtggaatattgcaaacacttgctagaagctgggagagttcaccgggaaggcgctgaacgtgtacagcaacttaccgggcatgatcatgacgcagcttgacagcttgcattggccgaggaagcccgtcaaaggccgaacgcaatggaaatatcagaacggcggtgtaagcgtgctatatgctgatggacatttaggtctgggaggatttgcatatcttacagctaatgagggcggacg

SEQ ID NO: 26477 - DNA, 253 bp, Gossypium hirsutum
  unsure (1)..(253): unsure at all n locations; Clone ID: LIB3147-049-Q1-K1-E1
gaaacttgattaggcagtaaatccatgggttgggagcctgcccttccaagatttccatcaaatgtagaatgtgagatgcaaataaaaataaaggctatcaaataaccgaaaatttcccattacggggacttggtagtttcccccttcaatttagttttgcagacaggctttgtctgctagtgaagaaccaagattattattttgagaaatgcagtcaattttttccatcggcnnnnnanannnnnnnnnnnnn

SEQ ID NO: 26478 - DNA, 493 bp, Gossypium hirsutum
  Clone ID: LIB3147-049-Q1-K1-E10
cccacgcgtccgatttcatttcatccctaaacatctaaatttaagccacaagctttgaggttttgaccttttgttgggtcattagctttgattagtgggaaaagttctttgtatgtgcagagagaacaaaggctaaagagaatggaagtgggtcagatgcagagaagattggtggactacacaaaatccttgtttatggagggtttcttggatgctcagtttttgcagcttcaacagcttcaagatgagagcaacccagattttgttgttgaagttgtgtctcttttctttgatgattcagagaaacttcttaatgatctcaccatggctttagatcagccaagtgtagatttcaaaaaagttgatgctcatgttcatcaattgaagggtagcagttccagcattggtgcacagagagttaaaaatgcttgcattgcttttcgtagcttctgcgaggagcagaacatcgatgcgacactgagatgtcttcaac

SEQ ID NO: 26479 - DNA, 192 bp, Gossypium hirsutum
  Clone ID: LIB3147-049-Q1-K1-E2
cttatgggaagctaacgtcggatgcagcactagacccaccaggcttggtggccatagcggtagctcatgcacttgcgttgtttgttggggtagccattgcagccaacatctcaggtggtcatttgaacccagccgtcacctttggtttggccatcggaggaaacatcaccatcttgaccggccttttctact

SEQ ID NO: 26480 - DNA, 300 bp, Gossypium hirsutum
  unsure (1)..(300): unsure at all n locations; Clone ID: LIB3147-049-Q1-K1-E3
gtgaaaaaccagacaagagagaaaacaagaaaaatgggtgttctggatcatgtttcagagcggcgggattcgcttgcaaggnttgttcccaaaatcattgcatccttcatcttatgtggatattttgtgcccagtcttcaccttttggttgtccatcttaggtaacattatcttctagaccgtccaattttactggtttgtccaatgccttggcttaatttgttcttgccttcttctctagtatgataccaacggattgagtgttctaacccactatcttttgttttatgaatgtatgct

SEQ ID NO: 26481 - DNA, 51 bp, Gossypium hirsutum
  Clone ID: LIB3147-049-Q1-K1-E4
cggacgcgtgggcggcagcccaaactccggcccaaacaagcctatctggcc

SEQ ID NO: 26482 - DNA, 467 bp, Gossypium hirsutum
  Clone ID: LIB3147-049-Q1-K1-E6
gaattaacaagatgcttgctgtgcttgagaccaacatcttgtgggttaacccagactgtggtctcaagactcgcaagtatgccgaggtgaagccagccctgaacaacatggttgcagcggccaagctgctccgcacccaacttgcgagtgccaagtgagaggcatatctgaggtcggacatcatcctttatatcgaagatggtccagaggaaatttgtcttaaatcatttgaataactgtgtgttggaagtatttgttaggcgtatcatatgcccctcttttaggccaattgttttcctttttcttttttggttatttaccctctaaatttttgtattttcgggaatatatgaattgccttcaattactttgaaaggcacgaaatttggtagtgtatcttttatgagcctaatgaaaatgtcagtactggctgtggctgtggactgactatattagcttctttctct

SEQ ID NO: 26483 - DNA, 430 bp, Gossypium hirsutum
  Clone ID: LIB3147-049-Q1-K1-E7
cccacgcgtccgcccacgcgtccgaaaacagtgatgtcgcatttctaaaagagaagcgactgaggtttgccaaagaactcctctgatttttcctccaactataactgtttctgttgtgagtctttctgccatgtggtccgaaatgccactgcaatgacgctgattacttccttttcattcttaaagcatgataatgccccaacttattcctttactagtgtgaccattaaagccaaatatttagattctgtattattagttgcatttcctttctccttgtgaggaaattataataattttctggtttcttttgttgatgggacatgagttcttgggtgtgtttctaggttagtttaagccaaaaggctttaatagttgcgaacatatgaatctgcattgatttggatgaaatggatccatggctatggcc

SEQ ID NO: 26484 - DNA, 498 bp, Gossypium hirsutum
  Clone ID: LIB3147-049-Q1-K1-E8
cccacgcgtccgcccacgcgtccgatcttgctcataatcagttgcagaatgcgctggcgggcatgtttggaccactttcttccctctccacactggatctctctttcaattctctgaacggtggtctccccgagagttttaagaatcttaccagtataaactctatgtacttgcaaaacaaccagttttcaggcactattgatgtcctcgcaaatcttcccctcgatactctagatgtttcgaacaaccgttttactggctgggtacctgatcaactgaaaagtatcaatttgaagaaggatggtaattcatggagctcagggcctgcaccttctcctccacctggtactcctcctgccactagaaatagaaagcacaaatctggcagcgatggttctgcatcagatagtggttctggtggtgggagtagcagctcaggaattggaggtggagccatagctggaatagtgatatcaatccttatatcggggctatagt

SEQ ID NO: 26485 - DNA, 486 bp, Gossypium hirsutum
  Clone ID: LIB3147-049-Q1-K1-F1
gccagaaaggcattccatacctcaatacatatgatgggcgtactatccgctacccggaccctgtgatcaaggctaatgacaccatcaagctggaccttgagagcaacaaaattgttgatttcatcaagtttgatgtcggaaatgttgtcatggttactggaggaaggaacagatgcctgttggtagttgttaataacagggtgtttcacatgggtttttttgataactattcatttttaggttgcttcttggttatgagtttgctactatgatttgtttatttgttcatattttgatatggatcgtaattcattgtgtttatcttgtttatggtcaatggttatatagttttccttttactgtagatgtcatgtaattttttttttttccttttatttctaaattgtttcttaagtatatttatattttatattatctattttttattaattttatatattatttttttcttatatatttttcttt

SEQ ID NO: 26486 - DNA, 270 bp, Gossypium hirsutum
  Clone ID: LIB3147-049-Q1-K1-F10
cacaaacttacaaaggagactagacgaaatactagtagaattataaatagtagtgatgaacggagtgattatatggatccatatatacatacaaaatatcacattcaaaattacattcaaatatctttattaaaattggtatttgagttcgtgagtttaaaagtgagaacaaatgttagatcaaactttaaatttaacgtttaatgaaataaactaagagcaataatcactgtaatcagctttctgatcattgtgctttttattgtggtt

SEQ ID NO: 26487 - DNA, 495 bp, Gossypium hirsutum
  unsure (1)..(495): unsure at all n locations; Clone ID: LIB3147-049-Q1-K1-F11
cgctgcggcggtggaacaagctgcagtgacagtgaacaatgctccaccagcgtccgaggaaccggtgaggatgtcattaatggaattattagaagaaacaagccaacaaatggggctgatgggatccagttacatcataagcgacgccggtgaagagtatgagaaagaggaagtgacggatgaagacgaagacgaaaaagaggtggtgcaaagcagcggtgggatggagcacgcttgttgcgtttgcatggttaggcataaaggtgctgcgtttattccatgcgggcatacattttgtcgtctctgttcaagagaactctgggttcagcgagggaattgcccactttgcaatggctccatcttgggaaatctngatatattttaatctatatttaaatccgcgttatcgnttgttcttcataacaattttatctattctttttcttcattatcagcagggataacaatagttcatgtcttctagtttccaacttt

SEQ ID NO: 26488 - DNA, 392 bp, Gossypium hirsutum
  Clone ID: LIB3147-049-Q1-K1-F12
gcacacattgcacaaggttacacagtataagaagggtaaggatagtttggctgctcaagggaaacgccgttatgatcgcaaacaatccggttatggtggtcagaccaaaccagtgttccacaagaaggcaaaaaccaccaagaagattgtgctgaggctgcaatgccagggttgcaagcatgtgtcgcagcatccgatcaagaggtgcaagcactttgagattggtggagacaagaaagggaagggaacatctcttttctaaatgttgtgttcttgttcttgtgtttttgttggttttgagttcaatgctagtatggaatttttgtccaagttttgatttttaattttctcatgttataaaaacattaatgtgaaattcacattttattgtt

SEQ ID NO: 26489 - DNA, 434 bp, Gossypium hirsutum
  Clone ID: LIB3147-049-Q1-K1-F3
cccacgcgtccgcccacgcgtccggattcaagcacaagtgatggcccttcgggatggcttcgtctttcattgtatgggaattcacactctgcaggttcagcaaagacaaataccacggggagttatgcttcttccttgccttcgaacctttgtcgccacttctcgtttgctgagatcaaggctgccacgaagaacttcgatgaggccttagtccttggggtgggaggctttggtaaagtttacaaaggtgaaattgatggtgggactactaaagttgcgatcaagcggggcaaccccttatctgagcaaggtgtgcatgagttccagactgaaatcgaaatgctttccaagctccgacaccggcaccttgtttcgttgatcggttactgtgaagagaactgtgaaatgatcctaggttacgactatattgctta

SEQ ID NO: 26490 - DNA, 386 bp, Gossypium hirsutum
  Clone ID: LIB3147-049-Q1-K1-F4
cttaccgtcaacggattataatatccctgagaccatgtccgagaagagtagggattctttctcgtacaacccctccaaacaacttcaaggtccgtaattcgaggttttcaaatgaaaacttttgaaactcgggcctgttttagaacaatttgggcaggcttgttatgaattgtgaatggaaaacaaacctcaacaaattaccgaagattaacttcaattctcgactgatcataatcatgctttccctcagatgttcgagcatggagatgcattaagccattcgatggatgaattaagtgaaggattagaagtggatgtgataatttactaacactctacacatgagacaaactcttcaaaaagagctacgcgagtactcttgtaat

SEQ ID NO: 26491 - DNA, 414 bp, Gossypium hirsutum
  Clone ID: LIB3147-049-Q1-K1-F5
cccacgcgtccgactcgctacagattactccgggaacacttaccatctcatcacaaagaactgcaatcatttctgcaatgatgtgggtatccaattgacagggaaaccaattcctagctgggttaatcgacttgctagacttggtttcctttgcaactgtgttctcccagcagagttgaacgagacgagagttcgccaagttagatcagaaagtaagcttcaaccggtagagaagaagttaagaagccaaccaagtaagttcgtaccttcttctaaacctctaccttcttcattgaaatcttgcccttcaggccctgccatgagtagtagacaaaggcgatgtattccatcgtcggctttgattcatagttcttcgacctcgactttgagtttgaagctttaattagaactttc

SEQ ID NO: 26492 - DNA, 153 bp, Gossypium hirsutum
  Clone ID: LIB3147-049-Q1-K1-F6
ccggtcgacccaggcgtgcgtcacgctttcgactcactacatattactcctctaacacttaccaatttatcacaaacatcggctggcatttcttcaatgatgtgtgtattctatttacttttaaacttattcctatcttttttaaactacttt

SEQ ID NO: 26493 - DNA, 433 bp, Gossypium hirsutum
  Clone ID: LIB3147-049-Q1-K1-F7
ccaaaacagatcacttgtcgatgctccagatatgttcagaggccaaatgaacttcagagggggttacattgactgtttttacattctttttatcactttgtatttaattataattacttttttttttattatatttttcttctttttatataattattttttttttattttttttatatttttttattttttttttttttttttattttttttttatcttatttattttttattttttaataatttttttattttttttttttatattttttatttttttttctatttattttttttctttatcctattttttttataatttaactttctttatcttttcattattttttcttaacttttttctaatctttttttacttattttctctttccaaatttcttctttttttttcctttttattttataatttttt

SEQ ID NO: 26494 - DNA, 353 bp, Gossypium hirsutum
  unsure (1)..(353): unsure at all n locations; Clone ID: LIB3147-049-Q1-K1-F9
tttttatttgattgcaagattactatataaattccaccccagctttagctccagtttgaagctagccctgcattttgtattatgctgcaatacagtactaccaggggcagttaagtgcccggtccgattttaaaaaattccaggcctgagactaagcccggccaggtctgctcaaaaagcacatattattgtttgaaaataataaaataacacattttttaaaaaaaaataaaatatttattatattttataatatttaataattattaaaaaattttaaataatattttaattttaattaaattatttttaattttttatattattttttttnttttttttatattttattt

SEQ ID NO: 26495 - DNA, 367 bp, Gossypium hirsutum
  Clone ID: LIB3147-049-Q1-K1-G1
cccacgcgtccgcggtgaaatatattcagtatcaaagggcaatctgtaaagctttactggatagggtccccgatgggaaggcatcagcaataacaactgtattaatggttgttggagcaagacgaggacctctagtgagagcagcattgcaggcagctgaggaaactggacgcaagcttaaagtttatgctgtagaaaaaaacccaaatgctgtggtcacacttcatagtctggttaaactggaagggtgggaaaatgttgttaccatagtttcttgggatatgcgtctttggaatgctcctgaaaaagctgacatcctggtcagtgaattgctgggatcttttggtgataatgagctgtctcctga

SEQ ID NO: 26496 - DNA, 293 bp, Gossypium hirsutum
  Clone ID: LIB3147-049-Q1-K1-G12
caaaaagcacgctcttcttccttgtgtaagcggcgccggcaagaagctaaggccagtccacctcggatctctcgtctctgccttccatcgacaacaatctatcttacatgtttcacttcttctttcatcaaagattttgatggcgtcaaaattgcagcagttgcaatctcaggcgtgccaagcttcaaagtttgtggcgaagcacggaactgcttactacaagcagttgttggagcagaacaagcaatacattcaagagccgccgacagtggagaagtgcaacgagttggcta

SEQ ID NO: 26497 - DNA, 485 bp, Gossypium hirsutum
  Clone ID: LIB3147-049-Q1-K1-G2
ctcgttcactccattatgcgacacgtggcggagacttggcgtatcgatttgcaggacctgagcatgaaaattgggtggcctctatacgggaaatatggccatgcttgggaggcattcaaaataattgagactgatcctgagtcagtcttgaacaccctcacctgtgaagtcacgaagcctgacccagatggacaggaagtaactgaagtgcttcctgctgctactgaggaagtcaaagatgctttggtaaaaaacattatgagaagaatgactccacaacctttgaagattcgggctgacattgaaatgaaacgtctccagtttgatggtgttcttcacattaaggaggccatgcgcaaagctgaggctgctgtgaatgatgattgccctgttaaaatcaagcttgatgctcctacactttatgttcttaccactcaaaccctcgacaaggagcatggtatagctattctcaataaacaattaca

SEQ ID NO: 26498 - DNA, 330 bp, Gossypium hirsutum
  unsure (1)..(330): unsure at all n locations; Clone ID: LIB3147-049-Q1-K1-G3
cggattctgatacttctgacaatggcaaggtagacagttcccctagtcatgtttctgactctgaaaccctctctcccagtgaaagtgtcatcgtcacaaagggaagtgataatgattccacagaagttcattagatatagaagagactcgaaacctgaacctgtcttgggtgaggtaataaggtatactataatctgaccatatgcagcgggtgtcgattgtttcactgttttaagtaaaaaatatgaagccaaaagtaaatctgctctcaatttttatcatntgtcgtttatactaaaagttaaatgaattacatcgttcaattgatgt

SEQ ID NO: 26499 - DNA, 260 bp, Gossypium hirsutum
  Clone ID: LIB3147-049-Q1-K1-G4
cccacgcgtccggagcggagttcagtctaggagtgtgtttggtctttttaatgttcctgctaaaaggtattcattcatcttattggtagtatttccagcttgttataccaaagtcttggtcttggacccttttggcatttggttgcttgcaataccttgctatcacttctatctgaccatctttcactgctggtctatatgtgagtgtgaggctatattatgcggggaacctatcatcattcgtaatatctcagcttttg

SEQ ID NO: 26500 - DNA, 492 bp, Gossypium hirsutum
  Clone ID: LIB3147-049-Q1-K1-G5
cccacgcgtccggaaattttttattagcacacagagatcgatctgatttcaatagatcctttcaatgccggttgaaacggaagaagttgcggggccgccgccgccgcctgccgttcccatccctcctcagcggcggccgagggtaagagaagtcagttccaggttcatgtctccggtatcatcctcccattcttccggcgaccattcgagatctccacttcataagcaacaccatttgcagcggcagagacggcaatcggaaccggaggttgacgagaacatcctcgccgttgccccttgtgatactccaagagcctctcttgaatcgccgttcataaatataactaccgttcaaaagaagcatcgccattcaagaacttatagcgataccagcaaattatttgggagaagcacagcaaataatacgcctttaaggccagatacgcctactattgaaagaacttcatcattaccatcatcaacaataaagat

SEQ ID NO: 26501 - DNA, 221 bp, Gossypium hirsutum
  Clone ID: LIB3147-049-Q1-K1-G6
tgaagatgaaaagaagcgaggagaaggaactaaagcttagagttgcggttaatattggagcaaatattgaaacatagctgctacgtggagaaaaagactgcagagtgtatgtctggtttatacaagatatatgatttactatttgttagtgctatcaccattgtttgccttgtaaaaaggatctcattctattaatcaaaatattcatgttaatgcttttg

SEQ ID NO: 26502 - DNA, 325 bp, Gossypium hirsutum
  Clone ID: LIB3147-049-Q1-K1-G7
cgacagaacgccttttggtttatccatttatgcagaatttaagtgtggcctatcgtcggcgagaactcaaacccggtgaacctgttttagcttggcccgcaagaaaaagaatagcactaggagcagcacgtgggctggagtaccttcacgaacattgcaatcctaagatcattcatcgggatgtgaaggcagcttatgttttattggatgtagactttgaagcatttttttgggactttggattttttaagtttttttattttatgtcatcttttttgttcaatttatggatttttttttttattttgatcttatattttttatt

SEQ ID NO: 26503 - DNA, 343 bp, Gossypium hirsutum
  Clone ID: LIB3147-049-Q1-K1-G8
cagtaatgttcatccggtcgataacgtagctgtttctgatgaactcgaagtccgagtttgagttgagaaaaccaccacgcttgctgatgattcctagcagagtctgcttcccctgagaaaatcattaatctctggtgcaagtataccccaagttctgatccatcaggtatggaaaataaatcagcattgggtctctggcaatcaagattctactttccgaggagcgtgatgtgtgtaattcttttataatgggggcagctcagccccccacttgaaaatatttttaaccttttgggtctattattgtaatactaccaatttgaagaaataattttaacctttt

SEQ ID NO: 26504 - DNA, 111 bp, Gossypium hirsutum
  Clone ID: LIB3147-049-Q1-K1-G9
gccacccacacgtccacagtatttttcatccattcaataacctaactttttctcatcaacatttattcctaggggtggttattaaaaccaccactccccactaaatattcc

SEQ ID NO: 26505 - DNA, 472 bp, Gossypium hirsutum
  Clone ID: LIB3147-049-Q1-K1-H1
gtgtagctggtgagaaggaacttcactcattttccacctcttggttttgtaatttgattgtaatgctttctaaactccttttcacataacctgttcattctagatttgtttttgttctcaaggttcttgagaatggttactgtgaatgtattgcttccatttgcctgccaagttcaagtccaactttgaggcactgtcagtgttgagtttttgatggagcatgggaagcattggcttccagcaggcacttgctgctagacaaatttagccagatttgtagaggaagattgaggaaatcaatcaatcttatgagatgcggaatttgcaagggagtaaatgccttaaccagtcactttgggatggagatagaaggcctaaataaagatgatctgttgatttttgaggctatctatcttgaggagttttggtgaaataaacttggtttagtatgctatataactttccaaatgtc

SEQ ID NO: 26506 - DNA, 480 bp, Gossypium hirsutum
  Clone ID: LIB3147-049-Q1-K1-H10
ctttctttggccctatcaattcaactgttggatctctccttgtcagcttcactgtttacattatcccttcattagcacacatgattacttttgcaccttcatccgcacgagaggttagccatactttttgttcaattatcatcatcattaccctctcaataactattactgatgttttcttctttgttttctgttttgcagaatgcagtggagagaccaccatcattccttggagggtgggcgggcatgtactccatcaacatctttgttgtagtatgggtgttgattgtgggatttggatttggaggatgggcaagcatgcttaatttcatacaacagattaatacatttggtttattcaccaaatgctatcaatgccctcataaggcttgaactatatggatttattatcatcttcttcccaaatgattaacaaagttttaagatacttttctttttaagtgtgtaaagaggttggca

SEQ ID NO: 26507 - DNA, 104 bp, Gossypium hirsutum
  Clone ID: LIB3147-049-Q1-K1-H11
cccacgcgtccgctcgggcatctgtggttattaccttaaaatctgttgatcattctccatatgataatcctcttgatgatcgaaagagagtgcatgtacaggac

SEQ ID NO: 26508 - DNA, 146 bp, Gossypium hirsutum
  Clone ID: LIB3147-049-Q1-K1-H12
cgctaatctaaaaggagataaatcatcatcttttgctgaagattttgaaccgagacctaacgttttcggcttacgggggcgatgatgctggtcttaaaggacagaaagaatcattcactaaagatttcgatccagaaccaaatgtc

SEQ ID NO: 26509 - DNA, 459 bp, Gossypium hirsutum
  Clone ID: LIB3147-049-Q1-K1-H2
aacgtattgaagaagaaaatgaaaggaaacgtttggtggccctgcggaaagctgaaaaagaggaagagaaacgagcacgagaaaagattcgtcagaagttggaggaagataaggcagagagaaggcggaagcttgggctgccaccagaggagccttcagcagcacctaaaccttctgcatccattgtggaggagaaaaagagcgcattgccagttaggcctgccacaaaggctgaacatatgcgcgaatgtttgcgatctctcaagcaaaatcacaaggatgatgatgcgaaagtcaagagagcattccagactcttcttacatacataggaaatgtggccaggaatcctgatgaggagaaattcagaaaaattagactaaataatcaaactttccaggatagagttggatcttgtaaaggagtggagttcttggagctgtgtgggtttgagaaagttg

SEQ ID NO: 26510 - DNA, 181 bp, Gossypium hirsutum
  Clone ID: LIB3147-049-Q1-K1-H3
cccacgcgtccgcccacgcgtccggttttttttttaagcttctatgtttttttgttctgttggggggtaatttctaattttgtgttttttatggaacaatactagttaagtggaactgaaattttatcaattgtgatgtgtactttatttttgaagaaatctgaaatgggtaattttagtt

SEQ ID NO: 26511 - DNA, 287 bp, Gossypium hirsutum
  unsure (1)..(287): unsure at all n locations; Clone ID: LIB3147-049-Q1-K1-H4
cagagtacaatggcccatggaagcctaagaaaatcaagaaccccaactacaatggcaagtggaaggctccaaaaattgacaacccagacttcaaggatgatcctgatctttatgttntccccaacttatagcatgttggtattgaattgtggcaggtaaaatctggaacattgtttgataatatcttaagtgctgatgatgttgagtatgccaaaaagctagctgaagatacatggggcaagcagaaggatgccgagaaggctgcatttgaggaggcagataaaaag

SEQ ID NO: 26512 - DNA, 143 bp, Gossypium hirsutum
  Clone ID: LIB3147-049-Q1-K1-H5
gcggcacacaaaaaagtcgaaattgtttactattacccatggtgaaaacccaagacattgtctaaaagcatggttactgtcttcttctgtatttgggcatcgaggacatgagctatctgaagccactcttcttaatctagatt

SEQ ID NO: 26513 - DNA, 265 bp, Gossypium hirsutum
  Clone ID: LIB3147-049-Q1-K1-H8
ggaagaatgtttccaccttccttgttcaggccggtattgtgaagaaggataacatcagagatgcatggcttttaaagttgcaacagctaaaatttcttcgagtctatcctattctgaaactcctatgtatgtaatgttataatatgtttatagtggtgtgatactgataaatgcaccctgtgactgtgtttcttgttgtgctttcaactctttagccctatgtgatgttgaatggcgatattagctttaattatttctatttctc

SEQ ID NO: 26514 - DNA, 441 bp, Gossypium hirsutum
  Clone ID: LIB3147-049-Q1-K1-H9
acgattcactggaatttattatctagacggtattacagttaccaacaaaggtctacagatggagctggagaaaatcctaactattttcacctccattgacctttcatgcaacaacttggaggggccaataccagatgtgatcagaaaattcaaagcactgtatgttctcaacctgtcacacaatgctctcactggaaaaatcccaccatctctaggaaacttgcaacagctggaatccctggacctctcgagtaataacctgagttacagtattcctcaacagcttttaaagctaactttccttgcagtccttaacctctcctacaatcaactggagggactcataccagatggaaagcagtttgcaacatttactaatgattcttatgaaggtaacaagggactatgtgggaatccattgacgaaacaatgcaacgatgc

SEQ ID NO: 26515 - DNA, 257 bp, Gossypium hirsutum
  unsure (1)..(257): unsure at all n locations; Clone ID: LIB3147-050-Q1-K1-A1
gaaacttgattaggcagtaaatccatgggttgggagcctgcccttccaagatttccatcaaatgtagaatgtgagatgcanataaaaataaaggctatcaaataaccgaaaatttcccattacggngacttggtagtttcccccttcaatttagttgtgcagacaggctntgtctgctagtgaagaaccaagattattattttgagaaatgcagtcaattttttccatcggcaaannnnaanatttatataaaaatg

SEQ ID NO: 26516 - DNA, 309 bp, Gossypium hirsutum
  Clone ID: LIB3147-050-Q1-K1-A10
taccaactgaattcggaggaaaggctgtattggagtacaaccatgaagaattctcggagcggatgagccaggatgatatcaagtctgccaatttgtggtgatttgatgataaactccaatgtatcggcttcaggcactctggatcctactttttctccgagccagtcttgtcttgcaccatctgccagttgatctacctgccttatgcctgttatgttggaatataattcatattatacatttgtatattgtctatgctactgtatagtgtgcatcaggtattgaagcagcgaattgtcctttttgtct

SEQ ID NO: 26517 - DNA, 464 bp, Gossypium hirsutum
  Clone ID: LIB3147-050-Q1-K1-A11
tcgtccaaccgtcccctctcaactttccaggttccttgctctacatctcctggagaacacagtcccctataacactatgtcctcctctttttcttctttcgctcattcaaatacaagtcagaggacgaagagcacatgataaaggtggacgcaaagaacgcgttggagaactacgcatacaacatgaggaacacagtgaaggatgagaagattggtgccaaacttgctgcagcagataagaagaaggttgaagatgcaattgacgaggccatccaatggttagacaacaaccagcttgcagagtcagatgaatttgaagacaagattgaggaagtggactaagaaatttctctccattcttttcgacccttacatttgttcctttagtcgtttcatgttggtttcttttttattggactttagacatgtttttgaggattttgtttgaagccaatttttgagta

SEQ ID NO: 26518 - DNA, 313 bp, Gossypium hirsutum
  Clone ID: LIB3147-050-Q1-K1-A12
cccacgcgtccgcccacgcgtccgcccacgcgtccgcacacgcacagacactctctcaccctttgtatctctatagcctgtgcgtgcagtagtgttcacacgcagcatccaaaatatacaatgaggggacaattagaaggtggtgataatttgttgaaaattccaaatgcatccattatacactgtattcgatttgttcataatgtgagttattcgttgtttttttcccttgaatatatgttcatggtattccaacttgtatcctttttgtaaaaaaaataaaaaaataattaataaaatataaataataaaa

SEQ ID NO: 26519 - DNA, 405 bp, Gossypium hirsutum
  Clone ID: LIB3147-050-Q1-K1-A2
aacaaaagcaaccatgtattgaggaagctggagaagcgtcaacaaaatcgcgctcttgacccacatattgaggaacaatttggcagtggtcgtctgttggcttgtatctcttcacggcctggtcaatgtggccgtgcagatggttacatcttggagggcaaagagctggagttctacatgaagaagatccagagaaagaaggggaagggagctgcttaaaaaattattgcatagttttcagcattcatatcagaatgccgcccttagggtttgcctttcacatttccagaacatttaaagttgtgttagcattgaacttttaatctggatccctgagagttattatttttgtattggaatttagattatctttgaactttataaatgcagcttattttggttggt

SEQ ID NO: 26520 - DNA, 338 bp, Gossypium hirsutum
  Clone ID: LIB3147-050-Q1-K1-A3
ctcattctccacagtttctttctttcactcttttttttttttgccctatctaatagggttggagtcatcttcaagctccaatctttctcatgcattcgtgtattcaagccatacacggcgacgtttagccttcttcctttttgggtctctttttttggctctctttggagggtttttgggcgtggaacagtgcatatttgacctcccggggttttttgagctgtactcatgtcaaagctctctgcttttagtggaagtgatgatttttgccctgtggggtcaatctacccaaaccggaggggagtcagtctctttctttaccctaaccaggatgtgta

SEQ ID NO: 26521 - DNA, 492 bp, Gossypium hirsutum
  unsure (1)..(492): unsure at all n locations; Clone ID: LIB3147-050-Q1-K1-A4
ctcactggggtgattctggagccaacaatccagcacctgccacaaattctgctgatgcccagctgaaacaagaactcgcagcaatatttaagaaaattggtgacaagcagacatgcaccattggtctctatgagctttatcgcattactcagctataccctaaggttgatatatttgctcagctccaaaatgctagtgaggcatttcggacttatattagagacggcttagctcagatggagaagaatgctgcagctggaaggactccttcaagtgtgccaatgtcaacccctccccctgcttctctttcttcttcgtcacctgaatttgggcctctgtcccctgtacagaccaactctttaaatgattctaaattatcaagtacaaaacctgaaccaacaagctttaatttgccaccatcatacactgaagactatcgnggggctggtaatgctataaatacagcaagagttcgtgcccctgaaaatgcat

SEQ ID NO: 26522 - DNA, 230 bp, Gossypium hirsutum
  Clone ID: LIB3147-050-Q1-K1-A6
taaaaaaaaataattattaaataataataaaaaaaaattataaataatattaatcataaaaaaaaaggggaaaaaaaaaaattagaagattgtcatactatataaaaaactctaatattaaattctaacaatatcattcgggttgtccttttattagatccaattttaatttccccattctttccggggtcctccttttttattattgaaacaaaattgacttcccctgc

SEQ ID NO: 26523 - DNA, 419 bp, Gossypium hirsutum
  unsure (1)..(419): unsure at all n locations; Clone ID: LIB3147-050-Q1-K1-A7
tcgcccacgcgtccgcccacgcgtccgccatggaccccctgaagctgtcctatgaagctcgagtgcatgcatcccaaaacaagcgcttgcctgtgcagattgttttgcacgcattgtactatgatcagctaaagctaaggagtgggggggcggatgaccgcaaccagccagacgccgtgaccaccaggaatcagttgcaggcagacgtgtcgctggtaaaggagaatgaggcattgcgaacggagcttttgaagatgaagatgtacatatcggacatgcagaagaacaatcaaactggaactagttcaaagagcgttgggaccagaaagcctaccttcttctcttccatgttcaagactctaggcaagctaaatccctttcgacatggcttcaaggacactnttccatatcgatgataa

SEQ ID NO: 26524 - DNA, 306 bp, Gossypium hirsutum
  Clone ID: LIB3147-050-Q1-K1-B1
ggcttatcagtgaaaagagaagaacatcctttcaatgcaagaccaacaacagaagatagccttaatccaccatggcctggtcccccaccaataaaccttttagatcacccactgtcacaaaacgaaaaccctagccaaaacactggttctaatacacttcttcctccattccagacccaaacagcatctccacacatgtctgcaacagcactcctgcagaaagcagctcaaatgggtgtgactatgagccaacccttacaatcatcaccagtagcggctatggctttcatgcaaagagcttacatg

SEQ ID NO: 26525 - DNA, 369 bp, Gossypium hirsutum
  Clone ID: LIB3147-050-Q1-K1-B10
cggttttccttggttgtgtgaaccatttattcattccttggctaattttttggcccgggcggctccgtgaagttggcttgtggccgcctcggccgggtttttcggatgagtggttaaaccgaaaaccgctgtgtataatcggcatgggacctgaaagcttttaatggttttctctttggctgagttgaatcggttgaacttgccagcttgtaaatttgatttccactttactttttcttttccttttcaggttacttattaaattcatttttgttttattatgtattatctttttggataatctgaaatcttgatattacataggaaaattctccgttggattaatccatgccatggcatttttatttt

SEQ ID NO: 26526 - DNA, 467 bp, Gossypium hirsutum
  Clone ID: LIB3147-050-Q1-K1-B2
tccttccttcgccgtctactgcacttgtgacatcgatttcaagtgaatcagaatgggtaaggaaaagagtcacattaacattgtggtcattggccacgtcgattccggaaaatcgaccaccactggccacctgatctacaagcttggtggtattgacaagcgtgtgattgaaaggtttgagaaagaagctgcggagatgaacaagaggtcattcaagtatgcttgggtgcttgacaagctcaaggctgaacgtgagcgtggtatcaccattgatattgccttgtggaaatttgagacgaccaaatactactgcactgtgattgatgcgcctggacaccgtgactttatcaagaacatgattactggtacctcgcaggctgattgtgctgttttgattattgattccaccactggtggttttgaggctggtatctccaaggatggtcagactcgtgagcatgctttgc

SEQ ID NO: 26527 - DNA, 54 bp, Gossypium hirsutum
  Clone ID: LIB3147-050-Q1-K1-B3
ctcaccttttcctgttctttgattttaatgaaataattgatttcgtttattatt

SEQ ID NO: 26528 - DNA, 389 bp, Gossypium hirsutum
  Clone ID: LIB3147-050-Q1-K1-B4
cccactcgtccggtcacatttggactctacatgttggattggtgggagcgttaccttttcaacacactggttattgtgttgatgtggttcatcttttacaacagctcgcgatatgtaacggagttttacaagaggcatctatcctagggttgggaggtggcaatggtgatggaagtgtgaaatacttttgaattatttggctgaaaatcttgcttatatgtggatttttcatacaacatttttagcatgtctcacatatattgtcgtactgttttcaaagctattccttgcaaaaaatttaaaacattgtcgctgttgtaactattgttgaaactcttctacaattttaaaaattataattagaagtaaaagcactttttgtccaaaaa

SEQ ID NO: 26529 - DNA, 295 bp, Gossypium hirsutum
  Clone ID: LIB3147-050-Q1-K1-B5
agacgcaccttagctcgactgggagctaagccatgtaaattttcccataaacattgtgtgacaggcgtaaatcgacttccttggctatgactggttgaaggtatcttataagaaagacctaccggccgtggaacctcttgaactagaggtatttttatacctggtgttgctctagtataacttcctatccaaaagggattagctgcttaactcctcttagagaattaaccaatgtcattgctagagctgatcacaaagattcaaaggaattcactcttggagattttgaaaggtt

SEQ ID NO: 26530 - DNA, 340 bp, Gossypium hirsutum
  Clone ID: LIB3147-050-Q1-K1-B6
ttcatattgaagtgttctcagatcatgaaagcttcaatttaatggttaaggtacatgccctggtcatatgcaatcacagaagtgatattgattggttagttggatgggttttagcacagatgtcaagttgttttggcagttcataaactatattgaaaaatcatctaaattcctgacgaacaagtttggacaatgtggttttctgagtatttgtttttggaacgaagctgggccatggatgaaaacacattaaaggcaggtctttaactgttaaaggtactttcacggtcatttttgttggcacttttcgtagaaggatactttgttatacaatcaaagt

SEQ ID NO: 26531 - DNA, 367 bp, Gossypium hirsutum
  Clone ID: LIB3147-050-Q1-K1-B7
aaattacttgtaaaacaaaatgcagacaaagatacgaaggataacgacggcaactctggagtcaacctatgtgactcagattggccttggttgcaacgtgcaggcaaagcggaatgacctgtgttttattcccaagtttggtttaagttaaaaagtacttgaaaaaatttctcatggatgtatatgggtataagtaaccttttgcacttctttccttagttatatgctaatgtggggtactctgatgttcattggcctcacctccttaattactgctttctttaccaccataagtagatggaaaaaaattggaaggggggtttagccggtgaaatggaattttgataccatcattttgtttgaatag

SEQ ID NO: 26532 - DNA, 69 bp, Gossypium hirsutum
  Clone ID: LIB3147-050-Q1-K1-B8
tcttccttttcctctttttatctactattcatctcagggcttttatcgttaatgaatagaaatatgggg

SEQ ID NO: 26533 - DNA, 299 bp, Gossypium hirsutum
  Clone ID: LIB3147-050-Q1-K1-C1
caaggtttcatgtcagtggaaatgactcccactgaagttagcattaaattctatgacgtttttggtaatgttttgcacaattggagcagttccaagcaactttcttttgctatctaagccaacgttttaagcctttaaaacaccttccattgcctgaccaaggagctgcaatattcagaagcaggggaaatgaataggagacgaactctgttaatatgttttctttggtacaagaaagttagatttggaagtataagcgtatgttatttttaaaattatatgcaagaatcaagtaagct

SEQ ID NO: 26534 - DNA, 494 bp, Gossypium hirsutum
  Clone ID: LIB3147-050-Q1-K1-C10
cccacgcgtccggggaaccaactgttacacacagcagcagcagcagcagccatggtgaagtactcaagagaaccggacaaccctactaaatcttgcaaagctaggggttctgaccttcgtgttcattttaagaatacacgagaaactgcctttgcaatccgaaagctacctttgacaaaggcaaaaaggtacttggaagatgttattgcccacaagcaagcaattccattcaggcgcttctgtggtggagttgggcgaaccgcacaggctaagaatcgccattctaatggacaaggccgttggcccatgaaatctgcaaaattcattctcgatttgctcaagaatgccgagagcaatgctgaggtgaaaggcttggatgtagattcacttatcatatctcacatccaagtaaaccaagcacagaagcaaaggcgccgaacatatcgtgcacatggaagaattaacccctacatgtcttcaccgtgtcacattga

SEQ ID NO: 26535 - DNA, 270 bp, Gossypium hirsutum
  Clone ID: LIB3147-050-Q1-K1-C11
cccacgcgtccggggaaccaactgtagctcgcattatgaatgcccggttcgatggcgagggacaaacactaaccggtctagacgtctaacccttgcatacggaaggtggtctgaccattgcgttgatgttaagattccacatagtacaagggttcgccattccaaagttacgaatgagagacgctataaggctcttacaagttgttactgtccacaagcaaggaatttcatagaagcgctcatgtagaggagagggtcgtacagatcaag

SEQ ID NO: 26536 - DNA, 422 bp, Gossypium hirsutum
  Clone ID: LIB3147-050-Q1-K1-C3
gaaaaactgtcgaacctggccggagtcgagcctttgtctgcaaaacaaagcatgagatctgtattctgtagtctacctcattcccatgtaaatataaacaattaagtcgcatgtttcctcgtatgtatcctgtttctagttcaaagacaacgggcgaacttacagcaaggttgcggttagagttggaaaattggtgctgctgaggagttttagcctgtttctttgcctctcaattcaatgcaaaacgtgtgttcaattgccttggaacttattctgtatatttattgcaagatctcattttgtacatcttattcttgccaatgtgcaaagaattcgaatccatcattttcagttttacattcttagcttttgttgtgtcttctttcaagggttcatttgttcaatggtaaaggttttttttt

SEQ ID NO: 26537 - DNA, 463 bp, Gossypium hirsutum
  Clone ID: LIB3147-050-Q1-K1-C4
ggtgaatggacaccctcaacaattcccaacccctagtacaagggcccatggaagccatagaaaatcaagaaccccaactacaagggcatgtgtatggcaccaatgattgacaacccagatttcaaggatgatccagatctctatgttttccccaacttgaagtatgtcggtattgaattgtggcaggtaaaatctggaacaatgtttgataacatcttagttgccgatgatgtagagtatgccaagaaactagctgaagaaacatggggcaagcagaatgatgctgaaaaggcatcgtttgaggaggcagagaaaaagagagaggaggaatcaaaggatgacccatttgattccgatgctgaggatgaatatgatgccgattattctgaatggcacgagtctgattccgataccaaatcagacgatgatgacaaggaagatgctcatgatgagctctaagcac

SEQ ID NO: 26538 - DNA, 139 bp, Gossypium hirsutum
  Clone ID: LIB3147-050-Q1-K1-C5
cccacgcgtccgagtggtccaatcctgtaactcatagaatttccccatcaatagaagtcggggggtctactgcaactataagagatcttgactgtaacagtagcttagtagttgctcctgtggaagatcatcagcatga

SEQ ID NO: 26539 - DNA, 272 bp, Gossypium hirsutum
  Clone ID: LIB3147-050-Q1-K1-C7
gcacatcaaccgcttcacttttccttcttttcatcttctcaatcacaccaccgtcctttgggttcgaggtggccaacgctacaaattatcctgtgctcgacatcaatggtgactggctccacaggcgttgaatatctacgttgtgtcatcttatttttggtgctgtcggtggggggcttgccctaggcaggtctaccaaacaaccatgcccggaaatcgatgtttatagacgatccgtttcctacaaaggttcaccgtgtatattttctaat

SEQ ID NO: 26540 - DNA, 329 bp, Gossypium hirsutum
  Clone ID: LIB3147-050-Q1-K1-C9
attcccggggggagcgccacgcgtccgcactcctatattcatctttcagcataaacgatgtcttcggttggcgaagctgcttgctggtatgctgctttgatggtctatgacgatggcatccccatcaccgctgagaatattgccgcgctagttaaagctgccaaagtctctgttgagtcttattggccaagcttgtttgctaagtcttttgagaagtgcgacattgagaatctcataaccaatgttggtgcttctgctggttaagctacggtcgctgcagcttcaccattttcaactgctggatgaggctgtccttcttcctctgcttc

SEQ ID NO: 26541 - DNA, 325 bp, Gossypium hirsutum
  Clone ID: LIB3147-050-Q1-K1-D1
ctttctctctctccatagctccctcccagcctctgctccccctataagcttcgttaatggcgtttcagatctcaaaaaacaaactctaagccttaagtaaactcaaatcctacccaaacccaataccaaaatcgagataaaaaaaaatcatcctttcatatcaaaagccttcattcttttctttttttcgtgtgtgtgttttcttttttccttcttttcgagttttaattaatgcataagaaaatggcgttttcgttcccagacgaggtgctggagcatgtgttctcattcatacaatcagataaagaccggaacgcggtgtcga

SEQ ID NO: 26542 - DNA, 236 bp, Gossypium hirsutum
  Clone ID: LIB3147-050-Q1-K1-D10
ctcgtgtttcccggcagcgaacttgttttgttctttgcttttagattatgcttaagaaggggtaacactataaaatgtatgcctacatatgacttaatttatctcttgcttgtgtaatctttccatgctttctgttattcatctttgattcgagaagtgtagtcaaacccgacttttcgagatgcggaatacatgcaggtatgatttagcctaatataatggtgcaacattctttt

SEQ ID NO: 26543 - DNA, 204 bp, Gossypium hirsutum
  Clone ID: LIB3147-050-Q1-K1-D11
ggggagtttaaagcagcaatatggtctggcatagtcggcaaatgaagtgattttggtgagggaagcttacaaggcccttcgtgaccgatcaccttatcctccaaaccatgtggttggccatctaattgggagctttgcttttattgtcctttgacaaataccaccttcactttgtttgtggcttctgatcaatttggtaaggtt

SEQ ID NO: 26544 - DNA, 433 bp, Gossypium hirsutum
  Clone ID: LIB3147-050-Q1-K1-D2
cttcacattgttatcatcgccttggcgttggccttcaaccatgcaagctcttcaaccttctgcttctcttcgaccttcctctctaaaacctcttaaaaaccccaaacccaatccccattttcccaatgtatcaacactccctcccaggcctgccaagaaattctcttccattaccgcttcatcccccactgtttcagctcccaagcgcgagaaggaccccaagaaacgggtcgttattacgggaatggggttggtttccgtttttgggaacgatgtggatgcttactatgaaaagctgctggctggagagagcgggatcggaatcatcgaccgcttcgatgcttccaagtttcctactcggttcgccggtcagatccgggggttcacttctgaaagttacattgatggaaagaacgataggaggcttgacgat

SEQ ID NO: 26545 - DNA, 473 bp, Gossypium hirsutum
  Clone ID: LIB3147-050-Q1-K1-D5
gtttcaaattcggcgtgctcgatctaataacaaacatctggaaaaagaatatgattcactggggagctaccttcgataagctcatggctgacttcgacaatctccttaaggagaaagatgatttaaaaaatcatgtgcttacactcaaagagaagctgcttattaaagagacagggatgtaaaatctgggatctgtccaagccatacattcgaccaatgatgaacctcataaacccaatccagatgcatcccatgttccattgctggcctgctaacaggaagaatcatgttcggctcaaagtgatgtttttgactcggacagcccacactatcccgatggccatgggtattattcctcattcatagagcctgcggaatcctctaacgttttcgaaccgtatcaatcagacaaagaagatgatctcatcaaaagccttctgcattcaccattgttctttccaaattcgattgtt

SEQ ID NO: 26546 - DNA, 137 bp, Gossypium hirsutum
  Clone ID: LIB3147-050-Q1-K1-D8
cccactcttccgaagagacttgactgcaccttatttagatgatggccttctggaaggtgtgggttttagagatgcatggcatgggctcgtgtttctttctccaaagggacatgtaactcgcctttcacatgcacacc

SEQ ID NO: 26547 - DNA, 443 bp, Gossypium hirsutum
  Clone ID: LIB3147-050-Q1-K1-D9
cccactcttccggtgctcgcataaggttccagaggggtctcaagagaaagcccatggcgttaatcaataaacttcgcaaggcgaaaagggaggctccaccaggtgagaagccagaaccagtcagaacccacctccgaaatatgatcatcgtacccgaaatgattggtagcattatcggtgtgtacaatggctagacattcaatcatgttgagatcaagcccgaaatgatcagccattaccttgctgagttctctatttcgtacaagccagttaagcacgggagacccggtatcggtgctactcattcttcaaggctcatccctctgaagtgaagccctttcatgctgcttggagcctcaatttggggtttactatttgagagttatattttgtttgttgcacttctaagtaatgaaaatttcacacagcttttggttgctttc

SEQ ID NO: 26548 - DNA, 361 bp, Gossypium hirsutum
  Clone ID: LIB3147-050-Q1-K1-E1
gaattatatatggaggttccgtaaatggagcaaactgcaaggaattggccgcacaacccggtgttgatggctttttggttggtggagcttccctaaagcccgagtttgttgatatcatcaaggccgcgatggtgaaaaagaattagaagttgaaaagcaggaattaaaggtgaaacagaaacaaccttctgggaaactttaatttttgtagttgagatctttccttggaacctaatgtctgttgaaaatttcccgatgtaataagccaaatttaactatgtgttttttttttgcggtggttgaggcattgatcctcatttcggactttccctgaatttacctcacaaattgctattgctct

SEQ ID NO: 26549 - DNA, 447 bp, Gossypium hirsutum
  Clone ID: LIB3147-050-Q1-K1-E2
cggacgcgtgggttttaggaaaggtcttgactgctggtgatgatgcggttggtttggagcagttagaagaagatgcagatgatatagcccttcacaaagctcgtcgctctatgggatccatgagtgcaatgtcgggtgcaaatggaatggtctacatggaatacagcactggaaagcataaacttatggggcatggccagaataagagtaaacctaaggatccatccaagcggcatcatttgtttaagaaacgctttggttgagatgaaagccaaaccatgcagaatgatggttgttttatgacaatctacgaggttacttcccgcattgttttgtttaagagatgctatggtcgagatgaaaagcataaacccgaattacgtttggtttatatatatcatctaagaggttccaagaagaagaagaagaagagttttatttcttcag

SEQ ID NO: 26550 - DNA, 492 bp, Gossypium hirsutum
  Clone ID: LIB3147-050-Q1-K1-E3
cccacgcgtccggataacttcgtttttggtcagtctggtgctggtaacaactgggctaagggccattacactgaaggtgctgagttaatcgactccgtacttgatgttgttcgtaaagaggctgaaaactgcgattgccttcaagggtttcaggtttgtcattccctgggaggaggaactggatctggaatgggaacactgttgatatcgaagataagggaggaatacccagataggatgatgctgactttctcagtcttcccatctcctaaggtctctgatacagttgtggagccttacaatgccactttgtctgttcaccaattggttgaaaatgctgatgagtgtatggttctggacaatgaggccttgtatgacatctgtttccgcacacttaagctaaccactcccagctttggtgatttgaaccatttgatatctgcaacaatgtctggagttacatgctgcttgcgattccctggtcagctcaac

SEQ ID NO: 26551 - DNA, 290 bp, Gossypium hirsutum
  unsure (1)..(290): unsure at all n locations; Clone ID: LIB3147-050-Q1-K1-E4
agtgaagagcgatgggttttaattagcagtgtgtttctgttaataagtttagtcggctgatggatatattctgttaattatagttctggaattagtgagtgcctgcaggtgtggagcttagtagtttaaaataagctgaaaaagcttgtactaagaattcctcagttatatatggtgcctgatcgctagtggctgtgctttaaatgagatgttttggctgtcggaagtgaccaaactatatttgatatgaaaaattgtccttaagattcanaanaaaaaaaaaaaaatat

SEQ ID NO: 26552 - DNA, 407 bp, Gossypium hirsutum
  Clone ID: LIB3147-050-Q1-K1-E5
cccacgcgtccgcggacgcttgggcccacgcgtccgctcttggatctgttaaaagcatcggggagtcttttggctcgaaatgttcctccaatttcagaacctcaatggcaacttacaagattaagcttgtaggaccaaaaggtgaggtgaacgagtttgaggcccccgatgataagtacattctaaatgcagctgatgaagcaagggtcgagctcccatattcttgcagagctggagcttgctgcacatgtgctggtaagatgatttcaggttctgtggatcaatctgatggttctttcctggacgattaacaaatggaggaaggttatctgctgacttgtgttgcgtacacaactttagactgggaaattcacacccacaaggaaaccgatccttttctaagtagt

SEQ ID NO: 26553 - DNA, 414 bp, Gossypium hirsutum
  Clone ID: LIB3147-050-Q1-K1-E7
cccactcttcctacctgattcaaagaatgcataagttaaccttgagccggaaggagtaggtgatttctctgctactggtggaactgacaataacacatatgagttgaagttggatctttttgataaggtcaatgatggaggaacagcataaattaattgtcggaaataggagcaatattctgcatcttggataaggctgaaaaagtgtggtggaaaaaattattgcgcggtgatggcatatcccttcattacgtcaaagtggactgggacaaatgggtggatgaagatgaagacatagggatttggtgatctcgacttaggaggaatggacttctttaactttgggggaatgggcggcatgggcgacatgatggcctggatgggcgatttgatgggcggcatgggagacatgat

SEQ ID NO: 26554 - DNA, 109 bp, Gossypium hirsutum
  Clone ID: LIB3147-050-Q1-K1-E8
ccttctgatcttaatcatatcaataatcataggatattttacttaccaatattcccctagtgacggttatctaaccgggaaaagcccattcttttaatccttcgccatc

SEQ ID NO: 26555 - DNA, 430 bp, Gossypium hirsutum
  Clone ID: LIB3147-050-Q1-K1-F1
aaaaaacttgcaatgctcttcttctcaaggttaatcaaattggatctgttaccgaaagtatcgaagctgtcaaaatgtccaagaaagctggatggggtgtgatggccagccaccgcagtggtgaaactgaggatacatttattgcggatctttcggtcggtttggccacgggtcaaattaagaccggagctccatgccggtctgagcgtctagctaagtacaatcagcttttgcgtatcgaggaggagctcggttcggatgccatctatgccggagctagtttccgtgctcctgttgaaccttattggagttggtttgatgataaagtttgttgcgactggatgtgcgcgatagagctctacttccaatgaataagttataataacacatagtgggttagtcaagactttttctttttcaataaatttga

SEQ ID NO: 26556 - DNA, 181 bp, Gossypium hirsutum
  Clone ID: LIB3147-050-Q1-K1-F11
actatactaaataagcaaccactattgtctctggtttgttgtttaaaattcacttctgagtgggtgcttatggcttaattgtactttcttttgatgtctacgaaacctgaacatatatgcatatagcatgaaaaaaaaattaaatttttatttaataattttattaaaaaaatataataat

SEQ ID NO: 26557 - DNA, 400 bp, Gossypium hirsutum
  Clone ID: LIB3147-050-Q1-K1-F12
ctgttttctgttcatctactgcacaaatcattacttctcgcccaatgaatgtaacgcggacgggtccctcaaccatactcaactctacctttttcaaaaatgatcatctccccctttcctactttctaccctatatcctttatcaccaaagactaatttaattgatctttagacatcctataccattttgatacaaatcctcgaagcttttttacaatatattttaactataattaaacactatcacaccttatacttgtaatgtactccccactccttcatattcaccaactgcactgctcaatacactacctcatatccactctcatttgaacttctccaacttcaatgtcatcatccactcaattatatacaattcactctgatttcacactcatct

SEQ ID NO: 26558 - DNA, 496 bp, Gossypium hirsutum
  Clone ID: LIB3147-050-Q1-K1-F2
cccacgcgtccgcccacgcgtccggttcgatcccattcacatgggattgggtgtgggcagtgttattaatgactcaaaccagaggcaagcaaattggattcctatctcttgggaggcatccatgggtggtcctcttggcgaggtattgcatagtactaacagcagcacaggtgagtgtaagagctcatcggcacttaacctcatgacagagggctgggatagtagtcctcggttaggatcatcacctaccggtgtcttacaaaagacttccttcggttctctttctaatagcagtgcgggaagcagtccaacagcggagcacaacaagacacatgaaggtgctagtctttgcaataacctccttggttcagcccttgttcagtcttcctctctacctgcttcttgaatccacttcactaggttgtgggaggagaaaaatggagaaatggaagcatggatttttatatctattgacaaacatggaacaattaattat

SEQ ID NO: 26559 - DNA, 266 bp, Gossypium hirsutum
  Clone ID: LIB3147-050-Q1-K1-F3
cccacgcgtccggggaaaaacaggtggtttttcacaaagttaaggttttgagatctgggttgctgttattttggattgattttgagagtttatttagtgttttgaccatttgttttatcatcacatattattgctggttttgagcatcgttttatgataaatttgagctttgctttatgataaaagttgcaaattgaggggatgtggttttcaaaaaaacatgaagctttaggcaaatggttaagaaaaaaaaagagagctagttt

SEQ ID NO: 26560 - DNA, 490 bp, Gossypium hirsutum
  Clone ID: LIB3147-050-Q1-K1-F4
gttatccatatttttcaagccaggtgaaagattctctgagatcgttggaagtccatattatgtggctccagaggtgctcaaacgaaattatgggccagaaattgatatatggagtgctggagtcattctgtatattttgttgtgtggggttcctcctttttgggctgagtctgaacaaggcgttgcacaggcaattcttcgtgggttaatagatttcaaacatgacccatggccaaatatttcagagagtgctaagagtctagtccagcaaatgttggaacctgacccaaagcttcgactcactgcaaagcaagtgcttgagcacccgtggctccaaaatgctaaaaaagctcccaatgttcctcttggtgatgttgttaagtcaaggcttaaacaattttcaataatgaacagattcaaaagaaaagctctgcgggttattgctgagttcttatctgttgaagaagttgaaggcatcaaagaaatgttc

SEQ ID NO: 26561 - DNA, 482 bp, Gossypium hirsutum
  Clone ID: LIB3147-050-Q1-K1-F5
attattttttgataatccggagttcaatcatctaaaagaagccctaaaatccttgaatcaggtgtgagcttgtggtttgttaggcctctttgatcaaactaagtttcatgtctgatcttgacgttcaaattcctactgcctttgatccctttgctgatgcaaatgctgaggactcaggtgcgggtgcaaaggagtatgtgcatattcgtattcagcaaaggaatggtcgcaaaagcctgacaactgtccaggggttgaagaaagaattcagctataacaagatacttaaagacctgaagaaggagttttgctgcaatgggaccgcggtccaggaccctgaactaggacaggtgattcaacttcaaggtgaccagcgtaagaatgtatcaaccttccttgttcaggctggcatagtgaagaaagaaaacatcaaaatccacgtgttctaagcctgcgcggtggaagcaggaaatactatctga

SEQ ID NO: 26562 - DNA, 286 bp, Gossypium hirsutum
  Clone ID: LIB3147-050-Q1-K1-F6
gttatccttattctctaacccctgctaaaaatcctatgaactcgctggaggcccatactaggagagtaaccaggtataaagtcgactttattttcattaaattgttaaatgaaactcttgacccattctttatattgcgttgtgaagggcattcttcatttcctatctatatcgtgaatcaagtctacagcacatgcaattctttttgatataacttatttgaaacatgactcaattatcatattttatatatacatctatgaatctaattcaatacttttgtaaa

SEQ ID NO: 26563 - DNA, 458 bp, Gossypium hirsutum
  Clone ID: LIB3147-050-Q1-K1-F8
cccacgcgtccggcctggctacccttggatcattggtgggattgatattcctcatgagggaggctgtgaatctcattctgatggatatgtactgcttcattgcgttggggacgcaatattgggaggtttagggctacctgatataaggcaaagttttccagactctgatcccaaatgtaaaggagctccatcttcagttgtcattatagaagctgtgagactcatgcatgaggcatgttacaagattggatacctagatgccaccttatttctttacagaccgaaactgagttcacacaaaggagttatcagagccaatttgtctgagcttttatgcgccgacccatatgtcatcaatcttaaagccaagactcacgagaaggttgacagccttggtgagaatcgaagtattgcagcacacactgtggtcttactcatgaggaagttaatactggtat

SEQ ID NO: 26564 - DNA, 134 bp, Gossypium hirsutum
  Clone ID: LIB3147-050-Q1-K1-F9
ctgacgcgtgggcggacgcgtggggttgtagcgaacttcgggttgtgtaacttgtagggggtatgcttttccgtgggacttttatataatcttgttatggaaaaacattggggaacactataaacaacaaattt

SEQ ID NO: 26565 - DNA, 483 bp, Gossypium hirsutum
  Clone ID: LIB3147-050-Q1-K1-G1
aaatattatagagataattgaaaattttctagacttatccattaccaaattattatcatttttctttttcctttcacaaattgtacacctataagctttaattatggcggaggaaacgaagaaggaggttgcggctgaaacgcccgtggctccgacgccggcagtggaagctccaacgccggtagcggaggatctcaaagctgattccaagaaaacaaccgtagctccaccgccagctgaggaaaaatccgatgaatcgaaggctcttgccgtcgttgagaaagcccctgagccagcaccaaagaacagttcaactggatcacatgatagagatgttgctcttgcggatcttgaaaaagaaaaaaagttgtcattcattaaggcatgggaagatagtgaaaaaaccaaagctgagaacaaggcccagaaaaagctctctgctattgtagcatgggagaacagcaagaaagcagctcttgaagc

SEQ ID NO: 26566 - DNA, 495 bp, Gossypium hirsutum
  Clone ID: LIB3147-050-Q1-K1-G2
caattatccttgatggcgctggagacaaggctaccattgaagaaagatgcgatcagataagatcagcaattgaatcaagcacttctgattacgacaaggacaaattacaagagaggcttgcaaagctctctggtggcgttgcagttttgaagattggaggagcaagtgaagcagaagttggtgaaaagaaggatagagttactgatgccctaaatgccacgaaagctgctgtggaggaaggaattgttcctggtggtggtgctgcacttctttatgcctctaaggaacttgaaaacctggagactgcaaactttgatcagaagatcggtgttcagatcatccaaaatgctcttaagatgcctgtacatacaattgcatctaatgctggagttgagggtgcagtggttggtggaaagctactggaacaggacaatcccgacctcggttatgatgctgccaagggtgagtatgtagatatggttaaagctggaatta

SEQ ID NO: 26567 - DNA, 489 bp, Gossypium hirsutum
  Clone ID: LIB3147-050-Q1-K1-G3
atacgattactgttccttattctttgacgctttggcctcctctccgtccttccatcgagcagtgcaaagatgtttttggccctgatatcgccgtctttagtaactctgctggtcttttagagtatgattatgatggttcaaaggcgaagaaactggaagggactattgggattaaagtaataaggcacaaggtgaagaaaccagctggaacagctgaagaaattgagaaacactttggatataagtcgtcacaacttatcatggtgggtgatcggccctttacagatgttgtttatggaaaccgaaatggatttttgactatattgactgaacctttaagtgttgttgaggagccattcattgttaggcaggtgcggaaactagaactgacccttgtaaaatggtggtttagaaggtgtctgaagccagttagtcataatatattatcagatgccacacagtgtgtgaaagatccacatcccctgtaag

SEQ ID NO: 26568 - DNA, 463 bp, Gossypium hirsutum
  unsure (1)..(463): unsure at all n locations; Clone ID: LIB3147-050-Q1-K1-G4
cggacgcgtggggcaagacttggtgatcttatcaggggggcataccatcggagtaggccactgcaataccttcagcaacaggctatacaactttactggaaatggagatcaggacccttccttgaatgcaacctatgcaactttcttgaagacacaatgccaaagcctcagtgacagcacgaccttcgtggcgatggatcctggtagtgggctaacatttgataataactattatgtcacacttaagcaaaacaagggtctgtttcagtccgatgccgcccttataacgcatgaaatctcgcgcatcattgttgatgagttgcttgtctcagaagtattcttcagagagtttgcactgtcaatggtgaagatgggaagccattgagttctcacagggaatgaaggagagattaggaagaaatgttccgttgttaactaattcctgaaagattntgctcatgta

SEQ ID NO: 26569 - DNA, 446 bp, Gossypium hirsutum
  Clone ID: LIB3147-050-Q1-K1-G5
cccacgcgtgcggtagcacttcttgaccttatcaccactgcactccatcatgggatgccagtggggccccttcagcaagcggctatacacccatcctggagatggagaccaggacccttgcttgaatgcaacctatgcaactgtcttgatcacacagtgccaacacctgagtcacagcacgacccttgtggctatagctcctggaagtgcactaacatgcgattatagcaaatatgccacactgcatctaatcacaggagtgcttcaatccgaggccaaactgttctctcatgaaataacccgcagaagtgttgctgacttgcttgtctgataagttttctgcagataggaaccactgtctatggtgaaaatgggtgccatcgtattcctcactggtgatgaaggagacattagaaagaaatgatccgttgttaactaattactga

SEQ ID NO: 26570 - DNA, 474 bp, Gossypium hirsutum
  Clone ID: LIB3147-050-Q1-K1-G6
cccacgcgtccggttcgaatgataactgctgtcaccactgagagtgctttgaaggcaacggagttgggtggcctgcttttgaaggaagtacatgatgcttccaatatggaagtaagcttgctggaaaagaaagtggcttctctaaaaaatactgcggattctgcatcaattcctgctgcccagaatgctgattttagggcctaaattgcacaactttcttattcaactgataaaagctcaaaagaagattgctgaacaaaatatgcagagagctgtcgcgacagcaacctaattgactgaagttgctgccaaagagggaatgaacttctgtgtcactcggattgatgtcgggattagatgctcctgctctccgataaacggcttcaaaagtttttcagcaaaagggtgtgccggttatgggttttagtattgaccaaaccccataacaggctgacgtttatgctgtgtgtcccg

SEQ ID NO: 26571 - DNA, 461 bp, Gossypium hirsutum
  Clone ID: LIB3147-050-Q1-K1-G7
cccacgcgtccgtcggccttgggttcaagaaaagcaagcaaaaatgcaaaggctcggagtgacacaaacacatacaagatttcaggtaccaatgccaatgctgccatttcaagcaaaggtggatccttaaatgataactcggaatccaagggtggtgaggaggatatgaacaacatcaaaactgcgagttcaaagaaaccaagtgcagcgaatttcttgaatagaatgaggagctctttatccggtaatgagccattgacagagacattgaagggtgtgattagttctgattatggaaaaggaggaggagatgcaggtgaatcataatataaacagcactatcagttaatgtgatcaacagatatatcgaacttcgactccacggacacgttctggcggaaaaagaacgagttctgcatataggagtacaggaagaccgcctaaaagagtgcctgccaccc

SEQ ID NO: 26572 - DNA, 475 bp, Gossypium hirsutum
  unsure (1)..(475): unsure at all n locations; Clone ID: LIB3147-050-Q1-K1-G8
attttgtgagtgttaaacattgtttgcctttcatttctttctctattccttgttgcttgctcggcagcctctcgggttctgagtaatataaaaaaggatggggctgtcttttgctaagctgtttagtcgactgtttgccaagaaagagatgcgaattcttatggtgggtcttgatgctgctggtaagactaccattttgtacaagctcaagctcggtgagattgtcactaccattcccaccattggctttaatgtggagaccgtagaatataagaacattagcttcactgtttgggatgttggtggtcaggacaagattcgacctttgtggaggcactatttccaaaacactcatgggctaatctttgttgttgatagcaatgaccgtgaccgtgtggttgaggccagggatgagctctcatcgatgctaaatgaggacaagctganggatgctgtgcttcttgtgtttgcaaac

SEQ ID NO: 26573 - DNA, 289 bp, Gossypium hirsutum
  Clone ID: LIB3147-050-Q1-K1-G9
cccacgcgtccgggtggatcttgctccgatggaaattcgcacctttgtcatggaattgagagttgatctgatgtctactactttcaagagaatagttgatgcataagtggctgcctgcagtttgttttttacaattgagagatgtaatttttgtatagtgttggaatttgcaaactgctgagggcaccgtttgctgtgcaggtgtgtatggactaatcatgtgagtctaataaagggtataaagtttgtcttatacatattaataatttattaaaataatttatataat

SEQ ID NO: 26574 - DNA, 499 bp, Gossypium hirsutum
  Clone ID: LIB3147-050-Q1-K1-H1
gcggccgctcgcgatctagagaagctaaaaaaactgaaaccgaaaattccaaagcaaagccagtgtcacaagagtccccacctttaaagaaagagagtgaagaagcttccaaaaatgaagtcgaagttcctgaagccaacccagcttcacaagaagttccaccattgaagaaagatagtgaagaagcttgcaaaactgaaataaaagattctgaagcaaagccaccatcacaagaagttgaaccagtaaagaaagatagtgaacaagctttgaaaactgtcgccaaggactcagaaactgtggcgcagtcttccgaagattctacaacaaacaaagataccgaagaagcagcaaaaacagagaattcggtcaagggttcggaaattagcactaatgaagattgaagatggtaacagggacttcaaatcatgatgtttggactttaaccagccatagacatgaaatgaagaaagctttcagcctctacaatatatgtggg

SEQ ID NO: 26575 - DNA, 319 bp, Gossypium hirsutum
  unsure (1)..(319): unsure at all n locations; Clone ID: LIB3147-050-Q1-K1-H10
cccacgcgtccggagagattgagaagtggaaagagtatactcaggagatggaacgactgtggccttgggttgttcaaatgaccctttatcatattacaatatcagtgagggattcaatgtgaactatagtttatatctgaaacttgtaaatatgaaggctacgatcatttggagctaaacagttaacattattttccaaattctgcctcgattaaaattatacaggctcatgtaaaatgatttcaattgtggatcactaaaatcacaataagtttaaacctannaaaaaaaaaaaaaaaaaaaaaaaaaaaaaataatg

SEQ ID NO: 26576 - DNA, 487 bp, Gossypium hirsutum
  Clone ID: LIB3147-050-Q1-K1-H11
gtcgtatgttgggccatggaactttcgctaaagtctaccatgctcggaatcttcagagggggaaaagtgttgccatgaaagttgttggcaaggagaaagtgattagagttgggatgatggagcagatcaagcgagagatttccgtcatgaagatggtgaaacaccccaatattgttgagttgcatgaagtcatggcgagtaagtccaagatttactttgccatggaacttgttcgaggcggtgaactcttctcgaaaatcgccaagggtcgactcaaggaagacttggcaagagtctatttccaacagttggtttccgttatcgatttctgtcatagccgtggggtttaccaccgtgatttgaagccggagaatttgctcttggatgaagatggctgcttgaaggttacagattttggtctcagcgctttctctgagcacttgaaacaagacgggttattgcacaccacatgtggaacgtcggctta

SEQ ID NO: 26577 - DNA, 452 bp, Gossypium hirsutum
  unsure (1)..(452): unsure at all n locations; Clone ID: LIB3147-050-Q1-K1-H2
ctctgtcgttcaaatctatattagaaagaatctagtttagatttaaataattccaaacttgacgatagaacattatctgaaaacatgatacaagggctctgctgctccaccacacttgtgacacaggacatctcttctaatccttctgtgttggagattaacaaaagtaggcaagaaattccaagtggttttccatagattaatttttacttttgaagggatttttagagatcatagttttttgtatagctccctagaatcataatgtgtataattagggttaaaagtacctttatgtaatagtttataggaacttctgacagaaaattcccttgaagattccccctccagacccgtatgtcttcaatcctttctttggccaaaggagtttgtaagattttcgacgcaatctcttcaagaaaggtactattaattagatntactttccattc

SEQ ID NO: 26578 - DNA, 448 bp, Gossypium hirsutum
  unsure (1)..(448): unsure at all n locations; Clone ID: LIB3147-050-Q1-K1-H3
aaacaaaccactctcacattaaatattgttagtgaaacaatggcgtcttcagctctgataagtgagcttgaggcagatgtagagattaaggcttctcctaagcagttccatgaaatgtttgcccacaaaccgcaccatgtgcaccatactngttatgacaagattcaaggatgcgatttacatgaaggtgaatggnggaaagtcggtaccattgtccattggagttatgtgcatgatggaaaggctaaaaaggcaaaggaagtagtggaagcagtagaccctgataagaatttggtcactttcagagttgatcgaaggaagatctaatggaaagagtataagagcttttgtaatcacgattcaagtttcgcccaagagcgagggtagtgcgagcgtattgcactggacttggaatacgaaagctgacggtgggattgcgcattctgag

SEQ ID NO: 26579 - DNA, 315 bp, Gossypium hirsutum
  Clone ID: LIB3147-050-Q1-K1-H4
acccacgcgtccgacacaccccactctcaaattaattatcacgaggaaaacaaagccgcctacacccctcatagggaggctatatgcaaacatataaacccctcctactgctaatcccttccattatattctatcccaccatacctacaattttcactctactatattttacaggtattcactgcttctatctacacaaaattcaatgttataaattcccttccttttaccatttgattcatgctcatgaataaaagactactacggcacacgaaatattcaaatctgtccaccccgttaacaattaatatcact

SEQ ID NO: 26580 - DNA, 233 bp, Gossypium hirsutum
  unsure (1)..(233): unsure at all n locations; Clone ID: LIB3147-050-Q1-K1-H5
gtttaattttgtttatctgtatggttttggagaatttacggatattttctatcagagattggtggggaggttaattttagatgatgttaacatttgtgggtcatctttatggctatatatgtgatgtttagttatatcctctgtttgtcctttatattgtattttttttcgtaatgcaagtcttggtgttttgcttannnnnnnaaaccataaaacataaaaaantataacat

SEQ ID NO: 26581 - DNA, 457 bp, Gossypium hirsutum
  unsure (1)..(457): unsure at all n locations; Clone ID: LIB3147-050-Q1-K1-H7
atccaaaactaggagtgtctgtcaaaagtcccatagctctacacgccagcaggctacttcggatcaccgctctgaagaatcgaggcgtatacagtgcaccaagtgtggtaattcacatatatgggtttgcacaaataggaacaaggccaaggctagatggtgtcaggattgctgtcaatatcatcaagccaaagacggagatggatgggttgagtacaaaggttccttggtgtttgataggcctcaaaaagtggaaataccacgggcttttgtttgcgctgaaagcaagatctttgatgtttcagaatgggctatctgtcanggaatggcttgtagaccaaacacgcatcgacctagcttccatgtaaacatggttggtttagaaaagacccanagatcaaagtcgagccgatatccttgggatttggatgctgaaatgatcgacgaagatgaagaa

SEQ ID NO: 26582 - DNA, 485 bp, Gossypium hirsutum
  unsure (1)..(485): unsure at all n locations; Clone ID: LIB3147-050-Q1-K1-H8
cccacgcgtccggaaaatggctgcttcggagtttagtgccggtgaaggcagtgtgaatggtgaggttgttaaggtgaggaatttgcggcacggcggcggtggtgaggtcggtggtttcgttttgtggcaaaaaaggccggagctttggtgccttgaactggtggtttccggctgtaaaatcagtgccggtagcgatgggaaagtggcttggagacaaacaccttggcaccattctcatgcttctagaggtccacctagacccctccggcggttcttacagggtcttgatccgcgatcgacggcaaatctgttcacgaattcggtttgtgttggtgagaaaacgatcgatgacgaagactgtntcgtcctaaaactggatgccgaaccttcggctttacgagctcgaagcagcagcaacgtagagatcattcgtcacacggtttggtgttgctttagccaaagaaccggtctcttgatccaactcg

SEQ ID NO: 26583 - DNA, 69 bp, Gossypium hirsutum
  unsure (1)..(69): unsure at all n locations; Clone ID: LIB3147-051-Q1-K1-A1
aaaaaaaaaaaaaagagananngnaaaaaaagaaaaaaaaaaaaaaaaaaagnaaaaaaaggggggggg

SEQ ID NO: 26584 - DNA, 315 bp, Gossypium hirsutum
  Clone ID: LIB3147-051-Q1-K1-A10
tctctacaccactttaacgtactcgtgctagagacgagaggctgatattggaaatacagacccagatctggcgccagtttgaggaatcaaatgaagaaaatagatgtcacgcaacacatcaagtacttgtgcgagttctgaggaaagtatgcaattgaacagaaaggctgttggaatattgtgctgcaaagattgtaggaaaatctaaagcctggggtgcgtatacttagacactgctagcgctgtgacggtgactagtaccattataaggttgatggaacacactgacagctgtaccaataacattatcatacc

SEQ ID NO: 26585 - DNA, 457 bp, Gossypium hirsutum
  Clone ID: LIB3147-051-Q1-K1-A11
cggacgcgtccgcccacgcgtccggctgttcgtgctgtcatagaatttgtgaaggcacctgacacgtttcggtgtgatctattagatatgcctgctgtagggcaattggagaaggatgctaaatatgcactggtttatcagcttctgaagatctttttgactcagcgattagatgcctacctggaatttcaggctgcaaattctaccttaatgaaaagctatggtcttgttcacgaagattgtataacaaagatgaggttgatgtcattggttgatcttggctcttatgaatctggacaaattccatatgccctcatcaaggatactcttaggatcaacgatgatgaggtggaattgtggattgttaaggctataactgctaaagtaatcgactgtaaaatggatcagatgaaccaggttgtgattgtaagccgctgtactgaacgcatttttggac

SEQ ID NO: 26586 - DNA, 353 bp, Gossypium hirsutum
  Clone ID: LIB3147-051-Q1-K1-A12
cagattctccctggtaatgtatacgccatcaatgatgcactgtctgctgaaggtgcaggcggtgattatgagacttgtctcaagcacttggtgaagagcaacgtgcttagtgtctcaacagctactgggtttcctaagtttgatctcatgcttctcggaatgggaccggatggacacgtggcttccctctttcctggccatcctctggtgaaggagaacgaaaagtgggttaccttcattaaggactcaccaaaaccgcccccggagagaatcacctttactttcccagttatcaacttatctgctcacattgcacttgtgatctgtggtgcttggtaagctggtgcggtgca

SEQ ID NO: 26587 - DNA, 261 bp, Gossypium hirsutum
  unsure (1)..(261): unsure at all n locations; Clone ID: LIB3147-051-Q1-K1-A2
gacgaccggccgaatcccggtcacccaccgtcggggaaggttacattgtgtgttggagtaagagacagcagattngacattcaagttggaggtgggtcctgaatggggtcaagggaagccggtgattcttttcaatggatggattggcatcggcaaaaacaagcatgagggcggaaaaccaggagctgaacttcatttgagagtacaactcgatcctgatccaagatacgtgtttcagtttgaagatgtgaccatgctgag

SEQ ID NO: 26588 - DNA, 426 bp, Gossypium hirsutum
  unsure (1)..(426): unsure at all n locations; Clone ID: LIB3147-051-Q1-K1-A3
cccacgcgtncgcccacgcgtccgatttgttaaagggctgctgttatccacatctttttgccttctcttcctgatccttgactgaaagaggaggcaaaaagatgtgaatttgttaaagggctgctgttatccacaattcttgatgatgttttatgataccttaaaggatggttgctgcaatcgtgggcttttcacagcgaagaggcctacgatatgggtcttcgcctattgtatgggttgctgcgctgtttgtagtgattatgtttgatgtattaagcaaaagtgttaaaataaggtaggaatgagtgtaatatataagtggcatgtgtggactttttagttattaggcctgatcaggtttncacttcatccttttcatctcaggtcatgacaatattaaaaataataataataattttatccctg

SEQ ID NO: 26589 - DNA, 478 bp, Gossypium hirsutum
  unsure (1)..(478): unsure at all n locations; Clone ID: LIB3147-051-Q1-K1-A4
accggccgaattccggtcgaccacgcgtncgcgcgatctagcctctttgatatcaccaccgatacggtgcaggcaattccaatggaagaagagcgagttgatcgacaagaaaactcaactcagccatctgaaaccaatgtgtttcccattatgccggcgactnttcccatggcctntaaccaggtagttccgccggttccaattcagaatccgactgaaaatctcacaatagcacaggggaatcaattgaataacaatgttccaacggcaaatctcatccgtccggttccaaatttcccagctcttcagagatccgatctcaacacagacttaaatcctgcgacggatcctttatcgctgtcactcaagctgtctttgcaatccgatcaaatggattcatcatcatcttcaacttccangcattctccatttcaggtgatgccaaactttagcagtggagataacaataacatcatca

SEQ ID NO: 26590 - DNA, 461 bp, Gossypium hirsutum
  Clone ID: LIB3147-051-Q1-K1-A5
cccacgcgtccgaaaatgggaaaaggaactggaagctttggaaagagaaggaacaagactcacacgctgtgcgttcgatgtggtcgccgaagcttccatctacagaagagccgttgcggtgcttgtggctaccctgccagtcgcatccgaaaatataactggagcgtgaaggctattagaagaaagaccaccgggactggccgcatgaggtacctccgacatgttccccgaaggttcaagactggctttagagaaggtactcaagcaactccaaagaagaagggagcagttgctgcttcgtaagttaatttgtgatgttttcgttttgttcagagagattcctgaatttagaaacgataggtttttgggtttctttcaactgtgttactttcttatttttcaccaaatgtctacaaacgggaagttttgttttatattatgagctgtcacgactttatttc

SEQ ID NO: 26591 - DNA, 256 bp, Gossypium hirsutum
  Clone ID: LIB3147-051-Q1-K1-A6
tattcttttattgcttatcggggttaatatgattggaccgtcaatggtggggttgatgaacaggtctctttctctttgaaaataaattgattctcttctataaatgatggtattgttgataaggattgcagggtggacctttatttgagaatatatatgatgattaatcaactttaatggtgtgatgattattttgtactataaatgatgtatcaacatatcacactcttgtgatatgctgaattttaatatagct

SEQ ID NO: 26592 - DNA, 108 bp, Gossypium hirsutum
  unsure (1)..(108): unsure at all n locations; Clone ID: LIB3147-051-Q1-K1-A7
ntancgagggtcgttgtcggaagtttgaagacatgggcnnattcatgttnatcctnntttaaaaccctctattttactggccgatttccgagtttttctcctggcttc

SEQ ID NO: 26593 - DNA, 407 bp, Gossypium hirsutum
  unsure (1)..(407): unsure at all n locations; Clone ID: LIB3147-051-Q1-K1-A8
cccacgcgtccgcccacgcgtncgggagggcttcttggaggattatctcttctattgagcagaaggaagagagcagaggaaatgaggatcattttgcaaccatcaaggagtataggagcaagattgaagctgagctcagcaagatatgtgatgggattttgagcctccttgagtctcacctcattccttcagcttcatctgccgagtccaaggtgttttaccttaaaatgaagggtgattatcataagtatcttgctgagttcaagactggtgctgagaggaaggaagctgctgagagcactttgttggcttacaagtctgcacaggatattgctctcggtgacctaacgccaactcacccaattaggctgggacttgctcttaacttctcttgtttctactatgaa

SEQ ID NO: 26594 - DNA, 321 bp, Gossypium hirsutum
  unsure (1)..(321): unsure at all n locations; Clone ID: LIB3147-051-Q1-K1-A9
cccacgcgtccgggagcattgctgcagaggtttatttgcttgaaatccaaagaacacgttgtggatgtgcaacaaatttctctcaacaattgatctaacagaaaaacgaacttaccggaaacttgtactgctaaaatgtaggggaattataggtaccttataatacactttcccctcttctgagtaatgtatgtaaatagcagcttagcaaagattgtaattatgctgtgttccatgaaatagcgctttgcatagattagntaagaanaaaaaaaaaaaataaanaaaaaaattttaaaaaataaaaanatataataatta

SEQ ID NO: 26595 - DNA, 322 bp, Gossypium hirsutum
  Clone ID: LIB3147-051-Q1-K1-B1
aaaagctactcctaaagcgaaggccaagacaaaaactacttcgaaggccaagagtaagccggcggctaagccaaaggttacttctaaggcgaaggctgctccagccaagactaaagcagtggcttctgtgaagccgaagactactgcagctacaaagccaaaagctgcagccaagcctaaggacaagccggttaaagcttcgaggacttcaactaggacgtcccccggaaagagggctgctgctcccaagcctgctgcgaagaaagctcctgcggctaaaaaagctccggcgaagagtgtaaagccgaaaagtgtcaagtca

SEQ ID NO: 26596 - DNA, 368 bp, Gossypium hirsutum
  Clone ID: LIB3147-051-Q1-K1-B10
ctcttttttcatttaaattttacgtggttagttcatggaaaactattatatgttgaaatcagatcttttcgactctatagtcaaaaaaaaaaaaaaaaaaaaaaaaaaaaaaaaaaaaagaaaaaaaaaaaaaaaaaaagggaggaaaaaaaaaaaaaggggcggcggaaaaaaaggggcaagggaggaaaaaacagtaaataaaacggggggggggggtaaaaggggggccgaggttaaacccggggggggcggggaaaaaagggggggagggggaaaacaaatgtaatgacaaggggaatggttaaaaaggcggggcggggaaaaacaggggggaaaacaacaaaaaggccgggaaaaaaagaccc

SEQ ID NO: 26597 - DNA, 447 bp, Gossypium hirsutum
  Clone ID: LIB3147-051-Q1-K1-B11
cccacgcgtccgcccacgcgtacggaataatttatgtgatgtcggcattgatcaaccgtgggcgcctctctgcgacatcaagggcagctatgtttctcagtttgaacacaccatcctactgcggccaacctgcaaagaagttatatcgagaggtgatgactattaaggtggaagaccaaaaagtttagttggtaatcatctcctcaaatattttgcgaataattttagttgtgtactttatgtgttttttaacataaggaaggttcctaaatagtggatgatacccatgtttgtcacttgtctgtactcttgctttgccgtgtttgatgatagatggtgtgattgagacttgaatcatgcaatatattgtgatgggaaaactagaatttttccattgcagtcaaagttatgtcttacttctacaaaacatgaatgattttttcttat

SEQ ID NO: 26598 - DNA, 296 bp, Gossypium hirsutum
  Clone ID: LIB3147-051-Q1-K1-B12
cccacgcgtccggagcttttgtcgggagagaaggaaggccttcttcaactaccaactgagcggggttctcctgtcagatcctgttttccgtccattggttgaaaaatatgctgccgatgaggatgccttctttgctgactacaccgaagcttacctgaagctctctgagctaggatttgctgatgcataagctgatggttgcggaatagaattgaacctacaacatttgccttcacaaaatgaatgtatcgggttttgtcatttcttaatagtttattggccagttgtttgcttga

SEQ ID NO: 26599 - DNA, 445 bp, Gossypium hirsutum
  unsure (1)..(445): unsure at all n locations; Clone ID: LIB3147-051-Q1-K1-B2
cccacgcgtccgcccacgcgtncgggaagaacttcaccgtgaaacatgccacantgatcaaaagcacttcatcagtatgattgcctgagagctaacaaagcaacatcagcgtggggattggaggctcgagtacccttcttagacatagaatttatcaacgttgccatgtctatagaccctgaatcaaagatgatcaaaaaggatcaaggacgcatcgagaaatggattcttagaaaggcctttgacgatgaagagcgtccatatttgccaaagcacatcctctaccgacaaaaagaacaatttagcgatggcgttggttatagttggatcgatggtcttaaggcgcatgctgccaaaaatgttactgataagatgatgcttaatgcttcttacatatttnctcacaacacgccaacgacaaaagaagcatattactacaggatga

SEQ ID NO: 26600 - DNA, 447 bp, Gossypium hirsutum
  unsure (1)..(447): unsure at all n locations; Clone ID: LIB3147-051-Q1-K1-B3
tgcctttcatttctttctctattccttgttgcttcttcggcagcctctcggtttctgagtaatataaaaaaggatggggctgtcttttgctaagctgtttagtcggctgtttgccaagaaagagatgcgaattcttatggtgggtcttgatgctgctggtaagactaccattttgtataagctcaagctcggtgagattgtcactaccattcccaccattggctttaacgtggagaccgtagaatataagaacattagcttcactgtttgggatgttggtggtcaggacaagattcgacctttgtggaggcactacttccaaaacactcanggtctaatctttgttgttgatagcaatgaccgtgaccgtgtggttgaagccagggatgagcttcatcgtatgctaaatgaggacgagctganggatgctgtgcttcttgtgtttgc

SEQ ID NO: 26601 - DNA, 439 bp, Gossypium hirsutum
  unsure (1)..(439): unsure at all n locations; Clone ID: LIB3147-051-Q1-K1-B4
ccggccggaattccggtcgacacgcgtncgccacgcgtncgccacgcgtcggatattctgatgttctctatcttgattgtgttcacaaaaagtatttggaggaagtttcttcttgcaacattttcgtggtgaagggtaatgtcatctcaactcctgcaataaagggaacaatcttacctggcatcacaagaaagagtataattgatgttgctcgaagccaanggttccaggttgaggagcgttttgtgccagtagatgaattgcttgatgctgacgaagtgttttgcacagggacagcagtagtagtgtcgcctgttggcagcattacatacaagggtaaaagggtaccgtatggcgtaaatggttttggggcttgtgcacaacagctctactctgtgcttaccagactacagatgggtcttatagacgacaagatgaa

SEQ ID NO: 26602 - DNA, 434 bp, Gossypium hirsutum
  unsure (1)..(434): unsure at all n locations; Clone ID: LIB3147-051-Q1-K1-B5
cccacgcgtccgggccgaccttttttttttttttttttttttttnttnatantttttataaagggtgtttttattatttttttttttttttattttttttttttatttttatttttttttaatttttggggggggggtttattaaaatatggccccccaaaaaaaaaaggttccaaaaaaattatattttttttaaaatggggaacaaccccaatttttaaaaaaaaacaatgaatgggggaaaggtgggcgtaacacaacaaaaaaaaaaccttgaattttgggataataaaggggatgaaaacaaaaaaaattttttttttaagaaaaaaaattttggtaaaaaaaaaaaaaaaaaaaaaaaggcgcccctttataaaaaacaaaattttttttcccctgttttcaaaaaaaaaatttttttttattggcac

SEQ ID NO: 26603 - DNA, 366 bp, Gossypium hirsutum
  unsure (1)..(366): unsure at all n locations; Clone ID: LIB3147-051-Q1-K1-B6
ccacgcgtccgagagtacagtgcagttatggagcttgttgcatatgtgcagttagtgttaaaaagtgcaatgcgggtttatgggttttctctcgaggtcaggtctgaagcaaggaaagtacatgatctgttttttgatttgttgaaaatcgcatttccggatactgatttccgagaagctagaaatgctctctccttctctagtctggtaactacctccaccatgggctcatctgccagacaagctgcttgtgacaagaagcagaagctgataaatgaagtggaatctgattcangactcactcaaaagtcattgcaacgccggtccagtcatgctggtgaggacacaagggttagagtgcacatg

SEQ ID NO: 26604 - DNA, 349 bp, Gossypium hirsutum
  Clone ID: LIB3147-051-Q1-K1-B7
gtgatgacgtttatgcttggggtttcattcccaaaaccaagtatgccactgttaaattccataacccacgtgttcaagaggatcccacctgtggtccattgttggatgcggttgctattaaggagcttgtccgtcccagagctaccagatataatctggtgaagaacaatggctttgaagagggtcctcatcgcctagtcaactccaccaatggtgtcttgctcccccctcggcaagaggatttcacattcccactcccgggctggatcattgaatcacttaaagccgtaaaattcatcgatgcaaagcacttcaacgtcccggcgggacactccgcaatcgagcttgt

SEQ ID NO: 26605 - DNA, 350 bp, Gossypium hirsutum
  Clone ID: LIB3147-051-Q1-K1-B8
caaagcttaggaagatattggatggcttatgcaaagggtaactgcggtacttgtagttacttggggacattccgaactacaaagtgccagagtggttgtgaccagccaacccaaagatggtaccacgttccaagatcatggctaaagccaacaaaaaatttgttggtagtctttgaagaacttggtggagatgtatcaaaaatatctcttgtgaggagatcagttttataaacattgcctagacaacaccacaagtctgggagctgggaaagaaaacaaggtgcaagaatataggtggagaagacatcccagattcacttgctaaattctttttcactattgttttattt

SEQ ID NO: 26606 - DNA, 396 bp, Gossypium hirsutum
  Clone ID: LIB3147-051-Q1-K1-B9
agcagatgaagacccagggccaatcgacaatggaattaaggaagcaggaaatgacttagcttgtgagaagccggtttcccaactcgttttacactccttgaggaaaaattgcaatctttcactacctcggagagtctttgttccatggttggcgggtacatatatctgtgactatctccaaccatcagagacacttgaggttttaaaagatcattgtgttgagttgatgtccatggaagctccaaatgatgcatcaaaaatattggaacctgaagaagaagccattagagtgtccactagatctttttgggatgtagttctcccttactgttcgacatcaagctctacccaagaaaagaacatggaaattaccggcaaagaaaatagccagaaaac

SEQ ID NO: 26607 - DNA, 400 bp, Gossypium hirsutum
  unsure (1)..(400): unsure at all n locations; Clone ID: LIB3147-051-Q1-K1-C1
cccacgcgtncgcaaaaatgcaaaaaggaagagcttcgagcacgagcaaaagggttgaaaactcttggtaaaatcttccagagtgtcaagtcaacaaatggaaatgagagtgatcctgtgctaggcaataatgcaagacataaattagatggagttgagccaagttataacagtggttctccaaatgtatcaacaaagtcctcatcccgggaagaactatcttcttctccattggcaccacagagcccatacgtggaggcccctaactttgttaatgctcaattgccgaggccaacagcaccgcctggtgcacaaagacatccattacctgaagagatggagaggctttgattcgaaaaggatacgcttgattatacaactatatcatcttgtatcaata

SEQ ID NO: 26608 - DNA, 450 bp, Gossypium hirsutum
  Clone ID: LIB3147-051-Q1-K1-C10
ggttgtggagaccttttctgagtacccacccttgggccgatttgctgtgagggacatgcgtcggaccgtggcagttggtgttataaagaatgttgagaagaaggacccatccggtgccaaggtcaccaagtctgctgctaagaagaagtgaaccgtgctggttaaatctaatgaagtttccgcagatggagtattttattatcataataatagtttgatagactttatcatttatgatatagttggtcttttgcttggttttgcatgttatagtgtgttgccattgttgtctggtaactgttctcagtattgggtgcttgacagacggtggcatatctatgggtggtctttagcgttatctggttttgtttaatttactactgtatcttgtcatttgtcaagaggtgcccccttggttttccaatggggcttgaaacttttgtttatgat

SEQ ID NO: 26609 - DNA, 428 bp, Gossypium hirsutum
  Clone ID: LIB3147-051-Q1-K1-C12
cccacgcgtccgaagtgttgaacaaaaaaaaaaaacgaaaaaaaggaagtaaaaaattgtaaccgaggtctgtaggcaatgtcgaggaggccagtgaatccctctagacgttacggcgatgccggcggcggagctgctctcttttcgctgtctaaatctcgttctccgcctttgctctccattgttctcattgtcctgggggcattgcttattgttgcgtatttccatagcggatcaggatctggaggcataaggagccttgtttccagagttgaaggtgacttttcctgcacatttgaggttctacgggcgcttcctattctgaagaaagcttatggtggtggcattcataaagttttgcatattggtcccgattcttgttaagtggtctcaaatttgttaaaagaagaagaaactgaaacttgggg

SEQ ID NO: 26610 - DNA, 471 bp, Gossypium hirsutum
  unsure (1)..(471): unsure at all n locations; Clone ID: LIB3147-051-Q1-K1-C2
cccacgcgtccggccaaaaattgtaagtaatgctgaggtcattggtaaaatcgccaaagggtggcctctttttggtgtcccgattgcaggatgtcttggtgatcaacatgctgcaatggttggtcaagcttgccgtangggtgaggccaaatgcacttatggaactggtgcctttatcctgctcaacacgggtactgcacccattaagtcaacccacggcctcctaaccacgcttgcattcaagcttggtccaaaagcacagacaaactatgctttagagggctctattgctattgctggagctgcagttcagtggctaagagacagtcttgggataatttcctctgcaagtgagatagaaagcctggcatcaaaggttgattgcacaagtggggtttactttgttcctgcctttaatggtttgttcgctccatggtggcgagatgatgctcgtggaatttgcattggaat

SEQ ID NO: 26611 - DNA, 374 bp, Gossypium hirsutum
  unsure (1)..(374): unsure at all n locations; Clone ID: LIB3147-051-Q1-K1-C3
cccacgcgtncgcaccagttcttttcgccgctttccaaagtcaaagaagaacaagagaatggaatgctggaaccggtagattataaggaaaaccacaggtccaaggaatctttcattaatatagcagcaggagcacacgaagaggctagtcatcgtgttggatccgacgagagacaaccacttcttcccacttaaagttttagggaggagggaatttgttttggtagggacccacgtattgttggatagtgacagagataaaccagttttcgctcgagacgttaaatggaattgaaagaaatttgtgaaatgagaaacccttaaagtgtagtcatttgttataattttcgntcatgggtctgaatggatgcttg

SEQ ID NO: 26612 - DNA, 151 bp, Gossypium hirsutum
  unsure (1)..(151): unsure at all n locations; Clone ID: LIB3147-051-Q1-K1-C4
ataataactaggatccaaactagtttcttgtaatagtttgtaggcgcttctaacagtaaatgcgtgcagatgattctcctttccacacannaaaaaaaaaaaaaaaaaaaaaaaaaaaaaaaagggaaaaaaaataaaaaaaangggcggg

SEQ ID NO: 26613 - DNA, 460 bp, Gossypium hirsutum
  unsure (1)..(460): unsure at all n locations; Clone ID: LIB3147-051-Q1-K1-C5
accggccgaatcccgggtcgccacgcgccggataatagaattaataaattcataagctggtgacagaaaatctctttcctatgcaaatgctctcatctctcccacaaatgaaattttcatacgtaagtttgtatagcactggcttaatactgcatttctatgagaagttttcctactcgaaagttgttgagttattctgtaaaatctttgtaccaaatatacttacaaatgtgaactaggagttgctatccaattcatctagaaaatgcgaatgttccatttagtgggcctctgaaaaagaattcattttcttctagtgaatttgagttgactctttgattgctaaagtataacatcagcaacgtatacatccagaagcaaattggaacctctgattcatcttgtgaaatattctgttctccgttttcagtcatgcattgaatgtgcanattttcattaa

SEQ ID NO: 26614 - DNA, 412 bp, Gossypium hirsutum
  Clone ID: LIB3147-051-Q1-K1-C7
cttctttcgccaaacaaacgcgagatttgtagatttatttctcgtctatctgcctccgaatcgatgattttgcaatcattatggacctgggcaactagatacaagaaggtatggtgagcaatatgctagtaaaggagaagatgtagattgtgctttgcttcctgagcagacacctttctacaaagatctggctgctgtggctattcaagcaagtgtatgcgtggacatttttgctgttacaaatgagtatacagatttggcatctcttaaatttcttagcatagaaagtggtggctctttgttcttatatgcaaatacagatgattcaacaattcctcaggacatgtaccgaatgctaagtcgaccatatgcttttacttgcgtactaagattgaagacatctactgaattc

SEQ ID NO: 26615 - DNA, 386 bp, Gossypium hirsutum
  Clone ID: LIB3147-051-Q1-K1-C9
gtggaaagccgataacgtcaacgtcgtcaagaacagaagaagaaacgaagcaaaggcagctgttattctaatacaacacgcttaaggaaaaatcgccaaataaaataccactaccctcaaggaatctacagatctctgtccctctttctctacgtctcaaaccctaattccttaatttttacagaagatcgggggtttaatcgcggagaatcaaccatgtttaacaggcttttcgggaaacccaagcaagaagcaaatgctctaaccacgttagacaaattaaatgagacccttgaaatgcttgagaagaaggagaaagtacttgcgaaaaaggctgctgctgaggttgaaaaagccaaagaatttgccaaagggagaaacaagag

SEQ ID NO: 26616 - DNA, 432 bp, Gossypium hirsutum
  Clone ID: LIB3147-051-Q1-K1-D10
gagaggcttcttccgtggttgggttcctacccttcttggttacagcgcacagggtgcttgcaagtttggattctatgagttcttcaagaagtactattctgaccttgctggacctgaatactttgccaagtacaagactctcatctatcttgccggctctgcatctgctgaggtgattgctgatgttgcactttgcccctttgaggcagtcaaggtcagggttcaaacccagcctggttttgctaggggtctgtctgatggtcttcccaagtttgtcagatctgaaggtgctctcggattgtacaagggtattgttcctctttggggccgacagattccatataccatgatgaaatttgcttcttttgaaactattgttgagatgatctacaagtatggtattcccactcccaaggagcagtgcagcaaaaa

SEQ ID NO: 26617 - DNA, 349 bp, Gossypium hirsutum
  Clone ID: LIB3147-051-Q1-K1-D2
attgtgtcataatggttccatccaacctcagggagctggagaagaagaggaaggaaagggctcaggttgcatatgagaggaagaagcagctgaacaagcttagggtaaaagccgagaagactgtagaagagaaactcggctctcaactcgacatccttgccccagttaagtactgaatttctagtggctagctagtttcatacaattttgttaaaggttattggtttcactatttagttccgtttgagatgtggagtttaaaatttttgttgaatcttgggttgtcccttttttttaatgaactttttggtgtaagatcattcgaatataattcatatatgctttttat

SEQ ID NO: 26618 - DNA, 405 bp, Gossypium hirsutum
  unsure (1)..(405): unsure at all n locations; Clone ID: LIB3147-051-Q1-K1-D3
cccacgcgtncgttattttcgtggttgatagcaatgatcgtgaccgtgtggttgaagctagagatgagttgcacaggatgttgaatgaggatgagttgagggatgctgtgctgctagtatttgcaaacaagcaagatcttccaaatgctatgaatgctgctgagattaccgacaagcttggccttcattctctccgccagcgtcactggtatatccagagtacatgcgccacatctggtgaaggactgtacgagggactggactggctctcaaacaacattgcaaacaaggcatagatggcgtaattgacttgtctgtctcagaaaatgccagcccctttcggaattattgatgtttctacgtccgttaaaatgttttggtttttcatgttcttttgtttcttgc

SEQ ID NO: 26619 - DNA, 352 bp, Gossypium hirsutum
  unsure (1)..(352): unsure at all n locations; Clone ID: LIB3147-051-Q1-K1-D4
ggagaatcagccaatgaagaagagtaggcttttagtggggtaaaagaaaattctagcctgngttaagggtttctaattatggttgttttgtttgtttcaatggaaattagggttttgtttttttcagcattagcactattttgattattatctttgttataaaatatttgaagctttgagcttatcaatattgagaacatgtttcgagtttacctactgtttttttttcttttaaatgttaaaaagtaccaattcattgaattggcattggaatttgggttgttttagttgtggatgatcatgatgtttggtttactcttcaattntagtggatatataaatttcatttctg

SEQ ID NO: 26620 - DNA, 454 bp, Gossypium hirsutum
  unsure (1)..(454): unsure at all n locations; Clone ID: LIB3147-051-Q1-K1-D5
gctctttattttctctgttcatcagtttctttttatctcttcgaattttcattacagaccctgatcctaaactctcaatcatgtcttccaagcaaggtggcaaagcaaagcctttgaagcaacctaaatctgagaagaaagaatatgacgagcatgatttggctaacattcagaaaaagaaagaagaagagaaggcccttagagagctgagagcaaaggcatcacaaaagggatcatttggtggttctggtcttaagaagagtggcaagaaatgaggttcttaaaaacctgagctaaacctaacttattgagtcatgtcttgngattaaaacatctattatgctgatgtctcttgtttcaattgtgatagttgggatgatttgatggtctagtttcattctgagtttgctataaaaaacatntgtgtgtaatttcctgacgtataacttaataa

SEQ ID NO: 26621 - DNA, 379 bp, Gossypium hirsutum
  Clone ID: LIB3147-051-Q1-K1-D7
ctccttttacttgcatcattctactgacaatgacatcttttgttgctggattcatctttaaaaattgagctcatggtttgagccgtttttaacgtctttccggggaagaaacgatgatcttagagttccgaaatgacttatacagcagccaatgcttgttgaagatgttcattgcctggataagctgcaaaccaaaagaaaaaaagtagtgattttcacatgaaatatacaagatgtttaatgttaggtgctatttaaggctacattagaataggcacagagatgatcttgtatatatgttttttatcaagtagtggattttgtgcataaacagagaaaaactgtaatgcttaatgggacatatttgcaaggtactatt

SEQ ID NO: 26622 - DNA, 464 bp, Gossypium hirsutum
  Clone ID: LIB3147-051-Q1-K1-D8
caaagcttaggaagatattggatggcttatgcaaagggtaactgcggtacttgtagttacttggggacattccgaactacaaagtgccagagtggttgtgaccagccaacccaaagatggtaccacgttccaagatcatggctaaagccaacaaaaaatttgttggtagtctttgaagaacttggtggagatgtatcaaaaatatctcttgtgaggagatcagttttataaacattgcctagacaacaccacaagtctgggagctgggaaggaaaacaaggtgcaagaatataagtggagaaaacatcccaagttcactggctaaattctttttcactatttgtttatttggttacttaagcagccggcattaaactcaccatgcattaaaagaatgctcttgtaagaaaatggggctgatgggaaactaaccctgtaatatctgaggttgaaaaaccattttt

SEQ ID NO: 26623 - DNA, 438 bp, Gossypium hirsutum
  Clone ID: LIB3147-051-Q1-K1-D9
ctcgcctgtacttacgccgcgttgattctccacgacgatggaatctcaatcaccgccgagaagattgctacattggtgaaggcagcgaacttgagcgttgaatcttactggccaagccttttcgccaagctcctcgagaaagtcaacgtcgatgatctcatcaccagcgttggctccggtggtggtgctgcccctgttgccgttgctgctgcttctggtgcagctggcggtggtgctgctgcggcagcccctgctgttgaggagaaaaaggaagaagagaaggaagagagtgatgatgacatgggattcagcttgtttgactagacacaattcttcccaatttggatttttcttttgttttgttggttgaaattgcggaaaattatgactcgttttaacattagttgaattttgtattgggttttgagaacttttgca

SEQ ID NO: 26624 - DNA, 471 bp, Gossypium hirsutum
  Clone ID: LIB3147-051-Q1-K1-E11
cccacgcgtccggtagggtgctatagtctactcaagtggtcgtgtctccatcattttcgtggatgagccaacttcagggcttgatgcaagagctgctgcaattgtcatgagaacagttaggaatacagtggacactggaagaacagttgtgtgtaccatccatcaaccaagtattgacatatttgaagcatttgatgagctattccttatgaagcgtggaggacaagagatctatgtggggccattaggacaccattctagacatcttatcaaatattttgagggaattcaaggagttagcaaaatcaaagatggctataatccagctacttggatgttggaagttacctcaacagcacaagagttatctttaggcgtcgaatttgctgaattctacaaaaagtcagacctattcaagagaaacaaaactcttattgaagattaaagtaaaccagcttctggtgcaaaagg

SEQ ID NO: 26625 - DNA, 423 bp, Gossypium hirsutum
  Clone ID: LIB3147-051-Q1-K1-E12
aaagaagaaaccagagggatctcagcaactctccaacactcaatctaaaagcatcagcggttcttctttgaatactggcaaacagaggtgtagatgatctgtaaccaactcctgccatcattggctcagctatcaaatgaaaacaaatgttgggatgccatggttgcattttcaattgtgtgaagacatatatgtcaggcttggttgtgcaatttcagggagtttgaaaactttggtagaggtaaaaccaatttattacactagatagctaaccatccccactgttgtaattgaggagtatctcttgtaattagatcaaacctcccatttgaatgactggtatttgcagctacccgaatgtctaatttcttattgagttttggaacctgcagtatgtttctccattgacacttgtatgatttt

SEQ ID NO: 26626 - DNA, 464 bp, Gossypium hirsutum
  Clone ID: LIB3147-051-Q1-K1-E2
cccacgcgtccgcaaggatttgaaggccgaccctgaagacgaattcctcaaattgctgagagctgcaatcaagtgcttgactgtccctgagaaatattttgagaaggtgctacgtcaagcaatcaataagctgggaacagatgaatgggctcttactagagtggtcgccactcgggcggaggtagacatggtgcgtattaaggaggaatatcagcgaagaaacagtgtgaccctggaaaaagcgattgctggagatacctctggagactatgagaaaatgctgcttgcgttgattggagctggagacgtctgagctgctttcctatattgagttgttggtatgaaaatttagtttgcaatttgaggtgtgagttatgtttgtttggttgggttgtgtgaacatggcttttgtatgccgctgcttccgtgttagaacgttcaaagatgatgtgtttgtggatata

SEQ ID NO: 26627 - DNA, 450 bp, Gossypium hirsutum
  unsure (1)..(450): unsure at all n locations; Clone ID: LIB3147-051-Q1-K1-E3
gcctaaggagggaaatagtggaacctttctatcagaagaaagatgaagctaanatggttgccatagaggctgccctggctgcccctaagctgcccgcctcttccccaccctctggttctatgcagctcgaagaacaagttaccgcacccagttccgcaacaaccaatctgaactccatggaggtggagatggctgactgtgatgaaaacaagaccaaggcctccttgagagctattggtagaataggaaagatgtccaaaaagaaattgaagatcaaaatttggaataatgccatttttgtgtttcaagtgtgtgatatatggccttgtaatattcttttatttagaagaagtattttttgggttgtgatagaaagcaaactggggatttcatgaanttgtaatttgaaggatatttcctgtcggcattggaatcgaccgagcatgtacc

SEQ ID NO: 26628 - DNA, 56 bp, Gossypium hirsutum
  Clone ID: LIB3147-051-Q1-K1-E4
gttatatgctatccaagacttcgaagtctaggatagcatgtaaatcgcgttaccac

SEQ ID NO: 26629 - DNA, 336 bp, Gossypium hirsutum
  unsure (1)..(336): unsure at all n locations; Clone ID: LIB3147-051-Q1-K1-E5
cccacgcgtncgtttttctttaaaaaaaacttttgagatacttttaactcacgcctcctcttgtccccttttcagtcggcaccgatcctgtcgaagatttgtcgcgccatggccactgatgaaagcccgattccggcgacgagctcacgataacaggtacttcccttctcttactttttgaaattcgtatataaaaagaatgaaataaaaaaaccgaaagaaaatcaaagatagaaaaataatcaccttcaaaagatcttgtttgaatcaattttgtttccgtgctttttcgtactcaatccatattcaatttctctcaaannanaanannnnnng

SEQ ID NO: 26630 - DNA, 374 bp, Gossypium hirsutum
  Clone ID: LIB3147-051-Q1-K1-E6
aatttgcattcaaaattcctttttcttaatacaaaggggggaaaaacccataaactgaattataattttctttccttcatatttgttaacaatttctctgcaattctacaaaaaaaaaaaaaagtttcctgcaaatgaggccttcctgtttagaagcagtctgttttctggtgttgttcattttcctttatagcgttgaagggattcgattggagggaagttttagatcatcagaacatgatcttaaattgcatgaagaagctttgatgaaaataagcaatggagttatgggagatgtcattttctgcaaacaagggcaatgtagaggaaacagtagaaaacttcttacagcaactactactgcaactaccact

SEQ ID NO: 26631 - DNA, 254 bp, Gossypium hirsutum
  Clone ID: LIB3147-051-Q1-K1-E7
gcgtccgcccacgcgtacgaccacgcgtccgaccacgcttttcggaatatgactggacattttacagagggaatggattccaatatatgatgtagcacctattctcacatctatccagacattgttgtgtgatccaaacccaaactcacctgcaaactcaaaagctgctatgatgtttattgagaacaagcgtgagttcaacactaaatgaacggagaatgttgagcataactggacaatggactaactccata

SEQ ID NO: 26632 - DNA, 162 bp, Gossypium hirsutum
  Clone ID: LIB3147-051-Q1-K1-E8
cgctcattatgttttctgaagatgaagagcagtattcttgccgtgaatcacaagaaaatgccggatgaatagagattgtccttgtaagaaaattttccttttatttttgtttttctcttgtatggactaataacgaaacagctttatcttgggatttgcgaa

SEQ ID NO: 26633 - DNA, 448 bp, Gossypium hirsutum
  Clone ID: LIB3147-051-Q1-K1-F11
cccacgcgtccgtgagcttccaatttgcaaggaaggcgatttgataatggagcaactggtggggctgagtagcaaaggatgcggatgcttggtggttatagatgatgaatatcacttgcttggcacatttacagacggtgatttgcggcgtactcttattaaggccagtggagaagcaatattcaagctcagagttggagacatgtgcaacagggaaccgagaaccattggtccggatgcaatggcagtggaagccatgcaaaagatggaatcaccaccttctcctgtacaatttctgcctgttattgatcatcaaaatgtcttgattggcattgtcattgcatggattagtgtcaactggcctttgagaagtatgtctggatttcaatgtgacataagtgttgactagaaattatggtcaaactatgataggatcttatgtatactg

SEQ ID NO: 26634 - DNA, 452 bp, Gossypium hirsutum
  Clone ID: LIB3147-051-Q1-K1-F12
cccacgcgtccggctcatgaattctggaggtcagattcaccgtcttgctaaatcagtttacaaggttgaggctgaagctgtagatttgatggacggactgcgagaaatccctggaagggaggcattgaaactacgagcagaggttgcttcaatggcatcacttttgaggcagcaaagggtttcacttgacagaaggataaggaaaatatctgagttggggatacctgtctgatacactgtgtgtggacctctcttgttatatttgatattatttgataaggatttttgaactgatgctgcattttctagatcccatgttactcatagagattaaacttaattcggccgaaataatctatctagtacaattgaactgtgagtcactaaatcattttgctatgtatgatttttagatcaaggaatgggaaagaattctttcttctttttggtgc

SEQ ID NO: 26635 - DNA, 403 bp, Gossypium hirsutum
  unsure (1)..(403): unsure at all n locations; Clone ID: LIB3147-051-Q1-K1-F3
cccacgcgtncgcccacgcgtncgcccacgcgttcggccaaagcagtggaatgaggaccatatcatttggcgttttccattcttccgctcttttgagattgagttcacaagatctcagatcatagctgcaatccctggaacctttttctgtgcatggtatgcctcgcagaagcattggctggctaataatattctgggtcttgctttctgcattcagggaattgaaatgctttctcttggatcatttaagactggtgccattctcttggctgggctttttgtatatgatattttctgggtttttttcactcctgtgatggtcagtgtggcgaagtcttttgatgctcctataaagcttttgttcccaacagcagactctgcacgaccattttncatgcttgga

SEQ ID NO: 26636 - DNA, 332 bp, Gossypium hirsutum
  unsure (1)..(332): unsure at all n locations; Clone ID: LIB3147-051-Q1-K1-F4
aaacttggtaagcaacaccacaagaagaagaaaatttgaaggtcggaggttccgatttcaaaccagtcattgtggaatacaaattacaactactttgatattccatgatattatgtcgatggacttgagtaatttccagtgtatttcttatgtaaccagcaacatgtacttcttgggatgatatgtgcccttattttaagattaaatgttcaaacacatgatcatatcacagcgttctgttgtttgaactcaaaatgaatatatttttgaaggatttttggnnaaaaaaaaaaaaaaaaaaaaaaaaaaatnttnnnaatttttatataatt

SEQ ID NO: 26637 - DNA, 436 bp, Gossypium hirsutum
  Clone ID: LIB3147-051-Q1-K1-F5
caagaatgtccaaggacagtttcctgcgctgatatcgtctctctttctgctagagatggcattgtcttgcttggaggaccacgcattgagatgaaaaccggtcggaaagatagcaagagaagttaccttccagaggtagaaaataccatccccaaccacaatgattcaatggagttggtgctttcacgctttcaatccattggcatcgacacccaaggagtagtagctttactaggagctcactccgtaggtcgagttcattgtgtaaacttagtacacagactctaccccacagttgatccgacattggaacctgactatgccgagtaccttaaagggaggtgtccgacacccgaccctgatccggaagcggtgttgtactcgagaaacgaccgggaaacgccgatgattcttgacaatatgtactacaaaaact

SEQ ID NO: 26638 - DNA, 362 bp, Gossypium hirsutum
  Clone ID: LIB3147-051-Q1-K1-F6
ctttctttccttttcctgtaaaaatggagggttcctcctctgagaagctgatcattgtgacccgtgaacctgatgggatcgctactgttaccatcaatcgacccaaatctctcaactccttgacccggcccatgatggtggacttggccaaggctttcaaggctcttgcgaaggacaactcggtgcgggtcatcatcttgtctggagctggacgggctttctgttcaagcgtggatttgacggctgcacaagatgttttcaagggtgacgttaaggacccggagacggatccggttgttcagatggagcaatgccccaaaccaatcatcggagctatcaacggccttgctattactgtcggc

SEQ ID NO: 26639 - DNA, 81 bp, Gossypium hirsutum
  Clone ID: LIB3147-051-Q1-K1-F7
cccacgcgtacgtctgtctttaatttttcgattatataataaaatcacaatttattttggcatgggtattagtaaaataaa

SEQ ID NO: 26640 - DNA, 465 bp, Gossypium hirsutum
  Clone ID: LIB3147-051-Q1-K1-F8
gaaaaaccggggcgaccgacgcgtccgcccacgcgttcgtattaggaaagtaaatgacgtttttatgttgatgttaatgaatacaagggggggagatgaattcttgatgggttcaagtcattggttttcatttgaactttgtgattacaacacaacaatttacttgaatggaaatgcacttgtgtttttatatcctacaaagcttctttagtcaacttttgagttgaaattgatattaggatgtaattgatgattttttattatgttaatgaacataattatagaccaagtttgggaccttttattttggttaaagacattgatattcattgagaatttcgtgcattgggattagataattacttgaatgaaatgcactttttggacccctgtatagctttttaaaacatactttgtgatggaaattgtttttatgaattaagaatggagattttttctcaattt

SEQ ID NO: 26641 - DNA, 464 bp, Gossypium hirsutum
  unsure (1)..(464): unsure at all n locations; Clone ID: LIB3147-051-Q1-K1-F9
agagactactttgagcttgttttgattagcaatgtaggtggggcaggatccatccaatccgtatccgttaaaggctctaaaactgggtggatgtcaatgtcaagaaactggggagctaactggcaatccaatgcctacctcaaccgtcaatcgttgtcgttcaaggtcaccactaccgatggtgttacccgactgttccctgatattgtgcctgcaagttgggggtttggccagactttctctagcaaagtacaattctaagctcactaaaagctttagttcccggcggaggcgtgctacattattttacaaaaaagctgcccgccatacatggtatttatcgatacatcacatggtcaataatatcangctacttgtttttcttgagaactggttgtttaaatggaagtgaaatctttgtttttgatacaagtcgatgtttgaaaatatttcatgatcataat

SEQ ID NO: 26642 - DNA, 444 bp, Gossypium hirsutum
  unsure (1)..(444): unsure at all n locations; Clone ID: LIB3147-051-Q1-K1-G2
cacccgtgctgcagctgtggttcatgtgacagatgattcgacaggctgtgcaatcaccgacctgaaacgtctcttgatgataaaggacttgctttgtaatgttctcaaaggaaatgatgacttgaaaacagcaaaaacaatgctttcagctccgggtgtcatgcatagggagcgaaggttgcatcaaatcatgtttgcagatagggactacgaaagggtggaaagaactggagtcagggcagtcgaagagaggagctcgagaccccaagttaatctgttgaatattgagaaagaatacactgttattaccatgagggcaaaagataggccaaaactactgtttgatattatctgcactcttacagatatgcaatatgttgtttttcatggaatggtcaacacaacgaggatggacgctaatcangaattttatatccgacatgt

SEQ ID NO: 26643 - DNA, 124 bp, Gossypium hirsutum
  Clone ID: LIB3147-051-Q1-K1-G3
ttgccagcgatcggagactcggagttcaactccaaactatcgccaccgatttccagaggatttataaagtccacgatcggctcttcctcggtctctccggcctcgccaccgatgctcaaacctt

SEQ ID NO: 26644 - DNA, 300 bp, Gossypium hirsutum
  unsure (1)..(300): unsure at all n locations; Clone ID: LIB3147-051-Q1-K1-G4
cccacgcgtacggtcgacggtgacggcggcatcaacggtgacgatgaggatggggatatatcatgatcgttgaatagtagctgttcaatcagttgggcaacttaagactctnttggcagttcatcaagaatggggatcattgtggctcaatccaagcgtataaatgaccggataatagttaagttattttcagcatttgcctgtactatttagtatttatgcctgaacttgagctttcagaaatgaaagtgaaaacattagtggttgaaactaatattattagagctctttttgcacctt

SEQ ID NO: 26645 - DNA, 451 bp, Gossypium hirsutum
  unsure (1)..(451): unsure at all n locations; Clone ID: LIB3147-051-Q1-K1-G5
cccacgcgtacgatttgctgtcgatttcccctttttttgttgcgttctctctgttgctttgcaggtgtttgttgcgagttgttgcaggtatcgtacgaagacgtggcacggctcgacgcgatgcatagaggctacggttacggcggctggagagagcgacgctagaggctactgttgcggcgctcgtgctagggctgaatgcctaaggtttctggcatttggtttaggccagttggccagggtattgtgcttaagtttgggctaagttaattgggttagattttgatgggcatttgggctagtctagcttaagctaaaatgatttgggccacgttgggcccatgtatttggaactgtggactttgntttacttttggttttaatttatttgtgaattttgggcccttgcaaaatttggccttataaaaaagggtattgttgaatattttct

SEQ ID NO: 26646 - DNA, 206 bp, Gossypium hirsutum
  unsure (1)..(206): unsure at all n locations; Clone ID: LIB3147-051-Q1-K1-G6
cccacgcgttcggactttgtttattttgntttatgttttggtccctgcatgttggctctaattgtatatcctctatgtattggctattttaatgttttaatgaattaaagtttatgctttgtcaatcaaaaataaaaaaaaaaaaaaataaaaaaaaaaaaaaattaaaaaaaaaattaaattataatttatataaattataaaaa

SEQ ID NO: 26647 - DNA, 371 bp, Gossypium hirsutum
  unsure (1)..(371): unsure at all n locations; Clone ID: LIB3147-051-Q1-K1-G7
aaagaatgaagtatctgcaagatttatatcacggtgtaacaaaatcacaggcaaagttggtatgcttgatgaaatcatcaattatgttcaatctcttcaatggcaagtagaggtaaaaaaataatggagaaagaacatatggatttgtgtatgaacacaaaaattctttttcatttctagtaattacttaactgctttaagattttgtcctccatgtgaggacatatttatttgttgttattttcttagctaataacaagatgagaacaatatgagaaagaaaaatagaaactactttgatacaattnaacaacttcaatagcttataatacttgtgaggagtaaaaacaagggcactcttagaattgaac

SEQ ID NO: 26648 - DNA, 299 bp, Gossypium hirsutum
  Clone ID: LIB3147-051-Q1-K1-G9
ctgatatattggacttgtcactcagaataacacatatatatccaacctaatccggtgtttacagtttggagcctggaacaggcaacgtataatgtatcctttgtaattaatcaatggtttaagatggttagaaaattgtttcactttcataaatattgtattctactgtcatgagtttgattatgaaagaaggattgatcctcttctaaaaaatataatactaattaaaaaatttattattatatatatataataaattagtataatccataaatttaaaaagggcggccgttttaaag

SEQ ID NO: 26649 - DNA, 349 bp, Gossypium hirsutum
  unsure (1)..(349): unsure at all n locations; Clone ID: LIB3147-051-Q1-K1-H10
aaaacaattccgagagtctcgactgttctcagatctatacgacaacgtttccagatccacaatggcttctacattcagcggcgatgaaacggctccgttcttcggcttcctcggcgccgccgccgctcttgtcttctcttgtatgggagctgcatacgggaccgctaagagcggtgtcggtgtggcatctatgggtgtgatgaggccagaattggtgatgaaatcgattgtccccgttgttatggctggtgttttgggtatttacgggttgattattgctgtcattattagtaccgggatcaatcctaaggcanaatcgtattaccttttcgatggttatgcccatctt

SEQ ID NO: 26650 - DNA, 181 bp, Gossypium hirsutum
  Clone ID: LIB3147-051-Q1-K1-H11
gtttgcagttccaatctgttaatggtttcttcttgtttaaattcgaggttttgtctagtaatctgtatgtaaaagctgtattagcagaatataatgttgtattctatacctattctacattgattatgtctgagatggtggattggtgaaaaaaaaaaaaaaaaaaaaataattaataatt

SEQ ID NO: 26651 - DNA, 422 bp, Gossypium hirsutum
  Clone ID: LIB3147-051-Q1-K1-H12
aaaaagatcgaattaaagtagaatcagaagcaaaaatcgccgaggaaaacaagatgtcggggcagcaagaagaagataagaaacccggcgatcagtccgccgctcacatcaacctcaaagtcaaaggccaggacgggaatgaagttttcttcaggatcaaaagaagcacacaattgaagaagctcatgaatgcatattgcgaccgacaatctgtggatttcaactcgattgccttcttgttcgatggtcgccgcctgcgaggtgagcaaactccggacgagcttgagatggaggatggtgatgagatcgatgctatgcttcaccaaaccggtggtactgtgtgaagcgagtactacttttgccgcatttagtatttgatgaggtagttatggtctgattatgtaagatgtttccatgtttta

SEQ ID NO: 26652 - DNA, 428 bp, Gossypium hirsutum
  Clone ID: LIB3147-051-Q1-K1-H2
cggacgcgtgggcggacgcgtgggcttgctccaagcagcatgaacattaacgtcgttgcgccaccagagagaaagtacagtgtctggattggaggatctatcttggcatcactcagcacccttccagcagatgtggatttccaagggtgagtatgatgaatccggtccatccattgtccacaggaagtgcttctaagttttgtaattgcttttgatggtgatctacattttgcatttagttggctatttttgtgtgcgatgttaagtgaagtccaaagtctggtttatgtggggagagttagggatcattgtaggatggtgtacttgatattgacgtattattattgtagcctttcaccgtatcaccaccattaagatgatgggtcctatggagatggcggtgggcggacaattggtgctgaattcct

SEQ ID NO: 26653 - DNA, 329 bp, Gossypium hirsutum
  unsure (1)..(329): unsure at all n locations; Clone ID: LIB3147-051-Q1-K1-H3
cccacgcgtncgctcttttttcacttggccacacatgaagatacttcgaataagtctgcctgcgttgctttaatggaatcacttaccaataggcggaaaagcatattcaaagctgtccattagtagaaagcagtgctcaattggccgacaatatcaccatgttattgacttggattcagcttatagaacctcaggtaaattatttcattcttcacttggttattaattagaaaagtccaagaaattgctgggtttttgtaccttctgctgtctaagttaccaatgttaacaaatacttggtcattatttggtacataatttttcttttt

SEQ ID NO: 26654 - DNA, 366 bp, Gossypium hirsutum
  Clone ID: LIB3147-051-Q1-K1-H4
gcaccccagccgttaagagtggcaatggaggagaaaacttatgctgaagaggcaagacaggaggcgaaaaggcagattgaaatagctgagcaagagtttgcaaaggcaaagagaatccggcaacaagcacaagctgagttagaaaaggctcaagccttaaaggatcatgcaataaagcaaataaactccaccatccttcaaattacttgtcatgcttgccagcaccaatttcaagcaagaacaccacccgaagagaactcccttgttgcgagttacatttcatcagcggtaacagaaggtgaagttgaaaacgatattcaaacaagtcttacaaaggcgactaacacataaacccatctaaacata

SEQ ID NO: 26655 - DNA, 115 bp, Gossypium hirsutum
  Clone ID: LIB3147-051-Q1-K1-H5
gttgttactagtggtttaagtgttttgtttttttgtaccaaattgtcactccattaaaatgagagtggctaaactttgctctattttattaatgaagatggtgttgtttaattac

SEQ ID NO: 26656 - DNA, 332 bp, Gossypium hirsutum
  unsure (1)..(332): unsure at all n locations; Clone ID: LIB3147-051-Q1-K1-H6
cccacgcgtccgggctgaacaagtgtggggtgatcagtcctcgttttgatgtcggtgttaaggagattgagggttggactgctcggttgcttccttcaagacagtttggttatattgtgctcacaacatcagctggaattatggaccatgaagaagccagaagaaagaatgttggtgggaaagtacttggcttcttctactgagaaatttgcctttttcattttgaatcgaactcatattattaagatggcatctttttgtagttcagcaattatggttttaatgttttgtttacgattatgaattgttgggttggtaagagattttngtct

SEQ ID NO: 26657 - DNA, 429 bp, Gossypium hirsutum
  unsure (1)..(429): unsure at all n locations; Clone ID: LIB3147-051-Q1-K1-H7
caaaaggttctagtgcaggtggagatggttttgaagttacaaaatttggtcatggacgtgtagcactaataggatttccaagtgtggggaaatcaacccttttaacaatgttaacaggaactcattcagaagctgcatcttatgagttcacaacacttgcatgcattcctggtatcatacactacaccgatactaagattcaactacttgatcttcctggaattattgaaggtgcttctgaaggcaaaggacgtgggaggcaggtaaaaatttgcagattctaattttacctggtggtatgttctcgtctcttggtataaaatgtatcattaccaagtgagggaaatgctgataaaatttttaattgaaatgtgttgattaactgcttaacattctnctttaaatgttgtttgattaaatgcttaacat

SEQ ID NO: 26658 - DNA, 457 bp, Gossypium hirsutum
  unsure (1)..(457): unsure at all n locations; Clone ID: LIB3147-051-Q1-K1-H8
caaacatggccgtggccatgtcaagttcatccgctgctctaactgcggtaaatgttgccctaaggataagtcaatcaagaggtttcttgtgaggaacatcgcggagcaagctgctgtcagggatgtccaggaagcctgcgtctatgacacgtacactctgcccaagctgtatgtgaagatgcaatactgtgtttcatgtgcgatccattcccacgttgtgagggtccgatcccgcactgacaggaggaaacgtgacccgcctcagcgcttcattagacgcagggatgatatgccaaagcctggtcagcctggtcaggctcctcgtcctggtgttgcggctcctgctcgtgcataaggcttttgaagtttaagatgaatttgtatttcgtgttttgctttgagatatggttgcttgaaatttgagaacttggatcatgtanggaagttttttttattg

SEQ ID NO: 26659 - DNA, 460 bp, Gossypium hirsutum
  Clone ID: LIB3147-051-Q1-K1-H9
ctcaaacaacatttcatctgtgtaagcaattagcagaggctgctgaagcatgtgagggattgagtggaagaacattgagaaaactaccatttttggcgcatgcagagcttgataacccgtattgttgtgaccctaacaagttgttgaacacaatgatagacacagcccggagggagcgttccgaactgcccgactgaagtaatggagttttgtactggtgtaaaatggatggttcttatgctgaaaatgttaaatctttggcgatacccactgccactgatgccttgtctatcttgactttaaatcctctcgtgtaatgagattataggttatgggatagactatagagtcgtacacaagatgcagagggttgattagaaatcatgtttgttttgttttcaagcataacaaatgtaaaaacctaaacagagcacacaataatataatagactcgagcaat

SEQ ID NO: 26660 - DNA, 439 bp, Gossypium hirsutum
  Clone ID: LIB3147-052-Q1-K1-A1
tgttaagcagattccctacaatatctctatccttgagatcagcgctccggttatcgctccgggggtcttaacggctccggccccggcgtcttctggcgtcaacattaccggtttgcttgaaaaagccggctgcaagacttttgctagtttgcttaccagcagtggcgtgcttaagacttacgagtcggcgcttgataaagggttgaccgtttttgctccgtccgatgaagcttttaaagctgaaggtgtccctgatttgagcaagctcaccaatgcagaacaagtctcacttctagagtatcacgcctcgccggattccacacctaatggaacgttgaagacgacgaaggacccgatcagtacattggcgactaacggcgctggaaagtacgatctgacagttacaaccgccggcgactcgatgacactacacacaggg

SEQ ID NO: 26661 - DNA, 481 bp, Gossypium hirsutum
  unsure (1)..(481): unsure at all n locations; Clone ID: LIB3147-052-Q1-K1-A10
gttaaatgccttagtgatgctggtctattccttgatgcggttgatgtctctggtggtcagacaattaggagtttatacagcggcgtggttggcttgcagggcgtgcaacataacctgccacgtatatgcaccaaccacctcgatccaacttcgtgtttctttcctcaaaatgtaatcaaccacatccggactccactgtttattcttaacgcagcatatgattcatggcagattcaatccagtattgctccaccatcggcggatccacatggttattggcatgattgcagattgaaccatgcaaaatgctctgcttctcagctccggtatttacaaggcttccggacacagatgcttaatgctataaaagggttctcaatgtcgagacagaatggattatttataaattcatgttttgctcactgccaatcagaaaggcaagacacatggttngctgataattctccttgaattagaaaca

SEQ ID NO: 26662 - DNA, 391 bp, Gossypium hirsutum
  Clone ID: LIB3147-052-Q1-K1-A11
attgagacttggaccaagtgggcaacctgtgaggatcaaatacaccccgttgctcagagaaccctaggagaccctcactttattacgtcaatttgattggaattagggttggaagaaggattgttgatatcccaccaagtgccattgctttcaatccttccactggtgctggcaccattattgattctggtactgtcttcacccggctagttgaaccagcctatgtagctgtccgggacgcattccggagacgagtaagggtggcgaacgtgacatctctgggtgggttcgacacatgttactcggtcccaatcaatgcaccgaccataacatttatgttttcgggcatgaacgtgacattgccacaagagaacctactgctccacagcac

SEQ ID NO: 26663 - DNA, 459 bp, Gossypium hirsutum
  Clone ID: LIB3147-052-Q1-K1-A12
ggaacattttctgcaccccaggctcaacgtatccccggaccgtcctatctttactatcctgcacaaatggaggggtccttctccacctatcctcccccaccttttcatcccactaggcatccaattccatctcctgcagattcacagactcctcaacctacctccacagaatcagaatctggggccatcacttctgaaagtccaaaaacctaaagggaagaactcatccctgatgccaaaatgttcaaattgtacaatcttgataagttttttatgcccttcttatcacctcatttcactcttatattctcaacattttagccatagctgactactgcatcaagttactgctatggcctaaggtaagaaaaggaggactaatcaaccacccttatgctgatttttttcccccttattctatttttttccccaaaagtttttatcttaagttattcattc

SEQ ID NO: 26664 - DNA, 132 bp, Gossypium hirsutum
  Clone ID: LIB3147-052-Q1-K1-A2
ctcagacatcacatgtgaccatagatcagatgaaactgtggacccggctggttacacttacagtggcgtacttctgaggaactggatctgcatctggatcctgtgatcaaggtttcggtgttcttagggagc

SEQ ID NO: 26665 - DNA, 434 bp, Gossypium hirsutum
  Clone ID: LIB3147-052-Q1-K1-A3
tgaagattcatgccatggatcacagttcttaagcaattacgttaagaaggttccttttctcctaactcttaaccaacattcttttgatgcattgttgataatgatataatggaattaagcatgcatcaaattatgatgcttgccttgtttcttgaacagcttaatcatgagttagattgtcaattcagtaggtgtagaggcagacttaactcagtcccgatcttcccatcggatgatgttctatgttttccaaggtgattatagcttgtgttctccattaaacagtaaattatgccttgcagatcacgtcaaattggcctcaatcaccaaaatctggaaggaagccatctcccagcacagtgcaagatgcaaactctatacatccaaggaggccttcaattaaggctgaaagctctaaaatggatcaatgaaaa

SEQ ID NO: 26666 - DNA, 456 bp, Gossypium hirsutum
  Clone ID: LIB3147-052-Q1-K1-A4
ctttgaggttaagtgaaaaaactatggctgaagagggacaagtaattgcctgccacactgttgagtcatggcagcagcagctccagatgggaaacgagtccaacaaactggtggtggtggatttcacagcatcatggtgcgggccatgccgttttatatcaccaatcctggtggatcttgctaagaagctgcccaacgtcatattcttgaaggtggacgtggatgaactgaaatctgtcgctcagtcgtgggctattgaggcgatgccaacttttgtgtttctgaaaggaggcaccataattgacaagcttgtgggtgcaaggaaagatgaattgcagcagaaaattgccttccattcatctacctcggtgcagacagcatgaatcaacatttaaatgtacttgatgtctggagttgtttatgaaactaggatcttatgaatgtctgacagacact

SEQ ID NO: 26667 - DNA, 351 bp, Gossypium hirsutum
  Clone ID: LIB3147-052-Q1-K1-A5
gagaaatcggggaatgggaagactttcttcacttctttatcgaaagggatcgggaggatcgggatatttagcggtcccggcggaggaaaacgtcgcaagccacgtggatcagaagggaaaagcggaaggagtcgaaggtattctgtgtcttaaaacatttgctttgcttgtatttaatagtaggaaagtagtaggacgtgaagaagcttctcatttctgactgtatgtatttacctatttatttagatttaactacaaaattgacctcaaattatatatattatttaggtaccttcgttttatccaaaaaatatacgacattcaataaaaatgtgcacgtatcatgttttt

SEQ ID NO: 26668 - DNA, 485 bp, Gossypium hirsutum
  Clone ID: LIB3147-052-Q1-K1-A6
cttctacaattacgagaaggagaagaaagaatttggccttctttttacgaagttctcacagaacttggcgctgttaggggcattgctgttcttcattggcatgaagaactcaatccccacaagacaactgaagaaaaaggctccgaaaaccaaaacagtttgaagacgtaacacgtccggttaaaaccgaagagggtctggtttttctcgttcgatcttaatttgtatacctcggtgaaactagatctgtttctgtatgcttgtatcaaggctttgttgttctttggaagttcatagctatttaatttgagttccacaaaaggatttcataattttgcccttcaatctgctgtttacctttttggattttgccaatctcatggaacttttaatcatggattcatggtattctagatgatatattaggaaatatacttattaggtaagttgggttcatttgtagtgaaatgattcatatgtttatg

SEQ ID NO: 26669 - DNA, 446 bp, Gossypium hirsutum
  unsure (1)..(446): unsure at all n locations; Clone ID: LIB3147-052-Q1-K1-A7
cccacgcgtccgaaacttttggatgctactatgaatatggaaggagttttgttggccggggttcctggagcaggtggatttgatgcagtctttgctgttaccttgggtgattctagcaggaacgtgacaaatgcatggagttcgcacaatgttctggccttgttagttagggaagaccctcaaggtgtttgcttagaaagtggcgatccacgatgccgggaaatcatttccgcagtttcttcagtcaacatcaagtgagctttgattaattgttttgggtttgatgagttagggatgtcatttaaagatttggtggaaaacatgatttacaagagaaattgtactgtgttctggagatataatttaattgggaaatgatttcannttgncgaaaacaaaatattaattctatttggtttattaatttnntatgaaataaatttaaa

SEQ ID NO: 26670 - DNA, 379 bp, Gossypium hirsutum
  Clone ID: LIB3147-052-Q1-K1-A8
cccacgcgtccgagtataccgagggcagtcctattgcaattagctggacatgataggagaataaaggggatggacagtttttaaactttaaaaagttgaatggcttcttaaactcactcaacacgatgagatgggggttggttcaattgttttagtgttttgtagttgccagattcatgatagctaaaccagctaataatggaagctggggtcttaagtgtttgatgttattctctgagagagggaacaatgaaaactaggaacattggtaggttttctttctcagtatacagtgtattaatatgcttttaattgcttaaaaaaaaaaaaaatctcacatgtaatgttttttatagatcaatcaaaaatacggcctctg

SEQ ID NO: 26671 - DNA, 351 bp, Gossypium hirsutum
  Clone ID: LIB3147-052-Q1-K1-A9
cttcaagccaaccacctttgaaagtgagaaaggagaagcttggagatagaataacaggagttcaccagttagtttccccatttggaaagactgacacagcatctgtgttgttagaagctattggttatatcagattccttcaaagtcaaattgaggctcttagctccccttacttgggtactgcatcaccaaacatgagaaaccaacaatctggtcaaggagaaaggaattgtgcatttcctgaagatgaaggacaggaaaagcaagagcctaagtcaaaggacttaaggagtagagggctgtgcttggttcctgtttcatgcacacaacatgtcggaagtgacaatggtg

SEQ ID NO: 26672 - DNA, 475 bp, Gossypium hirsutum
  unsure (1)..(475): unsure at all n locations; Clone ID: LIB3147-052-Q1-K1-B1
cccacgcgtccgcccacgcgtccgcgtattgcctttctctccaaaaaccccctttgcattccatttcattggctttttatagccgaataaaaagaataataataataataatacaagaaattttcccttagatctatttgctgtcaatctgttgcgggttgttagtctgctattttcttcttgcaagttcgattgtacggaggagaacgctcgtggggatgacgtggaggaggcttggggctctgtggcgctgaagacccttgctgaggaggctgcaatgttggtcctagggttttagtccctgaaaccgaatattgggccatctgggtcgagtttcaattgggttaaatatttgggctaagattaatgctttgggtctntgtatttatggattgtggactatattctatttttattcgggttatccattcgcttgtaaataaaattaaaggcccgggcaaaaatggccttctac

SEQ ID NO: 26673 - DNA, 327 bp, Gossypium hirsutum
  unsure (1)..(327): unsure at all n locations; Clone ID: LIB3147-052-Q1-K1-B10
aagaaaaccaagctattgcaaaagtggctaagcttcagccttcagttcagagtttgggaggtgtgaaacatgaaggtctttcttttgcctgtaagatctgatggattcacatacctgccatgcggttccaacacaactggcttttggtttcctttggattgagcttataactatactgtttgctttgttttcttttgaattgtgattgatatggatcatttatattctccatcatgaactttcaatcaggtcataaaattttaattttatcgcanaaaaaaaaaaaaaaaaaaaaaaaaaaaaaaaaaaaaaaaaaaaaaataaatt

SEQ ID NO: 26674 - DNA, 441 bp, Gossypium hirsutum
  unsure (1)..(441): unsure at all n locations; Clone ID: LIB3147-052-Q1-K1-B12
ggaaatgaacaagtggtggttctggctacagcgagtgttgacaagaaagtgagattgtgggcagcaccatcagtaaattcttcgtgagccaatgcttttacgttcattgtcaagaatttcatggagaagaccagggatacctgtggatgcactttagatcacatctgctcagcaatcttttaacatcaatagagaatacatacgtagctcttccggaatggtagaatagctgtatggtaggcatatatgattggaggagatacagaggaatgttccatatatttgcttgaatggtcttttatgttactgaacttttttgcttacttgaaggatttaaaaaagatgtagtgggctgtttgcgataactcgcacgagtagtatcaaggcaattggcccatgttatgaattataattanttgagcaatgaaatgttttgcgatt

SEQ ID NO: 26675 - DNA, 413 bp, Gossypium hirsutum
  Clone ID: LIB3147-052-Q1-K1-B2
cccaagcgagaccgaggaacccgcggtggaggagaaaccagctgaggaggaaaagggagatgaaaaagctgatgagattcctgttgagaaagttgaaaaatagagcgaccaataccatacgtaaggtggcaaatgcttaaaggagcttcttttttctatagttggcggagtcatactactattatttatgattactatgtacgatgtgggatggtgagggctttctttttctttaatggttgattctctgctatggggtttgatatttagtattgaacttgcttttgggtccaggggtcaacatgccgatggaagaaactatgggttttacatattgaagtggtatggatgtatgtatgtatgtatgtgatgggcatgcatgcatgcctgcacgtatggttttcggtcccaag

SEQ ID NO: 26676 - DNA, 132 bp, Gossypium hirsutum
  Clone ID: LIB3147-052-Q1-K1-B3
cgtacttatgagatgaaaaggggagattagtgccctagccggaaactgcctctcaacttaaggacgcctacggtttaagaactctgctgataattgaatcatgattctactgaagaaaaactaacaacaggt

SEQ ID NO: 26677 - DNA, 483 bp, Gossypium hirsutum
  Clone ID: LIB3147-052-Q1-K1-B4
caaccattttttggcggagaagagagaagccagtcggagatgcagctagtaaggtccgggcgattggtgtatgacccttgaacggattggtgttggaacgcatatttgccataggggtcgaaccgagaccatgaagcggcgaatgtgagcggtcccaacgcagatgacatatcagggttagattgtccgacgacgatggtggtggtggggggatttgatccattagaaagatcggcaaataaggtattatgaatggctattgaaatctggcaaagaggcgaggttgatcgaatatcataacatgatccatgcgttttatactttcccactcatgcccaacttcccacttggttgtgcaaatcaaggagttcattgccaagtgttcatacagagttccaaacctcaaatctgaaacctacatgtctcaagttcaactttcacctcgtaagctcaacttaatccatataccagatttatgttgga

SEQ ID NO: 26678 - DNA, 216 bp, Gossypium hirsutum
  Clone ID: LIB3147-052-Q1-K1-B5
gtttaaaccgtctgtttgttggccagcatgagccggcaaacattatataggcacctagggtgttttttttagggaatacggtactgtaaggacttatttccatactgccccaagaaagcagagaaaagaccttacatttctggatgcagaacacatacatacagaattccatgttttttgaggatgagaacccttaccttcaaaactttagatcct

SEQ ID NO: 26679 - DNA, 402 bp, Gossypium hirsutum
  Clone ID: LIB3147-052-Q1-K1-B6
cccacgcgtccggattggagtagtttgagagcacaaacccctccaaagcttgctttagagacaggggctcaatcaagtgatggcgatgattataatgattcttcatggaatcctacgcacattggagatggttctgccaggcagagtgatggaatcgtcagctcctcatcatcagctgaatcttctggtcatataactagacttgcctcaattgattccttcgactcaaaatggcaacaatttttggatccgggagaatctgttcttatgatctcaatggtgaagaagctacaaaagttatcaagcaagaaggtgcagcttatcctcaccgacaaaccaaaattgatctatgttgatccttcaaaactggtcgtgaaagggaacattatttggtccaacaat

SEQ ID NO: 26680 - DNA, 276 bp, Gossypium hirsutum
  Clone ID: LIB3147-052-Q1-K1-B7
cacagatactgtggaaggaaattgcctcaaacatcacatgccattgttgcttccaactgtaaaatagaagatttgtgacaattggaacctttcttgtaaggttctgtttatttattttgagttgctagtacgtgtttgatactggaaacttgaattttaagtttcgtacttatgagatgaaaaggggtgaatagtgccctacctggaaacttcctctcaacttatggtcgcctttgttataataacttttctgataatttaatcatgattttattt

SEQ ID NO: 26681 - DNA, 489 bp, Gossypium hirsutum
  Clone ID: LIB3147-052-Q1-K1-B8
cccacgcgtccgctttcaggccaagttctacggatccaagctctagacctgcttccatcgaggctaattatagagcggatccaagctccagatctgcttccattgatcccagacccgcttccattgatcccaactatagagcggatccgggctctagagctgctcccattgatcccaattatagagtggatccgagctctagagttgcttccattgatcccaattatagagcggatccaagcgctagaggtgcttccattgagcccaattatagagcggatccgagtgctagaggtgctccgattgatcccaattatagagctgctccagagctgaagtataggggtccaaccctggaatctgctgggttttctaaacgaagagaaagtttatttgtgaacagccaggttgtggatgacaacagttaactgttaaaaaccagtttccattaacttacatttcaaggtgggttgcttttaagttgtcctt

SEQ ID NO: 26682 - DNA, 298 bp, Gossypium hirsutum
  Clone ID: LIB3147-052-Q1-K1-B9
cccacgcgtccgcccacgcgtccgcttaaattgatttctatcagaacttgtgtcattgtgggaatgttgaaatttcataaacgatttgtctctttaatggaataccttttttattctcaaaaaaaaaaaaacaaataaaaaaaatggcggactgaataaaaaatttaagttttcgtacgttaacaaagcgacatcaaaaaaataaaatatagacaccttaatttttttatactaaacaaaaatttacatcctctttactggaaacacccttacgtaccccaacttaataacctatcac

SEQ ID NO: 26683 - DNA, 325 bp, Gossypium hirsutum
  Clone ID: LIB3147-052-Q1-K1-C1
cccacgcgtccgatataaagcaggttacggttttattaatttatcctatgttactctgttggagtgaaaaactcagtattcaggtttcaaaataaaacaaaaaaaaaacacgaacagaaaaaaaaaccaaagaacaagactaaaaaaaatcagctgccgctcaggagcgtgctaaagactaagaagatggacacttgaaaaacgaaagagggggggaccgttttaaggaaccaaggtttccgaccccgagacgcccaagatatgctttttcaaaagggtcacaaaaaaaaaattactgggccggtatttcacaacgccggatctg

SEQ ID NO: 26684 - DNA, 413 bp, Gossypium hirsutum
  Clone ID: LIB3147-052-Q1-K1-C10
aaaattcttctcttttttttcttccatgattgagtaaaagatttttgtttcttcaaagatgaatgtcggggacccgcttcccactatcctcctatcatgtaccaaacccaaatttctctagtttttttatagattcaaattaatccccctttcttctctacaatcctttttacagttttaaaagataccgatcttaatttcctcttgattttcaatggcgggtatgctagctggtgttgaatgtgctcgaagaagacggttccatcaaagtggcggttcatctgattcggttcttgggttcacgaggagaccttctttttgtttgtatacaagcaaccatgaatcccttcatagctctgttttttctcagaggagggtaataattgaagggtatgaagatgatgatgagaaac

SEQ ID NO: 26685 - DNA, 467 bp, Gossypium hirsutum
  unsure (1)..(467): unsure at all n locations; Clone ID: LIB3147-052-Q1-K1-C11
aatttttaaatgttctctcaacctccagccgtatggctaatgtcctgacctccaatggcgcgcttgtaaccggcgaagcaaggccctccaacgaagcggtacgtggagatgtgaagagggcgttcatgggcgtgtcaacgtgaaatatgggaggtggaagcgtgggctgaagcaatggcgtgcgtagaggctggcacgaaggcagcagcaacgcaagggggaaagggaaagggttctgaaaactccaaaaacctgggcctactgggcttggttcatttcattcagtattaggccattgtaaaactttttgggcctgtttaaaatgcaataagtttgtattttgggccgggtaaaatatgggttttacacttctatcagttaaagtgacattaaaatngcgatgttaagggaaaccattgcaactagtttaatgaattcatatttataaaactatcttgtatcataac

SEQ ID NO: 26686 - DNA, 57 bp, Gossypium hirsutum
  Clone ID: LIB3147-052-Q1-K1-C12
aaaaaaaaaaaaaaaaaaaaaaaaaaaagaaaaaataaaaaaaaaaaaaaaaaaaaa

SEQ ID NO: 26687 - DNA, 466 bp, Gossypium hirsutum
  Clone ID: LIB3147-052-Q1-K1-C2
ggtctcgattcaaggagatccgccccagagaattgcagcctacatggtcgaaggccttgcagctcgcatggcagcatccggaaaatatctttacaaagctttaagatgcaaagagcccccttcttctgataggcttgcagcaatgcaaatcctctttgaagtgtgcccttgtttcaagtttggatttatggcagcaaatggtgcaattattgaggcatttaaaggtgagaaaagagtacatataatagattttgatataagtcaaggtagtcaatatattacactgattcaaacaatagctaagctgccgggtaagccacctcatttgaggttaaccggagttgatgaccctgagtcagtccaacgtcttaatggaggcctcgaaattgtcggactaaaacttgagaagctagcacaaatacttcgtgtacctatcgagtttcgagcagttccctcgaggacttca

SEQ ID NO: 26688 - DNA, 290 bp, Gossypium hirsutum
  Clone ID: LIB3147-052-Q1-K1-C3
gaggaaacgccaatagaggagccagcggccgcaccttttgaagctgagccggacacaacatgagatggctcgggtgggggaggaacctgaattttccatatccgaagctccacctgagctcaataccagggaattggtcaaagaataatcaagcgctgctgaggaatcgtaaaaagcaaaggatgaggcataggatgacacccctgcagtgcagacagaaacagttacagtggacgccaatgtagagaccgtggaacccaccttggaagcagcgttggcagatacaccat

SEQ ID NO: 26689 - DNA, 480 bp, Gossypium hirsutum
  unsure (1)..(480): unsure at all n locations; Clone ID: LIB3147-052-Q1-K1-C4
cccacgcgtccggcttaaaaccctaaccctagaaatttattcggaattcatcgctggtgctgtgtgacctcattcaaaatgcctcgccgtagctctggaaggtctgcttctcgccctgcccctcgtcctgctcctgctcgcaaccctgcacctcaaccagctcatcatgctcctgctccagctcctgctcagagtggaagtggtggatccttgctcggaggcataggctctaccatagctcagggcatggcatttggtactggaagtgctgtagctcacagggctgtggatgctgtgatgggtcctcgtactattcaacatgaaactgtggtttccgaggctgcagcttgccctgcaccagcaactacttacagtagtttagctggcactgattcatgcagcatccactacaatgcattccangattgcctgaatagctatggaagcgaactcagcaagtgtcagttctacatggatatg

SEQ ID NO: 26690 - DNA, 327 bp, Gossypium hirsutum
  Clone ID: LIB3147-052-Q1-K1-C5
agaaaatgctgaactgcataaaaggatagaggtaaggaaaatgataccaaagcgaaatctggatgaaatggggtcctcgagtccggttaagagtcaagaaatgaaacgttcacggtttgccaccataaggtcacccttgcctaattcttctcatgtcaatgggttgcatgagcaacttgctactagtctcactgaacgcatgaggttgtacgaaagtgctatttctggtcgtctcaccactagatatcctgctgcatcagctgaaccacatggactaactgttggttctttacctataaatggagttgcccagatggtaggaataaa

SEQ ID NO: 26691 - DNA, 234 bp, Gossypium hirsutum
  Clone ID: LIB3147-052-Q1-K1-C6
cagatttttctctcagtttgaaacgatgtctacggctggtgaagctgcttgttcttacgctgctgtgattctctatgatgatggaattcccatcaccgctgagaaaattgcaacaattgttaaagctgcaaatgtttcggttgaatcttattggccaagcttgtttgcaaagcttttcgaaaagtgcaacattgaggatcttataaccaatgttggtgctgctggttgctgtgc

SEQ ID NO: 26692 - DNA, 285 bp, Gossypium hirsutum
  Clone ID: LIB3147-052-Q1-K1-C8
tccgagtttttccttgaaaccatgtggacgtacacgtttattacaacaaggtaactcgtgatgggggattgtactaaacttctagattgcaagctatttttgaaagacttctaaccaagtgcttacaattgctgcgctatttgagtatggagttattcaaagctatctaactctactaaaaatgattcatcttcaccgacctagctcatcattgtacctatgaatactactgtccgcgaccttaaaactgaagctacaaaattttttgaagatgtatatgccatg

SEQ ID NO: 26693 - DNA, 265 bp, Gossypium hirsutum
  Clone ID: LIB3147-052-Q1-K1-C9
ctcatggaaggtctaattcgaattttgttggaaaacaggacagggcaactggggcatcgttaacttctagaagatagcttgtgcatttacctcaattgtgagttgtcttgtttgttttgatgaactgatactagtttgttattatagcatatttgatttcatggatgtttataatatcatcgctcaaccaaaaaaaaaaataaaaatataaaaaaaaaaaatataaaaaaaagattaacgatgtatttgttctttataatattca

SEQ ID NO: 26694 - DNA, 287 bp, Gossypium hirsutum
  Clone ID: LIB3147-052-Q1-K1-D1
gcgacccacgcgtcctccgacgactcctctcttagaacctgatatcacagttctttaagacaagccccgaccatcatggggggcttctgttgacggatcatccgcactttccactacagaaacacctcctactccaaacgttgccaaacccgacaaggactaaacacccgctgctcatgactataagcctatgcaatacaatcgccgctatgtcactgccgcagttcattctgggacgaaccccgtgctcacctatttagagaacttagaacccacatgtgcaacac

SEQ ID NO: 26695 - DNA, 447 bp, Gossypium hirsutum
  Clone ID: LIB3147-052-Q1-K1-D10
aaagacttcagccacccacgcagcccctttaccgatccaaacaatgggacgcgtccggacgaagactgtgaagaaatcgtctcgtcaggtaatcgagaggtactactctcgcatgacgcttgatttccacaccaacaaaaaggttatcgaagaagtagctattatcccatccaagaggctccggaacaagattgctgggttctcaacccatttgatgaaacggatccagaagggtccggttcgtggcatttctctgaagcttcaggaagaagagcgtgagcgtcgtatggatttgtccccgatgtatcggctattgctgttgattcaatagaagttgataaggaaaccattgatatgctttcacttcttggaatggccgatcttcctgggattgttaaggttgatccggttgctgttcaggttcctcaagtcgggttcggacgtggt

SEQ ID NO: 26696 - DNA, 486 bp, Gossypium hirsutum
  Clone ID: LIB3147-052-Q1-K1-D11
gcgtccgcccacgcgtccgcccacgcgtccgccgattgacaacacgttgtgctgacattaatttgctgggtgtgatgtaatgcaggacattctgaaagtgggtgaatgtgctgaagctcaatgcatcagtggctttactgctttggatgtccctcctcctcgtggacctctctggattttgggagatgccttcatgggtcgctaccacactgtgttcgattttggtaagcttaaagttgggtttgcagaatcagcataaatgggacctgatgttttcaatggccataaactatatatgtgtatgatttaaatttataaagatccaacgaaagcccaaaacctttaaaagaaatgatgctgtgttgcctgtaaatatttgcgttcctgcactgtaagattttggttttagaagaaatgaaaaatattgtgtttgcatttaatgaatggttactatattatttgattttcaactttccaaaaattata

SEQ ID NO: 26697 - DNA, 154 bp, Gossypium hirsutum
  Clone ID: LIB3147-052-Q1-K1-D12
gaaaagcatacatatataagaatgagtaatatgatttgcattccaaaaccatatgtcgttggcaaaaacaaaaaataagcgagaaaccctgcatctcgatttcacctttaaatgtaataaacaaagtaacgtgttttactgaattgcctttact

SEQ ID NO: 26698 - DNA, 439 bp, Gossypium hirsutum
  unsure (1)..(439): unsure at all n locations; Clone ID: LIB3147-052-Q1-K1-D2
ctttgctcgaccctgaaaccatgtcggcatacaggcctcatgcaacaagggaacgcgtgatggatttggctactaaacttcttgattgcaagcaatttttgaaagactacaaaccaagtgctcacaatccctgcgctatttgtgtttggtgtcatttagagctttctaaccctactaaagatgatccagttccaccgcccgagctcatcattttacctctcagtgctactgtcggcgaccttaaaactgaagctacaaaagtttttgaagatgtatatgccatgtttaagaggcttcanaatgaggacctacctgactatggttctgtagaagacagcataaccctgaaaatgttgattggcacaaactggtcagttcgagtgcgaggcaaatgtacatcaagacatggccttaaatcgttccgaatggagaggggaac

SEQ ID NO: 26699 - DNA, 476 bp, Gossypium hirsutum
  Clone ID: LIB3147-052-Q1-K1-D3
cccacgcgtccggcagaagagtaaaatagcaaagagtcacagctgaggcacggaagaagatgccttgcctaaaccgttcaaccaacgtcaatctcgacagcgtcgacacctgcgccatgctttccgaagccacctcttccgtcgctaaactcatcggcagaacctgaggcctatgtgatgatcgtgttgaagggttcagtacccatgtcatttggcggtaccgagcaggcagctgcctatggagaactggtatcaattgggggccttaatccagatgtgaacaagaaactgagtgctgcaattgctgcaattcttgaaaccaagctacaagtgcctaagtcacggctcttcctcaaatgctacgacaccaagggttccaactttggatggaacggatccaccttctgagcctggcatgttctgaatctctcgaaacatcagtgatgtctattcaaaacaatcttactcggatgatg

SEQ ID NO: 26700 - DNA, 486 bp, Gossypium hirsutum
  Clone ID: LIB3147-052-Q1-K1-D4
gtcggttacgatccgcgtgaagatttagcctataaggtctgccgccattctatcttgaaacgttcatcggttcctgtcgagatcactcccattgttcaatcagatctccgggaaaaaggcctttactggcgcgagcggaacaagctcgagagtaccgagttctcgttttcccggttcctgactccctacttggcgaattatgatggttgggcgctgtttatcgactgtgatttcctttacttagctgatataaaggaattaatggagttgattgatgataaatatgcgatcatgtgcgttcatcatgattataccccgaaagagaccacgaaaatggatggtgcagtgcagactttgtatcctcgaaagaattggtcctcgatggtgttgtacaattgcggtcatccgaagaacaagggtctgactccagaagttgtaaacaatcaaacgggcgcttttcttcataggttccagtggctcgaagat

SEQ ID NO: 26701 - DNA, 412 bp, Gossypium hirsutum
  Clone ID: LIB3147-052-Q1-K1-D5
cccacgcgtccgctcttaccacctgtaatcagagtccagtaagagaagcgacgacaatcacaaatgggtaaggttcacggatcgttggcacgtgccgggaaagtgagagggcaaactccaaaggtagccaagcaagacaagaagaagaagcccagaggtcgtgcctataagcggatgcaatacaatcgccgtttcgtcactgccgttgttggctttgggaagaagcgcggacccaactcgtcagagaagtgaggccggacatgtaggagtcttacattatattgataattttctagcttcattagcattacattgttatgatttagtttggagtctttctttgctttaagaaaactataacatccgtatctgttgttttgaaatatttactaaggccctccatttctgatcc

SEQ ID NO: 26702 - DNA, 385 bp, Gossypium hirsutum
  Clone ID: LIB3147-052-Q1-K1-D6
ccggggaataattgccgcgaccaacgagtcctccgggctcgcatccgcctacacatccatgttattacgtcatccatcatcataactgaaaacggtgttcgtttctagacgagacacttccattgctcaatcaaaacttccgtaaaaagggcgttaactgccgcgagctgaacaagcttcacatcacctacttcttcttatcccggctcctgacgacgcacttggcgaattatgatggtcgaactctgctgatcaactggcatatactcatcttaacagctatgcaacgaatgatggagtggattgattatgaatgtgaccatcactcttcattcatcatgataatgtcactgagagacaccacgaaaatacatggtccagagca

SEQ ID NO: 26703 - DNA, 463 bp, Gossypium hirsutum
  Clone ID: LIB3147-052-Q1-K1-D7
ggatgattggttaagatttaaggagatggatccatctgtaagcggacgaggtgctgagcctgtatttcgtgataagacaaaaggggagcgcatatcaaaagaagagtaccttaagtcaaaacgaaaaggagaagaaaagcccaaggagaaagagttggaatggggcaaaggcttagcccaaaaacgtgaagctgagactaggttgcaagatttagaactcgagaagagtaaaccatttgctcgaacaagggatgacccagagctcgacaatatgttgaaggatcgactaagatggggtgatcctatggctcatttggtcaagaaaaaacaacctgagctggttcttaaagacctaggggatgctgagaaaatgaaagagtcagggttcatagttcctcaagatattcccccgcatagttggatagtaagaaaactagatgctgcaccaaatcgttatggtata

SEQ ID NO: 26704 - DNA, 286 bp, Gossypium hirsutum
  unsure (1)..(286): unsure at all n locations; Clone ID: LIB3147-052-Q1-K1-D8
cccacgcatccggggcaaaaccgtaactaagtgaggtgccggctgagaaacggtggctggggttcggatcaaatcgttaggcttcctattgtttgacatgaccttcgcaggcatgaccttcaccatcaaaggcagaacgtcctcatgtggctgtcgcaagtgattttaacaaccttgagccactacatgtggaatcattattattgatgcacgcatcccaacctcgaagtacaaaacatggtggaantacaagaataaacacatgcaaatgcggaacctcatatat

SEQ ID NO: 26705 - DNA, 390 bp, Gossypium hirsutum
  Clone ID: LIB3147-052-Q1-K1-D9
cggacgcgtgggcggacgcgtgggggggtatcgattttcggaggcagtcatgtttgggtggaccattgctctttgtctaactgcaacgatgggctgatcgacgccattcatggatccaccgccatcaccatttctaacaattacttgacccatcataacaaggtcatgctattgggacatagtgacacttacaaacaagataagaacatgcaagtcaccattgcctttaatcactttggagaaggccttgtacaaagaatgcctagatgtaggcatggatactttcacgtggtgaacaatgattacacgcactgggaaatgtatgcaatcggtggcagtgctgatcctacaatcaacagccaaggcaatagatttcttgcaccaaatgat

SEQ ID NO: 26706 - DNA, 380 bp, Gossypium hirsutum
  Clone ID: LIB3147-052-Q1-K1-E1
tccttttctgtttccatcgaatcgatggccggtcataacgtcttcagggttttctggttaggggaaacgaacatgggaaaccgatcaatgttggtgatactggagattaactgtgaaatccatagatggattttggtttattttgattctttgtggcttctgaggaattactgattttgtgctaatttcgcctgtaaatatagaaatatgttaactgaaaaaggctgtttttttttattgcctgagtttataaagattagaatttggtgttgtagaaggatcgactaagatggggtgatcctatggctcatatggtcaaaaaaaaacaacctgagctggttcttaaagaacctagggatgcttataaaatgaaagagtca

SEQ ID NO: 26707 - DNA, 438 bp, Gossypium hirsutum
  Clone ID: LIB3147-052-Q1-K1-E10
gaggcggtgcctacaaaggaatatgtcgaataagtataatttatctcgtaggaaaaggggggacgaattcgatctccaaagggagagggaagagaaagaaaagaaggttaagaagcttcaagcgaagaagaataagatgaaggttgatggtagtgagaagaaaaagaagaaagctggaagtgggtttcaagtagggaaaagaaaattgaagaccaagttaactgaagttgctaaagctaaagcagctctagcaatggagcttgacaaatgagcttcatggttatgtaattttagagggaatattcaatatcctcttcttattcttctttttttatttttacttttatttctgttaaattttgattattgagatgaatgcatatgttagcttgagaaaaaaaaaaatttatttaaattatatattaataaatttggggc

SEQ ID NO: 26708 - DNA, 473 bp, Gossypium hirsutum
  Clone ID: LIB3147-052-Q1-K1-E11
cggacgcgtgggttttatttttacttgctttttctatttctcctttgactggttcaggtgggccgttgatagtttagtgattaatatatagaactctttaaagctttggaaagatccttttttttcacttggtatcaagcatggaagatcgcaaggagaaaaatgcaccatggctatcagtaccacaatttggtgattgggatcaaaagggacaggtgccagattactctcttgacttctcaaagatcagggaaatgaggaagcaaaacaagagggaagtttcaagagccagtcttggtaatgaagaagagttcattaacccaactgcaaacactgttagcactactcctagtgatgatcatcaccacaattaccctcagaaccatcactctccatctacaaggaaggagttctatagctacttcaattgctgcgtcaaggcttaagggttagggtttaagggctcgcatgaa

SEQ ID NO: 26709 - DNA, 488 bp, Gossypium hirsutum
  Clone ID: LIB3147-052-Q1-K1-E12
gaggaagcaaattgaacaactctacaagaaggctacacccaaaaagccccaaagggggtgcgtggtctccaagaaaggggttcaagttagggctggcaaggggaaagtccttgttgatcgacggatgaagaaggatgctagggcacgagcaacgggtaaatccggaaaaggctgttcaaagaagggaaagaatggtaaagttgataagaaaggtaaaggttctggcaaggcttcagggaggaagggaaacaaaaacaaaggtagccattcatgaaagaacaagttttgaaagatgcaattttagataaaaaattgaacaataaattacatttaggaactgttttcttttgttgtggttgatacttgatagattaaattgaaagttcgatgcttttttgagtgtgtgttgattcaaagtgtaatttgcctgttccatttgctgcataaatattgtcgtttaaaagcatatcctttgtgttctgtaccaa

SEQ ID NO: 26710 - DNA, 487 bp, Gossypium hirsutum
  unsure (1)..(487): unsure at all n locations; Clone ID: LIB3147-052-Q1-K1-E2
cccacgcgtccgcccacgcgtccggttgagaagtgcaatcgttctgaaggaacccctcaggtggcatatacatttgacgctgggccgaatgcagttttaattgcacgagatagaaaggcagctgctcaattaattcagcggctgctattctacttccctccaaagtctgatactgatctggacagctaccttctcggtgataagacgatacttaaagatgctggactcgagggattgaaggatgtggaagctttgtccccacctcctgaaaatggttcagctcagaaataccctggggatgtcagttacttcatctgtacaagacctgggaaaggccctattctgctttcaaatgacaaactggctcttcttgacccagaaactggacttcccaagtaagaagtgccatactttctctccgcaacattggtaaaacttatcttcaaggagagctgaatgtctntgagctgcaaaagtgtcagatagg

SEQ ID NO: 26711 - DNA, 335 bp, Gossypium hirsutum
  Clone ID: LIB3147-052-Q1-K1-E3
ccattccacgcctttgtattttgcattttcgtttttttggaattcatcatcttcgttgcgagtatacaatggcaggtcggggtaaaactcttggatccggggcctcgaagaaggcgacatcgaggagtagcaaggccgggcttcagtttccggtgggtcgtatcgctcggttccttaaggctggaaaatatgctgaacgtgtcggagctggagctcctgtttacctcgctgccgttcttgaatatcttgcggctgaggttctcgagcttgctggaaatgccgccagagacaacaagaaaactcgaattgtgccacgtcatatccagcttgctgtg

SEQ ID NO: 26712 - DNA, 483 bp, Gossypium hirsutum
  unsure (1)..(483): unsure at all n locations; Clone ID: LIB3147-052-Q1-K1-E4
ctattccatcatttggaaaccccaacacatcattttcttggtggataacacccccattagagtgttcaaaaatgctgaatccattggtgtaccattccccaagagccaacccatgaggatttactctagtttatggaatgctgatgattgggccacaaggggtggattagtgaaaactgattgggcaaaagcacctttcacagcttattacaggaacttcaatgccaatgcttgtgtctggtcaggaacaagttcatcatgtgctaaaactaactcggtctccgccggtgcatgggaaacaaacgaacttgatgcaccaggaagaagaagattaagatgggttcaaaaatatttcatgatttataactatngcactgatttgaaacgtttccctcaaggtgttccaccagagtgtaaacgcccaaggttctaaaatcaaacctgttccaccagagtgtaaacgcccagtgttctaaaatcaaa

SEQ ID NO: 26713 - DNA, 58 bp, Gossypium hirsutum
  Clone ID: LIB3147-052-Q1-K1-E5
cttacatctacgtccttaaagaattgtttccaatttatcaaatactgtgctatttgtt

SEQ ID NO: 26714 - DNA, 485 bp, Gossypium hirsutum
  Clone ID: LIB3147-052-Q1-K1-E6
gaaactcaaacagcagccctacgaaatgagttggttgagcctcgtagttccgaaggagaggggctgcctcgtcttgagagcctgcaaagaattcttcaaggccgagctgcagttgaagtgaatagtggtgttctgagtgtgtgcacagccttcttgtctggtgaacctgccacacggttgcgttatcaggagctacagcaacttattgctgcactccttgaatatatggctgcttgcaagcgggcaattcgagtacacttcagactaataggagaagaagaccaatatttccacacacaactagtgaatggatttcaatctctcacagcagagctatctcattacatccctgcaattctatcagagctctgctaatgttgtaagcattactagctccgatatatcttattggtgcacgctgctcataaagatcgtgacacattctttttgtagatctgtgctcatatgatgattgctgatgtctg

SEQ ID NO: 26715 - DNA, 312 bp, Gossypium hirsutum
  Clone ID: LIB3147-052-Q1-K1-E7
cttatctgcacgtacagggtgcgtggcgctcgggtacggcgctgtgctggcgtgtgtacgggagccatgctgacgtacggtgactcggcgtggttgctggaggtgtagtacagcgcctagaggttgcaggggctgcatgcggcgcaagtagaaagctactaaggtttatcggctgagacattgagcttattaggcctatattgggacaagtataggtatagcgtaatgtggactgaactagggtcttgagtctaatatcggacctatgtaataggactctaagcatataatggactattatagattttatct

SEQ ID NO: 26716 - DNA, 327 bp, Gossypium hirsutum
  Clone ID: LIB3147-052-Q1-K1-E8
ggcgcaggcgtccgaaatcccccttttttgcggcgattaacgtatgctgttcggggctcgaattccgaggatggggcataactcgcgtgtaccagatagagcaaaatcaaaaaaggcgctcaagcacgaacgggcaaagacagaaagaacactgactatggcttaaccccagaacaacgccatacaaagagatgcgtaggaccttgcacgaaaatgcggcaaacaaagcatgccaagcggcagttttaaggaacaatgctggaggcaacactaacaccaaaaactaattattcaatgatgccaaattgtgaatgagatatttcttct

SEQ ID NO: 26717 - DNA, 352 bp, Gossypium hirsutum
  unsure (1)..(352): unsure at all n locations; Clone ID: LIB3147-052-Q1-K1-F1
aaaccactctcacattaaatattgttagtgaaacaatggcgtcttcagctctgataagtgaggttgaggcagatgtagagattaaggcttctcctaagcagttccatgaaatggttggccacaaaccggaccatgggcaccatacttgttatgaccagattcaaggatgcgatttacatgaaggtgaatgggggaaagtcggtaccattgtccattggagttatgtgcatgatggaaaggctaaaaaggcanaggaagtagtggaagcaataaaccctgattagaatttggtcactttcagagtgatcgaaggagatctaatggaagagtataagaactttgtaatcacgat

SEQ ID NO: 26718 - DNA, 489 bp, Gossypium hirsutum
  Clone ID: LIB3147-052-Q1-K1-F10
ggtaatggttagctattataatcacttactgacgcctgttggtggggtacggtttctgagtgccaagccttccgttttgacagccgagaccaacaaccccatggcttctgatctctcctctgaccgctccgtcttctgcggcgactcctcctcttctcctatccaccgccgtgatctagttttcatcatcaatcctggaggtgctaatgggagaaccggtaaagagtggaagaaactacttccttatcttcaatcttgcctcggcagtgattgtaatgtgagtgttcttttttcctctcttttttttcggttaatataataagaaaatctcttgtatttgtctcagatatgtgaatctttgacttcgagtcctcatgcaattgacattactagggaggcaataagggagggtgaaagagtatgcagtgcctgggatgggtatgcttctttttccgctttaattaccaagttatgtacatagacagacat

SEQ ID NO: 26719 - DNA, 490 bp, Gossypium hirsutum
  Clone ID: LIB3147-052-Q1-K1-F12
atcgccattgtttactgctagtaaagaccctaagcctaacctaacctaacctaacgtgaggctgcatactgctcgcaaaatcattaggtagcaatgggtacagttacagtgaagttggttgttgtgattatgataacggtgggtttaatggtggaagggtcaagagcaataagcttgtgtgacatgaacgatgagggtctggaagcctgcaagccatcagtgacccagccggatcctgtcgacccaacacctcaatgctgcgaggctcttaaaggagctaacctcacatgcttgtgttcttataagaattcaatgttgctgccttctcttgggatcgatccaacactcgccatgggtttaccagcaaagtgcagtctcgatatgccttctgattgttgattaaggtattttcggaggataatgaaccatgaagcggctttcatgttcgtcagcctttcacaagttgtttttatttatttgtacgtggaaa

SEQ ID NO: 26720 - DNA, 488 bp, Gossypium hirsutum
  unsure (1)..(488): unsure at all n locations; Clone ID: LIB3147-052-Q1-K1-F2
aatggattgagcgagagtgtgaagatgagattatttgctttgggcagtgaagttttgttgcaaacctcatcgtctttatctggggtggtaaagaaacaaaggtgccaaaggagaaggaagttgggagaggaagaacaagctgcaatttctttgatggcattgtcgtgtgacacagtttttgcgtaaaatatgaaacagactagacaaaacaaaacaaacgaaatgggggtttcaaaaaggaggggggggggaaacactaaccgaaaaagctgtttcttcattttgtcttttttttgcctgggattttccttattagtgaaatgaaaaaaacccatgttattgactgctgctgctgcttcttctttnttttgttntggtttttttacgtaagagagagttgagggaagtaatgttttttggggatggctgatgatggttcaatcataatgtaaatagtagatcgagaatcaatgagaatggcgtatttt

SEQ ID NO: 26721 - DNA, 289 bp, Gossypium hirsutum
  Clone ID: LIB3147-052-Q1-K1-F3
cccacgcgttcactctaaccctagccctatatcatgattcaaacacgaaaggaggtaaaggcgaatcataagcctggagcgccaacctctcccagaataataaatcaaccaccaacgctggaaagaaatcagggaaggcagctaatgatccaaactgccatgacgcctggttgcgcctacttcacatttatggaggaggtccgcgagctatacaagaaggaccaccctaaacacaagtccatcgctgctgaaatcaaagccggaggagataaacggaagagcatttctg

SEQ ID NO: 26722 - DNA, 490 bp, Gossypium hirsutum
  Clone ID: LIB3147-052-Q1-K1-F4
cccacgcgtccgctctaaccctagccctctatcaggattcaaacatgaaaggaggtaaatgcaggtcggatgccaagagcgccaagctctccgtgaataagaaatcaaccacgaaagctggaaagaaatcggggaaggcagctaaggatccaaacaagccaaagaggcctgctagcgccttcttcgttttcatggaggagttccgcgagcaatacaagaaggagcaccctaaaaacaagtccgttgctgctgttggcaaagccggtggagataaatggaagagcctttctgaagctgaaaagcgaccttatgttgataaggccgagaaacgaaaggtcgagtatgaaaagaacatgaaagcctacaataagagacaggctgagggtccccaagaagatgaggaggaatctgagaagtctgtatctgaggtgaatgatgaagaagaagatgatgatgaaggcagtggagacgaagatgatgagtaggaaaa

SEQ ID NO: 26723 - DNA, 445 bp, Gossypium hirsutum
  Clone ID: LIB3147-052-Q1-K1-F5
ggacaaccttgaaaatctgcaggaggagattaatcgattccaggggagctggggaatggaccggtcatttatgcccagcagaaagtcgtttgagcgtgcaggacgctatgacatcgcacgggcattggagaaatggggcggccttcatgaagtttctcgtctactgtcactcaaggtgagacagaagcaccctagcagacaggggcaaactagtgccaaggaaaaacaggtagacaatatagcagcaagtaggggcatagaaagtgaagaaaagactccaatatcaaagccatatgtttcgcaaaatacacaaaagtggctcacgaagctaaaaggtttagacattaattgggttgaataaatgtgcctactactactattactaccagtctactggtttagtttctttccttatgtttacggagtataataaattgggtttaat

SEQ ID NO: 26724 - DNA, 417 bp, Gossypium hirsutum
  Clone ID: LIB3147-052-Q1-K1-F6
aggggacatagttactcgatctctactgtcaaattgtcaaaccattccatttggcattggatttatttttcattcaaatgttatttctagaatttgggttttattcttcggatttgtgattcatttttcggtgatgaaacttgcaaagagaatacgaacagtgaaatgggagatctagacagtgttgtattgtattgtataatagcttattctttctgtgttttcatccatatagatttttacagacgggacaggaaagaatctatgagcttgaaaagaagagattttggaaaaaaacaaccttcttatgataaaagccgaaaaacaacaagtcgattatgaaaagaacatgatagccttctataagaaacaggctgttggccctcaacaagatgaggaggaatcagagaagtctgc

SEQ ID NO: 26725 - DNA, 422 bp, Gossypium hirsutum
  unsure (1)..(422): unsure at all n locations; Clone ID: LIB3147-052-Q1-K1-F7
gtttccagtgaattacatgcttttcttgatcaagtgatagaggatcacctggctatgatgaatgaagatgatgatgatggtgatacatcagagaacaaagattttgttgatatccttcttcgtcttcagctcgatggcaagctcgatatcagtctaactcaagataacctcaaggctataatactggacatgtttgttggtggaacggataatatagctgcaacactggaatgggcaatggcagagcttgtgaaaaatcccagcataatgaagaaagctcaagaagaagtaagagcgattgttggtaagaaacanacaatcagtgagattgatgtcaatgaaatgcactacttgaaatgtgttgtgaaagagacactgagactccatgctcctgttatggtgtcaagacaaaattccacagc

SEQ ID NO: 26726 - DNA, 268 bp, Gossypium hirsutum
  Clone ID: LIB3147-052-Q1-K1-F8
acgcgtcctacgttcccaaactccactggcctgttttatcaaccaaacgacgctaatcgggggtgaatttcaatagcggcttgctcttctggaatagcaaatctttcgctgctgccgcattgaaatatcttgatgaacgtgatgctccactctatcctcataggtgtgctagcgcccattttgttttcatagtggagttgcgggagcactacttggatgcgcccccttctaactaattgcttgctgatagtagcacagccgccgtaga

SEQ ID NO: 26727 - DNA, 466 bp, Gossypium hirsutum
  Clone ID: LIB3147-052-Q1-K1-F9
taacaatgtcactagtaaagaatgcaagttcgtatcgatatatgctggaatatagtagttgactataaacatggttctgtttgttctttgagacacacagatgtgcattcagtgcaataaccaaactactcgaagttccaaggataggatgctacttcctcgttattctttgttcagacgtgatgacggtccacttcttctttctggtgaagaacacggggagctggatggaaattggtaatagcattagccatttcggaatcatgagtgcccaagttgtgtttgtgctgctactttttgctctcacaaatatatacacgaaagacatcgaaatcagatcagggagtcgagattcccgaaaagtaatgtgattcacgagaaaccagaactcattagcattataattaggtagccaaatttatttgcaaggtaaaagcatttagtttctcagattctatggctttcg

SEQ ID NO: 26728 - DNA, 344 bp, Gossypium hirsutum
  Clone ID: LIB3147-052-Q1-K1-G1
ggcgcgcccgcgcgtgcgaccacgcgtactatcacaaatggtgctggccttgtatcttacccaatcgacactgatcggtggagattgttattgaggtgttgcaaaactgtccaatacaatagctcgcttgctgccttttctcaaatctggaaacacgcacgtgccaagtctctcttcaagggtgctggagcttacatacttcgagccattgccggtgcgggcgtgctatatggatacgacactgtgcagctcattggtatcggaaggaagaactgatcccgtggtgcataaatctaaggaggaactatcacttccttcttttgttaagcattcagttttaaaga

SEQ ID NO: 26729 - DNA, 444 bp, Gossypium hirsutum
  Clone ID: LIB3147-052-Q1-K1-G10
cccacgcgtccgcccacgcgtccgaagtctatctttatttgaagtctgtgattaagagggagtatggtcaagatgcgaccaatgtcggtgatgaaggtggctttgctcctaatatccaggagaacaaggaaggacttgaattgttgaatactgccattgctaaagctggttacactggcaaagttgttattggaatggatgttgctgcatctgaattttacggaacagataaaacttacgacctgaacttcaaagaagagaacaatgacggtaaacaaaagatctcaggagatgctttgaaagatttatacaagtcattcgtagccgagtatccgattgtgtcaattgaagatccatttgaccaagatgattgggagcactactccaaactaaccaatgaaatcggagaaaaagttcagattgtaggagatgatcttttggtca

SEQ ID NO: 26730 - DNA, 484 bp, Gossypium hirsutum
  Clone ID: LIB3147-052-Q1-K1-G11
cccacgcgtccgctcctttctacaatgtaaaagatgtaatgaataagcttcaagaatgcggagattacataaacgaaaatctaaacaagctagacacacggggtccggtttcaaaatatatcctccatgacgaaaaccttagaggaagccttactttgactttcgacgaggcaatgtccggtgttgcttgtgatctcaattctcgtggattccatgtattgtgcaaggcaactgaagaggctgttggacatgtgaagccttactcaattaccggaagtttgccactcattcgggagctacaagatgaaggttttgatgttcaaactgctggctacggtttaatggccacgtaccacgccaagaacgagtactgccttctttccgatatgtgccaaggttatcacgtatttaccggcatcatcgctcagctagaggattgaaagatgacaatagattagatatgaactttcataatagttttctc

SEQ ID NO: 26731 - DNA, 474 bp, Gossypium hirsutum
  Clone ID: LIB3147-052-Q1-K1-G12
aggttttcaacaggggaatgtctgatcactctaccattaccatgaagaagattcttgagacctatgatggctttgagggactcaaaacactggtcgatgttggcggcggtactggagctacgcttaacatgcttgtcaccaagcacccttctataaagggcatcaactttgatttgcctcatgtcattgaggatgctcctgcttatcctggtgtggagcatgttggtggagacatgtttgaaagtgttccaaaaggagacgccatcttcatgaagtggatatgccacgattggagcgatgagcactgctccaagtttttgaagacgtgctacgaagctttaccggacaacggaaaagtaattgttgcagaatgtattctcccagattacccagatcctagccttgacacaaagttagttgtccatattgattgcatcatgttggctcacaatcctggtgggaaagagaggactg

SEQ ID NO: 26732 - DNA, 52 bp, Gossypium hirsutum
  Clone ID: LIB3147-052-Q1-K1-G3
aaggatcagggtaccgaatatggggaatcgtcggtgatcaaggagcaccttg

SEQ ID NO: 26733 - DNA, 235 bp, Gossypium hirsutum
  Clone ID: LIB3147-052-Q1-K1-G4
tcccacacgtcctcccacgcgtactcccactcgactttctgtgttttcatacacaccaaaaggggggttttattcaatgtaagctccatcatttaggtaacaattgacccactagcttactatatgccgctaaacttcacggctatacattcatctcaaaaaccaaatatattgggttgctccaaaacttatataatgtgaaacaatatccgtctaactttcactgctttattat

SEQ ID NO: 26734 - DNA, 423 bp, Gossypium hirsutum
  unsure (1)..(423): unsure at all n locations; Clone ID: LIB3147-052-Q1-K1-G5
cccacgcgtccggcctgtctcaatctcctttgaaatgcataaaattattactgatctaaaagtgcaggtacttttcctgcattttaaagatggctgccttcatttttgtagtgttctctgtatctagggatggaaccgatttcaagagaggacattgttgtatttggagttacatatttctacagtaaaaaagggtcattgaacatttgttaaaaaaagatacttctttttggcgatgttaaaacaggattatcttttcgcggattcttgaaattgatagtattgaattcggagcttccttttnaaaaaaaaaaataggataaaaagatagaaacacaaaaacaaaaaaatatccngaaaaaaaattcattaactattccgatttaaaagtaggaaagttccacttaaaccctttttaaaatt

SEQ ID NO: 26735 - DNA, 281 bp, Gossypium hirsutum
  Clone ID: LIB3147-052-Q1-K1-G6
gaaaatctgcatcacagtctaaacaatgaacttgggcttttatcagatgcactactgctgtgtttgtttgctatttttgctgtctgctagtggaaacatttgacccttgagcttacttctgttgcaaaacttggtagagatctatccaaagcaaaaaccattttaatgggttgctctaaaattttattcaatgtgaaacaattatgtggcaaattttgccttggtttatgagaggttcgtcttattaattaaaaaaaaaaacataccactgataatattag

SEQ ID NO: 26736 - DNA, 346 bp, Gossypium hirsutum
  Clone ID: LIB3147-052-Q1-K1-G8
cccacgcgtccgaagggtagaggatctacagcacctggctggacaggggcagggtttgagggggatggtagaacctacaggcataatttcaggtcctcttttctttactgaaggatcaggacaaactatcatgtacggggtatcaccagtctttctccccaatttatttcttgatctcgaccctggcatcctttcaatcgcatatagctggttgatatgaatgatgtcatatggcttttctttcttatttatgacctgaacagataagtgtcattagtattgactccaaggaggaaattatttagaatccatctctttaaagaaataataatataaacaatttggg

SEQ ID NO: 26737 - DNA, 427 bp, Gossypium hirsutum
  Clone ID: LIB3147-052-Q1-K1-G9
gttgtcgtttctatagctgaagaaactcttcaatggctgaaaagagcaaggttttgggcggcggatgaactggatatctgggaaagttcattgtggaagccagtgcaaaagagggtcatcccactttcgtttttgtaagggagtccaccgtctccgaccctgttaagggaaaacttgtcgacaacttcaagaacttaggggtccatttgttgttaggggatatgtacgaccatgagagtttggtcaaggcaataaagcaagttgatgtggtgatttcggttgtgggtcaaatgcagttagcagatcaagttaagatcattgctgctattaaagaagctgggaatgtcaagagatttttcccatcggaatttggaatggacgtggacaagaacaatgcggttgagccagcaaaatcgacattcgcaat

SEQ ID NO: 26738 - DNA, 378 bp, Gossypium hirsutum
  Clone ID: LIB3147-052-Q1-K1-H1
agcagattgtttcatctgatctgaaactccgtcgtccacttcccaaacaaagcaaatcgggggcgccgcctcctggaccatactccggcaccagcactctagctctcgtggctcgcgcatctgcttagtctctgggactcgattatgggagcatcaagctcaagtatctcaaggtcaacgcacggtctcaaaggaaagctgcagcaaaggcttatcactgaagcatgggtggtatttgatcatagttggtttgcatgagtgaattgagtttggtgtaggaataaagcatataaatagtatggtaccagatcttcatttcggcttaaagcttatatcgacaatgacattctgtacccaaatatttttagtattacgaac

SEQ ID NO: 26739 - DNA, 476 bp, Gossypium hirsutum
  Clone ID: LIB3147-052-Q1-K1-H10
cccacgcgtccgggaagaggcaatgaattggttgctttcacacatggatgatccagggagagatgctcctatctcccatgggtcacaaagtgctgagatatctatcgaccaatcaaaagttgataccttgatttcgtttggatttcaagaagaaattgctcgaatggcattgaaagcatcgggtggcgacattgaaaaagcaacagactggatatttaacaatcccagtgcctctgcttcatcagctatggatacaaatgcatcaagcaacggcccatctactccagtcgatgcaggactgcccgacggaggagggagatatcggcttttcggaatagtgagtcacatcggaacctcaactcagtgtggccattatgttgctcacatcctgaaagatggtagatgggtgattttcaatgatgataaggttggtgcttcgatcaatacacccaaggacatgggttacttatactttt

SEQ ID NO: 26740 - DNA, 401 bp, Gossypium hirsutum
  Clone ID: LIB3147-052-Q1-K1-H11
gccgtttcatttggaccagccttggttagctgttcctgggaaaaccactgggtgtgtggtgctggaccacttattggtggtgggctcgctggtctcgtctatgagttcatcttcattaaccagacccatgaacaactccccaattattagtcaataaaatttccggtgtatttaatttttgttcagctttcttttgtgcttaatttgtggccgctgatcttgtttactttttttattataatcttctatcaatgatcatcgtgcatggctgatggtattttcaatttggaaaaaaactggtatttgagtgataatatttatttatgaaaaaaaaaaaccttggccgtttaaatttcttatatttttaaatataaattatattttcttctctctctttatat

SEQ ID NO: 26741 - DNA, 464 bp, Gossypium hirsutum
  Clone ID: LIB3147-052-Q1-K1-H12
cccacgcgtccggaaaaactatgatcctcaaaaagacaagcgattcagtggatctgtggagctgcctcatattcctcgccccaagatgaagatttgcatgcttggagatgctcaacacgttgaagaggcagagaagataggtttggattatatggacgtggaagcattgaagaaactgaacaagaataagaagttggtgaagaagcttgcgaagaagtatcatgcctttttggcttctgaatctgtcatcaagcaaatcccacgtcttctgggtcctggtctcaacaaagcaggtaaattcccaacccttgtcactcaccaggaatcactagagtcgaaggtgaatgagacaaaggcaatggttaagttccagctgaagaaagttttatgcatgggagttgctgttgggaatgttgcaatggaggagaagcagatcttccaaaatgtgcaaatgagcgtcaatt

SEQ ID NO: 26742 - DNA, 368 bp, Gossypium hirsutum
  unsure (1)..(368): unsure at all n locations; Clone ID: LIB3147-052-Q1-K1-H2
cccacgcgtccggtcttatctacgggccattgcttcaagttgagtcactacggtaggaatgtgttgtgtacatcagaaaatttttttccctttgaatcattatatccctacttttatgttcaatgttttagcttagaatctatatagttcttgcgaagttacaaaccttaatccgaccattcttttcgcccatatctgctattaagaaatgaattatctgtgtaaaatctaattaggaaacttgtcactttatgcgatttgttggtaattttggatttagagtctagagagtggtttatgcaatggcttacttgtagcttcatcgngcttgttattttccacatatgttgattttttcttaaattgaa

SEQ ID NO: 26743 - DNA, 291 bp, Gossypium hirsutum
  Clone ID: LIB3147-052-Q1-K1-H3
agggatgtgtatattgatagagcataaacccgaacttaaaggtgacccctaccaaaccctcgtcaacttttaattgggggaccaccgtcacataacggggcaaggaccttactttacttaccaagactcgcaacttgctaatactggtggaaccggcctttttgaaagttttttttgccaaggtaaggctcaacaaaatcgcctccattttaatcttttctacactttctattttaagggaattggtgaactcccaaaagagacttttttcaaaccagttgacccacaccc

SEQ ID NO: 26744 - DNA, 487 bp, Gossypium hirsutum
  unsure (1)..(487): unsure at all n locations; Clone ID: LIB3147-052-Q1-K1-H4
tgcatctccatcactcattttccgatcacacaaacaaaaaccaaagccatggcgccgccacctggaccttactctggcaccagcactctcgctctcgtggctcgtgcatctgctttttcttttggacttgtttatgggaactttaagctcaagtacctcaagatgaaggcaaagtctcaaaggaaagctgaagcaaaggcacaccattgaagcagggggggggggtcttgttcatagttcaattgcatgcgtgacctgagggtttttctttttgtcgtaataatgcattaacaatgggattataccagtttttcattttggcctgcagctttttatggaccatggtgaactgcctttaataactttttcgggtagttatcatcttagccattcagggtttgtttatttcctgtagttaaacatgcaagctgctggngtgattatatattctccgcagttctaaataataaattcagtctcttttttg

SEQ ID NO: 26745 - DNA, 296 bp, Gossypium hirsutum
  Clone ID: LIB3147-052-Q1-K1-H5
tttgcgtgtcttctcatctctgctttttccccctttttatctttcttcttctttttcttcttctgcttcttcttcttcttactccagccgactttttccggcaaaacggtgtcagatctttgtgatctatagccggaagtttcatttcgagttcgacgatctcatccttcgatctttccactttcttcagcctaccatgaatcccgaatatgactatcttttcaagctacttcttattggagattccggtgttggaaaatcttgccttctttggagattggttgatgatacatatg

SEQ ID NO: 26746 - DNA, 406 bp, Gossypium hirsutum
  Clone ID: LIB3147-052-Q1-K1-H6
ctcaaccattttaaatatcaattggacgcacgcaacatgagctaacatgatctcgatcccgataactatcgccaaaatgcttctgctgtgtctcctctccacactcacaacaactcatcacccttcggtagcaacaaattacactactagttctcaatgccataatatccatatatacaaatattatataataatgcgcacggtggtactacattcaatgccttgtattaatgaatcatttgcttgcaactcgtctcggcttcttcttgttattgctgactggatgatcaggttctgcatggaggcaagatccgcttgcttctaacaatttatttttcattatgcagcagcacatgtatcggaatgaaattatttctatattattactactactgttgttttagcc

SEQ ID NO: 26747 - DNA, 483 bp, Gossypium hirsutum
  Clone ID: LIB3147-052-Q1-K1-H8
cccacgcgtccgcaccgccagttcatgaagcaggtcccgctaaatctttgatacaaaatgtgaaaagttatcctggtagagatgatggacatgaaccgactggatcccttgttcccaacctgaatccaaacatggccatttcgtcaaatgggattttgccagtgtcatccctgcgaaaggttaggtctggagcaccagatagaaaagtcagggatcggcccagcccactggggccaaatggaaaggttgatagtttctcacatcaatccatgggaactgaagacaatggcaataaattgggtttggagaatggggatttgacaccatatgattatcagcgaccattgcagcatcctcaagcagttgccgagcagcctcaaattgaaagagaaggtttggtgcgttccacgggaaagccaagggtgcttagcaaaggtcagactgaacgagccattgttgaagacggtgaggaggtggagcaat

SEQ ID NO: 26748 - DNA, 429 bp, Gossypium hirsutum
  Clone ID: LIB3147-052-Q1-K1-H9
gaaaattattttaatttctcataagctaaacagattttgtcaaatctcgaaatcatgagaggaatggcccgtacaaagcaaacagctaggaagtcgaccggtggaaaagctccaaggaagcagctagccacgaaggccgcccgtaagtctgctccggcgaccggcggagtgaagaagcctcaccgtttcaggccaggaaccgtggctttgagagagatccgtaagtaccagaagagcaccgaattgttgatcaggaagcttcctttccagaggctggtgagggaaatcgctcaagatttcaagactgatttaaggttccaaagcagcgccgtcgctgctcttcaagaagctgcggaggcttatctcgtcggattgtttgaagacactaacctttgtgcaattcatgctaagagggttactatcatgccc

SEQ ID NO: 26749 - DNA, 413 bp, Gossypium hirsutum
  unsure (1)..(413): unsure at all n locations; Clone ID: LIB3147-053-Q1-K1-A1
cccacgcgtncgggcaaatgagccttggaagcgtccttcattttccaatatcatggatcaggtgaaatcattgattaaaccctccactccttgaccagatcctggcatgccattgcttacctgcatggcaggaactcctgcaaagtcttcttgcacataatacatcattctttttgacatatgccttcaacactacacgctgttaactaatctaagaaatagtggttgtacatgtctgttctaatagacaattgggaccctttgtgattnttggcatggattaaaagctcccctccctcttgcccaagatcatttgttttcgattaagtaaaatttcacatgcaattacgtgaaaaagtgtatcatattatatcgtcttgcatggtttagttctatatgtaatgatttcaact

SEQ ID NO: 26750 - DNA, 439 bp, Gossypium hirsutum
  Clone ID: LIB3147-054-Q1-K1-A1
ctatttttgccccgtccgatgaagcttttaaagccgacggtgtacctgatctgagtaaggggaccaatgccgatcaagtttcgctgttagaataccatgcctcgccggattataaaccaaaggggactttaaagacgacgaaagatccgattactacattggctactagaggtgccgggaagttcgatttgacggtcaccgccgccggtgattccgtcacgcttcatactggaatcagtccatctagagtcgctgaagcagtttttgactccccaccggtcgtgatattcaccgtcgacaatgttttgttaccctccgagttgttcggaaagtcaccgtcgccagcacctgctcctgaaccagtttcttcaccttcaccgacaccttcttcattatccgaagcaccatcgccattagccgtttaccaccagttcaccaa

SEQ ID NO: 26751 - DNA, 446 bp, Gossypium hirsutum
  Clone ID: LIB3147-054-Q1-K1-A11
gtgggttttcaattaacaatggcctccaaagcaagcagctccctcttccaaagcctgagacgctacatcaagaagccatgggagataactggaccctgcgccgacccagagtacaaaaacgcggtgcccaaagccacggagtatcgtgttcgctgccctgccaccactttgcaaaagcccatcgtccctacctccgaccctgaaaccgtctcgacatcaaatactacagccgcgatcaacgcaggaaccgccctccgatccgccgtaccatcttgaagaaagatgacgtggtgaagatgatgaaagagaaaacctttgatgtcaacgattttccaaaggtctacttgactgctaaagttgaagaggatgagaatgcagttgggggaggctaccagaaataggcctctgagcactgagcacttatggctgaatttaatggtgcacct

SEQ ID NO: 26752 - DNA, 364 bp, Gossypium hirsutum
  unsure (1)..(364): unsure at all n locations; Clone ID: LIB3147-054-Q1-K1-A12
gcacagctgaaagctgtttgtgtggaggctttcatgctagctcttcgccgcgatgcaactgaggtgaaccatgaagattttaatgaaggcatcattcaggtgcaagctaagaagaaggcaagcctaaattactatgcataatgggagagcatttcagtgtaagaatgtgaaggtgggttgtgttgagaataggttgatatacatatttactctctgcccaattatattgtgttaggttttcctggtttgcacgtaattttatataaaaaaaaccatttacaaatggattgttctgtttaaaagactgccatctttttatttgaataagctagttcagcnnnnnataaaaanaataatttaaaaa

SEQ ID NO: 26753 - DNA, 409 bp, Gossypium hirsutum
  Clone ID: LIB3147-054-Q1-K1-A2
tgcagatcttcgttaagaccctgaccggcatgaccatcaccctctgaagtcgagagctccgacacgatcgacaacgttaaggcgaaaatccaagacacggaagggatcccaccagaccaacaacggctcatcttcgccggaaaacagctcgaagatggccggaccttggccgattacaacatccagaaggagtccaccctccatctcggcctccgactacgtggcggcatgcagatcttcgtcaaaaccctgaccggcaagaccataactttggaagtcgaaagctctgacaccattgacaacgtcaaggccaagatccaagacacggaatgcatgccaccagaccagcaaaggctcatctttgccgggaaacaactcgaggacggtcgcaccttggccgattacaaca

SEQ ID NO: 26754 - DNA, 351 bp, Gossypium hirsutum
  Clone ID: LIB3147-054-Q1-K1-A3
cccacgcgtccgcccacgcgtacgtgatgattaaagactctttgacataatggccattgaggttttatgtgagacccgtctgtaatagacacagaatttttttagaagtgaaaatatttttatatagtatgccaggaaaatcgcctgtccctttcagctcatccttgacatgtaattgtactctttagtataggtcggaaaaatgtttgaagtggttcatagtgcttgtagacattaatggtggtattaaaaaaaaggttcatcatggctttgatgtgagaaattgggtttgtttgacaatggagttgctccccaaaatatgtagaatgacatcaatgtttttaatgccat

SEQ ID NO: 26755 - DNA, 393 bp, Gossypium hirsutum
  Clone ID: LIB3147-054-Q1-K1-A4
acgcccacgcgtacgcggacgcgtgggggagtcgtactttataatattgcatcagtgacccaaggatttgtttggataacttatatgtgatcaaattgatgacgattgtaattaagccccactgatgtaaaatgaacaatctttattcgaacacaaaaagatgctaaagggagtggctaaaaaaaagccggttctagaaacattggaaaataaagtaaaaaacgggcggccgttttaaagggttcaattttccatcccccccctttcaattttatagcttttctatagtgccccctaaatccaattaaatggccacttttttacaccggggggactggaaaaaccctggagtcacccaatttattcgatttgcacaactttccccttttgccg

SEQ ID NO: 26756 - DNA, 306 bp, Gossypium hirsutum
  Clone ID: LIB3147-054-Q1-K1-A6
gaagctattgatttggtaaaaactgtttttgcatctgcatccgagagagatatatacactggagacaaactcgaacttgttatcataaatgcagctggtatccgccgggaatacatggaacttaggaaagattgattaatctccattctccaaactgggttaccacctcttatagatgtgtgagttcttgaaattgatggaatgactcttacaatgtgtctgatgcttgtactgcaactatttccttgcatttggatactttaaaatatggattgcagttgaattttatcttccgtctgttagacg

SEQ ID NO: 26757 - DNA, 461 bp, Gossypium hirsutum
  Clone ID: LIB3147-054-Q1-K1-A8
tcgaccacgcgtccgggtttgtgacagtaacacggacacaatacacttccatgccgtcttccagtgacaaacttcgcctggaaaagctaattggagctggtgacgaggatgcagacttccctgttaatgaggggtttaatataaaggcattggattcaggcagagcaagagcacagaaggttgctaaagggagtggcttaaagaaagccggttctagtaacattggtgaatcaggtgagaaacgacgaagtgggaaaaaggtttcctatgcaagtcaacctgtctcatttatatcgagtggcgtcatggtatctgaaactgatgagatcagaactacggatcctgaaggcacatcagaaagttacgaacacaaagatatcatcagatcagcacagtttggtgcattcgaggtacatacaaaagggttttggatccaaaattgatggcgaaaatggggattt

SEQ ID NO: 26758 - DNA, 463 bp, Gossypium hirsutum
  Clone ID: LIB3147-054-Q1-K1-A9
cccacgcgtccgcggagatggaagccacattgtacttgcatgcaatgaatcagagccccaagccatgtcacgtttctttctcgtacgcacgttcattgcagaacactgtgcttaagacatggcaaggacgtccagagaatgttgaagctgcacagaaggctcttttggtgcgtgcaaaggcaaactctctggctcaactcggaaaatactctctgcgagggtgaaagtgaagaagccatgaaaggtttgttcgttttgggctatacctatttatgcgtatgacactgtaatatctggtttttgttctttaaaggcatatttgtttctatgttttcaacttttcttttagttatgaaattgtattatctattttttttctttcttatttttgattttaatacatttatttatttggcaatgtttttttatttataaaaattttccctttttttatgcctttttt

SEQ ID NO: 26759 - DNA, 318 bp, Gossypium hirsutum
  Clone ID: LIB3147-054-Q1-K1-B1
aagaaggaagctttgaaggaaaagtttgagggtctttgcaaggtcatcaaggatgtgctgggtgacaaggttgaaaaggttgtggtttctgatcgtgtggttgactcaccttgctgtttagtgactggcgagtatggttggactgcaaacatggagagaatcatgaaggcccaggctttgagggataacagcatggctggttacatgtcaagcaagaagacaatggagatcaacccggagaaccccatcatggaaaacctgaaaaagaaagccattccaaaaaaaatggttaatttttgaaagaccctggtcttcttt

SEQ ID NO: 26760 - DNA, 447 bp, Gossypium hirsutum
  Clone ID: LIB3147-054-Q1-K1-B10
gtgaaactttcccctttatcctcttcttttttttattttcttctttgtaaatgaagaaacagaaagaaatagaagaatagtcaagaaaaaaaatgaaatgctatgataagtttttaaaaaagagagcaaatcacctcttttgatttcttgttgttttttattgctatgtgcatgtaaagaaaatacattgatttgtttttgggcttctagccaaaagaataaaaaaaataaagaaaaaaatacaagttttttctattttctttcctatttggtgttgttctcttgtttgtttgcaggtacatggtgtgtatggtgcgtgtatggagggtacgaaggcatatgtggcagggctggcgatcatacaaagctgttgcagcgcaaaaaggtgacctatggttttctagtgtttgggttttgggccagttgggctgtgtataccttttgggc

SEQ ID NO: 26761 - DNA, 437 bp, Gossypium hirsutum
  Clone ID: LIB3147-054-Q1-K1-B11
aattttctcccttactaacaacaaaaacccttaaatgtcggacgacgatcatcatttcggagccaaggctgatgccggcgcctccaaaacctatcctcagcaagccggtactatccgtaagaacggctatatcgtcattaaaggccgtccctgcaaggttgtggaagtttccacctccaagacggggaagcacggtcatgctaagtgtccttcgttgggatcgatatcttcactggcaagaagttggaagatattgttccctcctcccataactgtgatgttccgcatgtcaatcgtactgactaccaattgattgacatttctgaggatggatttgtgagcttgctgactgatagtggtgatactaaggacgatctcaggctcccaactgatgagaacttgttgaaacagatcaaggatgggtttggtgagggaaa

SEQ ID NO: 26762 - DNA, 433 bp, Gossypium hirsutum
  Clone ID: LIB3147-054-Q1-K1-B12
cccacgcgtccgaattacagtggcaaatccttctgatcttgtgaaagttcgacttcaagcggaagggcgattacctcctggagttcctaggcgctattctggggcacttaatgcttattcaactattgctagacaggaaggagttaaggctctttggaccgggattggacccaatatagcacgaaatgctattataaatgctgctctcttgcaagctacgatcaagtaaagcagacgattttgaaaatccctggattcactgataatgttgtcactcatctcctttctggtcttggagctggattttttgccgtctgtattggttctccagttgatgtggttaagtcaagaatgatgggagattcaacttacaagagcacgctcgattgttttatcaaaactttgaaaaatgatggacctatggctttttaca

SEQ ID NO: 26763 - DNA, 246 bp, Gossypium hirsutum
  Clone ID: LIB3147-054-Q1-K1-B2
cacgcgtcgcgccacgccgaccgtgaaaccaccacaatcctcctcgcatgccttctatcaactacaaagtgaaggtatacacgctcagcaatacgagcacacgacgatacaaacatccctggctatgacgtgtttttaaaaaaagacagtcgaatcacacggcttgatgcattgactcgcagaccgttattgctgtgagcgtcttacgaaaagccagctcttctatcgtgggccctatagccaata

SEQ ID NO: 26764 - DNA, 440 bp, Gossypium hirsutum
  Clone ID: LIB3147-054-Q1-K1-B3
acgtccacgcgtccgcccacgcgtgcgcccacgcgtccgctcggctgcttcaaccaaatcgaagctagggttttgcagggagctttaaaacgacaatgacgaccgtcgttcccacctccgaagaagatcccgtcctccccgtcgtccgattcacggccgacctctcttgggctgatgccggtcctgaggttgcggaaccgctagtgacgaggctttgtatggaagcgcaagagtgtatggtgatgggaagatggttggatttggcttctttaatgcttacttctgctgagttggtctttcccaaggtctctgataaagatctcgagtgtatcttcactgttatctgcaatctagcctcaaagctcgaaaatccagatgatgaacttgagatggcaaagctcatatctacaaaaatcagtcaacaaccaaatgataagcct

SEQ ID NO: 26765 - DNA, 368 bp, Gossypium hirsutum
  Clone ID: LIB3147-054-Q1-K1-B4
cacgcgtccagccacgcgtccgaaaaaacacaaaagactgaagtgtgttatatttgaaattgccaggtgaaagaacactgcgcgtggtgtttgagcccatcattgtttatggcactcattcttaccttggatcaagatgtaaaaaggagttcgtctttacactgtacaaaatccatgctaacgtacggacccgtgcagggcaatttgtataatatacgggagcctgcacacaattgagttgccaagatcttaaggttgcaggactgggagcacagtattgattcccatctgcttcaacttgcagatcatacgcataacaccaggtgaactcctaccgaagtgctcttaacggactttatttacaatgg

SEQ ID NO: 26766 - DNA, 204 bp, Gossypium hirsutum
  Clone ID: LIB3147-054-Q1-K1-B5
gttgtttgagcttgaacgaaaaacaatagcccatgaatgtctttttttttttatgcttctaggagtttttgctgatcattttcatttccgctaaatacttcactttagaacttctccatggatttgatgttcaaaggacatgtttttgcaacttaatatttgagtacacattatgtggtaaaaaataaatatgatctttacctt

SEQ ID NO: 26767 - DNA, 124 bp, Gossypium hirsutum
  Clone ID: LIB3147-054-Q1-K1-B6
cccacgcgtccgaaaaaacacaagaaactgaaatgtgttatatttggaattacaaggtgaaagtatgctgtgcctgcaatttgagcacggaattatttatggaactcattcttaccttgttatt

SEQ ID NO: 26768 - DNA, 395 bp, Gossypium hirsutum
  Clone ID: LIB3147-054-Q1-K1-B7
tggcttcccatgatgacggcaaactggggttctttgagttaaaggccaaaaaaccttcccgttccttatattcaagattggggagaaacaaaagcaggtttgtagaaaagcttggtgagccaagtcaaagctatgatgatttcacttcaagcctccctgctgatgaatgtcggtatgctggctatgattttgactttgtgactgctgagaattgccaaaaaagcaggattttcttcattgcatggtctcctgacacctcaaaggtgagaagcaagatgatttatgcaagctcaaaggacaggttcaagagagagttggacggtattcaaatagagctgctggccactgacccgactgagatgggacttgatgttattcgaagccgtgccaactaa

SEQ ID NO: 26769 - DNA, 301 bp, Gossypium hirsutum
  unsure (1)..(301): unsure at all n locations; Clone ID: LIB3147-054-Q1-K1-B8
ccgggncgaattcacgcgtcgccacgcgtgcggaaataaagaacaggaccatggccttctatttataatacggacacattatagaacaattgcaagatgccgaggacgcagtctaagattaaaggctcgtatatggagaatcgtccaaggatgtacatgggagttcatctttccacggaacaaactcaatggacatgtacggaccttggaagagcaaatcgataaatgtacgtgcgcagtcacattgaactgatcctgacatcgaaagatgacacctccaagaacaaaccattgactacgt

SEQ ID NO: 26770 - DNA, 448 bp, Gossypium hirsutum
  Clone ID: LIB3147-054-Q1-K1-B9
ctgaggttgatgatacatccgttggtcgtgttggttctccacttccttgctcctttgtcaggttagtagattggcctgaaggtgggtatttaattaatgattcaccaatgcctcgtggagaaatagtagtcggtggttccagtgtaacacttggatactttaaaaatgaagagaaaacaaaagaagtgtacaaggttgatgagagaggatgaggtggttctatactggtgatgtaggacagtttcacgctgacggttgcctcgagataattgaccgtaaaaaggacattgtcaagcttcagcatggggaatatgtttctttgggaaaggttgaggctgctctcagcatcaatccctatgttgacaatattatgttgcatgctgatccgttccatagttactgtgtggctcttgttgtggcttcccagcatgcagtggaagattgggct

SEQ ID NO: 26771 - DNA, 338 bp, Gossypium hirsutum
  Clone ID: LIB3147-054-Q1-K1-C1
cttcgcccacgcgtccggccacgcgtccggccacgcgtgcgtccacgcgttcgcaagaagccatgtgtttctcgctcaaactgacgcccaaatacatcctccacattcctgaccctaatggggggtaaaatgagattgcatttttaaacatttctggaatccgcaattacagatgccttgtctctcataatcccaacaaactctctagctcaatcaacggcgataacaacattgtttatggcccaactgaagacggcaattattcaacgaacaatgatggttcgacggctggaaacaccgaggctggtcaaggagaatcgtttttttcatctaaagat

SEQ ID NO: 26772 - DNA, 415 bp, Gossypium hirsutum
  Clone ID: LIB3147-054-Q1-K1-C10
actttgtttaatttcatagggagtttatgtgtttatggtactatttgtaagcatttgaacgtgccttttgtgtttggagggacaagtgagtgttgggaagagagttatatagacggctccgatgccagactcgtcgccgaacaacaaatttgggcagccaccaggaatggcgatggagtgtcttccaacggcgaggcgttcaatgcatcaacggttcgagtttcagttggaaggagatatggccaatattgggaaagaaatttggagttagagtgcctaaagagacgtgtatggaggaattttggtatacgagggccatgggagacaagaaaagggtatgggaagatatagtggagaaggaaaggttggtggagacgaagatggaagaagtggcaaattggcaattcatggacat

SEQ ID NO: 26773 - DNA, 448 bp, Gossypium hirsutum
  Clone ID: LIB3147-054-Q1-K1-C11
gctcgtcgagtctggaaagattactatgcttaggttgatgctatggtgtacctggtagatgcctatgataaagaaaggtttgcagaatcaaagaaggaactggatgcactcctttccgatgaggcccttgccaatgtcccgtttcttatactaggaaacaagatcgatataccatacgctgcctcagaggacgagttacgataccattcgggctcacaaactttaccaccggcaagggtaaggtaaacctggcagactcaaacgtccgtccactagaagtatttatgtgcagcatcgtccgcaaaatgggttacggcaatggcttcaagtggatgtctcaatatatcaaatagagaaaatggtctcaaagatgcagtaggaaagatcttacagggtgccaaaccccaaattccataactcccaacttaaagggggggacaaagaaact

SEQ ID NO: 26774 - DNA, 445 bp, Gossypium hirsutum
  unsure (1)..(445): unsure at all n locations; Clone ID: LIB3147-054-Q1-K1-C12
ggcaccaaaacataattttcacggcacaagtatacttagaccagcactccagaatgttgctgctatggataaggttgctgtaattgagctgttctttccttctatcttcagagctgtagtctcattgcatccagctggttcaacagatccagattcagtggctttcttttctccggacgagggcggcagctacatgcattctagacttcttcggtctaccatgtatttagacagataacggagcacgctactgttgccctccagtatttccttggaatcagaagtaaaacagcattgcattctcttttgcactggatatgcagctaccaaactttattcaccaaagtctgcaacaaatgcggacggctattggcaatggacaggcaatcagctttaatcttacctnctgtccatcgtccttatcgaactctgtctgtttcaaaac

SEQ ID NO: 26775 - DNA, 440 bp, Gossypium hirsutum
  Clone ID: LIB3147-054-Q1-K1-C2
gcgtccgaagaatcgccattctaatggacaaggccgttggcctgtgaaatcagcaaaattcattctggatttgctcaggaatgccgagagcaatgctgaggtgaaaggcttggatgtagattcacttatcgtatctcacatccaagtaaaccaagcacagaagcaaaggcgccgaacatatcgtgcacatggaagaattaacccctacatgtcttcaccgtgtcacattgaactgatcctgtctgagaaagaggaagccgtcaaaaaagagccggagactcagttggctccgaggaaatcaaagggtgcttcagtttaaactgctgagtgatggattgttagtcggaagcttttacaattttctttttgttgtctctgtaatgagaacagttttgtttacttcacaatggggtgcttaagacttataagtttggagattc

SEQ ID NO: 26776 - DNA, 233 bp, Gossypium hirsutum
  Clone ID: LIB3147-054-Q1-K1-C3
cttttagtccgttttgcaagcgaacgtggtggaaacggcacgcgtggaggccgaaacttgcggcgactggagactgctggggtgtttgagggcggcggctacttgctgctactagtgataatggtaaaataaattttggcattcttattttcaaaaaaaaaaaacaaaagaaaaaaaaaaaaataaaaaaaaaagaaaaaaaaaaaaaaaaagaaaaaaaagaaaataaaaat

SEQ ID NO: 26777 - DNA, 279 bp, Gossypium hirsutum
  Clone ID: LIB3147-054-Q1-K1-C5
gcgactgtctttctcttcaagtctgcaccgaggtcaccaagctttctttgttactttcttagggcttaaattggctagtaaatgaatatagttccaggaaattcgccagaccagtatctttattttacctggtatctgtaaatcctataatttctaatagaaatttcttgtttcgggttgtaaaagataaacattaggattcaagctagcattatgtaatggtttataggcgcttctgcctgagaaaaaaatacaactgataaaagaaaagaggttgaa

SEQ ID NO: 26778 - DNA, 431 bp, Gossypium hirsutum
  Clone ID: LIB3147-054-Q1-K1-C6
cccacgcgtccgcccacgcgttcgcccacgcgtccgcagaattcggattcccggaataaagtatctagggtttgcaaaagaggtgaaacccgcaaatggaaggctgggacccgaatacgaagtcgacgctaacacagatcccgctactgacgacgaaggcgggtcccagagacggagcggcatggactcagcggctgaaggaggagtataaggctttgatcgcctacacgcagatgaataagtccaacgacaacgattggttccggatatccgccgccaatccggaagggacgcgttggaccggcaagtgttggtacgtccataaccttctcaagtacgaattcgatctccagtttgatatccccgttacttatccggccactgctcccgagctcgagttgcccgaacttgatggcaagactcagaagatg

SEQ ID NO: 26779 - DNA, 440 bp, Gossypium hirsutum
  Clone ID: LIB3147-054-Q1-K1-C7
cccacgcgtccgagtggacagcctatgccgtttactgctttggctacatcacttgcaaatgcagcacctgaacagcagaggacgatgcttggtgaaagcttgtatccccttgtggagcgactggagcgtgatgcaacagccaaggttactggcatgcttcttgagatggaccaaacggaggttttgcatctcctcgaatcaccggaagctttgaaggcaaaagtagcagaggccatggaggttttgagaagtgttgacgctcagcaacagtccaacaatccagctgaccagctgtccttaactgtcactgaatgacaaccttgtctcctgagtgaatgaacttgagtcgagattcttggcagagaagttgctagacccttttatcaaaattgggcttatctttaagtacggttggattttacaacgtttattctttttgg

SEQ ID NO: 26780 - DNA, 426 bp, Gossypium hirsutum
  Clone ID: LIB3147-054-Q1-K1-C8
cccacgcgtccgcggttcccgagattacaagtgctgtttttgaaccctcaagcatgatggctaaatgtgatccgaggcatgggaagtacatggcatgttgtttaatgtaccgtggagacattgtacccaaggatgtcaatgctgctgttgctaccatcaaaactaagcggactgttcagtttgtagactggtgtcctactggtttcaagtgtggtatcaactatcagccacccacagtggtaccaggaggtgatcttgctcgggtgcaacgagcagtgtgtatgatcagtaacaacacatctgtggccgaggttttctcccgaatcgaccacaagtttgatctcatgtatgccaagagagcctttgttcactggtatgtaagtgagggaatggaggaaggtgaattctccgaagcccgggaagatc

SEQ ID NO: 26781 - DNA, 187 bp, Gossypium hirsutum
  Clone ID: LIB3147-054-Q1-K1-C9
ggggtgcttaatacatacctttttgctaatgcctccatacttcaaaatactcctcccttactttacaacttattccactgctataacccttgatttacccaccttaaatctaattaaaccccatccttattaaaccataatggccttgaaaaacagcgccttccccaatctaccttcctaacaaaaa

SEQ ID NO: 26782 - DNA, 400 bp, Gossypium hirsutum
  Clone ID: LIB3147-054-Q1-K1-D1
tgaaaaagaagatggctttatagccgaatgagaaaaataaagaaaaatacaatattttcttgtctccttttttcttttttgctgttgtgctgtgctgtttttgtcttcatgcagatgggggaggacgtagaggcacgagcggcgctggggagtacggaggtcgtgcatgggagcgtacggaggctagaggctacggcgctaaggtggaaaccctagggtttctgtggataatctggtcttgggccgcttgggcccgatttgttttatttgggtattgggttatgggtttgtttgggcttagaattgggttttttgggtattgggccattgtaattgttttgggctgttttgtaatatttggactgatggccttttgatttggatattaatatttttgttt

SEQ ID NO: 26783 - DNA, 418 bp, Gossypium hirsutum
  Clone ID: LIB3147-054-Q1-K1-D10
cgacgaactaaccctggagggtatcaagcatttttatgttaatgttgaaaaggaagagtggaggctggaaacactttgcgatctctatgaaacactggccattacccaaagtgtcattttcgtgaacacaaggcgcaaggttgactggctaactgacaagatgcgaagtcgagaccacacagtttctgccacccatggagacatggccagaatacgcgtgatgtcatcatgcgggaattccgttctggttcttcccgtgttctcatcactaccgatctcttagcccgtggtattgatgtgcagcaagtctcccttgtcataaactacgatctggctactcaaccagaaaactacctccaccgaatcggaagaagtggtagggttgggagaaaaggtgttgccataaactttgtgactc

SEQ ID NO: 26784 - DNA, 225 bp, Gossypium hirsutum
  Clone ID: LIB3147-054-Q1-K1-D11
cccacgcgtccgcaaggacttccttttaattttttgccttttgttcattagataaatgtcagatgcagttcttggtaataaatttacgcattaaaatttaatgcgggttacaaaaaaaaaaaaaaaaaaaaaaaaaaaaaaaaaaaaaaaaaaaaaaaaaaaaaaaaaaaaaaaaaaaaaaaaaaaaaaaaaaattgggggggccttttataagaaacaaaaatt

SEQ ID NO: 26785 - DNA, 443 bp, Gossypium hirsutum
  Clone ID: LIB3147-054-Q1-K1-D12
cccacgcgtccggttgaacccatatgcgatttctgctaggaggatgtctcttttagccgagggacaacgtgttaaagctaagaaggagaagcttgacaagaagaggaagcccatttctaaggaggaggcaacagcaatcaagtcagcaggcaaagcatggtatcagactatgatctccgacagtgattacacagagtttgagaactttctaagtggttgggtgtgtctcagtaattttagtttttgatttagatatttgttgcagtcaatgttgtcaactttgttatggtgttgtctttttagttattttgatgttttgagttgtgggtggaaggaaaattagtgaaatatcatgctctaatacgcttctgttttgtcctcctcccctgttttcgcattctatggctagtggaatagtttctataatatgagaacaagaaatt

SEQ ID NO: 26786 - DNA, 443 bp, Gossypium hirsutum
  Clone ID: LIB3147-054-Q1-K1-D2
cccacgcgtccgctcgagcagaacgcaactattgctttccaggccgctatctggaggtggatgaccccaatcaagaagaaccaaccttcagcacacgacattttcgtgggcaactggaaaccaaccaagaacgacacagaggaaaaacggggtcctacttttggctccaccatgaacgttctctacggagattacacttgcgggcaaggcgatattgatcccatgaacatcatcatctcccattaccttcattaccttgacttactaggtgtcgggcgagaggaagcagggccacacgaggagctaagctgtgccgagcagaaagcattcaacccaaccccagctccacctgctgccagtgcttcctaatctttggttcagccaatttcattgttaaaatgtagttgtcaatgaagggtaatttaataagagagctgggcaat

SEQ ID NO: 26787 - DNA, 439 bp, Gossypium hirsutum
  Clone ID: LIB3147-054-Q1-K1-D3
cccacgcgtccgctgagccctgatgttgtgaacatattgccaggcttgcagggggataagatagaagatgagttgcaaccagacaaggtgaggaagccatatttgtcggaggcatggctggtacaaggccctgtaccacctcccattccaacatgtgtatccaagaattcagcaaaggatatgaaggcacaaatcaagttttgggccatagctgtaggcaactaatgttcgacaagagtgctgagaatagcattaaaaacatcacccatttctcgtaccaaatttgacataaattttgcttttcttttctatttctactctcatttatccatttaggactgatatcctttctattttgcccggtgctcatgtttcgaaggcctatagaagcagagtccttgtctgatactatgaaatcttatgtaaacaaaaatctttt

SEQ ID NO: 26788 - DNA, 417 bp, Gossypium hirsutum
  Clone ID: LIB3147-054-Q1-K1-D4
cccacgcgtccgcccacgcgtccgaatcaaaaccatgcccaacagataagttgatttgttgtttttttctgaattactgatcgcgagtcactttcaatctcatcctctctcaaccctagagataactgaagatggacgcctagagacatgccatcgcttccgcagcaaaaacagaagcatcaaagttgattcaaacccacggatcagtcggcgcgacccatctacccgtctgaagtcgattcactgaacactccctgaaaacatgctccttcgtttctgtcccattttggcacctttgacaagttgcggacgccatcagtcttctataatgtagattaccaaaagtaggcaaaaaattacaagaaaacctccagtttgtaattttaatttttgaaagtagatctaggctccacaatc

SEQ ID NO: 26789 - DNA, 193 bp, Gossypium hirsutum
  Clone ID: LIB3147-054-Q1-K1-D5
tctctttagtgaaaaaaacaaaaaccaactttttccaattttccacaaacaaaaaaaagggataatcgggaaaatataaaaaaacacattacacacaaacattctccttcccttcttaaacccccaacttgcgtccccctctaaacaaactccactcttttttctcttcccccccaacttaattttcctttct

SEQ ID NO: 26790 - DNA, 451 bp, Gossypium hirsutum
  Clone ID: LIB3147-054-Q1-K1-D6
cgtgacgccacacgttcgcccacgcgttcgtagatgctaagcgccggaaggtcaccgtctgtgtggtgataactgtggtgactaaggaagcccggcgactatgaatctttgttctaaatgatacagagatttacgacttaaagaacaacaacaagcttgttctgctaaatcgactataatacctgtccttcatcttgagtcaaccgcaggcgaatctgtgttctcacgcacctatcctgactatgcctgaagacaaaggagtcccgctgaccgtgtcggctgtcgcgatctctacggtggcggatcagaaacgacaagagcgacagcaactttatctagtgcaacaacaacaacgacggcaaccgactcggtgcactgttcgcaagaaactggtcggtttgaccggattcaagtgcatgtgcaggattacgtttagctggtcacacaggta

SEQ ID NO: 26791 - DNA, 459 bp, Gossypium hirsutum
  Clone ID: LIB3147-054-Q1-K1-D7
cccgggcgagaagtgctctttgcaagacttcgattatggctgcttcagatatcttcaatgcctacggcgaaaaattgcttgagtcaactgattctagtgcatttgatcagctgttactgcagttgttactgaaagcctctcaggacaagaagtttgtgtgtgaagaagccgataagtcgctgacagcaatggttaactccattgctgctttacccctgcttcaaaagctccgcggatttgttaaccatggcaaccttagagtcagagccaaagctgcagtttccatttccaattctgtttacaaaatgggatcagaagaaatcaaagagttcgggtcagttaccttgcttcaaatggcttcggatttgctaaacgataggctgccagaggccagagaagcagcaagaagcattgtactttcagtatacgaggcatttacagaaaacgaaaagcttgata

SEQ ID NO: 26792 - DNA, 219 bp, Gossypium hirsutum
  Clone ID: LIB3147-054-Q1-K1-D8
cccacgcgtccgcccacgcgtccgcggacgcgtgggcgaagttgaaactcacgcctaatgtagccttttgcatttacagatggcatgtatgataataaataaatgggcatacgtcctaaatgaaaatgcttccttaatatagtgatgtaagtggaagtataaagcaataaaattgtgcttttacttaccaaaggacaaatccgcgcgacccatataccc

SEQ ID NO: 26793 - DNA, 445 bp, Gossypium hirsutum
  Clone ID: LIB3147-054-Q1-K1-D9
gtgacagagagagagagagagagagagagatttagagagcgagagcgagagagagagagaagaaagatgaaaaagatagagagaaaaaagagagggagagagtgaccccttttaactatcttaaaagtatgaactatatttgaagtgatccttggtaattgtaatggagcactttacatttctaatataatttttagcttatttttacagagcctcataaaaaaaaaaaaaaaaaaaaaaaaaaaaaaaaaaaaaaaaaaaaaaaaaaatataaaaataaaaattaaaaaataaagaataattaaaattttaaattaaaagtaaattactttttatttgaattataactttttaattttttttgtaacaaaaaataaaaagggacccctttttaaaaattaaaattttttttatccgggagatacaaatctaaaccttttttttt

SEQ ID NO: 26794 - DNA, 424 bp, Gossypium hirsutum
  Clone ID: LIB3147-054-Q1-K1-E1
gaaaaatgcaggaaccggaactagctaccatcatacatgatcttttcccacacaccgaagattattatttctgaaagagatgacatgatgctggagtgggtaggagatcatcatgtaagcctgtttttgttctactgaaaaaagtcgtatccagtgcgtaaggctactgctataagcaagaactagaaagtcccattgtaggcacaaccatttgacggtgtttgtagcaaataaacctgttagtctacattaagttataaaaccttcctagtcctagcgtttgtgaggaactttaagattctatcagtcatgagtccgaacgagtccgtgtttcaaagcatgatctttttagtttgtaaagtgcattgattgttgaacttttatggtgcgtgtttgaatgatgaaagacctcgacatattatct

SEQ ID NO: 26795 - DNA, 441 bp, Gossypium hirsutum
  Clone ID: LIB3147-054-Q1-K1-E10
gctaaatgaaagacgggcaatgcaagggaagagccgaaatgacttttttgattttgtccttgaagaacttcagaaagagggaacaattctaacagaggcaattgctctggatttgatgttcgttctactatttgctagctttgaaacaacttccctggctctaactttagcaattaaattcctttctgacgacccttcagtgctgaaaaactaagggaagagcatgaagcaattctacgaaatagggaagacacagactctggacttacatggaaagaatataaatcaatgacatatacattccagttcatcaatgaaacagttagactagcaaatatagtgccgggaatcttcaggaaagcactaagagaaatccaattcaaaggatataccattccagctggttgggcagtaatggtgtgtcccccagctgtgcacctg

SEQ ID NO: 26796 - DNA, 446 bp, Gossypium hirsutum
  unsure (1)..(446): unsure at all n locations; Clone ID: LIB3147-054-Q1-K1-E11
cggaanttccccgggtcgagcccgacgccgtccggacccgtttcccctcatcgaatttcgtcaagggcttatcgccnngcccatctcatagcgcctccggcaagggggtgagccttccttcatnggacctgagtacttgtcaagaaccggcaaatctcaagggatnacttcctccatantgatcnnctgattggtacctanttatcagagccnnngcttccatgtgcgaaggaataatatatnnnctgagggngtaggtcttnnggtgttggtgccctttagaaggatntnttacggtggggctatagaagaaatgtgaagccgtcccctcgccatttctgtaaagagnncagtggatctgttgcttcgccacaattcttcaacatattgcaagaacgttaaacatcattgatatntgatccctaaagggtggtagggagaaatca

SEQ ID NO: 26797 - DNA, 319 bp, Gossypium hirsutum
  unsure (1)..(319): unsure at all n locations; Clone ID: LIB3147-054-Q1-K1-E3
ccggnctggagaacccggcgcgaccgacgcgtacgcccacgcgtccggaaacgctaaatgggccttccctacatgcgcaccgttccgactcccaagagtgattctggcgactggtaaatcgatcaaggctctcgctataatggtacatatgaagggtcgagcacatctagcatgaagaccacaagccacgaacagtggagatagctcgaaatataccatgagatgagatagttctgtaattaggatttttatttaagatatttttattgtttgggaataagcgagaactgatgtggcgtggaatcatttaatgaaaggt

SEQ ID NO: 26798 - DNA, 460 bp, Gossypium hirsutum
  Clone ID: LIB3147-054-Q1-K1-E4
ggggagcacgcgtccgcccacgcgtccgggggttaatgatgatgattattctcctgaaaccaattagcggcagagaggccgtcctagtacttaggagcaacgccacttaccagtgcaatggccttctcggcggctgcgttatccgggaagaattggagtcggagctggatttgttgatgatagattctaccgttatcagaatcctccagcaaggtagcggtcacatatctatagaggcgcttaatgctaataaggcagcagcgaagccttgccctgaaaattattcgaattgtattacaaaatccaagtcaggtaaacataattgtaatggtaataaccttttttgtagatagtgatgttgatcaacctatctatgacaataagcgccctatgcattattcgaatcgtaaaggttgctacttttgtggactctatttatttctactttgctttttgttgc

SEQ ID NO: 26799 - DNA, 429 bp, Gossypium hirsutum
  Clone ID: LIB3147-054-Q1-K1-E5
agcaaataatgttgttcctactcagatggttgaggaaaacgacaaggatctgcttttaacgacttcagagaaggaagaaactaaaggttcacgcaataatggttctgcttatactgttccttatgatggttcgtctacatccgtctttgcctcacaagcacagatagagtcggcagtttcaaatcccaccttggcaggccattctcctcaagcaagcttcgcaatagacgatcttcttggtcttggcataccagcaacacctgctgtgccgtctcctcctcaattgaagcttaacacaaaagctgctctagatccaagcacatttcagcagaagtggcgccaattgcctgttgctttgtcgcaggaaatctcggtaaacccttaaggtgttgcagcattgacggctcctcaagcgttacttcgacacat

SEQ ID NO: 26800 - DNA, 386 bp, Gossypium hirsutum
  Clone ID: LIB3147-054-Q1-K1-E6
tcgattaagcaatggctggagatagggcctcgttaacgcaccttaagcctgggcaacgtctacagcccgccgacgttcaagctgctcgccatgtggggcgtctttgccactaccggcgctctttggctcattcagccttttgattggttgaagaagacctttctggagaaaccagagtcggattatcaagcaagtgggacatcttgcaactcattgcggccttgattataggaattgctgatgaacacattatggaagagaataataataatagtgtactaagagtcattttttgcggtttattgttaagagaacaagcctctttgcttttggtatcaagtactgcgaagttttgaacctttcaccttccctatgcataattcaaa

SEQ ID NO: 26801 - DNA, 444 bp, Gossypium hirsutum
  Clone ID: LIB3147-054-Q1-K1-E7
gtctatagaccctgaatcaaagatgatcaataaggatcaaggacgcatcgagaaatggaggcttagaaaggcctttgacgatgaagagcgtccatatttgccaaagcacatcctctaccgacaaaaagaacaatttagcgatggcgttggttatagttggatcgatggtcttaaggcgcatgctgccaaaaatgttactgataagatgatgcttaatgcttcttacatatttcctcacaacacgccaacgacaaaagaagcatattactacaggatgatattcgagagattcttccctcagaactcggctagattgacagtccctggaggagctagcgtggcatgcagcactgctaaagctgttgagtgggatgttgtctggaagaacaaccttgatccttcagggagggctgccctgggagtccatctcttcgcttacgatgc

SEQ ID NO: 26802 - DNA, 442 bp, Gossypium hirsutum
  unsure (1)..(442): unsure at all n locations; Clone ID: LIB3147-054-Q1-K1-E8
cccacgcgtccggatctctatggccaactcccggcagaacataaggaagttggttaaagagggttttatcatcaggaagccaaccaagattcactctcgatctcgtgctcgtcgcatgaaggaagccaagagaaagggacgtcactctggatatggtaagcgcaagggtacaagggaggcaaggttgcccacaaagatcttatggatgagaaggatgcgtgtacttagacgcctactccgcaagtacagggaatcaaagaagattgacaagcacatgtaccatgacatgtacatgaaagtcaagggtaatgtgtttaagaacaagagagtcctcatggagagcatccacaaatccaaagctgagaaggccagagaaaagacattggctgaccagtttgaagctaagagggctaagaatagggcangcagggaaggaacatgc

SEQ ID NO: 26803 - DNA, 422 bp, Gossypium hirsutum
  unsure (1)..(422): unsure at all n locations; Clone ID: LIB3147-054-Q1-K1-F1
cccacgcgtccgaaggtggtaggggcattcctagaaggtggtagtgccgaagaaaaccaggcaattgctaaagttgctaagcttcagcctaaagctgagaatttggatgcgctgacaaaagaaggtcttgcctttgcctgtaagatatgaagagtagtaacagctgccatgccttacaaaaaaggaagaacactgttgcaagaggactgcgtatgggaagggttggatctgagttttttcattgggttgttatttctctttgcatttagtacatagattctggagtttgctatgtttatcttgcttttcttttgaatgatgaataataacaaacaatattcaactgtatgttgtgcagtacgaaaaataaaacctatgatcttgctggtaaaanaaaaaaaaaaaaaaanaaaaacccccct

SEQ ID NO: 26804 - DNA, 446 bp, Gossypium hirsutum
  Clone ID: LIB3147-054-Q1-K1-F10
cccacgcgtccgggctcacactgatgctggtggaatcatcttactcttccaagatgacaagggcagcggccttcagcttctcaaggatggtcagtggattgatgttcctcctatgaaacactctattgtcatcaaccttggtgaccaacttgaggtaatcacaaatggtaaatataagagtgtgatgcaccgtgtgattgctcaaacgatgggaccagaatgtccattgcttccttctacaacccgggcagtgatgctgttatatatccagcaccagctttgctagagaaagaagctgacaaatctcaagtgtaccccaaatttgtgtttgaggactacatgaatctctatgctgacctcaagttccaagccaaagagccaaggttcgaagccatgaagaccgtggagtctgcagttaacttgggtcctattgcaactgtttgagt

SEQ ID NO: 26805 - DNA, 225 bp, Gossypium hirsutum
  Clone ID: LIB3147-054-Q1-K1-F11
gcatctgtaggttccacagttttttgtaaaattcttttatttcggtttgtaataaatagtagctaggatccgagttagcaatttgtaatagtttataggcactgcggactgagaactcaccagataattctcctttccaaacttgaaaatcttcatgctcaatctctgcaaggggaatttgaagaattttccgagcaatatcctcttaaaggtattattaaccag

SEQ ID NO: 26806 - DNA, 427 bp, Gossypium hirsutum
  Clone ID: LIB3147-054-Q1-K1-F12
gccgaaggcttgctgcgacgggatccggtccctgaacatgatggctcgaaccacccctgagcgccaaaccgtgtgtgggtgcttgcaaactgccgctaaggctgtcaaaattaaaggcaacttggctgagaccctcccggccaaatgtagtgtcaacatcccttacaagatcagcacttccactaactgcaaaaatgtgaagtgagatgatgaagagagggttttgcagcagcttgaaggagatataatatatgattaaaaagaagaagaagaatgaataaggattttgggatggaattttcaaaatccaaaattagtctccactttagtgtagtgaggctttgtttattttgtttaatgttttggtccctgcatgtattggctgttttaatgttttaatgaaaggaagtttatgctttgtcagatc

SEQ ID NO: 26807 - DNA, 277 bp, Gossypium hirsutum
  unsure (1)..(277): unsure at all n locations; Clone ID: LIB3147-054-Q1-K1-F2
cgtccgcccacgcgtacggcactcatnctcccctcttccgaccattcgtccgtccacgcataggggggtttacgagatgccgacccacccataacactgtccatgcaaaacaagaaacgctgctgctgaagggattcaggaactttttgtcgatgattgcgtgagctcatcaacaattgtataaatgttttgctagaaacaggaaaggaaaatttagatatgcaaaactcttcaacctatgacttttggtgtatgagtgattcattttatgaaatca

SEQ ID NO: 26808 - DNA, 207 bp, Gossypium hirsutum
  unsure (1)..(207): unsure at all n locations; Clone ID: LIB3147-054-Q1-K1-F3
ccggnncggaaaaccacggctcgacccacaccttcggcacagtactagaattccttgtttccattatctatctcaccgctccgcaaatgatcaacatagtgcgtttttggggcaaacctgtcccaaaggatattataccaaacctcgttcatgatacaaaccttttaacatcttaactccattttatatgggtctatatttttaggt

SEQ ID NO: 26809 - DNA, 374 bp, Gossypium hirsutum
  Clone ID: LIB3147-054-Q1-K1-F4
accgggtgggaccacgcgtccgatttttcctgctagcaaaacagcggacattctccaaccactcgttcgcccacacatgcgagggttttctggatgccgaacgcagtcataactatttgttcaagcaaaacacgaaacgcttgtgctgaattgattcacgtattttttgtcgatgattgctgtagctcatcaacattgttataaatgttttgctagaaacaggacaggaaaatttagatatgcagaactctgaaagctatgacttttgtatgtgcgtgatacatttatgcattcataagaggtgcagcgtgtattttggcgtgttcgcggaaatgctggctgaagaaggggagacgtgggacgttttcacgttg

SEQ ID NO: 26810 - DNA, 394 bp, Gossypium hirsutum
  Clone ID: LIB3147-054-Q1-K1-F5
cccacgcgtccggctggagggtatgccatttacaaatacagtttccggagatacatggatgcagagattcgggctataatggcacaatacatgccattggataatcaaccaaacaacgttcatcatccagacatctgaagtgcctcttccgattgggttggttatatattagtaggttttatatttttgggtcacgtaacttatttggcttctcttcgacattgtaattctaaataaagaacaattttcataattatgtggcttttacatttatcttccggctggatttatttttgaaaaattgagttcagggtgggtcggaaaatagttgggtaaatttgcccgatattaagtttttaaaataaataaaatttggatccggatgcttcgttct

SEQ ID NO: 26811 - DNA, 383 bp, Gossypium hirsutum
  Clone ID: LIB3147-054-Q1-K1-F6
cgcacgcgtacggccacgcgtccgtccacgtgttcgcccattcgtacgtccacacttccgagggtttcctggatgccgaaccagttcataacttttgttcaagcagaacaagaaacgctgctgctgaagtgattcaggtattttttgtcgatgattgctgtagctcatcaacattgttataaatgttttgttagaaacaggaaaggaaaatttagatatgcaaaactcttcaacctatgacttttggtgtatgagtgattcattttatgaaatcaaaggttctgaagcgttgattgctgacagtcacactataaaaatttgttttcatactgttgggggtgtcactgtcaatttgcttttgaatgtgagtttcatatcagaaa

SEQ ID NO: 26812 - DNA, 248 bp, Gossypium hirsutum
  Clone ID: LIB3147-054-Q1-K1-F7
cgcacgcgtccgaatgatttaattgcatgtgttactagatatgtttccattgtccgtattatgtctacatatggtgtttgggaaaaaaaaaaaaaaaaaaaaaaaaaaaaaaaaaaaaaaaaaaaaaaaaaaaaaaaaaaaaaaaaaataaaaaaaaataaaaaataaaaacaaaataaaaaaatatataaatatatatcatatattaatttatattaaatatatttaatcaactatataaaattaaa

SEQ ID NO: 26813 - DNA, 286 bp, Gossypium hirsutum
  Clone ID: LIB3147-054-Q1-K1-F8
cccacgcgtacgcatatctctctctctctctctaaaagcccactctgaagtttaaagagagagaaagagatcgtacactttctctctctagaactctaaagggtcaaagctttaaagcctccaaatatatacatataaatcgagagagagggagggaaacatattttgcctctcttttaattatcccctagcgagagatattgaatcatgggtggcgcgaagaaattcggagctcttctatgctctgcgtactcgcactacattaataagaggtactgcaggtatt

SEQ ID NO: 26814 - DNA, 345 bp, Gossypium hirsutum
  Clone ID: LIB3147-054-Q1-K1-F9
cccacgcgtccgattgattgtagccatggatattgctgccgactataacatgtaaagaaagagctcatggtctaaaaagctgtttgtccagaacagaaaggcagctatcactgacatccatcggatcaagcttatgttatctaaaatcaagaaggctggcatacgcaggcaagagcttgcaaagcttaaaaaggagaatgcatatagcggtattctgaattaaaggattgtttgctaattctctcatcaatgttacgccagttctatataggactgattttcgtttttctattatacaggagatcaagatcttttgaggacaccttatttactgtatgacagatt

SEQ ID NO: 26815 - DNA, 422 bp, Gossypium hirsutum
  Clone ID: LIB3147-054-Q1-K1-G1
caaactacaactgtccttgctgtgggctcaaacaacggacatggtgttaccaggggggtacggggtcgccacccttgtaatacaaaggggaaaactagcatgagagtccactttgtgaggagcctaattcgggaggttgctggtttcgctccgtctgagaagaggataactgaacttctcaaagttgcgaaagataagcgtgctttgaacgtggcgaaaagaaagctaggcactcacaagcgggccaagaagaatcgtgaggagatgtctagcgttctccgcaagatgaggtcagctggaggtggagagaaaaagaagtgagtagccctgcgattgtgcttcaaagcaagtattgagttttttagatttgttaaattttctctatcacctttgtattgagagtttggagtactgattcggat

SEQ ID NO: 26816 - DNA, 392 bp, Gossypium hirsutum
  Clone ID: LIB3147-054-Q1-K1-G10
gctttttaacaacatagctctagtgaagaatccgcccatggaccgtttgatcgccgatttggacgagcgtactgtcaaggcgcttgatgtttgcaatgcgattcgcgacgggattgaacagatcaggcaatggcagaagcttctagaaatcgttctttgcgctttgggtgatagtaatgttggttatcagagaagtctaggagaagggcattccgtcgcgcgaggaaggcgttgatagatttagcaattgggatgcttgatgagaaagattcaggtcaggccttggctcataggaaccgttcctttgggagacacaacactagcggcagtcactccaaggatcatcaccatcgatctttgggtcatttcaggtccttgtcttggagcgtttc

SEQ ID NO: 26817 - DNA, 446 bp, Gossypium hirsutum
  unsure (1)..(446): unsure at all n locations; Clone ID: LIB3147-054-Q1-K1-G11
aggaaaccgtatctattgcagaagtggaggttattgtcaacgtaggagctgacatccattggtcaagggttgagatcatgtctatattanagaaattgcaagatgagaatatattgatgatagctggagaaaccgtgcatatgatagtttaagatgtaagagaagaccaggatcaaccaaaataagcagatgcagaaagttgagatcatgctttaatgaagtacttataagttggttctttggaacctgatttgaacgttttctttattaattaatgtatacaattgttttttattatcaatttgacctttattttttttagttaaaattaactaatacatttatgtttggttcctgttatgtatatgataaaatttaagagttgttttcagcaaaattatttttgacatgaaatatttgtatgacaccaaattcgaattttaaat

SEQ ID NO: 26818 - DNA, 447 bp, Gossypium hirsutum
  Clone ID: LIB3147-054-Q1-K1-G12
tgggcttatccaagaagcaatgaagcttttttgattaatgagggaaaagggtacaatccggggagttgtaatatacacagctgttgttgatggcttctgcaaagcacacaagcttgaggatgcaaagagaattttcaggaagatgcaatcaaaaggtgtgatccccaatgcttttagttatactgttttgattcaaggattgtataaattaagcacttggatgatgccgttgagttttgtttggaaatggttgaagctggacattctccaagtgtcaccacatttgtgggcttggttgatggattgtgcaaggagaagagtgtggaagaagcagtgaatgctattggaaccttaaaacaaaagggatttctggttaatgataaagctgttagacagtttctggataagaaggctcctttttcacctttaatttgggaagcaatattt

SEQ ID NO: 26819 - DNA, 412 bp, Gossypium hirsutum
  Clone ID: LIB3147-054-Q1-K1-G2
atttttcctgctagcaaaacagaggatctgcagccaattgatcgctttgttgttgaagagtctttgctggatgtgcttttgttcttcaatggatgtcgaaaggaatgtgctgctttcatggtaggcttgcctgtgcccttccgatatgagtatctaatggcagagacaatattctcccagctgcttttgttaccacaacccccattcaagccaatatattacacactggttattatggatctctgtaaggctctccctggggcctttcctgcagttgtagctggtgcagttcgtgctctttttgttaaaattgctgatttagacatggaatgtcggacacgccttatcctttggttttcacaccatctatcaaatttccaatttatttggccttgggaagaatgggcttatg

SEQ ID NO: 26820 - DNA, 212 bp, Gossypium hirsutum
  Clone ID: LIB3147-054-Q1-K1-G3
tcgcggacgcgtggattcaaattcaacgccatgctctaaagtttttctctaaggctgattgttgtgagttcattacaagatttcattgattaactaaacgtatcatatcttttattaccaagatttacttgatttagaaaatgcattgcatattttattacctcgcatatgtattattaactgtaatattgatgtgtagacccttatgttta

SEQ ID NO: 26821 - DNA, 421 bp, Gossypium hirsutum
  Clone ID: LIB3147-054-Q1-K1-G4
agaagaaggtgcagaaaatgagctgtcatttcaagagtggacacaacaggttcaggatatgctgaatacaaagaaatttggagatattgcatttagagacaaagattttaaaaatgctattgattactactcaaagttggtagcgatgatgtctgttccttctggtactgtatttgtgagaagagccctttcatacttgattattggccaaccagaacttgccttgagagatgccatgcaggctcaggtatgcttgcccgagggccccactgctttttacatgcaagcttttgccttctccaagcttggaatggaaaccgatgcacaggacatgcttaatgatggagcctcatttgaggcaaaaagcagaatggctggcgtgtctaagcagcgatcaggcagtattgttaatttttttttc

SEQ ID NO: 26822 - DNA, 415 bp, Gossypium hirsutum
  Clone ID: LIB3147-054-Q1-K1-G5
aaaaagaagggtacttttcaacattctagtttcttggctggtggtgctactattgctgctggtagattaggggttgacaatggtgtccttaaggcggtctggcctcatagcggtcattatcgtcctacagaagaaaactttaacgatttcatttcatttctgaaggagaacgatgttgatcttacagatgttaagatggcaccagttgatggagaagagagtttccatggaaccagtcaccatcttagatgcaattcatctgaagaaaatagcttagagcctgaagaaaacagtgttaaaggttcgatcgagaagctcggtgatttgatcgaagaaggaaccagtgaaagccttgagtgcacaatgtcaagcaggttcctcaacttgagtcatcttgaaataccgatgaaaaccg

SEQ ID NO: 26823 - DNA, 421 bp, Gossypium hirsutum
  Clone ID: LIB3147-054-Q1-K1-G6
atttttcctgctagcaaaacagaggatctgttgccaattgatcgctttgttgttgaagaggctttgctggatgtgcttttgttcttcaatggatgtcgaaaggaatgtgctgctttcatggtaggcttgcctgtgcccttccgatatgagtatctaatggcagagacaatattctcccagctgcttttgttaccacaacccccattcaagccaatatattacacactggttattatggatctctgtaaggctctccctggggcctttcctgcagttgtagctggtgcagttcgtgctctttttgttaaaattgctgatttagacatggaatgtcggacacgccttattctttggttttcacaccatctatcaaatttccaatttatttggccttgtgaagaatgggcttatgtcctagacc

SEQ ID NO: 26824 - DNA, 446 bp, Gossypium hirsutum
  Clone ID: LIB3147-054-Q1-K1-G7
cccacgcgtccggtaaccccaatcatcaccatgctcaacagcaacagtcctcagtacagcctgctcctcctgcaccttccgccgctgttcagccttcttctcaacctaccttagctgaattcgccgctgattctggggacttgggatccggggctgctggggatgagccggcacggactctcaagcggcctcgtctcgtgtggaccccacagcttcacaagagattcgttgatgccgtggctcatttggggatcaagaacgctgtccccaagactatcatgcagttgatgagtgttgatggtttgacaagagagaacgttgctagtcatttgcagaagtatcgcctttatttgaagagaatgcaaggtttatctggtggtagtggtggtggtgccaatggtggatctgggggtgccggattaggtgccttggcttgatcagccaca

SEQ ID NO: 26825 - DNA, 310 bp, Gossypium hirsutum
  unsure (1)..(310): unsure at all n locations; Clone ID: LIB3147-054-Q1-K1-G9
gtcagggccagcttgacactctggttacgctcattgagaggttcagaaaacagatcagaatagagctctatatccaaattggagtttgtgcaactatcttgcagaagctgtaacgcaagcagacaatagcaagctatcattttatgacttggagtttatggccaaatggattgcttgaggcaaaaatgcaaggccacctttcttgcttcagtagatgaaggattgattgtccttttatacttccaattatttgcattctgattattttgttgaatcagctattatttaatgttttggtgattttgatnna

SEQ ID NO: 26826 - DNA, 442 bp, Gossypium hirsutum
  Clone ID: LIB3147-054-Q1-K1-H1
tcgcccacgcgtccggagggaagtgcagctttgaagatggtcgaggaagtgcgccgacagttcaacacaatccctggtctcatggagggcaccactaagcccgactacgctacctgtgttaagatctctactgatgcttccatcaaagaaatgatcccaccgcgtgctcttgtcatgctcacaccccttgttgatgggatctttatcggcgtggaaactctttccggtgtcctcgctggatctgtcgtctcaggcgttcagatcgctatctctgcatccaacacggggggcgcttgggacaactccaagaactacatcgaggctggggctaaaacacatgcaaaatctattggccccaaaggttcaaatccacacaaggcagctgttataggcgacaccatcggtgaccctctaaaggatacatccgggccatcgttgaaca

SEQ ID NO: 26827 - DNA, 331 bp, Gossypium hirsutum
  Clone ID: LIB3147-054-Q1-K1-H10
cccacgcgtccgcccacgcgttcgcccactttttcgcccacgcgtccgtatcatttcaatgcgggagaatagggtttactgtagatgtaaatgtaaaatgaaacgaattatgtaactttaggtgattgctgttgaattagaatttagttttctgatggtataaaatgttaatgggagagggtagaattagatagtgttctaaatttgaactcagtgattaataaaaaaaaatataaaaaattaataaaaaaaaataaataaatataattataaatattaaaattaaaatgttattttaaataataaaataaataaaattatttggggcggc

SEQ ID NO: 26828 - DNA, 439 bp, Gossypium hirsutum
  Clone ID: LIB3147-054-Q1-K1-H11
cgggcattgtgatccagaaatgtaggataggtgccacttctgatttacagcctgttcgtagagacttcccaacatatcttggcaggccctggaaggagtactcgaggactgtggtaatgcaatcaacaatcagtgacgtgattcaacctgctggttggcacgagtggagcgggagtttcgccctgaaaacactgttttatgccgagtccagaacaccggggctggtgcctcaacttctgcgagagtgaaatggggagggtacaaggtgatcactagtgcaagtgaagctcaggcttttactcctggcaggttcattgctggaagaagttggttaagctctacaggctttcctttcgctcttgggttgtaataattttaaagattgtattgtcaatgtaaccacctgccgacttcattgtttggtttgagatttgctttg

SEQ ID NO: 26829 - DNA, 453 bp, Gossypium hirsutum
  Clone ID: LIB3147-054-Q1-K1-H12
ctttgtggagagggaacactgtcaatgttattcgttatttccccactcaggccttgaactgtgccttcaaggattacttcaagaagcttttcaacttcaagaaagacagagatggttactggaaatggtttgctgggaacttggcatctggtggtgcagctggtgcttcttcccttctctttgtctactccttggattatgctcgaactcccttacaaatgatgcaaaggctgcaaagaagggaggagagagacaattcaacggttttgttgatgtctacaggaaaaccctaaaatctgatggtattgccgggctttaccgtggtttcaacatttcatgtgttggaatcattgtttaccgtgctctatattttggaatgtacgactctctgaagccagtgcttttgactggaagcatgcaggatagtttcttcgctagctttgctcttggttg

SEQ ID NO: 26830 - DNA, 379 bp, Gossypium hirsutum
  Clone ID: LIB3147-054-Q1-K1-H2
gtgtttaccttcctccagctgaggaagctgttattgctgcattgaagagagcccttggcgctttgaacactcatcttgcttccaacacatttcttgtgggacatgctgtcacccttgctgacattatcatgacatgtaatctctacttgggtttcttccagatcatgaccaagagttttacctctgaattccctcatgttgagaggtacttttggaccttggttaatcagccaaaaatcaagaggattcttggtgaagtgaagcaggcagtctctctaccacctgttccttcaaagaagcctgctgcccagccaaaagaaactaaaccaaaggctgaaccaaagaaagaagccaaaaaggaggttgagaaacaggcagc

SEQ ID NO: 26831 - DNA, 374 bp, Gossypium hirsutum
  Clone ID: LIB3147-054-Q1-K1-H3
gcggagtgtggggccggcactttcatggcctataagatgaagcaccagacgaagaagggcgagctcgccgtgctccagatctacaaggtggatgagtccaggaaggttcacaggctgaggaaagagtgtactaatgcggagcgtggggccgggactttcatggccaatcattttgataggcactattgtggtaagggtgggctcacttacgtttaccacaaggctggtggagactgagcagcgtccgattccaccttcagtaaaaaaaaaaaagctgaaatcaatagtttatttgtatcagtatgagtcgcattaatattcgctaatattcggatctttttatatatttgtcatgctatgatactttggatatg

SEQ ID NO: 26832 - DNA, 426 bp, Gossypium hirsutum
  Clone ID: LIB3147-054-Q1-K1-H4
agacaaataaaatatgaagagttcattgcttgtatctgttgtaatcagcttggtaataggggcttcagccgccaactttaaccaagacatcgacgttacttggggagatgggaggggcaagattctcgaaaacggaaaccttctcactctcaccctcgacaaattctccgggtctggttttcaatccaagaaccaatatctggttgggaagatcgatatgaacattaagctggttccaggcaactctgctggcactgttaccacttactatcttcgttcggaagggtcgacatgggatgaaattgacttcgaattcttggggaacctaagcggagacccatacatagtccacaccaatgtatatacacaaggcaaaagtgacaaagaacagcagttctacctttggttcgatcctaccaaagactt

SEQ ID NO: 26833 - DNA, 444 bp, Gossypium hirsutum
  Clone ID: LIB3147-054-Q1-K1-H5
cccacgcgtccggatggatttgacagcttataaagcatggttagaattaaggaagcagaagcaatattgttgcaaagcaaggccgatgaagcacggagagaagtggagagttacatgaggatgatccgggccaagtccgaaaagttggaagaggaatatgccgagaagctatcccgactttgcttacaggagacagaggaaaggcgaaggaataaaatggaagaacttaaggttttggaacattcacagtgtgattactacaaaatgaaactaagaatgcaagcagagattgccagtttgttggagagaatggaagctacaaagcagcaatgggtttaactcttttcttttctttttttttctttttttccttaatttattggttaacaattaattaatgtaaaacgtgtggtttgttccaaagttttaaccttatggattcta

SEQ ID NO: 26834 - DNA, 405 bp, Gossypium hirsutum
  Clone ID: LIB3147-054-Q1-K1-H6
gttctcaacaggcgatgttaaggagctcggaagtgcacaaaatgttaaccaacatctcagcaaccttcttgttgacaatacaataagggtcaagtccgagagagtttgcgataccagccctgccaatatattccccgatcacttcggacaagatgatctcatgagtgctcttctcaaacagcaagaaagtgttgcatcatctgaaaacgagtttgacttcgacgggtattctatgaataatattccagtgtagggtgttattccatactccagctcacgtcgtgattgcagtttccgatgtacatatccattgtaacggaaaagttatcacttcagcaatcaagttagtgggaactcaagtttggttaagaaactgcgttttgcttagttggaagaaggtgtctt

SEQ ID NO: 26835 - DNA, 331 bp, Gossypium hirsutum
  Clone ID: LIB3147-054-Q1-K1-H7
cccacgcgtccgctcagttggatgttgtcgttaccaacaaattggctaggctgcgcagccgggagaacgagtaaaggtcggttcttgaatgttgattttgctctttttagtatgatattctcttgtttaggaagtaagaacttttggtccaatgttaaaattgttatatttttatctgagtagcgttgtctctttttttttttggttgtgatttgagtataaaaccccatttctaatttaatgtatccttgatgttttgagggatctcttctttgttcatgcttttctacaataatgaaaggtttaagataccggcaaggttgtttgaacc

SEQ ID NO: 26836 - DNA, 130 bp, Gossypium hirsutum
  Clone ID: LIB3147-054-Q1-K1-H9
ccgattcccgtcacccacctcgctcatttacattttcatgtgctttttaactaatttgtgaaccaaccaaggctatttcttaatccgccatccactatttttttaatctttttatataatcttatatttt

SEQ ID NO: 26837 - DNA, 68 bp, Gossypium hirsutum
  unsure (1)..(68): unsure at all n locations; Clone ID: LIB3147-055-Q1-K1-A1
cccacgcgtccgcccacgcgtccgnnaaaatttataaaaaaaaaaaaaaaaaaaaaaaaagggggggg

SEQ ID NO: 26838 - DNA, 303 bp, Gossypium hirsutum
  Clone ID: LIB3147-055-Q1-K1-A10
cccacgcgtccgggattacccgctgagtttaagcatatcaataagcggaggaaaaaaagggccagaattgggaaatggaaagagaccaacttcagaattttcattgtaccggtaccagtctttcttcttcttttacgttatgtttccaagtcaagaaaatagtgacaaaaaaaaagaaaagaaaagaagattttgcagccatggctgatggctcatgcattgtttatttccattacaagtatacattaaaaggaagttaagtttcctggtaacagatgccatatctataccctatttgactta

SEQ ID NO: 26839 - DNA, 409 bp, Gossypium hirsutum
  Clone ID: LIB3147-055-Q1-K1-A11
cccacgcgtccggcggtagggaaccaactgttacacacagcagcagcagcagcagccagggggaagtactcaagagaaccggacaaccctactaaatcttgcaaagctaggggttctgaccttcgtgttcattttaagaatacacgagaaactgcctttgcaatccgaaagctacctttgacaaaggcaaaaaggtacttggaagatgttattgcccacaagcaagcaattccattcaggcgcttctgtggtggagttgggcgaaccgcacaggctaagaatcgccattctaatggacaaggccgttggcccatgaaatctgcaaaattcattctcgatttgctcaagaatgccgagagcaatgctgaagtgaaaggcttggatgtagattcacttatcatatctcaca

SEQ ID NO: 26840 - DNA, 334 bp, Gossypium hirsutum
  unsure (1)..(334): unsure at all n locations; Clone ID: LIB3147-055-Q1-K1-A12
cgaaaggaagaggaagaaagtacctagaaaagaggacaagggtatcgacggtatggtgaagagccccgatctttgattctaggtttctcttaataggagattttatgcataaccaactcttacctgaaagtactgaactatacttatatgtcattacacactaaaagcttgtaaaaacttatgtttaatggtaattcaagttgtaatacaacctatttactagttgcatgctagtgtcaaatttgtatatgttaaactactttgagagtctttgtatctctctactataaaatcgaataatttagtttggttttttttttaanaacaactttat

SEQ ID NO: 26841 - DNA, 118 bp, Gossypium hirsutum
  Clone ID: LIB3147-055-Q1-K1-A2
cgggggtcccagtcccgaacccgtcggctgccggcgcactgctcgagctgctcccgccgcgagagcggttcgccgcgtgccggccggtggacggactgggaacggctccctgggggcc

SEQ ID NO: 26842 - DNA, 217 bp, Gossypium hirsutum
  Clone ID: LIB3147-055-Q1-K1-A3
ccaggagttgccatacacacttagtacctgcctgcctactggaaagggatcgaaatcgatgaaggcagtaagtgatagtagtatgttgtggcatattcatcaaaattctcatttactaaaatactttatgattgtttggatcttccattcttgttgttgcttatttgaatgtgtgtaactgttatcgtggaagtcaatcaaatatttgaatgtgtgt

SEQ ID NO: 26843 - DNA, 389 bp, Gossypium hirsutum
  Clone ID: LIB3147-055-Q1-K1-A4
ctgctctgcgctgctatcagagagatgaaagatttttcggttggggatttggatttgggtggcgtgaaaaagtggagcgcgacacttaattacgctaagaaatatggttttcaagtgggatttgctgataatctgttgaagaagaatttgcttgcctattttgcaattcaatgtctgcccaaatcgataaaaatatagcttcccaagagcaaatggttgttttgttgttgctggcttgctgcagtctacaaaaatattggctttaacgatatctacatttacttttctgtatgtgtgaagtttatcttatttgagattaatgctttgttaaactgagaaattatgtatcaaaaaaattaagagttgaatttaagttttaaattttattt

SEQ ID NO: 26844 - DNA, 314 bp, Gossypium hirsutum
  Clone ID: LIB3147-055-Q1-K1-A5
agccttcgggcctgttttgccaaaaccccaattcgatttttttaccgcaaacaataaatctttctctgaggaggatgcatccgaaagctgttttaccagtgtacgtggaagcgattatgtcagagcgtttataacttttgccttctgaaactaagcctaataatgcctgatgaggcactattaagtttactgcagctcaaaacttgtattagagatatcctaaaatatatatacattggataatgaatagctgggtcactgtattgtggtgcagatatagcacaatgggtggtagatatttcttattctttttg

SEQ ID NO: 26845 - DNA, 421 bp, Gossypium hirsutum
  Clone ID: LIB3147-055-Q1-K1-A6
cccacgcgtccgcggatttcagtattctctcattcttttcccgggacccagacaaactctaggagcaagaaaatggcaccaaaagctgagaagaagccagctgagaagaagccagcggaggagaagaagacggtagctgagaaagcccccgctgagaagaagccaaaggcaggcaaaaagcttcccaaggaaggcggagctgcggccggagacaagaagaagaagagggtcaagaagagtactgagacctacaagatctacatcttcaaggtcttgaagcaagttcaccctgatatcggtatctcaagcaaggctatgggaatcatgaacagcttcatcaatgatatctttgaaaagcttgcccaagaatcgtctaggctcgcaaggtacaacaagaagcctaccatcacttccagggaaa

SEQ ID NO: 26846 - DNA, 435 bp, Gossypium hirsutum
  unsure (1)..(435): unsure at all n locations; Clone ID: LIB3147-055-Q1-K1-A7
cactttccgaaccagacaggcgcatatcctctcagcccagcgaccatgacaaagagaacgaggaaggccggaattgttggcaaatatggtacccgttatggtgccagtttgaggaagcaaattaagaagatggaggtgagtcaacacagcaagtacttctgcgagttttgtggaaagtatgcagtgaagagaaaggctgtaggaatctggggctgcaaggattgcgggaaagttaaagctggtggtgcttatactttgaacactgccagcgctgtgacggtgaggagtactattagaaggttgagggagcaaactgagagttgagctgctgctgactacgttatgttcacaactttggtatgatgttcgngtatgtgttggctacaaaccagttgagtcattttgttgacaattatggcgcttatttcttaattt

SEQ ID NO: 26847 - DNA, 143 bp, Gossypium hirsutum
  Clone ID: LIB3147-055-Q1-K1-A8
ttttcttccatttttgttactttgaatttggtatcagctttttgtttttctttctttgcatcgatgtaaatgtgcttaaaatttatctaaaaattctcatcgacataaattttcataaattgtattatctctctgttgctggt

SEQ ID NO: 26848 - DNA, 430 bp, Gossypium hirsutum
  unsure (1)..(430): unsure at all n locations; Clone ID: LIB3147-055-Q1-K1-A9
ataagcacctccccgtaagcaaaccacataggaaagcttggagagagacccaaaaagggggtctaaggaagttagtgaagaaggacagggtcgtaaggactatgtggaccctccaccggcacctctgattgacatggctgaactcaagtcatggtctttttacagagccctcatagctgagttcatagccactctcctcttcctctatgtcactgttgctactgtaattggtcacaagaaacaacaagatgcatgtgatggtgttggtctcttgggtattgcatgggctttcggtggcatgatctttatccttgtttactgcactgccggtatctcaggtggacacattaaccctgcggtgacttttgggttgtttttggcccgtaaagtgtctttcattanggctgtggcttacatggtgtcacagtgc

SEQ ID NO: 26849 - DNA, 433 bp, Gossypium hirsutum
  Clone ID: LIB3147-055-Q1-K1-B1
cccacgcgtccgcccacgcgtccggttttagcttgaaagcttacttccttgttgcactgggtgtgtttgatataagttgcatggtgttcattaaggatgttgaagcagctgggagtgtggaaagactccatttaggtctgctgcggtaagtttaagcccatgcttaggagctgctgggaacgcaaaggcaaaagttccgcctgcttgctgctccaaggttggtgccttacttaaggcttctccgaggtgcctttgtgctattttattatcaccattggcaaagcaggctggaatcaaacctgggattgccattggcattcccaaaagatgtaacattaggaacaggcaagctggaaaaaaatgtggaagctacacagtcccatgagacaaactaataccttatacaagaagagaagagagagcttattaatta

SEQ ID NO: 26850 - DNA, 322 bp, Gossypium hirsutum
  unsure (1)..(322): unsure at all n locations; Clone ID: LIB3147-055-Q1-K1-B10
cccacgcgtccgctgattttgagcttattttggttcaaagttcaaacgaggttgtattgggtgttcttgtgacttgtaaccattttttttcctctctttacatttctttcacgattgaagaagaagaaaaaaaaaatgtcgatcagatgccatttaattttctagtttcttcgttatattcgttcatttactggagtgtttatggcagatctgggagtaccatatggattgaagagtttatataanaaaaaaaaaaaaaaaaaaaaaaaaaaaaaaaaaaaaaaaaaaaaaaaaaaaaaaaaaaaaaaaaaaagggggcggc

SEQ ID NO: 26851 - DNA, 326 bp, Gossypium hirsutum
  Clone ID: LIB3147-055-Q1-K1-B11
cccacgcgtccggtaaaaagttgacccagctttataaaaatgactacttgaattgtctgcaacgtcatcgttgatgatatgttgttgattttcaatgttatcaaaaaaaaaaaaaaaaaaaaaaaaaaaaaaaaaaaaaaaaaaaaaaaaaaaaaaaaaaaaaaaaaaaaaaaagggagggaaataaaaaaaaaaaaaaaatatataacgggttaatggggggggatatttattaaaaaaaggggaatatatataaaaaataggtgggggaggttaaaaatgtggggggacggaaaaaaaattgtttttaccaaaaataaaaattt

SEQ ID NO: 26852 - DNA, 445 bp, Gossypium hirsutum
  Clone ID: LIB3147-055-Q1-K1-B12
cgccttgggaacaagccaagaggctgctcatcctgactgcatcaaagcccttgtggtcgagtttatcaccactttcctcttcgtattcgttggagtaggagctgccatggccgccgatgagtcgggggcaaatgcgctggtgggattgtttgctgtggcggtggctcatgcccttgtcgtcggcgttatgatatcggccggacacatatcaggcggccatcttaacccagccgtcacgcttgggttgctattcggtggtcacatcacggtggtccgtgcgatcctctactggatcgatcagttgttggcatcttcagctgcttgtatacttctcaagtatctcaccggaggattgaacactccggttcacacattagcaagtggaatggggttccttcaaggtgttatatgggagattattctcacattcgcattgctgttcaca

SEQ ID NO: 26853 - DNA, 377 bp, Gossypium hirsutum
  Clone ID: LIB3147-055-Q1-K1-B2
gagagacccttcctccggttcttttaatctagacagcttctatttgtagtcgatcatttagaagccctacttctacccaaatttattctcctataaaacgattcaaaacctaaagtaattcctttctcatcatcatcttcaacaaatcctcccaagccatgcaaaaccagggcttgcttgaggaacaacaagagatgcctactcccatgggtttcttttctacttttcctcccaacaacaacatcacttcatgtcctccattgggttgccatcctctcaaagccttcaatatagcagcacctgatcatcatcatgcacttcctactgaaaccctactctcatctctctcctctccaaaacatagagaacaccttgct

SEQ ID NO: 26854 - DNA, 404 bp, Gossypium hirsutum
  Clone ID: LIB3147-055-Q1-K1-B3
cccacgcgttcgcccacgcgtccggtacggtgtggtgctggcgtgtgtacgggagggtgcgtggtgccaggaggatgctggggttgctggttgcggcgcatgggaaggaaccttaaggttctaaaatttctgggccacttagggtgttcatatttgggctgtaaggctattggtttttttgtaatgggactaaagtattagtaatggggtcatgctattgggcttatgctatgtaattggactttaaatatttaagggactgttataattttatttatttatttatttattatataggtttgggatttctttagcgggcccgggccaaaattggtcactacaaccttgagacatgacctgaaccttgtaaacaaaggagctgaaaaaggcttagtgaacacatc

SEQ ID NO: 26855 - DNA, 395 bp, Gossypium hirsutum
  Clone ID: LIB3147-055-Q1-K1-B4
cccacgcgtccggtacaaggatacagggcaacacttcaatggtgagttctcgatggcagtggggcaggccaataatttacttgaggatcagagccagcttgagtctggttgtttgagttcacatgagtgcggtccctatggtacttttgttggtgtatatgatgggcatggaggccctgagacttcacgttacatcaatgatcatctctttcaacatctcaagcggttcacctcagagcaacagacaatgtcagttgacgtaatacaaaaagcttatcaagcaacagaagaaggttttttgtctctcgttaccagacaatggcctatgaacccacaaattgctgctgttggatcctgctgcctggccggtgttatctgtggtggaaccctttatg

SEQ ID NO: 26856 - DNA, 444 bp, Gossypium hirsutum
  Clone ID: LIB3147-055-Q1-K1-B6
gggatttgcgggtggagaagacgagagctcatctctctgcttcaaagctcctgtccagggagaattctcttcttcctttgcgttgtgttctttgttgttcagtcgccatggcttcaaagcggattttgaaggaactcaaggatttgcagaaagatccacccacttcttgcagtgctggtccagtagctgaagacatgtttcattggcaagcaacaatcatgggaccctcagatagcccttatgctggaggtgtgtttttagttaccatccatttccctccagattatcctttcaagcctcctaaggtcacgtttaggaccaaagtcttccatcctaacatcaacagcaatggaagcatttgtcttgatatcctcaaagaacaatggagccctgcactaaccatttccaaggttctgctctcaatctgctcgttgctgaccgatc

SEQ ID NO: 26857 - DNA, 110 bp, Gossypium hirsutum
  Clone ID: LIB3147-055-Q1-K1-B7
cccactcgtccgcccacgcgtccgcccactcttccgcccacgcgtccggttactgccgtgggtataactgatgaatgaatgaaggaaagctctatttggcttttgcttac

SEQ ID NO: 26858 - DNA, 433 bp, Gossypium hirsutum
  Clone ID: LIB3147-055-Q1-K1-B8
caattacttcaattcagttgttatagcagaccagtgctgtctggtttagttatttcagggggtggcttgcaagattctttgaggaaggcatcactgtcagcttttctggaatatcttaatgtcgatcaagatgttaatgaagaactcaaattgtgcaagttacccacggacatcctttggattctccaacagtataagcgatgtgacagggttattatacccacattgaagacaattgagattcttttcagcaaaaggatattcttggatatggaggcgcatacttcggctttctgttctggtgttttggattctctggcggttgaattgaaagcatcaaaggacttctctaagttatatgcaggcattgcaatacttggttacatttgttcagtttccgatcctatcaacgcccgtgccttttctcatcttc

SEQ ID NO: 26859 - DNA, 444 bp, Gossypium hirsutum
  Clone ID: LIB3147-055-Q1-K1-B9
gtttactatttgcaatttagcctattttatttggctccaagaatggacataactcatgagtgatcctttcccttgtatggtctatgacatttccgcccattgttttcttccaagttacaacaacgatgaattgatagtaaattttaaaaaaaaaaaaaaaaaaaaaaaaaaaaaaaaaaaaaaaaaaaatactttaaattatacaacaaaataaaacaatgtgacaagaatattatacaccacattgaagacaattgaaattcttttcaacaaaaggatattcttggatatggaggcgcatacttcaactttctgttctggtgttttggattctctagcaaatgaattgaaatcatcaaatgacttctctaagttatatgcaggcattgcaatacttggttacatttgttcagtttccgatcctatcaacccccgttccttttc

SEQ ID NO: 26860 - DNA, 347 bp, Gossypium hirsutum
  Clone ID: LIB3147-055-Q1-K1-C1
tattttcaaataaactcagctatttggtttagatgtataacgcttccatttatttattttaagaaaactcagctatttggtttagatgtatcttccttaaaaataaattaagcaacaatctctggatatttatttaaagttaaaaaaaaaaaaaaaaaaaaaaaaaaaaaaaaaaaaaaaaaaaaaaaaaaaaaaaaaaaaaaaaaaaaaaaaaaaaaaaaaaaaaaaaaaaaaaaaaaaaaaaaaaaaaaaaaaaataaaataaaactgggcgacgatatacaaacgtaaaaaaaaaaaaataaattggggggggtgctctttaattaaaaaacattaaccttggg

SEQ ID NO: 26861 - DNA, 439 bp, Gossypium hirsutum
  Clone ID: LIB3147-055-Q1-K1-C10
ggggagcctaatgatgatgctgtaactgatttcaaacaaaatgcagccatagcaaaggaggcttcggaaaaatcaacgtctgcatcgacggcggaggtagcgaaggcgaatggagatgttaaacatatagaagagaatggatcagttgttgtaaccgaagatggccccgtgaaaccggtgtgtgcagccagtgcttgctaaattggattggtagatttggaacagggttgtacttcgggtttgttatgaagaagttagataaattggtatcaggtattgggactggtcttatagcttattccttagaatgtaggaataggtaaaagcaccttttacagtgttaaaaaccatttcgctacgggcagaatgtgactgctcattagtctttataagtttttttcttttctttttgtcatttttatctggttttatttttctt

SEQ ID NO: 26862 - DNA, 314 bp, Gossypium hirsutum
  Clone ID: LIB3147-055-Q1-K1-C11
cgtaaatggagcaaactgcaaggaattggccgcacaacccgatgttgatggctttttgggtggtggagcttccctaaagcccgagtttgttgatatcatcaaggccgcgatggtgaaaaagaattagaagttgaaaagcaggaattaaaggtgaaacagaaacaaccttctgggaaactttaatttttgtagttgagatctttccttggaacctaatgtctgttgaaaatttcccgatgtaataagccaaatttaactatgtgttttttttttgcggtggttgaggcattgatcctcatttcggactttccctg

SEQ ID NO: 26863 - DNA, 372 bp, Gossypium hirsutum
  Clone ID: LIB3147-055-Q1-K1-C12
cccacgcgtccgcaacaaatgaaccagccataaaacaaagatgattgttaccgcaagggacgaactagtgttgatccgtaaaggtaactaaaatagccaaccagtatctgcccttacagagaacaaaaatttgcagccgtagcagagaagaaatttttttactgacattgttgtacacaattgttctttgtctaacatgagatgcatttacccatgttagcacatcagaacgaactgtttgttagtgaaattttgaaccccatggtaagtggaccaatgtagtctgtcaatttaacaaaactgtgatgttatttaaattcatgctctaaagagagccattttttcaataatagccagaaatatttttccctt

SEQ ID NO: 26864 - DNA, 437 bp, Gossypium hirsutum
  Clone ID: LIB3147-055-Q1-K1-C2
cccacgcgtccgtctacattcagcgaaggggtgctctgagatcacataccaaaatggtgaagggcgttgccgtccttggcagcaatgaaggtgttagcggaactgttttcttctcccaagaaggagatggtccaactaccgtgactgggaacctttctggtcttaagccgggactccatggcttccatgttcatgcccttggggacacaactaacgggtgcatgtcaactggaccccattttaatcctgctggcaaagagcatggtgctccagaagatgagaaccgccatgctggtgatctagggaatgtcactgttggtgatgatggctgtgcaagcttctccatcaccgacaaacagattcctctcacaggcccaaactccattatcggaagagctgtagttgtccatgcagatcccgatgaccttggcaagggc

SEQ ID NO: 26865 - DNA, 232 bp, Gossypium hirsutum
  Clone ID: LIB3147-055-Q1-K1-C3
attttgataggcactattgcggtaagtgtggtctcacttatgtttaccaaaaggctggtggcgattgagtttccatctttagcttgtcgatcttttgttagtatgagagacgggattttaatttccaattatcgttcgactgtttaattttttattatgttttatcatgttacgatacttgggatatgattatcaattttagcttttctgaatctaagtaagggcattttac

SEQ ID NO: 26866 - DNA, 74 bp, Gossypium hirsutum
  Clone ID: LIB3147-055-Q1-K1-C4
aaaaaaaaaaaaaaaaaaaaaaaaaaaaaaatttttaaaaaaaaaaaaaaaaaaagggcggggggggtataata

SEQ ID NO: 26867 - DNA, 449 bp, Gossypium hirsutum
  Clone ID: LIB3147-055-Q1-K1-C6
cccacgcgtccgcccacgcgtccggatggtgtgagccacacagtccctatctatgaaggctatgctcttccacatgccatcttgcgtctcgacctatctggtcgtgatctcactgatgctctcatgaaaatattaacggagcgtggttattctttcacaactacggctgagcgggaaattgtgagagacatgaaggagaaactagcttacattgctcttgactatgaacaagagttggagacagcaaaaaccagctctgccgttgagaaaagctatgagctacctgatggacaggttattaccattggggctgaacgattccgttgtccagaagtcctcttccagccatccatgatcgggatggaagctgctggcattcatgaaacgacatacaactcaatcatgaagtgtgatgtggatattaggaaggatctctacggaaacattgt

SEQ ID NO: 26868 - DNA, 160 bp, Gossypium hirsutum
  Clone ID: LIB3147-055-Q1-K1-C7
gctaactagataaatagaatatatttttgactccgtttagacataggtaaatgaaaatggggtatttatgaataattttataaaaaatttaataatttattaaaacaaaaaagaaatacatagaattagaataattagaataatataaatatgatagaat

SEQ ID NO: 26869 - DNA, 432 bp, Gossypium hirsutum
  Clone ID: LIB3147-055-Q1-K1-C8
cccacgcgtccgattttcgttagttttagctttgctgctatgtatggcattgctgtttgtgcccttggaatgctgagcaccatagctaccgggttggctattgatgcttatggtcccatcagcgataatgcaggaggcattgctgagatggctggcatgagccacagaatacgggagagaacagatgctcttgatgctgcaggcaacaccactgctgctattggaaagggtttcgccattggttcagcagcactggtttcccttgctctctttggtgcctttgtgagccgagctgctatctcaactgtcgatgtattgacccctaaagtttttatcggtttgcttgttggggcaatgcttccttattggttctctgctatgaccatgaagagtgtgggaagtgcagctttgaagatggtcgaggaagtgcgc

SEQ ID NO: 26870 - DNA, 423 bp, Gossypium hirsutum
  Clone ID: LIB3147-055-Q1-K1-C9
cccacgcgtccgcccacgcgtccgcccactcgtccgctcacgtacagagaagttattggtgttctcatgcagaggcatgtcatggttgatgggaaggttcggaccgataagacttatcctgctggtttcatggatgttgtgtccattcctaaaacaaatgaggacttccgtctcctttatgacaccaaagggcgtttccgtctccatgccatcacgggtgatgaaaccaagtttaagctttgcaaggttaggactgtccagtttggccagaaaggcattccatacctcaatacatatgatgggcgtactatccgctacccggaccctctgatcaaggctaatgacaccatcaagctggaccttgagagcaacaaaattgttgatttcatcaagtttgatgtcggaaatgttgtcatggtgact

SEQ ID NO: 26871 - DNA, 455 bp, Gossypium hirsutum
  Clone ID: LIB3147-055-Q1-K1-D1
ctttgaggtttttttaggttgctcttggaacatttagcagccaaccaaaaatggttctccaaaacgatatcgatttggtgaatcctccagcagagcttgagaagaagaagcacaaactcaaacgtcttgtccagtctccaaattctttcttcatggatgtcaaatgccaaggctgtttcaacataacaatagtgtttagccactctcaaacagtggtggtatgtggtaattgtcagactgttctttgtcaaccaacaggaggaagagctagactcaccgagggatgctctttcaggaagaagggtgattgatctcatattttgctattttatgattcacaaaaacaaaagaaagtaatctttggatcaaatatgggaatcatatgagtaatctttttcatgtgtttcagttatgacatatgtttgaagtttatttttgtagtaagttggtacttg

SEQ ID NO: 26872 - DNA, 203 bp, Gossypium hirsutum
  Clone ID: LIB3147-055-Q1-K1-D10
cttccgccactccttccgccacaccttccgtctttattttctctgttcatacaattcttttatggcgttgaatattcatatacacacccccatcctaaactctcaatcatgtctttcaaacaaggtggcaaaacaaagcctttgaagccaccctaatctttgaaaaaagaaatttaccacgcatctattttgcttacattctt

SEQ ID NO: 26873 - DNA, 438 bp, Gossypium hirsutum
  Clone ID: LIB3147-055-Q1-K1-D11
cccactcgtccgcccacgcgtccgagtattctctactgtattgcagagccacgaggatctggctgggaagcttcaggaagagatggggagaagtcgcagagcatcatcaggctccatgtctgatggctctggtaggcggatgaaggaagttgcctgtcctacatgcacagttcatttgcaggttcaagttccaagctcaagttctgagaccattgaatgtggggtgtgccagcatccttttctcgttagtgcccattgatcaatgcgcttttgtcaccagtgaattgctctttttctctattaatttcttgttgaggtcgtgtttataataaactaatacggatgagctctctattatctcttttgtcatctcttcaagttattgtgaatatggaacttatctcttgatctttaatcaaatcttttgtgtaaaattta

SEQ ID NO: 26874 - DNA, 441 bp, Gossypium hirsutum
  Clone ID: LIB3147-055-Q1-K1-D2
tgttcctctagatgttggtccagccacacagttggatatcatagcggagtttgagatagatgacgaggcgttagagaaaacaacagggtccaatgtaacattcagctgcagcagcagcggtggaactgtagaacgtggggcattgggaccatttggtctgttggtgcttgcggatgacagcctcagtgaacagacacctgtatacttctacatcgccaaaggatccgatggcaaactcaagactttcttctgcaatgatcaatctcgatcatctgtagcatctgatgttaataaacaaatttatgggaacttggttccagtactggagggcgaaaaattatccctcagagtcttggtggatcattcgatcgttgaaagctttgctcaaggtggaaggacagtcatcacatctcgggtttatccgacgaaagcaatctatgg

SEQ ID NO: 26875 - DNA, 416 bp, Gossypium hirsutum
  Clone ID: LIB3147-055-Q1-K1-D3
gcctagcttacgtcctaatggaccacctgatggttcaaagagtggttgtactaccttcggagcggacttgctatcctacaagatccattacaataaccattacacctgccctgataccagctatgcttagagctataaacatgcttgtacacacgcatttacttacacatataattaccctcatgttatgcactacttcattcacgaacgtgagctaacacgtatgctctgtcacttgaggtagaccatgatgaagacgagtatgaggaataatctgtagaactatgtgaaagactttgtgaaagatatagtgaatggattaaagcattgatggaagcataaaaagtggaagaagaaaattgagtatgttaatacaaatgttatgacagatgttatgcatgttgtttttcatcttc

SEQ ID NO: 26876 - DNA, 146 bp, Gossypium hirsutum
  Clone ID: LIB3147-055-Q1-K1-D4
agcaaggcatgagaaaggatcagtgtattggttgttagttagacttgttgaaactctggcggctcttgaagaggatatagcttcctgtttatccagcaacgtttgtaatgacagaatatctagctttgtttaatctttttacttgg

SEQ ID NO: 26877 - DNA, 332 bp, Gossypium hirsutum
  Clone ID: LIB3147-055-Q1-K1-D5
tcggcgaccccttggcctgaaaaaaacattacctgtttgacagggctggatcataacagggcacggggtcaaatctcagagaaactaaatgtccaagtttctgatgttaagaatgtgattatttggggtaatcattcatcatctcaatatcctgatgtcaaccatgcaactgttatgactccatctggagaaaagccggttcgcgagcttgttaaggatgatgcatggttgaatggagaattcataaccactgtccaacaacgtggtgctgcaatcatcaaagctaggaaactctcaagtgcactatctgctgctagtgctgcttgtgatca

SEQ ID NO: 26878 - DNA, 436 bp, Gossypium hirsutum
  Clone ID: LIB3147-055-Q1-K1-D7
cccacgcgtccggtagcccagcttgttacctactgtgcttttggagtactagctggagtgggcggcggtctgcttggcctaggaggaggatttatcatgggtccactattcttggagttgggtgtccctcctcaagtatcaagtgctacagctacctttgccatgacattttcctcatccatgtctgttgtagaatattaccttctgaagcgttttccagtaccttacgctctgtacttcactggggtagctacagttgctgcctttatcggacagcatgttgtccgaaagctgataattttatttggaagggcatctttgatcatcttcattctagcctccacaatatttgtcagtgcaatatcactaggtggtgttggcatatcaaacatgatcgggaaaatcgagcgccacgagtacatgggattcgagaacc

SEQ ID NO: 26879 - DNA, 423 bp, Gossypium hirsutum
  Clone ID: LIB3147-055-Q1-K1-D8
gttcttgtcaatgaagcttgaagcagttaattcaagaatgaatcctaccattgaagtggggcgctcttaaagattatggccaacaaacgtttgatgctactggaatggcatttggtccacaagcaacgagggaatacagtcgcggtgcatcaccagagtggttgcatattcgtggtggtttcgaaagaacaacataatctcaacagttcattgtcaatcagcaataagaacattaatttcccaatgaatcctctctttcagtcatacccaaagaagcatattgcatcctggtaaaaccagcgagacactctattttcattctcaacatgaggcattgagctctaaaagaatgctaaagtcagtacctgaacattttgattgttgtgtttgggagaatgtgttctttttcttcatatatgaaat

SEQ ID NO: 26880 - DNA, 388 bp, Gossypium hirsutum
  Clone ID: LIB3147-055-Q1-K1-D9
gcatggactttgcttcgtatcttccctcgtgaacttctccatcgtatacctgcaaagacgggttgaccagtactacagtcgcgaatcgtgaaagcaacaagctgagctggtaaagcatttgcatttgctgcatggccttaacccagtaatccgtcttggtgaatggcttcattgcggtgtgctacatttgtttcatttccttttcagatacagttccaatcaagttcatgctctgtgattataatttattttagctgttgagtattctttgttttgagaacccaacccataagctttttcgagaacattattttcagcttgttattctcattcaaacctgttgttaagacttggattgccaaggaaaagactggttctgttttaagtt

SEQ ID NO: 26881 - DNA, 232 bp, Gossypium hirsutum
  Clone ID: LIB3147-055-Q1-K1-E1
cccacgcgtccgcccacgcgtccgaaagaaggaaggtgaggcagctcctgagaaacccatgtttttgtatgcttcagggggggatgcaagctacattgctgaaggtcaatggactggaccttacattggttgcgatgttccctatgtttgtctctataaggatattcaggtgcctgtctccactgctgtcgagtgttcttgtgattcgtgatctgccctcttattttcttct

SEQ ID NO: 26882 - DNA, 331 bp, Gossypium hirsutum
  unsure (1)..(331): unsure at all n locations; Clone ID: LIB3147-055-Q1-K1-E10
cccgcgcgtacttgcgctgaccgtcacctttaccgacgacccagctctaggccaggcgggaggcatttgcggcgtcaatcgtatccatgatattatgcctgagatacctactgtgaggcctgacttcaacgtactctgcccctttcttctgacagctccactgaatgcaccatagaatagtatgaaccataatatgaaccgttgtgacgccggcggccatgccaattacctcaacaatttcatcaacaaattgatttagaaaaccaatcttgggtcctgacttgaaaaactgttgaaaaaactagttgttgatgtattttgngagggattc

SEQ ID NO: 26883 - DNA, 439 bp, Gossypium hirsutum
  Clone ID: LIB3147-055-Q1-K1-E11
ccgcttcacttttccttcttttcatcttctcaatcacaccaccgtcctttttgttcgagggtgccaacgctacaaaatatcctgtgctcgacatcgatggtgactggctccgcacaggcgttgaatactacgttgtgtcagcgatatttggtgctggcggtggggggcttgccctaggcaggtctaccaaacaaccatgcccggaaatcgtcgttcaaagacgatccgatttcgacaaaggtacaccggtgatattttctaatgcagacaccaacgatactgtagtccgcctatccaccgatgtaaacatagagttcactcccatcaggaccaaactctgccgaacaacaacggtgtggaagattgacaattatgatgattcagccgggaaatggtgggtgacaaccgatggggttagaaggaaccctggtcccaacac

SEQ ID NO: 26884 - DNA, 238 bp, Gossypium hirsutum
  Clone ID: LIB3147-055-Q1-K1-E3
cccacgcgtccgatttattttccattgattttaatttttgtttttttgaggcttgggaagagctgtagaagaaagatgccgagaacatttgccctataattaatgctttttttttcgactattgaacagttcgtaatatcggacactaatccgagcaattgcattttatatatatttgtgtttttaaaaattagagggattagtttttaataaaaaaattaacttattttttaatttt

SEQ ID NO: 26885 - DNA, 337 bp, Gossypium hirsutum
  Clone ID: LIB3147-055-Q1-K1-E4
tccgccacgccgtccaaccgatgatgatgataattgctatgaaaaatctgctctcgaattacttgcggaagatattattattaagattatttgtggtgtggatcatgaagatttgaaacggcttcctattgtttctaaatcaatcagagaagctgctatggttgcaaagcaattgcattttgcatatagtacaccaacaaaggtgaaagcttttaaaacatcaatagatttcgatgaacaaagtgaatcaaacgacttggaacttgaagctccaaatgcacctcaacaatggcggtcacacaggtcaatcaacaagaaaaaacttgcagatatatca

SEQ ID NO: 26886 - DNA, 101 bp, Gossypium hirsutum
  Clone ID: LIB3147-055-Q1-K1-E5
tcggccaagcgttccgccaagccttccgattaaattaatggttatatgcggcaatggtttcttgagatcaaaaatatgctttgcgtttcttcctactgctt

SEQ ID NO: 26887 - DNA, 372 bp, Gossypium hirsutum
  Clone ID: LIB3147-055-Q1-K1-E7
gttcacttctaccaattgttggaggagttgttcttgcatctgttactgaggcatcttgcggttggcctggattttggagtgcaatggcttccaatttggcaaaccagtcccgtaatgttcttagcaaaaaactcatggttaagaaagaggaatcgctggacaacattaccctcttctcaataataacaattatgtcctttatcttgctagctcctgtggctatctttgtggaaggcataaagtttacccctgcctacatgcaatcagctggtttgaatgttaaagaagttgttgtaagatctctgcttgctgctctatccttccatgcctatcagcaggtttcatatatgatactgcaaagggtgtcccctg

SEQ ID NO: 26888 - DNA, 419 bp, Gossypium hirsutum
  Clone ID: LIB3147-055-Q1-K1-E8
ggccaattggtttcgagttgtcggctgtttgtcccatgcggcaattttggcacgttgggtggatggggttcgcacgtgggcacacccaccaacgactatcttagttcatgttttgcttatagcggtggtgatgtgcccacaactagtcctctccaccatattcatgtatgccttcttaattttggcattgagatttcgttaccgcatgcgagtcacacacaatgtatacctaaggctctcttacgttgacgctgtcggtcctgatgagctcgatgaagaatttgacggactttcaaccacacgatcggcagacacaagtcgggttcgatacgacccgttacgcgcattggcatgccgagcacaatcactattaggggatgtagcaacccaaggggaacgtttagaaacattgtttaatt

SEQ ID NO: 26889 - DNA, 441 bp, Gossypium hirsutum
  Clone ID: LIB3147-055-Q1-K1-E9
catggtcattgatgtgagagtgtcccacagtttatatataattctgggtattcttttggctcaatgaacctcacacgggacaagaaatctggtgcaaaaagggaccctcatccatggcggaaacctttttcattttgtggtttgtaatatttatttacatttggatttaagttaatgatggtataaaaatgatcaccttgttggctacacagatgcctttcaaatggagcccctccattgacaaagtacacttcaaggtcttttttataggcggattcgacaaaatagcacacaatacaaggaaaaaaagaaaaggggggacagatggacccctagcagatctttttcctctctttttctttttcaaatagtttcaatgttttttttcttcaggagaaaaattaaaaagcatagtttaattggaaagacccaagagcaaca

SEQ ID NO: 26890 - DNA, 381 bp, Gossypium hirsutum
  unsure (1)..(381): unsure at all n locations; Clone ID: LIB3147-055-Q1-K1-F1
gccaaaaggagagctgaaattgctaggttgagagaactgcacacactgaaagggcatgtggaagcggtggtgagattgaagaacctggacatagacacaatccagcaagcgtacacggtgtaaggcggtggaatggtattccgaaggaatagtggaaaatgtaatgagagggagcgttttcctgcgagtgaagctctaatatatgtatcttttattaccttaatcccgtccgccattttacaagggaaaggttattgtttatggcattttatgtttatattagtagtaaaaaaccatgtgttttgcttttgttgtagtaaaaaaaaaaaaaacaaaaactggtatagtaggaataagaacccaaattaactttttcggntt

SEQ ID NO: 26891 - DNA, 438 bp, Gossypium hirsutum
  Clone ID: LIB3147-055-Q1-K1-F10
cggacgcgtggggtttttttttgtattctatgtgtataatatgcatctgtaaacttacgaactgaagaaataccttggctttatagccgaagggattaaaatgatagaactaaataaaaagaaaatacaatattctttgtttttgtctttgttttgctgtgctttcgtcctttttgcaggtacggagtatgcgtggctcgtgtacatggctgtgctggggcttggcgtgaggcgtacggaggcgcgcgtggtggtcgtacggtgctggaggcgcatggaggctgtggcttggctgcggcgcaaagtgggagaagccctagggtttctattagggtttaaatttttggggcttgctggcctgtgaatctttgggtctagacttgcttgggcctatattgtaatggactgggtttgagtttagtaacaataaatttaaag

SEQ ID NO: 26892 - DNA, 402 bp, Gossypium hirsutum
  Clone ID: LIB3147-055-Q1-K1-F11
aaaaaaaaaaaaaaaaaaaaaaaaaaattttttaaaaaaaaaaaaaaaaaaaaaaaaaaaagaaaaaaattaaaaaaaaaaaaaaaaaaaaaaaaaaaaaaaaaaaaataaaaaaaaaaaaaataaaaaataaaaaatttttttttactcaaaccctctttttttttaattcaaattttttttcccccctctttctttaataacctttttttttttaaaacctttattttttttaattccccccctttttaaaaacttccctttttaaaaaccttttttttcccaaattaattcccctttaaaccaattccctttttgccaattgttttatattctaataatgcccccccattttctttttccataaatttttcccacctttttttctttttagcccccccc

SEQ ID NO: 26893 - DNA, 372 bp, Gossypium hirsutum
  Clone ID: LIB3147-055-Q1-K1-F12
ctaaggcatcaaatgatggaagaaaggagaaatgcagaggaatggatgttagatcatgcacttcaacaggcagtaaccaagcttggaccagctaaaaaaaagaaagtggcattacttgttgaagcttttgaaacagtcttaccattgcctataactaaatgtgaaactcatttaaggcatcatacttcaacaggatttgctcatagccatggtagaaccattcaagcttgtaactgatagactgttctattacatgttattagtttggttttttagtttgtatttgtgggtgagaattatgtctgctgttatgtactcgtaatggtggcactaaagtttatgttttaaatatttaatgcatcaatgtttttt

SEQ ID NO: 26894 - DNA, 368 bp, Gossypium hirsutum
  Clone ID: LIB3147-055-Q1-K1-F2
gcttcatgagaatgttggcggtgacattgctgcatcaactagaattatatatggaggttcgcgggatggagcaaactgcaaggaattggccgcacaacccgatgttgatggctttttggttggtggagcttctctaaagcccgagtttgttgatatcatcaaggctgcgacggtgaaaaagaattagaagttgaaaagcaggaattaaaggtgaaacagaaacaaccttctgggaaactttaatttttgtagttgagatctttccttggaacctaatgtctgttgaaaatttcccgatgtaataagccaaatttaacaatgtgttttttttgtggtggttgaggcattgatcctcatttcggactttg

SEQ ID NO: 26895 - DNA, 417 bp, Gossypium hirsutum
  Clone ID: LIB3147-055-Q1-K1-F3
cccacgcgtccgcccaaacagagagaagctttccaatccctatgtcaaggcttccccctcaggttgctcaaagcatccaagcaggtgctgccagacctgggaaagtagttggatcagtattgcgatacaacaattgtggggcattagctgcaggtgaggctcttgaacagcgaaggatggctcggaatccttcagttccaactcagtatactgccacaaattgctcatatccacggagaaatcccgtctgtaaagatgatgaagaaaatgaattgcagccaaaaccccagtacatggctaggaaagttgctgctgcccaatgtggatcaagaagtcagtggtattgacctaatatcaactactaatggccaacaaaaaatgccggtgaggatctagtcccaaattgctcttactact

SEQ ID NO: 26896 - DNA, 358 bp, Gossypium hirsutum
  Clone ID: LIB3147-055-Q1-K1-F5
cgggtcgcccacgccttcggccaaggcttccgcccacgcttccgcccacgcttccgcccacgcgtccgcccacgcgtccgggggcgcgtccgtttgacaatgaaatcgatatgctcggtcttgagacctatcctggtgttaaacgcatcaccattaagcctcaaaccgataggtgggtcttccctgaaaccaaaaccggcatcattgtgttggctgaaggacgtctgatgaacttgggatgtgccactggacacccaagttttgtcatgtcctgctcgttcactaaccaagtgattgcccagctcgaactatggaaagagaaagcaactggaaaatatgagaagaaagtttacgtatt

SEQ ID NO: 26897 - DNA, 441 bp, Gossypium hirsutum
  Clone ID: LIB3147-055-Q1-K1-F7
gttgattaatgggtttagggactatgctctgacgagtgctttgagggaccgcaggttcccggctattcaagctaaagaactgcctaacttagaatgtacagtttctattctgactgattatgaaacagctaataactaccttgattgggaggtaggaaagcatggcataattattgagtttgttgatgattataattcaaggcgaagtgccacatatttacctgaggtgccggcacatgaaggttggactagagtggaggcaattgactcacttatccggaaggcaggtttcagtggccccataacggagtcgctcaggaagcgtataaaactgacccgttaccaaagcacattatttaccatgcactacagtgactatgcctcccaagttaaggcaaccaggggtgcagcgcctactattgctggcgctaagctcggaaa

SEQ ID NO: 26898 - DNA, 440 bp, Gossypium hirsutum
  Clone ID: LIB3147-055-Q1-K1-F8
gaagaatcaacccttacatgtcctctccttgccacattgagttgattttgtccgagaaggaggaacctgtcaaaaaagagcctgagactcaattggcagcaagcaagtccaagaagtcccaagcttcttcttgagtgaacaaagtttgaaactttatcaagtcagttaatgtagtgatgtctggtctttggatttcatacactatttttgaagtttttgacattaagatgtgttggatggttttttatttcaaagcatgttttagtcaaatgttgtcttgagttatgtttttcttggagattttgtctcaattacagtgttctatgttatgtttcatttatatgacttttaatataaaacaaggttcgttaattggtaggttggtttggttgtaagttaatttgggttttaaagtttttgaattattttgatttaagcaa

SEQ ID NO: 26899 - DNA, 449 bp, Gossypium hirsutum
  Clone ID: LIB3147-055-Q1-K1-F9
cagccgtccgaaactatattagccaaatacccagatcgatttcctgtgatcattgaaaggtattcagggacggacctcccagatatagagaagaatatgttcctggttcttcgagacatgttggtgggtcagttcattcacattttaagtagcaggctacatttgagtcctggaaaagctcactttgtttttgtgcacaatacattacctcaatcagtaagtctcatggggtgtgtctataattctttcaaagatgatgatgggtttctctacatgtgttacagcactgaggaaacttttggctaaactctcctctgcatctttaatcttcaatgtgaaacaatgggaaaatatatatacatatctatgtatgtgttggtggaattggttatagttcaattcaccctattgatctgtaaatgatgtaactatatttaaatataaaatgg

SEQ ID NO: 26900 - DNA, 467 bp, Gossypium hirsutum
  unsure (1)..(467): unsure at all n locations; Clone ID: LIB3147-055-Q1-K1-G1
ttcccgggttcgacnccacgcccgtccgtcccactgccgtcnncggttcaaaaaatctgtcatggcgtgttggatatagaagggtggcnntgatgggctactagaggcgttanttccttctgaaagagtgcgctctggnngaaattgtgttttcacttgggcgagnntatgatagaaagggcgcctggatgaataccacttnntctgcattttgcaaagtcttaaatnccagattttantttgtgatcntgttttanagctttancttgcacaatnntgttcttccatatnccttggatggtttatctcaatggtcatgctaatactttttgttgtactctttctctaggattctttcttttcttgaactccattgtcaaaaggcttgtaccaagttgtaatgccagtattaatgtagtcaataaaaactatatgtatggtaaagtatgtatttttattatttgctt

SEQ ID NO: 26901 - DNA, 257 bp, Gossypium hirsutum
  Clone ID: LIB3147-055-Q1-K1-G10
gggggtgtaaagttaggtctttcctcatgatgatttttaaaaaaaatttaaaagaaaaagaggacattgaatatcctgcttctgtttttgttcaattataataattattatttccatcacttttcttttaattagtatcccaaaaccatctctaattttcaagcagactgaaaataatgtatgatcacacctactttcctctcatattaaacactgcttcctttagaagctttaacttcaaaaagagcaaaacaaat

SEQ ID NO: 26902 - DNA, 440 bp, Gossypium hirsutum
  Clone ID: LIB3147-055-Q1-K1-G11
cccacgcgtccgcaacctcgattcatggttcagcttttgcacaaagccagaagatcatgggtgccaaccaaaacatgttaattcttgaacattcggctaagaactgttccacaaaaacccaagtaaaagcccgtccggtagttggttctaagcttgtagcacaaggtgttcttcgtaaacccgggaatggctcagctcttggtcccaaggctccggttcaaccaccacctgaaatatggacaaggggaaatggccttgatgaagttgttgacatggcagatatgttgcaaatggaatcccaagattggttcctaggatttgtcgagaaattcttggatgccgatgtagacacatctgttctatccgacaacggtcaaataagccggatgttgacacaactcaagagtgttaatgacttgttagatgaaattagttcgagt

SEQ ID NO: 26903 - DNA, 425 bp, Gossypium hirsutum
  Clone ID: LIB3147-055-Q1-K1-G12
cccactcgtccggcaatcgatgctatccaagagttagaagtacttgcagctatggacatgggcaaaccatttaaagatgatgctcagccaccgcccccaccacccccagcaccagaaccgacacagcctgcaccgatgccccaaaatatggaaggacaagtgtattaataacgaagccctatctctctgtatgattattaagaaggcaaggcgtggaagaaaatgttctgaccctagacatatgatatttctgtaaagggaaaagtatgaagttgcagatcatctaatttgtgttggtattagtggtgaggtgtgtgttcgcttgtgaaccctgttcatcgacttttaattattcccccttcatttagtgcaacattaagtcaagcattccttgttcgcttggattttgcttgagtgctattatt

SEQ ID NO: 26904 - DNA, 446 bp, Gossypium hirsutum
  Clone ID: LIB3147-055-Q1-K1-G2
ctggtttgatcctaaatgggaaggctgcctgctgtatgcacatgggaaactttgacaaggggtggacactgttacttgaagcactcaataaggatgcaaaggatcctgaaactctggccaacctggttgtatgcggccttcacctcggtaaatcatcttcacgttatctaagccaattgaaactcacacatacagagcacattcttgttaaacgtgcatcatctgcggaagacagctttgaaagagcagagcaatcagatgcttgaagaagtggagttagttttgttttattctacaactgctctgactgctattctttgccctacgtgagtctatgatcaattatgagatcgttggcaaatttagagcttgctcggcaaaatagaacggtacttggaaacatttggattctgcgtttttttttggctgttagtactgctcttaaa

SEQ ID NO: 26905 - DNA, 429 bp, Gossypium hirsutum
  Clone ID: LIB3147-055-Q1-K1-G3
aagatgatgacgaagaagactcagatgaagattcggaggaagatgaaggaaagacttgggaagagttggagagggaagcaagctatgcagatagagagaaaggagatgattccgatagcgaggaagaacggaagagaagaaagatgaaggctttcggtaaaggtcgtgtacctgataagagacccagcggtaaccttccgaagaggtccaaattgaggtgacatgctttttgaaaacaaatgtagtagtaccagcaacctagtaaaatatggtagttgtactaaataatactagttgctttcagtagtatatgtttaatcaaggttttttatttgttgctttccatcccttttttgtgtgtcaatcaacttgttataaacttttaccagtaaattagctaagataaaatatcatggaggttttacctgt

SEQ ID NO: 26906 - DNA, 431 bp, Gossypium hirsutum
  Clone ID: LIB3147-055-Q1-K1-G4
agaatacctccccagtcgcccctgccaggcttttcaaggcctttactgttgaagctccgagagtggggcccacggctgcaccaaatgcagtcaagagcattgaggttgaagctaatcctagctctggaagtatagtaaaaatcaactttgttgaaggccttccattccaatatatgaagcaccagatcggaggacatgatgaaagtaatttttcatacagttacgatttaatcgaaggtgggcctttgggggataagcttgaaaaaattagctatgagaacaagtttgaggcagctgcaggtggaggaagtatttgcaagagctcaatgaaattctacactgttggcgataatgttatcactgaagacgaaatcaaggctctcattaaagggagtgaaggagtttacaagcctgttgaagcttacctcttg

SEQ ID NO: 26907 - DNA, 430 bp, Gossypium hirsutum
  Clone ID: LIB3147-055-Q1-K1-G7
ctttagcctgttcgacaaggatggagatggttgcattactaccaaggagttgggaactgtgaggcgatcacttgggcagaaccccactgaggcagaactgcaagatatgattaatgaagtcgatgctgatggaaatgggaccattgattttcctgaattccttaacctgatggcaagaaaaatgaaggatacagactctgaggaggagcttaaagaggcattcagggtgtttgacaaggatcagaatgggttcatttctgcagccgagctgcgccatgtcatgacaaaccttggtgaaaagcttacagatgaggaagtcgacgagatgatccgcgaagccgatgttgatggtgatgggcagatcaactacgaggagttcgtcaaagtcatgatggccaagtaaaggacctctccaactataaccaggatt

SEQ ID NO: 26908 - DNA, 433 bp, Gossypium hirsutum
  unsure (1)..(433): unsure at all n locations; Clone ID: LIB3147-055-Q1-K1-G8
ggtagtcaatagctcactgtagctctggcagctatgttattagaatggttttatgtggagacgttcttacaaggggaatggtattgttttagtattataattattattccagtggagctttgagatgcagcagcatgttgggggcgtcaaatatattacacaaaaggaaaggatatactgtttttatggttttttagatggttctttaatttgtctcacctgagttgttttgttaatttgtttgaacctcttcnaaaaaaaaaaaaaaaaaaaaaaaaaaaaaaaaaaaaaaaaaaaaaaaaaaaaaaaaaaaaaaaaaaaaaaaaaaaaaaaaaaaaaaaaaaaaaaaaaaaaaaaaaaaaaaaaangggggggggcccttttaaagaaacaaattttttttcccggggtttgggagtttttattttttttt

SEQ ID NO: 26909 - DNA, 441 bp, Gossypium hirsutum
  Clone ID: LIB3147-055-Q1-K1-G9
cccacgcgtccgcccacgcgtccgcccacgcgtccgaatggtgttcaatgttaagatttgcgcttttggctatttacagcgcacatgctggctttctgcttggtttaacatgaccagctgaattgatcctccagggttttcttgtccatgggttccgattgtgccatctgtttgcatctttttcaacatatacctgtttgctcagttgcactatgaagcgtggatcagattcatcatcctcagcatagtatctgtaggtatttatgcattttatggacagtatcatgctaatccccgtttagatgagacaattatttaccatatggggcctgaagaagatagacactgagcattaatgtacagtcaccaatagttattggtgggacttgtagtctatcatcctattattgcacaatcagcttataaaattattagtgatca

SEQ ID NO: 26910 - DNA, 193 bp, Gossypium hirsutum
  Clone ID: LIB3147-055-Q1-K1-H10
tttacacgttacaacaataatgcagacctttatcttatgagaactgaaatgtgtgtggggggagcgcttttcctgatgtggaacatacagctccatcacctataatatgactctccgctctactagattcccattcggctcctagtgaaccataaacctgtcattggcgcctttacactcattggagaaaaac

SEQ ID NO: 26911 - DNA, 406 bp, Gossypium hirsutum
  Clone ID: LIB3147-055-Q1-K1-H11
cagacctgaacgttgccgagatgaccacatctgagactctggttcttggtgtagcagcggggaaagcacactttgagggagctgagatggaattcggggctgagaacggctgcaagtgtggagacaactgcacctgcaacccttgcaattgtaaatgattagagaccaaagccaaagctccctgtaagcagagacgcctttgtctttaagaaataatatgttttgttgtttatgtgtttttagaataaagtagccatggcttgtcgtaagttttgcctgttgccgccacggttacttggtgcttgccaatagatagagtgaagtactaatatttacttgtttttctgtccaatgtgagcatctctgctatctcaagatatattgtgactattacataattaatgta

SEQ ID NO: 26912 - DNA, 377 bp, Gossypium hirsutum
  unsure (1)..(377): unsure at all n locations; Clone ID: LIB3147-055-Q1-K1-H12
cgtccggcangagcanctgctttgccattgatgcttctaccgcgagcttgttcctctaccctctgacgtgaggaactcgaaaggcaagaaagtangcgatcatcatcgtcaacaacccttagaagggctagtgtggaaggattttgattgtttatagtatgaacattttttttttcaattttttctcttaaattcaacaccaacatatagaatataaaagatgtggttcatccacccatccctctatatttagataatgaaatagagaggatgctgttttttgtagatatgagtgcataacttgatgtgaaactgggtccaatattttcctcaaatccaaaatgcaatcatatatttatataaatatatacacaagt

SEQ ID NO: 26913 - DNA, 447 bp, Gossypium hirsutum
  Clone ID: LIB3147-055-Q1-K1-H2
gagaaaccaacagctgctgcctttacagcaacaaatcaaagcaatgaaaatggaaacatgagtgatcctgacttgctcgtccaaattctcagcaaccccaaattgattgagaaattagttacagaacatggagtggcttcaggtcacatcggtagaacagaaaatgatggagcgttttacggcaagtcaaatggggttggaattggagcctcaaataaacatggttcggttcctggtgtatgtccaatttcgcattcacttgcaatggaacttccccaaaagaaggatgtaaactattacaagaacttgattcaacagcatggaggagaaagtcaagtaggaggtcagaagttcaataaccgatacaatcaacagttaagacccaaccaagaagtaataaataacccgaggtcaagagattcgaagccgaggataatgaaaccttgt

SEQ ID NO: 26914 - DNA, 444 bp, Gossypium hirsutum
  Clone ID: LIB3147-055-Q1-K1-H3
gcctcccccaacttaacaccagcaaagcaaatgcttcaccaatggggatcgatttagtcgcaggaggtaagagcaagaagacgaagaggacagcccccaaatccgatgatatttacctcaaactcctcgtcaagctttaccgtttccttgtaagaagaactgggagcaaattcaatgctgtgatattgaaacgcttgtttatgagcaaagttaacaagcctccactatctctctctaggcttattgaattcatgaagggaaaggaggataagattgctgtggtagtggggacagtgacagatgatattagggtttatgaggttcctgctttgaacgttactgctcttaggtttactgagactgctagagctaggattgagaaagctggtggagaatgcttgacttttgatcagcttgctttgagggcacctttgggtcaaaaca

SEQ ID NO: 26915 - DNA, 422 bp, Gossypium hirsutum
  Clone ID: LIB3147-055-Q1-K1-H4
ggtcaagcatctttgatgccaaggctggcattgcattaaatgacaattttgttaagcttggggcgtggtacgataacgaatggggttacagttctcgtgtgatcgacttgatccggcacatggcttctgcctaagtgagtgattttggtgaaccaaactcatttcataatggactttttaataatagcctcgttcttcagctttagcaaaatatggaagagatgctatgggaataataatagaaattgctcgggattctgggagtttctaattttacactgtaattgtgttctgtctgaaacacttgtaatatatataattacaaggaaccaaacaaacaaggcaaggcttaagtaaacttgggaacaagaagctaacattctatttagcatcaaaacttaaagaatttaatttacttgttt

SEQ ID NO: 26916 - DNA, 429 bp, Gossypium hirsutum
  Clone ID: LIB3147-055-Q1-K1-H7
agttctacatcaccagcggctgccctcttttttcaaaatttgaaccccatctagtggttggggctggtgggtatgtttcttttcctgtctgtttagctgctctgcagaagggatcaaggttgccatccaaaagcaaaactccgttcccggtattgctaatagggccatctctttcgttgctgattgggcgttcgttgcattcaattcaacggttcatagtttcccaagaaaagaaaaatgtgttgtttgcgggaataccgtgagattgtctttgaaaaattcggtttccaaggcattctcaaggttgcatttttttccatggctagaaaaaatggaaggtttcttcagaggacatcaaagtgattaagggtcaaggaggttctataagagctaatgctgataacattgccttgttgaatgtgtactctc

SEQ ID NO: 26917 - DNA, 437 bp, Gossypium hirsutum
  Clone ID: LIB3147-055-Q1-K1-H8
cccacgcgtccgatcacttccagggaaatccagacggctgttagacttgttcttcctggagaacttgccaaacacgccgtttctgaaggcaccaaagccgtgaccaaatttactagttcttgaatttgatggaatttagggttagtgttttcccctccattttgtcagcgtagttttgatgactgtaagtacttgtgtcacttatggatttgaaaaggaagaccctttttctttttggatatataaaattgctaatgtttgcctatattacgactgtctttatcaaggatgttgataaataaccacagcaccataaatataattaaatgagtatgcaaaagaattaatgattattacagttgcttctaagaaagaaaaagctggtggaaaatgctttactattgatcaacttgctttgagggcaccttttggtaaaa

SEQ ID NO: 26918 - DNA, 346 bp, Gossypium hirsutum
  Clone ID: LIB3147-055-Q1-K1-H9
gctggctgaagaggagaccagaatgaccgtcagtttttttgctgggttttatcacgaagagaaagacgttggatattattactagaaatagcacaaattttggatttgcttttcatatatcgtatgtgttatttttttcactcaaacgatgacagtgaaccatcattttgagaccaatgggtgatattgtatatgatttgttcaggcataacatacaagatgccactgctgtattatggcggatttctgagtggtatgctgaaagtttaatgatagcattgaccttaggtattgggagaaagtagttgtcaatttatatacacagccgcttgtattgttttttttt

SEQ ID NO: 26919 - DNA, 449 bp, Gossypium hirsutum
  Clone ID: LIB3147-056-Q1-K1-A1
gcggcagctagtgcgaagccacttgcaagtggaggaaaccaaaatgtgatggctatggctctctttgctatgaccctcgatctgatggtggagatggagtcatgttctacttccatggagccaggggtgggaacttcgccatagtctcagatgatcagcttcaaatcaatgctcatttcatcggcactagaccacaaagaaggactcgtgatttcacatgggtgcaagccttgactgtcatgttcgatacccacacacttgacattgcagcaaatagagtttgtcagagggatgacaatgtcgatgctctcagtgtacgatgggacgactagacggttaccatcccttacgacggagaaggtgactggaggaagggtaacggctatgaaagacaagtgttggtggaaagaaccgatgacaaaaacagtcttcatgtcaaaatatctgga

SEQ ID NO: 26920 - DNA, 435 bp, Gossypium hirsutum
  unsure (1)..(435): unsure at all n locations; Clone ID: LIB3147-056-Q1-K1-A10
agtatacagaagcaaagacatatgcatctaggaccattctgttcttgagaggggatggtacattgaagtctgtggccattgagttgagcttgccaaaaatggaagaagataaaataggatgtgttaacaaagtatacactccagctgaacatggagttgagggttggatttggatgcttgctaaagcttttgtaaatgtgaatgattctggtcaccatcagctagtgagccactggttgaacactcatgcagtgatagagcctttcgtaattgcaacaaacagacagctgagtgtggttcatccaatttataagcttctccatcctcacttccgtgacaccatgactatcaatgcattggctagagagttgctcattaatgctaatggaantatagagaagacattttgccctggaaaatactctctagagatgt

SEQ ID NO: 26921 - DNA, 292 bp, Gossypium hirsutum
  Clone ID: LIB3147-056-Q1-K1-A11
ggtgaaaagtataggagtcgctaaaggagaggaagcaaagaaagcagcaatagcgcaagtggaggcaggccgttagggtttaaagataggattaaaagggcgtaaaacaataaactttcaagggtttacttttggcacttaacaatctattcttttctttgggcagggctactgtgccgggcccttccaccaaacctgaccataaaccaaagccaaaccccaaccccagcaccccattttaacagggcaagtgccctaaagatgcccttaaattaagtatatgtgcttatgt

SEQ ID NO: 26922 - DNA, 272 bp, Gossypium hirsutum
  Clone ID: LIB3147-056-Q1-K1-A12
attgtgcttacaacacatttcaagacactgctaataactatgtttcttaaataagcgggttccttaattgtgccgggggatggtgatttgatatttgttttgtttaaggagtggaattaattataatttttatgtttcttaaataaatgggcacttaattgtgctgggatggggattggatatttgttttgtttaaaggggtggaattaattgtaatttttatgtttcttaaataaaccggcacttaattgtgccttggatggtgatttgtt

SEQ ID NO: 26923 - DNA, 443 bp, Gossypium hirsutum
  Clone ID: LIB3147-056-Q1-K1-A2
cggacgcgtccgcccacgcgtccgcccacgcgtccgagggattaatgtcattacattctatgctccaatactattcaggacaattggtcttcgtgaaagttcttcactcttgtctgcagttgtgattcgttgtttcaacgttggctgtacattcatatctatgtttgtagtcgataagcaaggtcgaagagtactgtttatgcttggtggaattcaaatgcttgcaacacaagtaacaataggagggtttatgacagctttattaggtgatcatggtggattgagcaaggcgagtgcttatgtggttttagttttgatatgtatatacatttctgggtttgggttatcttggggtcccttgggatggttagtccctagtgagatttatccgttagagattcgatcagcaggccaaagtattacagtagcagtcagctttttct

SEQ ID NO: 26924 - DNA, 355 bp, Gossypium hirsutum
  unsure (1)..(355): unsure at all n locations; Clone ID: LIB3147-056-Q1-K1-A3
cccacgcgtccgaaagaacactccacaaaacttactactcttgaccctttgagggaaaccatcaagaattttaggaacaagaatgagaaaatgggcaatgagtcagacgctgctacacgggcactgtttcaggatgcagacaagtactgtaagcttatagctggaagactatcgcgaggccctgggtgcctaaaatcgttggcctttctcgtcgtcgcatttggtgtgggtgctgctgtttagctccaacatggatggtgggactggacaactgatgtagtatcnctctcaaatcctgctaaagctcggttggtatttcttctcgtaagtcattttattgagttcaactgtaagg

SEQ ID NO: 26925 - DNA, 335 bp, Gossypium hirsutum
  Clone ID: LIB3147-056-Q1-K1-A4
agtgagttttgggcaaggcaatatcttgggcagcaattttacttgagagtttatacacctgtgaactcactcagggatgaatatctcattccaaagaatgctttgctttgtggcagagcccaaggaagaagcacaaggcctctttgaaacatttccagtagccgaaattgttgagaatcaaccattagtcaattataaaatatgcctcaattcttttcattttttgtttcaccagaatctgtatttggttttgtatctaaagaaatgaaaataattgtattaaattagaacattctttttgctgaggaaataatacaaggctcaatttctgtgat

SEQ ID NO: 26926 - DNA, 452 bp, Gossypium hirsutum
  Clone ID: LIB3147-056-Q1-K1-A5
ctctttggtaagctattttttgccttctgggtgatcatccatctctaccccttcttgaaaggtttgatgggacgccaaaaccgtacacccaccattgttgttgtatggtcaattctgcttgcctccattttctctttgttgtgggtgcggatcgatcccttcacaaccagagttaccgggccagatgtagaacagtgtggaataaactgttaaagagagaacctataaagactgaagatttgttctggtgtcacttaagtttccaatgccaaaggtttgtttagttgtaatttgtgtatgtcagttcacatcatgttcagaatatacggttgttgatatatatatatgtcatcttgtttctactttgatgtaatattttggagttgggacataacttatcgatagtgctttctctcaagaaaacactacttcgaagtagatatatgttttgg

SEQ ID NO: 26927 - DNA, 331 bp, Gossypium hirsutum
  Clone ID: LIB3147-056-Q1-K1-A6
ggaattgccatatgctaatggaaatggtgcatgggaacgccgacggagcaggagttaagtgctgcaaggatgtaactcttatgtgaagggactgattaagtttgtttagtttgttgacttcagtgctactgttttaattgggcaacgcccgcagcatcttggatttggttaagttactttctgtttttccttatttctatgatggttttatttgctttatctatgctaagtacttttttatgctttgggggggaatctttaattgacctctttatttttatttagaaatcattttttttaatttttatttttattatattttttccttttt

SEQ ID NO: 26928 - DNA, 446 bp, Gossypium hirsutum
  Clone ID: LIB3147-056-Q1-K1-A7
cccacgcgtccgtcatgattatccaaccaaggatggcagcgcgatccgagactacatccatgttatggacttagctgatggccatactgctgcacttaggaaactttttaccacagagagtataggttgtgttgcctacaacttgggaactggatgtggtacatctgtgctcgaaatggttgcagctttcgaaaaagcttccagaaaaaatccccattaaactatgcccaagaagacctggagatgctactgccgtttatgcttctaccgagaaagctcaaagggaacttggttggaaggcaaaatatggtgtagatgagatgtgtagggatcaatggaagtgggcgagcagcaatccatggggataccagtcaaaaaagcgttaaaagctttgcttaagattttctcatgttacaccaacatcaacagcatgtttaagcaaaagt

SEQ ID NO: 26929 - DNA, 146 bp, Gossypium hirsutum
  Clone ID: LIB3147-056-Q1-K1-A8
cccacgcgtccttccacgcttccttcctcttctttcgtcagccacatctaccaaagtgtgccagactaacttttaaagcatacaaatttcacctttactaaatggcccacatatcccatatatagccatcctaaacgtaaccgcct

SEQ ID NO: 26930 - DNA, 157 bp, Gossypium hirsutum
  Clone ID: LIB3147-056-Q1-K1-A9
cccacgcgtccgagggtcgaagagccaaccaagatatggaagtatgtactaaaataacgagaggaaaaccgggaaatcccaaaccgggatttgaaacacaaagaaaaggggggctagccccctaaaaaaacgggcccggccccccacacaaaaacca

SEQ ID NO: 26931 - DNA, 179 bp, Gossypium hirsutum
  Clone ID: LIB3147-056-Q1-K1-B1
cttaaccacccagatcttggtttaactatgtaatttgtttgttgcctatctgtcgaaactacatggtattatgttaggcatatgctttatatgatgttgactgttctattctatgtgcttgagaatacattttatgtaattcgaatcttatttgagtttctcaatattttcttttactc

SEQ ID NO: 26932 - DNA, 442 bp, Gossypium hirsutum
  Clone ID: LIB3147-056-Q1-K1-B10
ggaagccaaaagatgttcatccgccatcttccttgtgggtatcaatctacttttcctcacttcagtgagtggatgctacacttgtgttcacccaagaccaagtggttcacctcccaccaaaaggagctgccctagagatgctctgaagctaggggtttgtgccaaggtgctgaatggaacagttgctggcgtagtggtggggaaccctccagatactcagtgctgctcagcgctagggggacttgtggatttggaagctgcagtgtgtctttgcactgccattaaagctaatgttcttggcattaacattgatattcccattgcattgagtttgcttatcaacacttgtgggaagaacctaccttctgacttcatttgtgcttaccaatgttttgtaggtaatttcaacaattaactctgctggatggaccctttttttctc

SEQ ID NO: 26933 - DNA, 318 bp, Gossypium hirsutum
  Clone ID: LIB3147-056-Q1-K1-B11
aattaccagtacatcttcgctttgagattagatccaaaattcccctttcatcttatttccgagtccccaatttttcctgaaaccctaatcctaatcccggattcctctcgtctacatcgtctagcaaatggcaaccgaggagccggcagtcgtggcagaccccgcaccggagacggaggaggacaagactgctgagaccaaagctacttcaaaaatctggcagagcaaagaaaaccaaggaacccaaaaccaagaaagctgcagctcctcggaaaccacgggctgttcctactcatccaccttacgaagagatgatca

SEQ ID NO: 26934 - DNA, 390 bp, Gossypium hirsutum
  Clone ID: LIB3147-056-Q1-K1-B12
cccacgcgtccgaaagcggcagcaaaggtgtcatcttcgattcacaatggtgaaaggtcgccaaggagaacgcgtcaggctctatgttcgtggaaccattttgggttacaagaggtcgaagtcgaatcaatatccaaatacgtcactgattcagatcgaaggggtgaacaccaaggaagaagtgggatggtactgtgggaagcgaatggcgtacatttacaaggctaaagtgaagaaaaatgggtcacattatcgttgcatttggggtaaagtaactaggcctcatggtaatagtggtgttgttcgtgctaagttcaagtctaatctccctcctaaatccatgggtgataaagttagaagtttcatgtatcccaacaacatttgagatgc

SEQ ID NO: 26935 - DNA, 232 bp, Gossypium hirsutum
  unsure (1)..(232): unsure at all n locations; Clone ID: LIB3147-056-Q1-K1-B2
cccacgcgtccgtattgattcaatatacattaagacatggtagtttctgacttggtccgtgaactaaaaagagtatattctctctgtctagcattaaggcatgtaggaccacaactttcatatattcttatgtggtgcataaaggcatatcatcaggaactttcggtgcgtttaaaaaaaaaaaaaaaaaaaaaaaaaaaaaaaaaaaaaaaaaaaaaaanannnnnaatat

SEQ ID NO: 26936 - DNA, 453 bp, Gossypium hirsutum
  Clone ID: LIB3147-056-Q1-K1-B3
ggaatcaggtattcttgctagttgatattatctgctgttgcgccattattttcccaattgtttggtctattcgttcgttgagggaaacttcgaaaactgatgggaaggctgcgaagaatttggcaaagttaactctgtttaggcagttttacatcgtggtgattggatatctatattttacgagaattgtggtgtttgctttgaggacgattgcagcttacaagtatcaatgggtaagcaatgcagcggaggagactgcatcattggcgttctatttgattatctttttcatgtttaggcccgtggagaaaaatgagtactttattcttgaggaagaagatgaagaggctgctgagctggctcttagagatgaagatttcgagctttgagaacctgggggctgttgataagtgaattggtataaagggttactctggatttttacctttgatg

SEQ ID NO: 26937 - DNA, 146 bp, Gossypium hirsutum
  Clone ID: LIB3147-056-Q1-K1-B4
tttttttttttttttttttttttttttttttttttttgttttttttttttttttttttaaccccaagggccattaatatattatagcaaaattctcatacatttttgcaatacgacactgtttcaggacccaaactcataattacc

SEQ ID NO: 26938 - DNA, 416 bp, Gossypium hirsutum
  Clone ID: LIB3147-056-Q1-K1-B5
cccacgcgtccgcccacgcgtccgcccactcgtccgcccacgcgtccgcccacgcgtccgcgcacgcgtccgcagattaatattttcaattagaatgatttatggttggcttggttggaccgaaaaaatgaagcatccaggctccgtttagaaaaaacccaattggtaatacatttatgattaccacctatatcataatcataaatcttttttatttacaaattcgaaatagaaataagaacgatttcaaactattaatcaatcgaataatatgagaaatacgttgaatatttggcggaaaacatgaaagaaaaaggaattaaaataaaaaaggaaatgaaatcatagcaaaaagatgtggtattgggtcatttgtcctatatgcgcaaatcaaaatcgggcggatctttactcgg

SEQ ID NO: 26939 - DNA, 445 bp, Gossypium hirsutum
  Clone ID: LIB3147-056-Q1-K1-B6
cccactcgtccgaaataacccagaaaatgacgggtgtataaatgcagttttgcttgtctaagaggtttacaccccatgtgttgggttgagtctgctaactttgcttgattgtcatttcatttcatgttgtttagtatgttacgtgtttcaaattttgagtagtcataaagggtaatttgaaaagtggaatgttttaagtggtaaagaaacatgtggatcgtgatttgcatgatgggtggatgaaggtcaaaaactgacaaccttggtgggatcacattgtcagctgcccacaattgctatcgggactccgatggccactcatctcccgtatggcatttgggatagcccttcccagttgcttgctttctatatagttgtccgcttcttaaaatctaaaatttcagaaaaatgtaattcagaattagagacgctaaagttttccaga

SEQ ID NO: 26940 - DNA, 451 bp, Gossypium hirsutum
  Clone ID: LIB3147-056-Q1-K1-B7
cccacgcgtccgcccacgcgtccgcacgagttccatcaccgcctacatcaatcctatggccgaagccacagctctttctaattttttccatccgcttttcatcaattttagtctccataaagaagaccatttggggattttgttgcttcagcaaaaaccgaagccttcttattgcctgtggattccccagtccacggacattccaacatattgtttttattgcattcggtcggcttgccttttggcagccgccgatctctttcggttggaattttcttcctgcaaaaatattccatcaataatctccaaagttggttgaccatatctccgcttttttgttgcaacttcccagattccatctgggccatattcaccagcttcaatctctaataatttcctttttccaagtttactttctcccacagaagcactccgctcttttgttgattta

SEQ ID NO: 26941 - DNA, 372 bp, Gossypium hirsutum
  Clone ID: LIB3147-056-Q1-K1-B8
gcgtccggtcaaatcagaatgccaagatattgcggaaatgtttttatccactggagttggatgtttatgagcgatgttctaattaacttcgcaaacaattttaatgtcctcttcagatcctgagggatgaggaaggtaaaaagctctgtctgtaagctaatgtgataagctccagctcaaaagattatgatttcaagatgatctgattgataggggtcatccaatgcaagtggataatcatctgtgtcaacatctctagaatgggttccctcttacaaagaaacaccttttaccggtatttattattttgttgccgtgctgacccacaaaatgtttgaaattgccctaatcacgtccattaattttttcgtt

SEQ ID NO: 26942 - DNA, 449 bp, Gossypium hirsutum
  Clone ID: LIB3147-056-Q1-K1-B9
cccacgcgtccgcagaaccgataaagtcaatggcatcgtcaacatcaaagctggcgtttcgtatagcactggcggttctcctcctcttggctctcttctacgtcggccgtccgctttactggaagatctccgccaccgtccacgacatccgccacaacaaacaaaccgttcaagaaggtatttcacagataatgctggaggctcagagatcagtggggtggtttaatgacgaatcagactcaggaatccatgaaaatcgtggtaagcaagcttcaaggagattgaaatttagggttttgtgatgggagtccccccttttgattcttatgttaattaatggagttttatctcataattttaataagtttagtttgatttagctcttcttattagaatttttttgttgatgttttagattggaaatgggtttttttagaggaaaatgtgag

SEQ ID NO: 26943 - DNA, 446 bp, Gossypium hirsutum
  unsure (1)..(446): unsure at all n locations; Clone ID: LIB3147-056-Q1-K1-C10
ggcgnncnncactnnggnnagctctacctacgtgccttgcccaccaccaccaaagagccacaggcctacccacaaaagcccaccctcggcacctgaacagccaggcacttgccccagagatgcactgaaactaggcgtttgtgctgatttgttgggctcagtgcgcgttgttgttggaccgtcgaggaccaaatgctgctctctcatttcgggtttggctgatctcgatgctgctgtttgcctttgcactgctattaaagctaatgagttgggggttaacctaaacgttcctgtttcattgtctttgctcctcaattcctgcgaaaagcaaatgcctgctggttacaaatgtgcttaagctcatttccaactgtttcctaagcaatgtttgggtttattcttttaccgggtctttttttttccgggccttgttaatttgggatttt

SEQ ID NO: 26944 - DNA, 436 bp, Gossypium hirsutum
  Clone ID: LIB3147-056-Q1-K1-C11
cccacgcgtccgcccacgcgtccggccttcgattatggctggaaaatcagtgccggtgggctggattctatccgtggtcgaggaggagatgatttgaagctcgaagttcttgacggattgctcgatgaggttgatgaagtgatgatatcgatgcagcccacgatctctctggtgcttgtgaagattttcttttggatattgaatttcccgaaaagttatccgagttggattgcggtcctcgtgaaagatcaactttgtgcaactcaagttcggaaagtcattcgcccggatttagtggaaggagtaatagtgtcgggggcatatcagaatcatttacagcaactgttcgagaatcaacagcgagatggtgggctagagaagaggttggtgcgattacatcataacttaggagaaacacggtgtcaggtccgtatga

SEQ ID NO: 26945 - DNA, 352 bp, Gossypium hirsutum
  Clone ID: LIB3147-056-Q1-K1-C12
cccacgcgtccgcccacgcgtccgcccacgcgtccggttagaccaagtctcttttcaggacagggtttgtttgataccagatgctgatgagtttctagattcactatggactaacaacaggcattgtagtcctctggagattgttttaaagttgattggataacatcttggatttgagttcccaatcctgtcgaattttagtgtatttgaagaaacattgcatgttttttagagtgtggagttggctgtatctttcatgacagtgaagttaaatagtgactgtttatcaaggatgattattcagacctgattatgtagaatccgacctcgtttgttaatttaatgttgaaac

SEQ ID NO: 26946 - DNA, 425 bp, Gossypium hirsutum
  Clone ID: LIB3147-056-Q1-K1-C2
gtcaaatcaaaaggccaagatattgcggaaagttgattatccactggagttggatgtttatgatctatgttcagatgaacttcgcaaacaattggaaggtcctcgtcagatcctgagggatgaggaaggtaaaaagctcggtctgaaagctaatgggaaaagctccagctcaaaagatgatgatgtcaagatgatcgatggagaggggtcatccaatgcaagtggagaatcaactgtgacaacatctcaagaaggggttccctctgacaaggaaacacgtttaaccgggatttatgatttggttgccgtgctgacccacaagggtcgaagtgccgattcagggcattatgttgcgtgggttaagcaagaaagcgggaaatggatcgagtttgacgatgataaccctatcccgcagcgagaggaag

SEQ ID NO: 26947 - DNA, 317 bp, Gossypium hirsutum
  Clone ID: LIB3147-056-Q1-K1-C3
gctacctccaacggatagaaatcttctaaacccgcgaccttaaacgcattccacataattccattgtcggaaggctacgatctatctccgttgttcgtagagaatacgagggcagagtaagaggagttgacgctcgccacgacaaggcccgctcgcatcgcgatgtccaggctaggacaggtggccatataccctaagttcaccgcttaatacagcgagttgtttgcgaggtcgcagctgcaagattgtggttggtacggtcaacttgcaattgcttcccatatatttgctgtgactcctccaatcttggccgtggt

SEQ ID NO: 26948 - DNA, 413 bp, Gossypium hirsutum
  Clone ID: LIB3147-056-Q1-K1-C4
gtccatagaaattgtcatgtacctctgcctcatacacaacaatttcacttgtcataaaacgccattgatcgacctcggcctctttaaggtgccgtagtgttgttcatttctttgttgcttctctttgtaattatgtacttcgctttaacagtttccccctgctttccctctttggccccttgtattcttgtctctttgatgaatttagccagcaagtaaattgcgtaagtataaagtttcacatacgtttcgaatttgtgattaaaaaaaaaaaaaaaaaaaaaaaaaaaaaaaaaaaaaaaaaaaaaaaaaaaaaaaaaataaaaaaaaaaaaaaaaaaaaaaaattataaaataatttaataatataaaaaattttttatataatatttaatttttgggggggcccttttt

SEQ ID NO: 26949 - DNA, 449 bp, Gossypium hirsutum
  Clone ID: LIB3147-056-Q1-K1-C5
gcatcaactaggttgtctcaatcaatgtctactgctaatggggcatcccctgatgaagtggacaatgatggactagaattacttgaagccgaagcttcattagattatttatgcaacttgtcacctcacagatacgaagctctttatgccaatctacttcctcaatcaatgcttggtgaggtgtttttggagaaatatgttgatcatggtgatacagttacagtaatcgataagaaacgaacatatagtgtaacagctgccgctaagcatcctgtatatgaaaattttagggtcaaggcatttaaggcactgctgacatctgcgagttcaaatgagcaacttacggcacttggagagctgttgtatcagtgccactacagctatagtgcatgtggtcttggttccgatgggacagatagactggtacagttggtgcatgagatgcatca

SEQ ID NO: 26950 - DNA, 142 bp, Gossypium hirsutum
  Clone ID: LIB3147-056-Q1-K1-C6
tcgagacttgcgatttgggagaatggttgtttcttaaacctggattttatgatgattatggggaaatgaactgaattggttttgagttttggttatatttttgcctcccgttttgagaaaaatgttgggattagatttgttt

SEQ ID NO: 26951 - DNA, 450 bp, Gossypium hirsutum
  Clone ID: LIB3147-056-Q1-K1-C7
cggacgcgtgggtcagaatcagggtttgaaaaaaatgcagatcttcgtgaaaaccctaacagggaagaccataaccctagaggtcgaatccagcgatactatcgacaatgttaaggccaagatccaggacaaggaaggtattccaccggaccagcagagattgatcttcgctggaaagcagctcgaagatggccgtactcttgctgactacaatattcagaaagaatcaaccttgcatctggttctgagacttcgtggtggcattatcgagccttctttgatggcattggctaggaaatacaaccaggataagatgatctgccgcaagtgttatgctcgtctgcacccccgtgccgtgaactgcaggaaaaagaagtgtggacacagcaatcagttgaggccaaagaagaagatcaagtagattacatatatcgacggaggaattctact

SEQ ID NO: 26952 - DNA, 452 bp, Gossypium hirsutum
  Clone ID: LIB3147-056-Q1-K1-C8
atcctattagcgaattattcggttcattcaatgggaagcaacgccgctctggcagcaaccgctgctgcgaatccgacgccggggtcttatgttgctatggttgacgttcaagatcagaaggattccaagttcgattcttcgtcgataaagtcattttcagtgtcgtcatcgagcgggaaaaccgcttccatcggggggaacaacggcggcggtggaaaagtccggtctgtagccaacggaacagacggtgacggttggtttaacaaagcaggccagttcagaaccatctttcccgatggtgcttcccagttatcatcccccggaacaacagcagaaacacaaagcgaatcaaccagagaagaagagcttactctttggaactcaatcgtcgatgaagcttcgaaaatgctcgcttcatacagagacgaaatgctcgaccatgaaacaattca

SEQ ID NO: 26953 - DNA, 445 bp, Gossypium hirsutum
  unsure (1)..(445): unsure at all n locations; Clone ID: LIB3147-056-Q1-K1-C9
agctgtaactgctgctggatctggatgcgtcgctgctttatctgttgaacgataccttgttcgaaatgatcttcttgtcgagtttcatcagcctcaaactgaagaggtcaagaaagaactgacggatagagatattcaagaaggttttgacattacactcacaaaacacaagggccagtatgctttgcgaaagttgtatcatgagagtccgaggcttatatgtgtattatatacttcaccaacttgtggtccatgtcggactttgaagccaattcttagcaaggtgattgatgaatttgatcagaatgtacattttatcgaaattgatattgaggaagatccggagatagctgaagctgctggaattatgggtaccccatgtgtgcagtttttcaaaaataaagagatgctcangactgtatcttgggtcaaaatgaaaagagaa

SEQ ID NO: 26954 - DNA, 441 bp, Gossypium hirsutum
  Clone ID: LIB3147-056-Q1-K1-D1
cttcattgttgtctgggtggaacaatataatagttcagtcctttgaagtgtgaaacttggcacaaacctacaactatttatgtgttcgtaaaatgctgtgttcgatggagttttgtgctttcttgacaaaaaaaaaaaaaaaaaaaaaaaaaaaaaaaaaaaaaaaaaaaaaaaaaaaaaaaaaaaaaaaaaaaaaaaaaaaaaaaaaaaaaaaaaaaaaaaaaaaaaaaaaaataaataaaataaaataaaaaaaaaatttaaaaaaaaaaattggggggggcccctttaaaaaaacaaattttattgcccgggggatgaaaagtatttttttttttttggggaacaaaaaataaaatagaggggggggttttttaaaaagtttggaggggaaaaaccgtgggataccaaaattaatttttttgggaaaaaatccccttt

SEQ ID NO: 26955 - DNA, 334 bp, Gossypium hirsutum
  unsure (1)..(334): unsure at all n locations; Clone ID: LIB3147-056-Q1-K1-D10
annnncagcanncagaaacacaccaagcgaagcgcaccagcaacaacccaacaacaaaggcgaccaagacancagccgnccgggcgcacccggccccnncagggagcgcaacagaagcgngcaggcaaccacagggcncacgcgccccnagagccacaagcccacagncccncccaccaganaccacaacgggcgccgaacaaccagccgngcaagccnacaggcgacaacnagcgcnggcggcgagcgacggacaacaaccaancgcccaanggcaacaacaanccggggcacagcgaaaccaacaaaccancgcaacgcaacagcaacaaca

SEQ ID NO: 26956 - DNA, 236 bp, Gossypium hirsutum
  unsure (1)..(236): unsure at all n locations; Clone ID: LIB3147-056-Q1-K1-D12
cccanccccaccncccaggganggaagcaggagcccacccaccaaccccnangcnnacncacgagaagcaggcccnccnccccgggcgggngcacacccnggagcccccangaacnanccngcanacgggggcnanggnaaagggnnggcaccagcanancagcaggcccacnaccganaggcaaagaggacaccacncnggcganggnaaccacnganacgcngaccaccgaccc

SEQ ID NO: 26957 - DNA, 451 bp, Gossypium hirsutum
  Clone ID: LIB3147-056-Q1-K1-D2
gccacactctccaggaagctcatcaaccatggcggaacagaccgagaaagcatttttgaagcagcccaaagtgtttttaagctctaagaaaactggtaaagggaagagaccaggaaagggagggaaccgcttctggaagagcattggtttgggattcaagacccctcgtgaagctattgaaggaacttacatcgataagaaatgccctttcactggccctgtttcagtcaggggccgcatcttagctggtacttgccatagtgccaagatgatgaggacaatcattgttcgacggaactatcttcattatatcaagaaataccaaaggtacgagaagaggcattcaaacattcctgctcacatttctccatgcttccgtgtgaaggaaggggatcatgtcattattggtcaatgcaggccattgtcaaagactgtgaggttcaatgttttg

SEQ ID NO: 26958 - DNA, 244 bp, Gossypium hirsutum
  Clone ID: LIB3147-056-Q1-K1-D3
ctccactcgtctcgcccacgcgtccgaaaaaaataaaaaaaaaaaaaaaaaaaaaaaaaaaaaggaaaaaaaaaaaaaaaattaaaaaaaaaaaaaaaaaaaaaaaaaaaaaaaaaaaaaaggggcgaaatttttggggggcccttttttgggttcctggctttgctaggggggggcgcttttttatgtccccttttttgtgaccctttgttccatttttttgaccgtttttttagggaaataa

SEQ ID NO: 26959 - DNA, 454 bp, Gossypium hirsutum
  Clone ID: LIB3147-056-Q1-K1-D4
gaaaatcaaggccaagacggaaggaacaaagttgaaggattttgtagcaaccttacagtcggatacatactttcaaaccgaaatcgctaagctccgacaagaagtggaggagtacgcaaaacagtttccgactattggttttgagaaagaagcaatgaaatacaaggactaaagcggatatctttacacacaatgcaaggtttgtcagctctaaagaacttcctaaactggttgctgtcttatttgttgaacgtaatcttctagaggcaactatcttagaatttattgaaatgccaaaatatgcacgttagtttttagtattaaggatgttatctggggttgagccgaactgtattcaaactgtatgaaactatgagcttttcattcaaagtttgagacttgagtttggctcacgctcgatcaattttccgtttcgaagctcaaaatcgattcg

SEQ ID NO: 26960 - DNA, 451 bp, Gossypium hirsutum
  Clone ID: LIB3147-056-Q1-K1-D5
cccactcgtccgcccactcgtccggttcgagtgaaccatgtgtttgggcgagtggttgaagaagaaatggctcggattgaacgtgaggtcggaaaagagaagtttaagaaaggaatgtataaagaagcatgcaagatttttactcgccaatgcactgcttcaactttggatgattttttgacacttgatgcttataattatatcgtcattcatcatccaaaggatgtttcttctaagctttgatgaagcttccatgaaagcttagaattatggggtttgagtgaaaaaaaatagtgccattgctaaataagcaaataatcataattgtggtttttacgggaaatggttcaataaggtatgttttatttcaatgttgggttttaatgtattatttgaaagttttcatttaagtcattagacttataaaattgtagtcgtttgactttttctg

SEQ ID NO: 26961 - DNA, 451 bp, Gossypium hirsutum
  Clone ID: LIB3147-056-Q1-K1-D6
cccactcgtccggaaacacactttgcacaaggtcacacagtataagaagggcaaggatagtttggctgcacaggggaagcgtcgttacgaccggaaacaatccggttacggtggtcagaccaaaccagtgttccacaagaaggcaaagaccaccaagaagattgtgctaaggctgcaatgccaaggttgcaagcacgtttcacaacatccgatcaagaggtgcaagcactttgagattggtggagacaagaaggggaaaggaacatctctgttttaaacgtgttattcatggtatcttgttatgtttgctttactttatatggagtagtttgaacttacaagactgtaatggaattttgttaaatttgcttagtttcttctgatgatgttttgcagttttctaactgttaccaaatgtttcactggcaattttgagttcaatttgttttaa

SEQ ID NO: 26962 - DNA, 452 bp, Gossypium hirsutum
  Clone ID: LIB3147-056-Q1-K1-D7
gaagctcctgtcagtcttccgtgaaggagtgaagtacggtgctggaattggacccggtgtctatgacatccactctcccagaataccatcaaccgaagagattgctgacagaattaacaagatgcttgccgtgctcgagaccaacatcttgtgggttaaccctgactgtgggctcaagactcgcaagtacgctgaggtgaaaccagccctgagcaacatggttgctgctgccaagctgctccgcacccaactcgccagcgccaagtgataggctcccgagatattggaaatccgaatcccataccattccagagagattaaaaagaaaaatggcaaagaagtttcttctatcttatcatttgaataactctgttgttgatgaaatatttgttacatgcccttggcgtccctttgatttccttatttttgggtgttcttttctctaagtatca

SEQ ID NO: 26963 - DNA, 372 bp, Gossypium hirsutum
  unsure (1)..(372): unsure at all n locations; Clone ID: LIB3147-056-Q1-K1-D8
cccacgcgtccggctagggtttcaagggatttcttccggtgcaaagagcagcagccatggttctcaagacggagctttgccgatttagtggtgccaagatataccctgggaaaggcatcagatttgttcgtggtgattcccaggtcttcctcttttccaattcaaaatgcaagaggtacttccacaaccgcctgaagccatcaaaacttacatggacggccatgtacaggaagcaacacatgaaggacattgcccaagaagctgtgaagaagaggagacgtactgcanagaagccatactccagatccattgtggctgccaccttagaggttatccagaagaagaggagtgagaaacccgaagttcgtgatg

SEQ ID NO: 26964 - DNA, 453 bp, Gossypium hirsutum
  Clone ID: LIB3147-056-Q1-K1-E1
ccagcttagaattgctggacctctcctacaatttcctcaatggatcaattcctgaaagcctagggaacttgaccgcattgcgcagattgaatcttaatggcaactctttgtctggaagagtcccaggtgcacttggaggaaggcttttgaatggagctagctttaattttactgacaatgctggtctctgcggcatacccggattacccacatgtggaccccacctctctgccggagcaaaggtctgcattgccttcggtgtatctctatcatttttacttcttgttatctgttcagtttgttattggaaaagacggcagaacattcttcgagcacagcagatagcagcaagaggtgctccgtatgcaaaagcaagaacccaattctctcacgatatccaaatgtcaaggcaccataatcatggccatactcggactgctgctgagaatggac

SEQ ID NO: 26965 - DNA, 236 bp, Gossypium hirsutum
  unsure (1)..(236): unsure at all n locations; Clone ID: LIB3147-056-Q1-K1-E10
aaaaaaccaaggncatncgccgagcgccagaacccaacccaccacgaaaccaaaccaaangggggacgcagggagcagaaccgggcaacccccagagcncaaaaaggacagggacaaacaacaccagancaagccgaaggcaaaacggaaggaagggggnacacagcgngggcacgaacaggnaacgaagccaggggcggacaacaccggggaggggaacggcaangagaaaacag

SEQ ID NO: 26966 - DNA, 429 bp, Gossypium hirsutum
  Clone ID: LIB3147-056-Q1-K1-E11
gcggcttttcttgctcatgtcggcgccaagacatcttgtggagatggtgtcatagacggaggaccgttggcttggggtctttgcttcaagagagaaatgagtcctagccaggattactgtgatgattactacaaatacatgtatccatgtgcccctggagctcaatactacggccgtggtgctttgccaatttactggaactacaactatggagctgctggcgatggtataaaagttgatttgttgcaccaccctgagtatctcgagcagaacgcaactattgccttccaggctgccatctggaggtggatgaccccaatcaagaagaaccaaccttcagcacacgacattttcgtgggtaactggaaaccaaccaagaatgacacagaggaaaaaccgggtcctacttttggctcaccatgaacgttc

SEQ ID NO: 26967 - DNA, 437 bp, Gossypium hirsutum
  Clone ID: LIB3147-056-Q1-K1-E12
gccgaaccctccatttctctctgcaaccagcggcacccaaagatgcaaatcttcgtcaaaaccctaacggggaagaccataaccctagaggttgagtcttccgacaccatcgacaatgtcaaagccaagatccaagacaaggaaggcatcccacccgaccaacagcgcctcatctttgccggcaagcagctcgaggacggccgcaccttagccgactacaacatccagaaggaatccaccctccatctcgtgctccgtcttaggggaggtgctaagaagagaaagaagaagacctacaccaagcccaagaagatcaagcacaagaagaagaaggtcaagctcgctgtgctacagttctacaaggtggatgaatcgggtaaggttcaaaggctgaggaaagaagtgcctaatgctgaatgtggtgctggaacttttat

SEQ ID NO: 26968 - DNA, 100 bp, Gossypium hirsutum
  Clone ID: LIB3147-056-Q1-K1-E2
ctttgtttgtggcttctgatcaatttggtaaggttcctctctattggggaatcaccgccgacggatatgtggcctttgctgataatgctcaattgctgaa

SEQ ID NO: 26969 - DNA, 392 bp, Gossypium hirsutum
  unsure (1)..(392): unsure at all n locations; Clone ID: LIB3147-056-Q1-K1-E3
cccacgcgtccggaccaccatgtcatgcttgagggtactcttttgaagcctaacatggtgacccctggttcggactccccgaaggttgccccagatgttattgctgagtatactttcgtgccttgcagcgaaccgtccctgctgcagtcccagctattgtattcttgtctggtgggcaaagtgaggaggaggctactcttaaccttaatgccatgaacaagctccagaccaagataccatggtcactctcattctcatttggacgtgcccttcagcagagcactctcaagacctgtgcaggaaaagaggagaatgttgagaaggcgcangatgctttgctcgttaggtgcatggctaactcagaggccactttgggtacatacaagggtgat

SEQ ID NO: 26970 - DNA, 145 bp, Gossypium hirsutum
  Clone ID: LIB3147-056-Q1-K1-E4
ctagctttgtcagcagaccacccaacaacaacactcttgggaaaagaagtcgttacagtgtcagattgttatcttcaacgacggtattcaatccacgggcagcagcaccatcagccactgctgtagagaatgatggaagtccccc

SEQ ID NO: 26971 - DNA, 449 bp, Gossypium hirsutum
  Clone ID: LIB3147-056-Q1-K1-E5
cataaatttaatagggaatcaggtggtgaggtttacttcacaatgccaagattgcagtctataaccattcagtgtttggaggctctccagtttttgcatggccttggcctaatacattgtgatctgaagcccgaaaatatattagttaaaagctatagtagatgtgaggtgaaggtcattgatcttgggagcagttgttttgagactgatcatctatgctcctatgttcaatccaggtcctatcgtgcaccagaggttatcctaggacttccatatgacaagaaaatagatatctggtcacttggctgtatcttggcagaactctgtactggaaatgtacttttccagaatgattcacctgcgacattacttgcaagagtaattggaatcataggtcctatcaaacaagacatgcttgccaaaggacggtatacatacatatactttac

SEQ ID NO: 26972 - DNA, 403 bp, Gossypium hirsutum
  Clone ID: LIB3147-056-Q1-K1-E6
attgtgacgaatagccaccttctcaagacaatggatatctccaagatggctccgggtgatgcttctttcactgcatcttttaagcttgttgcacaacgtgatgattacatccatgcttttgttgcgtactttgatgtatcatttaccaagtgccacaaattgatgggcttctctacagggccaaaatcgcgagctacacattggaagcaaacggtgttgtacctaaaagatgtgctaaccatatttgagggagaggcaatagttggtagcatgactgttgcaccaaacaagaagaatccccgagatgttgatataatggtaaaatattcattgagtggtcggcgttgtgcggtttcaagagttcaattctacaagatgcgctgatgtttctcactactatttt

SEQ ID NO: 26973 - DNA, 410 bp, Gossypium hirsutum
  Clone ID: LIB3147-056-Q1-K1-E8
gtcctagatgctcaatgcttttactcgaattcgtcatttaatggtgaaacaacaacacgaatgaatccaaagcaaagttcagttgataagaagttgatgaaccattatttctgttttggagcacaaggcctagctgtcgaggataatagaagccatacacggctggatcgccgcatcaagagtgcccgttctttagttgcttgatgcagagtattgcaattttctagaaccaccgttgacaggaaaggaatttaggattctatgagattcctacacttcagtttactgtgtttgggacctatgaataaattcaaggtatatactgaaaaatgacccagaatttttaatgtatcaataaacataccaagttgtattatatgtttagtttgttgttgaagttgtaagttttt

SEQ ID NO: 26974 - DNA, 224 bp, Gossypium hirsutum
  Clone ID: LIB3147-056-Q1-K1-F1
aacaagctccgtgttgaacgtacgaacaaacgtcatattggtgctaggttgaagaaggctgccgaggccgagaaggaagacaagaagtaaggttacccttttggggacagtgttttgttatttggcttgctaaaaagaccttaaattttgtattcattttgtcaagtgaactgagacagctttagaaaactttggtattatgacagtaatccattttgttgagc

SEQ ID NO: 26975 - DNA, 353 bp, Gossypium hirsutum
  Clone ID: LIB3147-056-Q1-K1-F11
ggctccagcacctacctaccattacaactcccctcctccaccatcaccatctcctcctccccgatactactacaaatctcccccaccaccagcccactctccctcaccaccatactactacaaatctccacctcctccatctccctcaccacctcctccatactactaccactcacctcccccacctgtgaaatcacctccacctccagtctacatctacgcttctcctccaccaccaacaccctactagatctaaaaagatcgaccacacaccgttcatgttgtagtttcgccagcaaaataaaggaaggtgccaaggaggaagggagatttggacatcaaagcagttcctt

SEQ ID NO: 26976 - DNA, 452 bp, Gossypium hirsutum
  Clone ID: LIB3147-056-Q1-K1-F2
cccacgcgtccgcagcaagaaagaacaacttttgtatcatctttgcttcctcttttggcggagtattccctgcagccaccagtacccgatgctcaatccattgtaagctatgtcaaggttctatttaaacatctgcaggagaagcttattatcaccgagtcaaagctaaaagactcacagtatcagttggcaccttggcggtcggatgtcaatcattccaatttcgctccccaatctccatctcattcccttggtccaacattgacagcttcgagcaaaaatggtcttgaattggtgccacagccggttttttcccatggaaagacacagatagtctctgatgctcaaacagattcaaattgggatctacccggtcaataccagggtggctcaggtggtggtattgtctcaaaaaatttggaacctgatgatttggggagatattcacccat

SEQ ID NO: 26977 - DNA, 449 bp, Gossypium hirsutum
  Clone ID: LIB3147-056-Q1-K1-F3
cccacgcgtccggggaaaacggcctacggattcagccgattttggtgataacaatcttgttggatgggtgaaacaacatgctaaactcaaaataagtgatgtcttcgatccagagttgatgaaagaagaccccatgctcgagatcgagcttttacaacacttaaaggtagcttgtgcttgcttggatgatcgacattggagacgacccacaatggttcaagtgatggcaatgttcaaggagatacaagcagggtcggggctcgactcgcaatcgaccattgccaccgatgaccgaggttttaactcggtcgaaatggtagacatgacaataaaagaagtcccagaaggtaagcagtagatgaaaaccaaaaaaacttcagaagagaacattcttttgcaggtgaagaagaaagaagcaggtggtgatgatgaattcccacagaattttc

SEQ ID NO: 26978 - DNA, 455 bp, Gossypium hirsutum
  Clone ID: LIB3147-056-Q1-K1-F4
gcaccagaggcagctccaaaatggttcagcggctcacttaccgcacgcgtcacagctacgccaccaagtccaaccagcaccgcgtcgtcaaaaccccaggagggaagcttgtttatcaaacgacaaagaaaagagctagtggacctaaatgtcctgttaccggcaagaggattcaaggaattcctcatttgaggcctgctgagtataaaaggtctaggttgcctagaaaccgtaggactgtgaaccgtgcttatggtggagttctatctggaagtgctgttcgagaaaggatcataagggccttcttggtggaagagcaaaagattgtgaagaaggtactgaagattcagaagacaaaggaaaagcaatcatccaagtgagagctaggatttgctaatggattgatagtgaatcttggaatagtagtttgaggggatttaagatttggatttatg

SEQ ID NO: 26979 - DNA, 452 bp, Gossypium hirsutum; identical to SEQ ID NO: 26962
  Clone ID: LIB3147-056-Q1-K1-F5

SEQ ID NO: 26980 - DNA, 437 bp, Gossypium hirsutum
  Clone ID: LIB3147-056-Q1-K1-F6
ttttaatcctgctggcaaagagcatggtgctcccgaagatgagaaccgccatgctggtgatctaggaaatgtcactgttggtgatgatggctgtgcaagcttctccatcgccgacaaacagattcctctcacaggcccaaactccattatcggaagagctgtagttgtccatgcagatcccgatgaccttggcaagggcggccatgagctcatcaaaagcacaggaaatgctggcggcagagtagcttgcggtattattggtctgcaaggctaaaatctgagccaagatgcgtttgaaggatgcaatgggctttgagaagtagaaagaacttggttataataataaaaaggttaaaagaatccttagtttgtgtacttttgttgtgtgttggttgtcatgagtgtcccttgaatcctaaaataccttttgttgaatg

SEQ ID NO: 26981 - DNA, 448 bp, Gossypium hirsutum
  Clone ID: LIB3147-056-Q1-K1-F7
gtgaagctttattgtcagagtttctatttccatatccgattttaagttcatcagtgcctgacagagattggaacggaaaggctaaagtcgttcccttgcctttgaaagtcagaaccatggcaaacatattagcatgaaaatagaacaattatgaccataataatatccggagctttcagtataaatatttatagatactcagtatgctgatgtatgttccacatcattgttaatgactttctgcaattgttcttaattccatgtttgtttgaattttctaaactaatgcagagcaagatgagttgtctgatgatcaatgacattgatgctggtattggtagatttggtgagcttatgttttactggaacagaaaaccttgaactgtaccaattatgctttaattttcataaatttcctcttggttaataagttttaaaaagttactta

SEQ ID NO: 26982 - DNA, 446 bp, Gossypium hirsutum
  Clone ID: LIB3147-056-Q1-K1-F8
cccactcgtccgcccactcgtccgcccactcgtccggcaggaatcgcctttggtcgcttcgatgattccttcagtttggggtctgtcaaggcctaccttgctgagtttatctcaactttggtgtttgttttcgccggcgttggctctgccattgcttacaacaagttgacaactgatgcagccctagatcccgatgggctagtcgccattgctgtttgccacggatttgctctctttgttgcagtggctatcggtgccaacatctcaggtggccatgtcaaccctgcagtaacttttgggttagctcttggtggccaaatcaccatactcactggcatcttttactggattgcccaacttcttggatccattgttgcttgcttcttgctcaaggctgtcactggtggtttgacagttcctatccacggtcttggagctggagttgg

SEQ ID NO: 26983 - DNA, 398 bp, Gossypium hirsutum
  Clone ID: LIB3147-056-Q1-K1-F9
cttcgggcacgcgttcgttggtggatgttgcacacaatgctatccgcaatgacccaagaattaactggatctgcagtgcggttcacaagcacagggaacttcgaggacttacatctgctggtaagaaaaacaggggtctccatggaaagggtcatttgcaccacaagaaccgtccttctcgcagggcaacctggaagagaaacaacactctctcccttcgccgctaccgctgagttactgtgttcaactttttatccttgttgattttagaagtcatcgttttgagtttgaaatttttggaagttttaaaaaacctgactctttgattttacatgcaatttattttcgttttggatgctttgaatttctgaaagtattgctacgtgcttttccgattt

SEQ ID NO: 26984 - DNA, 228 bp, Gossypium hirsutum
  Clone ID: LIB3147-056-Q1-K1-G1
ctccacgcgtccgctccacgcgtccgaaaaaaaaaaaaaaaaaaaaaaaaaaaaaaaaaaaaaaaaagaaaaaaaaaaaaaaaaaaaaaaaaaaaaaaaaaaaaaaaaaaaaaaaaaaaaaaaaaaaaaaaaggtaaagtgaccaaaattaaaaaaacttttagactggaaaaaaaaaaaataaaacgataaataaaattgacttaaaaaaaattaatttttaggaca

SEQ ID NO: 26985 - DNA, 376 bp, Gossypium hirsutum
  Clone ID: LIB3147-056-Q1-K1-G11
ggacaacaagggtttgttgattgtggatcaccaactggcgtacgacaaaaggaccagaccttatgtgaagaaaatggccaagagccaagactatttcttcaaggagttctcaagggccattactctcctctctgagaacaatcctctcactggtagcaagggtgagatcaggaagcaatgcaatcttgcaaacaagcttcactaaaatgcctcgccaaagagaaagccgagtgtggccgaataaaatgtttgtttactcagtttcttttccaagagacgagtttgttaatgtgcaggtgagtaatggtgcaatggtactggtttgtaacgatcgatccattgatttttttttttacaataacccaggttgcctttt

SEQ ID NO: 26986 - DNA, 454 bp, Gossypium hirsutum
  Clone ID: LIB3147-056-Q1-K1-G2
cggacgcgtgggtttcgatggcgtcgacctcaaaccgaaccggtggcggttccttctacggcggtgcggctccttaccgatcaagagatggtttaagcacgagaccggtggctagctcagatgagatacaattgcgtattgatccgatgcatgctgatttggacgatgagatctctggtctccgtagccaagttaaacaattgagaaacgttgctcaagagataggatcagaagcaaaatttcagaaggaccttttagatcagctgcaaatgaccatgattaaagctcaagcaggggtgaagaacaacatcaggaaactgaacaagagtataatcaagcatgggtcaaaccatattgttcatgtggttctttttgcactgttttgcttctttgttgtctacatgtggtccaaagtatccaggagatgaagttcgcaagactgccggatacattg

SEQ ID NO: 26987 - DNA, 194 bp, Gossypium hirsutum
  Clone ID: LIB3147-056-Q1-K1-G3
ggccaagcctgctaaatcgcaattaaacctttaaaagggagttgagaagcgggccgccgggcctgggacccatgcttaacccaccccccgtccgaccgtctacgttcactgtactggatactggataaatggagatgtgcgtgagttatcatcgtgcacactggatacaccgcggcgtcccctatctttacaaa

SEQ ID NO: 26988 - DNA, 449 bp, Gossypium hirsutum
  Clone ID: LIB3147-056-Q1-K1-G4
ctcttcttggcggtgccggggtaaaagtttattgtttgtggaaagagcagagattcggagatgagtaagcttcagagtgatgcgcttagagaagctatttcaaccattgtagctcagtcaaaggagaaacagcgcaaatttactgagaccattgaactccagattggtctgaaaaactatgatccccaaaaagacaagcgtttcagtgggtctgtgaagcttccacatattcctcgccccaaaatgaagatttgcatgcttggagatgctcaacacgttgaagaggcagagaagataggtttggattatatggatgtggaagcattgaagaaactaaacaagaataagaagttagttaagaagcttgccaagaagtatcatgcctttctggcttctgaatctgtcatcaagcaaatccctcgtcttttgggtcctggtctcaacaaagc

SEQ ID NO: 26989 - DNA, 433 bp, Gossypium hirsutum
  Clone ID: LIB3147-056-Q1-K1-G5
gggtttcaaactgaaaaaagtctccaaaactttcaatccaaaatgcctaagcaaattcatgagatcaaggacttcctgctcacagctagaaggaaagatgctcgctcggtaaagatcaaaaagagcaaagatgtagtgaagttcaaggtccgttgctccaagtacttgtacacactttgtgtgtctgatgctgagaaagccgacaaattgaagcagtcccttcctccaggtttgagtgtccaagatctgtgaaaatagtgcttctccaagtctgttattcaattactaggccaagaaatctagattttgatttatggtttattgtatttcacgccatttggtgttcggaggatgtactttttcatgttcaattaaaccttggcactctttaaattaattgattgggagattgaacaaaagtgattttctgttg

SEQ ID NO: 26990 - DNA, 452 bp, Gossypium hirsutum
  Clone ID: LIB3147-056-Q1-K1-G6
taaacctggaagtaatacaccaagttctattcatattggaatgccaagtggttatggaccagatggctcccccccagctggttataatcctagttctgctgtggcaactgggaactcaaccacaaatgaggatcttagtggtactcagttcaaggaaagcaatgtctacgtcactgggcagcagagtgaaggttcagctgtatggattgctccccccgggcgagacatatccaccctaccagcaagttcattctataaccttgcccctcaaggtcagaatgtaacttttgctccaacacaggttgtgcctggctcctttgctggtatatatcatccacaagcagcaacagcagcagccgttcatcctcttctacaacaagctcaaactatggccggagctgttaacatggggggatctgccgctggtgtttatcggcagcctcaacatgccc

SEQ ID NO: 26991 - DNA, 415 bp, Gossypium hirsutum
  Clone ID: LIB3147-056-Q1-K1-G7
aaagaaaacaggtaacagagagtagcagcgatggttctcaagacggagctttgtcggtttagtggtgccaagatatacccagggaaaggcatcagatttatccgttctgattctcaggtcttccttttttcaaactcaaaatgcaagaggtacttccacaaccgtttgaagccatcaaaacttacatggacagccatgtataggaagcaacataagaaggacattgctcaaggggccgttaagaagaggagacgtgccacaaagaagccatactccagatccatcgtcggtgccaccttagaggttatccaaaagaagaggagcgagaaacctgaagttcgtgacgctgctcgggaagctgcactccgagaaatcaaggaaaggatcaagaaaaccaaggatgaaaagaaagcaa

SEQ ID NO: 26992 - DNA, 273 bp, Gossypium hirsutum
  Clone ID: LIB3147-056-Q1-K1-G8
ttaaagaaccaagcaaacatacacatgcgtgcgacaaaaataactattatatagaggggccggccgttctttagagtccacgcttacttacacctgcttgcctggtaataccttttctttaccgccacttaatctcattgcactgcacccccttttccaccgctggcgtctgggaaaaccagtgcccttaccgatcttacttgccatcgattgcacaccctttatgccggatggcacactccctgtaacgcccattccgctcgcccttccgta

SEQ ID NO: 26993 - DNA, 422 bp, Gossypium hirsutum
  Clone ID: LIB3147-056-Q1-K1-G9
gtcccgaagttaatacatcccttaccacctcccattcagtctccagaaacatcgccggagcgtgttggagacgacacatggatgcaggaactaaacatccaaagaccaccaacaccaactcgtggtcgccctcaacccgaccatgaccggagctcacttgcatatatatgaacacgatgttacaaattcaaggacttaaaaccttttttctaattgacaaatctccgtgtacgtattattgctcgtgtagtttctcgaagatggaagccattgtttattgtatgcatagctatggagtttgaagatcagtatttaaccagtgaaattcaacatatgcatatagtttggttagtttttggaaaagggatttaataggataattaatagggattggggtcacctaaaatttttggtttcctttt

SEQ ID NO: 26994 - DNA, 321 bp, Gossypium hirsutum
  Clone ID: LIB3147-056-Q1-K1-H1
agttggtacacctgaagaaaatgttgcccatttctttgaggttgctaaagcaatcaggtactaaaagcaataccagattaactgttttcggaccgagtaaagcttatgcatcttcaggttatttttttttcagcccttgattcttcatttgtatttctcggtacacattctcggatacggtgcttcaagaaaaatggagccgtaggaacataaacttgttggaatttagaaagttccgtttggtctttttttcagtttgtatttgtttatgtgcttgagctaacaagaaactctaaatttggaagcattctcatttgaggc

SEQ ID NO: 26995 - DNA, 387 bp, Gossypium hirsutum
  Clone ID: LIB3147-056-Q1-K1-H11
ccttcgagttctttctaaacctaaggtggagaaacttcctgaaatttatcaacaccttggtctagagtatgatgagaaagtgcttccctccattggcaatgaggtcttgaaagccgcggttgcacagttcaatgctgatcagcttctcaccgagcgtccccaagtgtcggccttggtccggaattcactgacacagcgtgcaagggacttcaacattgagctagccgatgttgcaatcacgcatttgtcatatggttctgagttctcaagggcagtggagcagaaacaggtggcacaacaagaggcggagaggtcgaagtttgttggggcgaaagctgatcaggagaggagggctgctatcatccgcgcagaaagagaaagcgaggc

SEQ ID NO: 26996 - DNA, 335 bp, Gossypium hirsutum
  Clone ID: LIB3147-056-Q1-K1-H12
gcgggctgagtataagcttattcatgtggttcgaacacatcgtggagcagatgatacggcattgaggcgtgtgtatcaagaacaggacgatgcagggaatacaggtgtttcactgtctaaagatttgatggccattgccgggggtgcactgaaaaccaatatcactactttgggtcctcttgtgctaccaatcagcgagcagcttttgtttttcacaaccttggtggtgaagaaattgatcaagtgccggaataatccttatattccagatttcaagttagcattcgatcatgtttgtatacatgcttcggggagagctgtgattgatgagctgg

SEQ ID NO: 26997 - DNA, 432 bp, Gossypium hirsutum
  Clone ID: LIB3147-056-Q1-K1-H2
cttattggcaagctcgagactgatgtcgagatcgatatttctcccgaaaagttccaccatatgtggtgccacaggccgcaccatgtccaccacactagctctgaaaaagtacaaggatgcgatttacatgaaggtgaatttggaactcccggcgtcgttatctgctggagatatgtgcatgatggaaaggctaaaactgcaaagcaggtagttgaagttatggaccatgagaaaaagtcaataactttcaaaatgcttgaaggagatctgatggaggaatacaaaagcttcgtgattacaatccaaacttcccccaagagcgacggtaaaggcagtatagtgcactggactctggattatgaaaagctgcacgagggtattggacatcccgagtctctgctccagttctttatcgaactcacagcggacatg

SEQ ID NO: 26998 - DNA, 276 bp, Gossypium hirsutum
  unsure (1)..(276): unsure at all n locations; Clone ID: LIB3147-056-Q1-K1-H3
tccgccacgcttntatgtctcttcggcggacacttcttcggccccggtggcggttgtacaagggggggtcacatcggcactctaatggctgaaaacaagtataacctcaagaatccggcggcgaagaggatcttacaagaggttaaggaattgcaatccaatcctttcgatgatttcatgagcctaccactcgaggagaatatatttgaatggcaattcgcacataggggtccaagggattctgaatttgaaggagggatttatcatggaaggatt

SEQ ID NO: 26999 - DNA, 456 bp, Gossypium hirsutum
  Clone ID: LIB3147-056-Q1-K1-H4
gtttttaatgtatttctttgtgtatgttttgcagctgtcatctcaagggccaacccatgatgagatagactttgaattcttagggaatctgagtggtgacccttacattttacacaccaatgtcttcacacaaggcaaaggcaacagagaacaacagttttatctttggtttgaccctacaagaaacttccacacctattccatcatttggaaaccccaacacatcatgtaagaacccatcaaataatgtcttctactttgtcttttgccttaataacattagctactttttgtctttttctcagtttcttggtggataacatccccattagagtcttcaaaaatgctgaatccattggtgtaccgttccccaagagccaacccatgaggatttactctagtttatggaatgctgatgattgggccacaaggggtgggttagtgaaaactgattgg

SEQ ID NO: 27000 - DNA, 450 bp, Gossypium hirsutum
  Clone ID: LIB3147-056-Q1-K1-H5
aaaattatacgtatttatatacggaggtgatagcggcggcgctggtggcggttgtacaatcggaattcagatcggcaatctaatggctgaagacaagtataacctcaagaatccggcggtgaagaggatcttacaagaggttaaggaattgcaatccaatccttccgatgatttcatgagcctaccactcgaggagaatatatttgaatggcaattcgcaattaggggtccaagggattctgaatttgaaggagggatttatcatggaaggattcaattgcctgctgagtatccatttaagcccccttcatttatgttgctcaccccaaatggacgtttcgaaacgcagactaagatttgcttgagtatatcgaatcaccacccggagcattggcaaccatcttggaatgtgcggactgctctagtggcattgattgcattcatgcccac

SEQ ID NO: 27001 - DNA, 443 bp, Gossypium hirsutum
  Clone ID: LIB3147-056-Q1-K1-H6
ccgctttcgttaaggtttgacgagaaagtttgatcggatcaaaactgaacgggttcaatgggttccgaggagttttatacgcaatgaggaatgtaagctcgttgctcctaatgatcttgctgtacggactagtttattgtcgaacggaatccagtttcctacgaggaggatatgaagggtgtctaattttcggatcagctttcatgatctcaacagggagattgcagcaaagagtggccgcagagatcaaccaaatgaatgggaggccggggatattgctttatgagttcaggagatcgaagttggcaatggaggagctgagaggggagctagagcggatgggcggcggaggggtggaggagtgggaaacggaggtaggggggataagggaaagggttgagaacttgaaagggtggtttggggtgttgagatctggtgctgac

SEQ ID NO: 27002 - DNA, 438 bp, Gossypium hirsutum
  Clone ID: LIB3147-056-Q1-K1-H7
ggatctatcatcgcaatgcttttaatggataaacttggaaggaaaatgcttcttttgtggagcttctttggcatggctatatcaatgctcgtccaagttgctgctgcaaatacttttgtgtcaggctctgcatctttatatctatcagttggtggcatgttaatgtttgtcttaacatttgcattaggagctggtcctgttccaagtctcttattaccagaaattttccctagtcgaatcagggcaaaagctatggcaatttgtatgtcagtacactgggtaatcaatttcttcgttggcttgctcttcctgcgtttgctcgagcaacttggaccgcaactcttatactcgatgttcgcaagcgtttgtatgatggctgtagtctttgttaaaaagaacgtaatcgagaccaaagggaagtctcttcaagaaatcgag

SEQ ID NO: 27003 - DNA, 451 bp, Gossypium hirsutum
  Clone ID: LIB3147-056-Q1-K1-H8
gcgttgctggttctgtggctcctgatatagattcatttccagataagcaggccatttttatgcatgaaaggaatgcagactcgaatactgctccagcaggtggtgacataactgagagcgtaagccttgagaagcaggtacattgtgaagtaagagggagtcttgaaccttgagatgtggggaaaccttgagatcaattgaatgtggggaagaactttgcagatttaagagccttaccaagatcaattggaaaccttgagatgcttgaagagttggacataagtgacaactagatcagagtttttacacgattgtttcagattattgtcgaaattgagagttttccgagctgatgagactcccttggaagttccaccaagagaagtaatcaaattgggtgctcaggctgttgttgagttcatggctgatctcgttgccaagagggatacca

SEQ ID NO: 27004 - DNA, 326 bp, Gossypium hirsutum
  Clone ID: LIB3147-056-Q1-K1-H9
ggaaaatgccggaggtcaagcgttcactggaaagcaacgggcacttgacttggttccaactaagatacatgataggtcaccaatatttcttggcagctatgatgatattgaagaaattaaagcactctatgctgctgaagggaaaaaggaatgagtgtacaattctcattcttctcccactctatctttactggattcaggtttcaatcatcaaagtatttaatccatttcaaagcttattctgtaatgggatactatatttatattgaacaatagttaagtttccccaaaagatatgggatgagaataaaaaaagaagttatttt

SEQ ID NO: 27005 - DNA, 352 bp, Gossypium hirsutum
  unsure (1)..(352): unsure at all n locations; Clone ID: LIB3147-057-Q1-K1-A4
accaaanccgggagtcttttttataagttgtgcggcccatccacaacntctactcccatacattaattccttttctttcctaaacttttctatatacaaactcaatcaaaatctttatttattcacatttcattctaattttcattatgttctcttcaactttgatatgtttaacaaataaatttaaaataaataatttttctaagaaaaatttcaaccttcaaatttactaaatactatttaaaatacatataaatttgtattccaattatattattttatacaaaatcatcatataattaataaaatttttattttaaattcaaaaacttcccatcacttaatcatttaa

SEQ ID NO: 27006 - DNA, 424 bp, Gossypium hirsutum
  unsure (1)..(424): unsure at all n locations; Clone ID: LIB3147-057-Q1-K1-A5
acgggcgccacgcgtncgcccactcgtccncctactcttccgtgtatgttttcttcaaagctnnatccacaagnggagggctctctcatggatgaggacatgaaaatttatgtttaaatcaaactaatgtaagaatcgatgactttcacttcagccaaacaaaataagggatatctaccgtaatattgctcacgtcttccctcatataggaattcataactttttccacctcaaatcaaatcaaattcatgactttcatgtatttctttttctttttcttttttttttccttttctgatatactctcatatccattttcttaaaagaaaaacttatttctttatttctttttgctataccataaatttaatatgttggaccttaaaattctttattaaattatttaagacataataattaattt

SEQ ID NO: 27007 - DNA, 90 bp, Gossypium hirsutum
  Clone ID: LIB3147-057-Q1-K1-B1
aacccttatttatcaatctttaaacaacaattctaaacattaaactcatcttacaaacataataatgaaatatatccctttatttaaaat

SEQ ID NO: 27008 - DNA, 328 bp, Gossypium hirsutum
  Clone ID: LIB3147-057-Q1-K1-B2
gctcctgctcatgtatttctggaagtttccttgtacattatctccttgctcttcatatgagcggacacataatttgttcgctggtgaagataagatcttcaaaatgtggttccaggggaataccttttgcatgcaaagcaagttctagtggttataggaggagccctgacttctcgaggcatagacatgggttgcaaggtaggaataggcaaaatgaagacaaatatagttttgaaaatcttgatgaatctgaaatgttatcatcgaaaaatgggccagttctctcgctattccgttcgacaaatttttaagccacatcatccccatc

SEQ ID NO: 27009 - DNA, 238 bp, Gossypium hirsutum
  Clone ID: LIB3147-057-Q1-K1-B3
cgcgtccagaattttggttagatcaaaaaaaaatatacttcttaagttcttagtattttcttagggattgactatgtttatagtgggctggcgatttgtgttctaagttgatgatctatgggaatggacactgtcttgtttgaaacatgtttgagataatatttgactttgtggattttgaaatcaacacaatgattaataatccaagaatggggattgtttcttaaaaaataaatat

SEQ ID NO: 27010 - DNA, 379 bp, Gossypium hirsutum
  unsure (1)..(379): unsure at all n locations; Clone ID: LIB3147-057-Q1-K1-B4
cgtccggttaaaacctggtttgaatcatcatttttcttttaaaaccggngccccttacatagcggagggtgtaatcagtggcagatgggcatggtttctttttgaggtcacagttgatatcccatacagtactgagatcgttgccaaagcggtggattcggctgcaaatgtgcaacctgaaaacgtgcaagatttttggaacctaatatgtattctcaacacttcatggcatctagttcaagttcgcgtcgggcactcaaatatgttaatggaacagttaaataacttgattagcaatgctgaaatatgtggctgaactttctttaccaatgttttttttgagaaaaaaatatcacccgctttaacaatgatgtttttg

SEQ ID NO: 27011 - DNA, 410 bp, Gossypium hirsutum
  unsure (1)..(410): unsure at all n locations; Clone ID: LIB3147-057-Q1-K1-B6
ggcgtttatcccgtgaaatgtaaccttttaccggttcgttgttgaagatatagttaggttcgggacaccgttccggtgcggtttagaagccgggtcaaaacccgaactcctccttgctatgtcttgcctttgtaaaggaaacccagaagctttattgatctgtaatggtttcaaagatgctgaatacatttcacttgctttacttgcaaggaagttccagttcaacacagtgatcgtacttgagcaagaagaggaagtgaaattggttattgacataagcaaaaagctttcggttcgaccagtgatcggacttcgagctaagctaagaaccaaacactcgggtcatttcgggtcaacgtcgggtgagaaagggaaatntgggttaacaacgaaccatattttacgggtcg

SEQ ID NO: 27012 - DNA, 269 bp, Gossypium hirsutum
  Clone ID: LIB3147-057-Q1-K1-B9
aaaaaaaaaaaaaaaaaaaaaaaaaaaaaaaaaaaaaaaaaaaaaaaaaaaaaaaaaataaaaaaaaaaaaaaaaaaaaaaaaaaaaaaaaaaaaaaaaaaaaaaaaaaaaaaaaaaaaaaagaaaaaaaaaaaaaaaataaaaaaaaaaaaaaaaaaaaaataaaaaaaaaaaaaaaaaaaaaaaaaaaaaaaaaaaataaaaaaaaaaaaataaaaaaaaaaaaaaaaaaaaaaaaaaaaatgaaaaaaaataaaaaaaaaagaaaa

SEQ ID NO: 27013 - DNA, 376 bp, Gossypium hirsutum
  unsure (1)..(376): unsure at all n locations; Clone ID: LIB3147-057-Q1-K1-C2
aaaaaggatacaacaatgttgcctttttctttttatagatctgngttttatctaacatttggcaaaaacaagagttgctgggttttcctgtttttctttttgtatcctaaagtaagtaaacgaagtcaacaaaatgggagacagcaagcttatcctttgttgcttcattgcttgcattttgttcctcggcgttaatggagaaaacccttatcgttatatcacttggaaagtcacctactgtgatatttaccctcttggagttaagcaacaggggatcttaataaatgggcagtttccagggcctcatatcgatgcagttactaatgacaacttgattatcagtgtttataactacttaaatgaaccattccttatc

SEQ ID NO: 27014 - DNA, 310 bp, Gossypium hirsutum
  unsure (1)..(310): unsure at all n locations; Clone ID: LIB3147-057-Q1-K1-C3
cccacgcgtccgaagatatgtatggttataacnagatcttcctctccatccatagataaatattttatggcagccaatatatattgaagcccgccccccccatccaccaaatctttcacctactctccgtgcctaaatccatatatcaaccatcaattatgtattgtcctctctcaaaacgtttaatcatccacccccattttaaattatacctttcattatcaccgtaataatatgagaaaacaacctatttaaaaatcgtccagcataaaataaaagaattagtacaaactaccgcttgagtcttaac

SEQ ID NO: 27015 - DNA, 272 bp, Gossypium hirsutum
  Clone ID: LIB3147-057-Q1-K1-C5
ttgaagcaccctctaatggtaaaaaggctgaatacacagaagatgggctttccgtcgatgtcaaattacctattaagcatgtattatctagagaactcaaactttactttgacaagatcgtggacattacatgaataaatcagtctcgattctctttaaacaagcattattgagtttggaaacagactctggattacatcctttagttctttattgtacatgtttcattgctgatgaggttgcacggaatttgaataatttccctctcatgt

SEQ ID NO: 27016 - DNA, 366 bp, Gossypium hirsutum
  unsure (1)..(366): unsure at all n locations; Clone ID: LIB3147-057-Q1-K1-D1
gcgtccggcactcttcctgtcttattgaatgtctatattcganctggnctaagaaaaagcgagatggatgaaaaagtcagtgcggtggagagtaaaatcgaatctttacaggaggagctgaatgctgtaatccataagaagaacaaagcttatgaaaccatgcaacatctttttaaacaacgtgattaggcgaatgctcacttttaccagagcctgtctcttttaaacaaagccaaagagctatctgcaaagaaagatataaaggctcttgaggagctttcgactgtcgaggccgataaatttattgctctttggagtaacaagaaagctttctttgacgtttattataaaagaattcttccatcc

SEQ ID NO: 27017 - DNA, 313 bp, Gossypium hirsutum
  Clone ID: LIB3147-057-Q1-K1-D2
cgtccgttcactcttcctttttaacaagattttgtttttttttactaaaaaaaacatgttgtgatagtgtttttaaactgagcggtggaagaactcttgaatttagagatttgatggaggctggtttttgctgcctcttccttttaattttgctcaaagtgggggaattttgaagttctattgattgtatgacaataaatcatttatgaagtaactgaaaactaggggatttactaattttatattattatttttattgtttttttatatctatatttctttttatttttatatatattggggctggcctttt

SEQ ID NO: 27018 - DNA, 401 bp, Gossypium hirsutum
  unsure (1)..(401): unsure at all n locations; Clone ID: LIB3147-057-Q1-K1-D3
tccacgcgtccgttttcttggggtgatgtatgtttcccaaaggaagnctttggacgggctgcgtattcctgctgaagatgtgcctaccgatcagttcgtcccactgagccgcatgctctacaaggcaccttctgacggcaagtggggcgagcatgaacttgattacctcctattcattgtccgagatgttaatgttcatccaaaccctgatgaggtagcagaggctaaatacgtgaaccgtgaccaactgaaggagttactgcgtaaagctgatgctggtgaaaacggtttgaaactgtcaccatggttcatacttgtcgtggataatttcttgttcaagtggtgggatcatgtcgaaaaagggacccttaatgaagtaagtgacatggaaaccattcata

SEQ ID NO: 27019 - DNA, 215 bp, Gossypium hirsutum
  Clone ID: LIB3147-057-Q1-K1-D4
gacccacgcatcctgtttctataaacttttataaacgattttattttacaatggcatccatctatcttatgggcggtctctatactgagggggagagccaaatttctcccttaaagttccaccatatgttttgccacatgccgcaccatttccaccacactatctctgaaaaagttcaaagattctttatacatataagtaaatttttaacttcc

SEQ ID NO: 27020 - DNA, 224 bp, Gossypium hirsutum
  Clone ID: LIB3147-057-Q1-K1-D5
aggggctacaaaagctcggatgcataacaataagaacacttttgggaagaaagatcaagccattaatgaaggagaaactggtattaacaacaatactgagaatggactcatccatgaataccaccatcaccacatcaacatcaatggtcaaaatctcaaccatcacttttaaacttataatgttgctaatgttgaaataaatggctcttcttccttttaaaaca

SEQ ID NO: 27021 - DNA, 372 bp, Gossypium hirsutum
  unsure (1)..(372): unsure at all n locations; Clone ID: LIB3147-057-Q1-K1-D6
gtaagcttttcaaagtgtattttccattcccaatggtgaaaggtcgccaaggttagcacatcaggctgtatgttcaaaganccattttgggttacaagaggtcgaagtcgaatcagtatccaaatacgtcactgattcagatcgaaggggtgaacaccaaggaagaagtgggatggtactgtgggaagcgaatggcgtacatttacaaggctaaagtgaagaaaaatgggtcacattatcgttgcatttggggtaaagtaactaggcctcatggcaatagtggtgttgttcgtgctaagttcaagtctaatctccctcctaaatccatgggtgataaagttagagttttcatgtatcccagcaacattttga

SEQ ID NO: 27022 - DNA, 327 bp, Gossypium hirsutum
  Clone ID: LIB3147-057-Q1-K1-E1
aaaaaaaaaaatataaaaataaaaaaaataaaaaaaaaaaaaaaaaaaaaaaaaaaaaaaaaaaaaaaaaaaaaaaaaaaaaaaaaaaaaaaaaaaaaaaaaaaaaaaaaaataaaaaaaaaaaaaaaaaaaaaaaaaaaaagaaaaaaaaaaaaaaaaaaaaaaaaaaaaaaaaaaataaaataaaaaaataaaagaaaaaataaaaaaaataaaataatgaaaaaatatataaaaaaataaaataaaagaaataagtaaaaaaaaaaaatagaataaaaaaataaaaaaatataaagaataaaaatataaaataaaaaaaataaa

SEQ ID NO: 27023 - DNA, 424 bp, Gossypium hirsutum
  Clone ID: LIB3147-057-Q1-K1-E2
gtaaaaccagcgggacccacgcgtccgggctgtcctacattttctgtttactttttttttacattgcatgttatagattttctgagcggtttatatgcaaaagagtcctgccttcctgggaatcgagctattaaacgaaccctctgctgcagaagttccattggacacgttagtttcatattacaaacattgctatgaagtggtgcggaaatactctccatcagcgtatgtgataatttgccaaagaattggcagtgcatatccactggaactttatcaagctgatatatgctcacacaacctagttgtggatttgcattactacaatctctttgatactttctttgttaacttgagtgcgattgataatattcaattcatatataagagcagggaaactcatcttcaaacttttaatggtgcc

SEQ ID NO: 27024 - DNA, 279 bp, Gossypium hirsutum
  unsure (1)..(279): unsure at all n locations; Clone ID: LIB3147-057-Q1-K1-E3
tccactctcccanaataccatcaaccgaagagattgctgaccgaattaacaagatgcttgctgtgcttgagaccaacatcttgtgggttaacccaaactgtggtctcaagactcgcaagtattccgaggtgaatccagccctgaacaacatggttgcagcggccaaactgctccgcacccaactttcgagtgccaagtgagaggcatattttaagtcggacatcatcctttatatcgaaaatggtccacaagaaatttgtcctaaatcatttgaataac

SEQ ID NO: 27025 - DNA, 360 bp, Gossypium hirsutum
  Clone ID: LIB3147-057-Q1-K1-E5
ccccagctccaatcaagaggaaggtctaattcaagaggtggaatgagcaccatactccggctccttcacctgatatgcttggacctcccgctccaccaactggagctcctggacctagcctcgattcttcctctcccggtccatctttcgctgccgatgagagtggagcagcggcaatgaataacatgaagaagataattggagggttggcgttgggatgggcatccattgctttgagcttctagattggttttgatcacattccacattctgcgttctaattctttggttggtgtactgaaaagcggaaactctaattttatttttcctatgtaattttccaccaattctttttttttt

SEQ ID NO: 27026 - DNA, 363 bp, Gossypium hirsutum
  Clone ID: LIB3147-057-Q1-K1-E6
tccacgcgtccggtaaaaaggctttttatcttttggctttttatcacgaaatagcggatgccattatagcaacgctgtttgaagtcttcttcattcaataatattacctcaacatttctctttgcagagaaaaaaaaagaagaaaaagagtgagaaaaaacaggtacttaaatggctgagctacaacattcagagacagagagcagctcaaattcaacctcatcgccgccgctatcaccatctaactcaacccctaactcaactactacgaccccaaaccataaacccgaaactttcacttcgggttctactaaaaaacccaagacaatgagggactcaagcaagcgcaccgtttaccggggt

SEQ ID NO: 27027 - DNA, 257 bp, Gossypium hirsutum
  Clone ID: LIB3147-057-Q1-K1-F2
tccatcttcctcttactcttccgtttgtttataatggaagtatagtttttaattgagaagtttctatttaccgtttgaggagttattttggtgtttgtaatattttaataattcgtatttttaatgttttgtctttggttgttgggtctgtgttattaatgtcagtgctgcatggttttgtcttgtttatgtgatgttgctcaaaataataattaattttaaaattattaaaaaaaaaaattttttattattaatat

SEQ ID NO: 27028 - DNA, 234 bp, Gossypium hirsutum
  Clone ID: LIB3147-057-Q1-K1-F4
ttcaacaactccttgcttctctgttactctcctaactctccaactgttgtttccacttcctctcttccatatctgaatcgcaaaaaggaattctcatattgttcgcacttttatcacttgcctaagacacagctcattacgtcattttgtttttaaaccgataatcttctataccatttacaaacaactcccaaacttctccaacttaatcaccatctgtcttcaaacctttcc

SEQ ID NO: 27029 - DNA, 372 bp, Gossypium hirsutum
  unsure (1)..(372): unsure at all n locations; Clone ID: LIB3147-057-Q1-K1-F5
acccacgcgtccggtgggtaggagagtcaacagngctcttcgcttttttgatagannnctccatcttcgggaaggtcttttaaaggcaagtggggcaaaagtctttgcgagcaagccatcacttgaacgttttatccggttgaatttcccagatgcagatgttaatgcgttctttgcttcatttgtttggaagatccctgccgttgtggaatctcctactaaagtggcagcagcgcctgcatcaccagcagaaggaacagaagatgataagcaagaaagtgacacaaaaggtctccgtagaacccaaaggaagagggcttcccctcctcccccattcaatactccgagttccatctaagcaccatcagcacc

SEQ ID NO: 27030 - DNA, 286 bp, Gossypium hirsutum
  unsure (1)..(286): unsure at all n locations; Clone ID: LIB3147-057-Q1-K1-G1
aaaaagaaaagggagaggggggaaaaaaaaatttttcntaaaaaaaaaaaaaatacaaaaaaaaaaaaaaaaaaaaaaaaaaaaagaaaaaaaaaaaaaaaagaaaaaaaaaaaaaaaaaaaaaaaaaaaaaaaaaaacaaaaaaaaaaaaaaaaaaaaaaaaaaaaaaaaaaaaaaaaaaaaaaaaaaaaaaaaaaaaaaaaaaaaaaaaaaaaaaaaaaaaagaaaataaaaaaaaaaaaaaaaaaaaaaagaaaaaaaaaaaaaaaagagaaacaaagaaaaa

SEQ ID NO: 27031 - DNA, 382 bp, Gossypium hirsutum
  Clone ID: LIB3147-057-Q1-K1-G2
acgcacgcgtccgcactttcaggcacttaactaaaggtttcatttttaactagctgatgctccaaaaaaggataggttccattatacacagggtgcgcataagattaacagcttttatactgctccgaagaagctattggcatctgactctcgcctacgtcccgacagatatgcactatagctgggtgacctctctaaggcaggctttgaaaagagcagtttgtaggaaagacagagagctgaaaagaaaaacagggaggtaaagggacataaattcacccctaaattgtttgacttcgccaacgaagtttcttctacaccttggggtgacttggaagtttatcaatacaacggcaagtataccttacaccgatcttccata

SEQ ID NO: 27032 - DNA, 405 bp, Gossypium hirsutum
  Clone ID: LIB3147-057-Q1-K1-G3
cggggattaaagataataacccatatgtttttgttatattttgcaacaaacacaagcctgtggtgctcaaaatctgaaaagcttaagtgttcaagaagataagctgtttcagttaccatcggcttgtcaattgaagaacgctagcgtcagtgattgcccaaagcttcttgggttatctccgagctcaccagacgccgccatcttcaccaactcctcctctaaagcaacgacacccagtacttcagcaaccaccgcaacgccgtcttccgcggcggataaaaccgatagcaaatccagtggaaccaagcttggtccccacttcgtcggttccacggcggcgctactggttgctacagcggccgtgtttttccttgtattcccagctggatttgcttcaatagttta

SEQ ID NO: 27033 - DNA, 357 bp, Gossypium hirsutum
  Clone ID: LIB3147-057-Q1-K1-G4
cgtccgaagcgattcaattttccataaaacttttgttatctttacgctgagaaagtcaacagcagagtccttttcgctagtggccaggccaagtctcttcgctacaagctactctgatgtcttgccgttcgcagggcctgctatggtgtactgagattcatcatggatagtggtgccaagggatgcgaggttattgttagtgggaagctaagagcacagcgtgccaaatctatgaaattcaaggatggatattgatctcttctggtcatcctgtcaatgattatattgactctgctgtcagacatgttctttttagacaaggggtgcttggtttcaatgtctaaatcatgcttgact

SEQ ID NO: 27034 - DNA, 242 bp, Gossypium hirsutum
  Clone ID: LIB3147-057-Q1-K1-G5
cccaactgagctaaatcagcaagctgcttccaatagagacgggccatcttccttcagaattatatcatccctcattacagctttaacaattatcttaaatttggacctagaactacttttttgagacttttagattgcttttaaacaaatcctattctaatttcaatgttttccaatctaatgtttataattatatctattgctccaatacgacagataattacaaccttcactttcttctc

SEQ ID NO: 27035 - DNA, 347 bp, Gossypium hirsutum
  Clone ID: LIB3147-057-Q1-K1-H2
gatcctgttatcctttcatcgaagatattgtcagttgaggacttctgcactcgaaggatgtttacatgcttaaacggtggaagtatgcacttgtatggggatcaagcgtaaaacacaagcctcaaagagttggcaaggatcatgaacttgaggatgaagatgttgttcagattatcaagaaagtgtgatttgaggatattggaatttatgccttcatgttttaggaatcccatgaatcatattgctcaacattgtaagctgctgccatttaggttgtggagctggaaattttgtgaaaaacctgacagcttgaatgtgtaattaaaaaccaatttgttgtcaagctc

SEQ ID NO: 27036 - DNA, 393 bp, Gossypium hirsutum
  unsure (1)..(393): unsure at all n locations; Clone ID: LIB3147-057-Q1-K1-H3
gaaaatgggtgttgttagtctatcacctttttttgtctgngattaagaagaagtatgggcgggattcaaccaatgtgggtgatgaaggtggctttgctcctaatatccaggagaacaaggaaggacttgaattgttgaatactgccattgctaaagctggttacactggcaaagttgttattggaatggatgttgctgcatctgaattttacggaacagataaaacttacgacctgaacttcaaagaagagaacaatgacggtaaacaaaagatctcaggagatgctttgaaagatttatacaagtcattcgtagccgagtatccgattgtgtcaattgaagatccatttgaccaagatgattgggagcacttctccaaactaaccaatgaaa

SEQ ID NO: 27037 - DNA, 406 bp, Gossypium hirsutum
  Clone ID: LIB3147-057-Q1-K1-H6
gacccacgcgtccgggtttccataacatatgatcagagcttcattttcagccatggttctcaagacggaggtgggcctatttagtggtgcggagagataccctgggaaaggcatcatatttgttcgtggagattctcaggttttcctcttttccaattcgaaatgcaagaggtacttccacaaccgtttgaagccttcaaaacttacatggacagccatgtataggaagcagcataagaaggatattgcccaagaggccgtgaagaagagaagacgtgcagccaagaagccttactcccgatccattgttggtgccaccttaaaagttatccagaaaaagagaagtgagaaacccgaagtccgtgatgcttccagggaagctgctctccgagaaataaaggaaaga

SEQ ID NO: 27038 - DNA, 382 bp, Gossypium hirsutum
  Clone ID: LIB3147-058-Q1-K1-A10
cggacgcgtgggctttttcaatcctaatcttcatcatttcagcaaattcactttgttttctcacatttccttgtcttaatcactatggcatttgtagtgcaagaaaattccttgcgtatgagctgtgatgttgagttcaacaatgctcttctcatatccttccttgaagaatcacctaacgaagagtacgatagtaaagaattggaaacctggatgagatcgttagaagccgaaatcaatccgaacccgattggtatccaagacttaaagatgggtccagaaagtcttagcgatggaaaagaaagcaatggtacaaaacccattgattgtgaatttcaatggaatgacttggaatcaatgtcatccccatcaccaaaccatg

SEQ ID NO: 27039 - DNA, 287 bp, Gossypium hirsutum
  Clone ID: LIB3147-058-Q1-K1-A12
gttaaaaactacttttcttcaaaaaatggaggggaaagagaaaactaattgtggtgactggatgatgagtgcctgtattttcttattgtcattctttataacttgttttagggtgtgaggatgtagtgtttttctttataattgtttgtgtcatgtgaagaacataaccttctgtttctcccccatctctcggctccttcatgtcaggaagcctaagttctgactgcttgcaagactagttcatttgttggtagggaaggaaatggaaaatggaagtggtttctttt

SEQ ID NO: 27040 - DNA, 117 bp, Gossypium hirsutum
  unsure (1)..(117): unsure at all n locations; Clone ID: LIB3147-058-Q1-K1-A2
naaaggagggggggggttacatccatcttttctacctctttattaggttagttggatgatgtaagtttgtataaaataatttcataaataaaatagaatgtactttcaatttttact

SEQ ID NO: 27041 - DNA, 450 bp, Gossypium hirsutum
  Clone ID: LIB3147-058-Q1-K1-A3
gaaactttggcgccccaacttgacactactcttgatcaccctcggtgaaaagggtagcatgtattataccaagtacttccatgggtcagtggatgcattccatgtgaatacagtggatacaactggcgccggggactcttttgttggtgctttactatgcaagatcgtggaagacccaaccatacttgagaatgaatcgaaattgagggaggtactgaaattcgcaaatgcatgtggagccataaccacaaccaagaaaggagcaatcccagcccttccaaccgaagctgaagtccttgccttaatcaatggagcttaagattattagcaacaaacttcaataatctatgctcatctttttcttttttaatttcttaacatttaaaaaaaaggttttgaaaaggatcgaatttttcttcccctcttttgatttcctttttccctcggttt

SEQ ID NO: 27042 - DNA, 370 bp, Gossypium hirsutum
  Clone ID: LIB3147-058-Q1-K1-A4
caatatcaaagctttatggtcccatatggggtctcaccaagtctggcaattcttatggtttcccagaatggctcaactctttacctgccggaaagagtcttgagtttgtatacatccatgctgcttctcctgctgatgtctctgtttcaagctacaatatagcttaataatggaagacattgcaaaaaaaataaagggtaagttccaacatggttctggggttgtggtgttagaatttgtgcagctatacagaatgcgtcaaagaaaaaggttttcctttttttttttcttcgctgtttggggattttcaactttacttgttgaatgggttatttaattaaggttctaccagatatttagtggaagattg

SEQ ID NO: 27043 - DNA, 340 bp, Gossypium hirsutum
  Clone ID: LIB3147-058-Q1-K1-A5
atcaccaaacccctaagagccgagtgatcaaaacacagataggaaaggactgaaaaagaaaaacagaaatggctccgaaagcagatacccaatctgccggcgctgtcgctgcagctgacgcatcctctcaattctcaatggacccactattccacatcttgaaagtcgtcccttactccttccttcgcgctccgcgcctccgcctcaagatcccctccgtctcccttccttccgccatgactgtcttttctctcgtcctcctcacttacttcatggtggtctccggcttcgtctacgacgtcatcgtggagccccctggcattggctctacccaagatcc

SEQ ID NO: 27044 - DNA, 362 bp, Gossypium hirsutum
  Clone ID: LIB3147-058-Q1-K1-A6
cccaggaatcccttcttagcctagaaaagagaaatgtcgattctgtggactccatcgttagtggagggatggaagccaatcggatattccgtgatcaattttcttctgctgtatccactgctcttgaagacgtagacacagcaaacaacagttgcctaacatccattgatcattcgttacaacttgaccgtgatgcttgtgggaacttgaattccatgatttctccttgttgtgacgatttgagagacctgaaaagtggtcactaccacaagattgtagaaattacagagaatgcttcacaatgcctcgaggacgaatacatggtggacaagccatcttgttcgactcccaagaaaaagtca

SEQ ID NO: 27045 - DNA, 423 bp, Gossypium hirsutum
  Clone ID: LIB3147-058-Q1-K1-A7
gtccgaactctctttatgattgtcagtacaaatcattcttcttagcattcgctggtctgaccgaacagataaagttggaccgttatttgcatccacatttccggttttacatgagggaggttagaactgttgtttactctcaatttctggaatcctacaagagtgttaccattgaagccatggcaaaagcttttggggtgaccgtggagttcattgatctggagctatcacgttttattgccgcaaggaagcttcattgcaagatcgacaaggttgccggtgttcttgaaactaaccgcccttatgcaaaaaatgcgctctaccaagcaaccattaaacaaggagacttcttattaaaccggatccaaaaagtggctcgcgttattgatctataaatcaagtaagcatttcttctgatttaaa

SEQ ID NO: 27046 - DNA, 266 bp, Gossypium hirsutum
  unsure (1)..(266): unsure at all n locations; Clone ID: LIB3147-058-Q1-K1-A8
ggcccggaacgaccgaggcgacccatgcgttaaatatgggtaggggaaaaagagatgaatgtgggaacatttagtgcatttctgttgttttcctggaagtaataataattttgttactttgaatgaaacggattttatttatgatttttatgcattgctgccccatgtgatttgggtgcttggnnnnnaaannnannnnnnaaaaaaaaaaaataccnnnnnaaaaaaaaaaaaaaaaaggaaggactaaaaatacgaaaatacat

SEQ ID NO: 27047 - DNA, 325 bp, Gossypium hirsutum
  Clone ID: LIB3147-058-Q1-K1-A9
ggccggagcccacgcgtccattcaaatgcagatggatcaattgggtggtcagttggtgccactcttggatatgcacaggctgttccggagaaacgtgtcatcgcttgcattggtgatggtagttttcaggtgaccgcacaagacgtgtccacaatgctgcgatgtgggcagaagaccataattttcctcataaataatggtgggtacaccattgaagtagagattcatgatggaccatacaatgtgatcaagaattggaactatattgccttggttgatgcaattcataatggtgaaagcaagtgctggacaaccaaagtatttt

SEQ ID NO: 27048 - DNA, 290 bp, Gossypium hirsutum
  Clone ID: LIB3147-058-Q1-K1-B1
gacctcttcagttctcctgatgtggtgaagcagataacatctattaccattgaacctggtgtggaggtggaggtcaccattgcagattcttaaatatggagtcacttctgctctgcttagaatgatttgtagggttccttagcttgtatttttcccatactagtgttgaagtgagtcttcatctgttttatggctccaggttttgtttcctttttgttatccgaagattatgtttggattttttaaatttatttgaaatcaaaagtcaagaaacgagttgtgtagtattt

SEQ ID NO: 27049 - DNA, 470 bp, Gossypium hirsutum
  Clone ID: LIB3147-058-Q1-K1-B10
cccacgcgtccgaaaagatggagtgattctgttgtgggatttggctgaaggaaagaagctttatagtcttgatgcaggttccgtcattcactcgctttgctttagtcctaataggtactggctttgcgcagccaccgagcagggtatcaagatctgggatctggagagtaagagcatagtggaggacttgaaggttgatcttaaggctgaggctgagaagtctgacgtcactgacatcggaaataagaagaaggtcatatactgcactagcttgaactggagtgccgatggaagcaccttgtttaaggggtacactgatggtgtaatcagagtttgggggattggtcgttactaaatatgcttgtcttgagttaaaaattttgttcaaatgtcggaaggttttttggtttattttcttaatatggttggatattgaggccttgccctcttctattctaatttgggttggg

SEQ ID NO: 27050 - DNA, 399 bp, Gossypium hirsutum
  unsure (1)..(399): unsure at all n locations; Clone ID: LIB3147-058-Q1-K1-B11
ggcatttatatgccatttctacaacatttattttgccaacacagccggtggtaggatcattgccaagaaggtagctgagaagattctcgacagcagggaattggagttctataaatgggatggtgaactttcgcaactattacaaaatgtaagggataagctgaataaagttgctgagaactggagtagagaagacaagaaccgttgtttgggagaaactgagatatctttcaagttttatagagagatcgttcgactcatgttgtcctagagctgggtagctagggttggttcctaactgcctgcttgttgtcgtgctattgtgttagtccaagccgcaaccctaaagatctcatgtttactgaataaaaccgtgtccttccnnnnnaaaaaannnna

SEQ ID NO: 27051 - DNA, 316 bp, Gossypium hirsutum
  Clone ID: LIB3147-058-Q1-K1-B12
cccacgcgtccgcccacgcgtccgcccacgcgtccgcccacgcgtccgccagagcaagccttgtgctgtctgcggctgaataagattgattttgcaaatcatggccaaattcctaccattgtaagtgtcaaagatgattaaaatgcagatttaaattcaacaccattgtttgcattcatttattttgttatttctgccttgtaattttcatcatctttatcacaccagcaaagcaattgactagattattgagatcaaagcttgttgtaaggattaactattttggttttcaaccataaacaataatttttcaatc

SEQ ID NO: 27052 - DNA, 438 bp, Gossypium hirsutum
  Clone ID: LIB3147-058-Q1-K1-B2
cattcccatctctctttcatcaacccgaatgcctcctacaaccacaagttccccggtttaacactacatgcatcacttatttccccttctacacctccctcatccagagaagaagccattctccaagccaaaacatgcctttccacctgcttggagaagcctctcaacaatcccaagctagtaggcaagctcaagaagctaaaacaacccaggtttcaagttgaaattccactcattgatgactgtccatcatctctagctcaactagctctagacatctttaaagatatgtcactcaaaaagaaaggttctttagttgagattttagttctttggcctgatgttcgtttaaaagaagctggaattcaaacttttgaatcatcctcctcgtttagccatattgaacatattgacttaccttcagttagcaaaaataat

SEQ ID NO: 27053 - DNA, 388 bp, Gossypium hirsutum
  Clone ID: LIB3147-058-Q1-K1-B3
cccacgcgtccgcggagatcaagcaaagcattttcataacccaatttttttcttcaaacacaaatcaaagggagaaaaaagaatggaagtggagggttcatcgaagaagatgatagcaacacaagcagagatggtggagaacaaggtccccatcccgtacagggatcaatgtgcacatcttctcatcccgctcaacaagtgccgccaagccgagttttacttaccttggaaatgcgagattgaacgccactcctatgaaaagtgcgagtacgagctcgtcatggagaggatgctgcagatgcagaagatccgtgaagaagaggccaagttgaaacaagctgggaaacaaggcgcttctgttcctctcattcccaaaactgctaatgct

SEQ ID NO: 27054 - DNA, 368 bp, Gossypium hirsutum
  Clone ID: LIB3147-058-Q1-K1-B4
aattttcttcctttctgccaaggctgccgcttgggagacaggatgaagaccattgtttcttcggagacgatggacatccccgatgggattagcatcaaaataaaagccaaggttatcgaagttgagggtcccaggggtaagctcatccgcgacttcaagcacctcaacctcgacttccatctcattaaggacgaggagaccggcaagcgtaagctcaggcttgaggcttggttcggctccaggaagactagcgccgccatccgcaccgctctcagccacgtcgagaacctcatcaccggcgtcaccaaaggataccgttacaaaatgaagttcgtctatgctcactttcccatcaacgcctccatcac

SEQ ID NO: 27055 - DNA, 330 bp, Gossypium hirsutum
  unsure (1)..(330): unsure at all n locations; Clone ID: LIB3147-058-Q1-K1-B5
aaaacagggccggccggacgcggcggaaaattgaacgaanctaataaactttaattttgtgcacattacaataccaatttgtggaattgctaaattttaactgttggacagtccattataatgttgacataattacagcactctactcatatttgtatcatgaaccccttctgcatgtctctgcatgtttcaagaaattgacttattttcattcttgaatgattcagattgtgctcttaaatgaatttatatttcaatctcaaaaataaaaattcttatttaaatatatatttcatttttatttattataaatattttttatttttctaa

SEQ ID NO: 27056 - DNA, 388 bp, Gossypium hirsutum
  Clone ID: LIB3147-058-Q1-K1-B6
atcggatcaacaattcgggacaagattattccacatgctgtgtcatggtttacaggagaagcggtccagggagatgagcttgatatagatgacgatgaagaagatgacgatgatgatgatgaggaagaggatgatgaggaagaggatgaggatgctgacgatgaggatgaggatgatgacgaaggaagtaagaccaaaaagaagtcggctcataagaagagtggtaaagcagtaggggatgggcagcaaggtgagaggcctccggaatgcaagcagcagtagaaattaattgctgctgtcggagtgtggtttataagattttgattggaaaaaagcgggaaaaaaggaaggtttgcaagtttggtggttatttatttctacaagttta

SEQ ID NO: 27057 - DNA, 138 bp, Gossypium hirsutum
  Clone ID: LIB3147-058-Q1-K1-B7
agaataaatgccatatgattattatatatatgtttgatatggttttttgggggtaaaatgttggattcagattgattaaaatgtattgttgtcttgaatttgaggttgttttcaatgatttaatgatgaagtttctag

SEQ ID NO: 27058 - DNA, 425 bp, Gossypium hirsutum
  Clone ID: LIB3147-058-Q1-K1-B8
ggcccggaacgaccaacccgtccggccacttctttttttcgtaatctctaactttaagatttcagtctcagtaaagctttttcatcgccagccaaaatggggaagactcgtggaatgggagctggtcgtaagctgagaacccaccgtagaacgcagaggtgggccgacaagtcatataagaagtcaaatctcggaaatgaatggaagaaaccttttgctggatcatcacatgccaagggcatagttcttgagaaaattggcattgaagctaaacagcctaattctgctatgcgaaaatgcgctcgtgttcagttgatcaagaatggaaagaaaattgctgcctttgtacccaatgacggttgcttaaactacattgaggaaaatgatgaggtattgattgctggatttggacgaaaggggcatgc

SEQ ID NO: 27059 - DNA, 334 bp, Gossypium hirsutum
  Clone ID: LIB3147-058-Q1-K1-B9
cccacgcgtccgctgaattctgaatagaatatttccggattacaattcccacgtactctcatgatatcttgttcagcagctccaaggtattaagaagctctcctattattaatccggcaagcaatttcattttgtggcattaagcaatggttcaaattgttttttcttttttacccctttttccttgtattgaattactttgacaagccatgaaatgatcatcatctatataggctattcttcaaacagatctcactttgatgccgtccaaagctttgcttcggctgatcatggttaccaattactatattattccgactcttcgttttacttg

SEQ ID NO: 27060 - DNA, 238 bp, Gossypium hirsutum
  Clone ID: LIB3147-058-Q1-K1-C1
gaaaattgaacgaagctaagaaactggaatcaagtgcacattacagtgccaattgtgggaaagactagaggttttctgttggacagtgcattataatgttgtcataattacagcactctagtcatatttgtatcatggaccccttctgcatgtttctgcatgtttcaggaaattgacttattttcattctggagtgatttagtttgggctcttaaatgaatttatatttcaatctcag

SEQ ID NO: 27061 - DNA, 420 bp, Gossypium hirsutum
  Clone ID: LIB3147-058-Q1-K1-C10
gcggccgctcgcgatctaaaacgtctccgcccaaaaggaaaaattattttcccctttcaccataaattgaacgttgaactcctcaaaaatcttcaaagcttcaacttttccaaacatcagcgatccctttcactccaaaatcgggtgaataatggcgacgtttgagctttaccggaggtcaacgatcgggatgtgtttgacggagactttagacgagatggtttccagcagtactttaagccctgagctcgctattcaagttctcgtccagttcgataagtctatgactgaagccctggaaagtcaagtgaagagcaaggtttccattaagggacatctgcacacctatagattctgtgacaatgtttggaccttcatcttacaagatgctttgtttaagaacgaggatactcaagaaaa

SEQ ID NO: 27062 - DNA, 452 bp, Gossypium hirsutum
  Clone ID: LIB3147-058-Q1-K1-C11
ccgggcaccacgcgtcgcccacgcgtccgccacgcgtccggttcttggtctgcagatggagctaagcgaagagaaatgaaagacaatccagtacgccagcaggagcttgctgcctacttcactcactgcaccttcaattaccacacctaagacttgccctgctgaatgcaatgactgtctgctacaaggcaaagaacatggctacagcaggtaactttgcccggcgactgctagaaacaaaccccacaaatgagaatcaagcgaagacagccaggcaagtgcttcaagctgctgaaaggaacatgacagatgcttctcaactgaactatgatttcagaaatccatttgtgacatggggggcaacttatgtgcctatttaccgagggcagaaagatgtatcgtgcccatattggactaatcgctttgtgcctaaccaggaaaggcaattgggt

SEQ ID NO: 27063 - DNA, 399 bp, Gossypium hirsutum
  Clone ID: LIB3147-058-Q1-K1-C12
ctccttaatatcccaagaatcatctttttcaaaacattttactccaacgttttgatttccatggagcaaaccttcattttcctcacaaaaacctcagtctggttctcagacccattcgtcctctagtgttttgactgcataccttggtaccgctccttccagtgttccagaatcggttcgttaagacaatggctaccctcagaatagctcttcgtaacgtccaccgcatctttaatacctccgccgtttccggccgtacaacgaccgttttcagaaagcaaaaggcgtctttataacagattgttgtataagagcaaataaagaaggtttttggagcttgatttggttttgggaaaatgggttgaagaacatatccattctatggatgaaaatggaatt

SEQ ID NO: 27064 - DNA, 466 bp, Gossypium hirsutum
  Clone ID: LIB3147-058-Q1-K1-C2
cccacgcgtccgataacatgcggcgatgtgacaagcaaagtggccggttgcttatgatacttgcagaacggagggaacgtgccgaaggcttgctgcgacgggatccggtccctgaacaacatggctcgaaccacccctgaccgccaaaccgtgtgtgggtgcttgcaagctgccgctaaggctgtcaaaattaaaggcaacttggctgagaccctcccagccaaatgtagtgtcaacatcccttacaagatcagcacttccactaactgcaaaaatgtgaagtgagatggatgaagagagggttttgcagcagcttgcaggagataaaatatatgattaaaaagaagaagaagaagaagaatgaataaggattttgggatggaattttcaaaatccaaaattagtctccactttagtgtaatgaggctttgtttattttggtttatgttttggtccctgcatgttg

SEQ ID NO: 27065 - DNA, 467 bp, Gossypium hirsutum
  unsure (1)..(467): unsure at all n locations; Clone ID: LIB3147-058-Q1-K1-C3
gcctgaacaaggttcaactaaaaatagtggtgatttaattgctgttggtgctgatgggagaggtggtagaattaaggttatgcgatctgcgaatcaatcttcaatgggtgataaggagaattcagttagtgcaaagagattaaaatgtggagctaaacaaaatagtttcccttctggaggatgcttgcaaatagagcacttctttggaaagacccattactgattgaaagttgaagactcagcacatgcttgaacttgtaccagggaataatgaaacaaggccgaagcaaatttgcttatgtcatcagtgtatgatgacgtangcttgatgcctcttgaatagtaagttatatcatatatttgtttgataaacactaaaactatgaactaattttatatatgaaatttaattgtgtaatttatacataaaattttgatttaatctaatttttgtaaattattaacac

SEQ ID NO: 27066 - DNA, 311 bp, Gossypium hirsutum
  Clone ID: LIB3147-058-Q1-K1-C4
agagccggcattttttttatcttctatgaagggatcaaattattggtttcaaccacgcacaatgcagcatatttatttatggttagattcaacaacaatatatcagggtttttttttttttcattagctagttttactatgcataggatttacattttttggaaagggcttccattattatatacttaatttgttctttcaatatttaatgggcaatatgtttgcagttttgggttccttgcgttttcttttaggcttgcctcaaaactttggtttaatttcaatctgcagcaaacaagctccatttgttc

SEQ ID NO: 27067 - DNA, 439 bp, Gossypium hirsutum
  Clone ID: LIB3147-058-Q1-K1-C5
ctttgatttttcaaaaatgtcgggccgtggaaaaggaggcaagggattaggaaaaggaggagctaagaggcatcggaaagttctccgagataacattcaaggcatcactaagccggcgattcgtagattagctcgtagaggcggtgtgaagaggatcagtggcctgatctacgaagaaactcgtggagttctcaagatctttctggaaaacgttatacgcgatgctgttacctatacggaacacgctaggcgtaaaactgttaccgctatggacgttgtttatgctctcaagagacaaggaaagactctttatggtttcggtggttgatttaaggttttaaggtctttcttcttttgttgtaaatctttcgttgcaactgcttggtgtaagctttttttttttgtttggatcgatgtattttcgtttcgatgaaaattt

SEQ ID NO: 27068 - DNA, 404 bp, Gossypium hirsutum
  Clone ID: LIB3147-058-Q1-K1-C6
gttttgtttactacacaatgcggtgcttaagacttaaaactttggagattcttggggtctatgtaaaactattctcatttcgcattgaatatcttaatactaaattaaatttacaaaaaaaaaaaaaaaaaactcaaaaaaaaaaagtgaaaaggatcaaaaaccatgatcacagaaaaaactcgtggagttctcaagatctttctggaaaacgttatacgcaatgctgttacctatacggaacacgctaggcgtaaaactgataccgctatggacgttgtttattctatcaaaacacaattaacgactctttatggtttcatttatttgattaaaggttttaaaatatttattcttttgccggaaatctttccatgcaactgcttgaaaaacccttttttttt

SEQ ID NO: 27069 - DNA, 438 bp, Gossypium hirsutum
  unsure (1)..(438): unsure at all n locations; Clone ID: LIB3147-058-Q1-K1-C7
acaagatcaagaagctcactggggtgaagaccaaggagcttctggtttggatcacactcagtgatatctatgttgatgatccaccaactgggaatatcactttcaagacacctgctgggctgttcagaactttccctgtatcagcgtttgaggttgaaggtgaagttaagggtgctgttaaggacaagaaagaagaaaaggataatgtgaagcctgctgctgtggaagcagtgaaagaggtctagagtagtgagactagaattaaatttccaaattccatccatctgcggggttgtttttggacttgctatcttttaacaagcctcttctattaatatcatcaatagcagcaatcaataaaaaataacagcatgttagtttacattcaaaaaaaaaaaaancaaaaataaaaaacacattaaaagaaaagagggtaag

SEQ ID NO: 27070 - DNA, 461 bp, Gossypium hirsutum
  Clone ID: LIB3147-058-Q1-K1-C8
ggtcatggtcaacgtgaagctgtgaaagtattattagattatcatgctaatccaaatgctgaggacgaggataatatcactccattgttgtcatcagtggcagcaggttcacttgcatgcacggatttgttgattcaggcaggtgctaaagtgaatattacagctggtggagcaactccgttgcatattgcagctgatcatggaagccctgaactaataaacagcttactgaaagctggagctgatcctaatgccactgatgaggatggcctgaagcccgtcctggttgcagctgccagaggtcatcgtggagcagttgagatactatttcctttgacgtcaagaattgataccattccagagtggactgttgaaagaattctcaaatatatgcagtctgaaactgacaaacaattggagcaaatgaaaaaactgacggaagccaaagtaacaagggacac

SEQ ID NO: 27071 - DNA, 165 bp, Gossypium hirsutum
  Clone ID: LIB3147-058-Q1-K1-C9
aaaaaaaaaaaaaaaaaaaaaaaaaaaaaaaatttaaaaatttaataaaaaaaaaaaaaaaaattggaaaatttaaaaattaaaaaatttaataataaaaaaaaaaaaaatatttatttttatataataaaatttttttttttttgcaaattatataaattttat

SEQ ID NO: 27072 - DNA, 134 bp, Gossypium hirsutum
  Clone ID: LIB3147-058-Q1-K1-D1
attccatatgattattatatatatatgtttgatatggttttttgggggtaaaatgttgtattgagattgattaaaatgtattattgtcttgactttgaggttgttttcaataatttaatgatgaagcttctagg

SEQ ID NO: 27073 - DNA, 434 bp, Gossypium hirsutum
  Clone ID: LIB3147-058-Q1-K1-D10
cattgctgctcaacagggtggagcctttgcatgggaaattgctccggttgaagttcctggggggaggggaaagccatccatcatagtcgacaaggatgaaggtctaggaaagtttgatgctgcaaaattgaggaagctgcgaccaagtttcaaggataatggaggcactgttactgctggcaatgcctccagtattagtgatggtgctgctgctttaatcctagtcagtggagaaaaggcacttaagctgggattgcaagtgattgcaaagattgcaagatatgcaaatgctgcgcaagcaccaaaatttttcacaacagcgccagcccttgcaatacccaaagccatttcaaatgcttgcttggatgcttctcaagttgattactacgaaatcaatgaagcctttgctggtggggctcttgcaaatcaaaaac

SEQ ID NO: 27074 - DNA, 471 bp, Gossypium hirsutum
  Clone ID: LIB3147-058-Q1-K1-D11
gtccttggatgatggtccaagtgagaatggttctgaggcaacttctactgatgattgggcaggcttccagtctgctggaggggcctccacaactgacaagcccaatccaccaaaacctgctgaaagtaataccaagtctactagtggaattgaggatttatttagtgatttacctccattaacaaccaaccaagtcccagagaagcctcaaaaagatgttaaaaatgatattatgagcctctttgaaaagtccaatatggtgtcaccttttgctatgcatcaacaacaactagctatgctagcacaacaacagtcccttctcatggctgctgcagctaaatctgctcctggaaatgctcaacagcctccatctaacggcacaaacataccctctcaagcttggccaaacattggctaccaattccctggaatgatgatgcccgttgctgggcaagctgatcttgaaaaact

SEQ ID NO: 27075 - DNA, 235 bp, Gossypium hirsutum
  Clone ID: LIB3147-058-Q1-K1-D12
gaaagttgaggagaaagaagaatccgatgatgatatgggattcagtctctttgattaaagagttggttttgtgcagaaattctcttctttttttttcaaatttaaggctagtttagattctaaaatttcgttattttcgttgtcgatttggggattcgatgaacaatggcatatgtttttgcttaaacttaatgttgcaatgaattttccgtagtctattatgatgattttcttg

SEQ ID NO: 27076 - DNA, 406 bp, Gossypium hirsutum
  Clone ID: LIB3147-058-Q1-K1-D2
agaaactacaattgtaacaccccgactcgtgtccgtcgccggatttgagttacgaggcattaccgaccaaaaatccaactcaatttttttttataaaaaaaaaaaaaaaaaaaaaaaaaaaaaaaaaaaaaaaaaaaaaaaaaaaaaaaaaaaaaaaaaaaaaaaaaaaaaaaaaaaaaaaaaaaaaaaaaaaaaaaaaaaaaaaaaaaaaaaaaaaaaaaaaaaaaggggggggccttttaaaagaaccaaatttaactacccctttattgcaaaaaaaaattttttttttggggcccctaaaataaaattactgggccggggtttaaaaacgggggaatggaaaaaacctgggggtaacaaaattaaatggcttgaaaaaaaacccctttttcccaagtgggct

SEQ ID NO: 27077 - DNA, 401 bp, Gossypium hirsutum
  Clone ID: LIB3147-058-Q1-K1-D3
caggaatgactgctcctcaagctgctggagtcattcactctgattttgagaaaggcttcattcgtgccgagacagtatcctatgatgatttcgtcgtatctggttcactagcagcagcaagagaaaaaggacttttgagatccgagggtaaagattacgtagtacaagaaggtgatgtgatgctgtttcgtttcaacgtttgatgactgtattcccggagctgaaggcaaattcatcattcttttacttatcaaagcaccaaacaagaaatgtaaacgtcgatggttttatatcatacagcggtctaagaccatgttcaatatcagaaatatagcataggattgcaattattctttcaccattgctaaaccgagaaatatatatattcagagattttgctc

SEQ ID NO: 27078 - DNA, 457 bp, Gossypium hirsutum
  Clone ID: LIB3147-058-Q1-K1-D4
cactgcacttgctccaagcagcatgaagattaaggtcgttgcaccaccagagagaaagtacagtgtctggattggaggatctatcttggcatcactcagcaccttccagcagatgtggatttccaagggtgagtatgatgaatccggtccatccattgtccacaggaagtgcttctaagttttgtaattgcttttgatggtgatctacattttgcatttagttggctttttttgtgtgcggtgtcaagtgaactccaaagtctggtttatgtggggggagttggggatcattgtaagatggtgtacttgatattgacgtattattattttagcttttcaccggatcaccaccattaaaatgatgggtcctatggaaatggcggggggcggacaattggtgcttaattccttccttacaatccatctttgaaccatggtgctgcttaaaaagatgttt

SEQ ID NO: 27079 - DNA, 419 bp, Gossypium hirsutum
  Clone ID: LIB3147-058-Q1-K1-D5
cccacgcgtccgagaacacagttattgcaggggcacaatacagaggttcactctatttgttgggacacaaatggagactttttagcatctgtcagtcaggattctgttagagtgtggtcgctggcctctggagagtgcattcatgagctcaattctagtgggaacaagtttcattcttgtgtttttcatcctagctttcctgctctcttggttgttggtggttatcagtcactggagctttggaacacagctgagaacaagtgtatgacaattccggcccatgactgtgttatatcagccctgacacagtctcaagttacagggatggttgcctctggcagttacgacaaatccgtcaaaatatggaaataactgtgtcagccaacttttaatgttgcattgggggaatgctatatatt

SEQ ID NO: 27080 - DNA, 430 bp, Gossypium hirsutum
  Clone ID: LIB3147-058-Q1-K1-D6
cggacgcgtgggcttcgaatccgtgctggccaaagccaagcacttgttggagctagtggctcgggcaagagttcagtcattgcattgattgaacgattctacgatccaacagccggaaaggttatgatcgatggaaaagatatccggagattgaacttgaagtctcttaggcttaaaatcggattggtacaacaagaaccagccctctttgctgccagcattttcgataatatcgcttatggaaaagaaggagcaaccgaagctgaagtaatcgaagcagctcgagcagctaacgtgcacggtttcgttagtgcgttgcctgatggttacaaaacacccgttggtgaaagaagcgttcaactctccggaagtcaaaaacaaaaaatcgccatcgcaagggctgtacttaaagacccaacaatattactac

SEQ ID NO: 27081 - DNA, 461 bp, Gossypium hirsutum
  Clone ID: LIB3147-058-Q1-K1-D7
agtatttgaaaccaaatttgctggctaatgacattgcaccttttgtgaaggattacaaggaaggaaaagtgccaccatatctcaagtctgaacctattcccgaggagaataaggaacctgtaaaagtggtggttgctgacacctttgaagacatggttttcaaatcaggcaaaaatgttctgcttgagttttatgccccttggtgtggacattgcaagaaattggccccaatcttggatgaagttgctgttcattatgaaaaagatgataatgttttgattgcaaaacttgatgccactgcaaatgatattgtgggtgagaactttgatgttagaagctacccaaccatttactttaaatcaactagtggaaacataactccttatgaaggcaataagaccaaggaagacatcgtcaacttcattgaaaagaacaaggataaaacttgccaacaagagtca

SEQ ID NO: 27082 - DNA, 472 bp, Gossypium hirsutum
  Clone ID: LIB3147-058-Q1-K1-D8
cccacgcgtccgggaaaacgcaccatttcacacctttttgctgttcatttctcttccaccacaccaatacccagacccagagaaaaaatggccagcaaatctgagggtaaggaacctgtgaacgaacaagtggttgcgaatatgtacggagctatgagatctgaactaaatcaaatttattctaagatcaccgagttggagatggaagtgagcgagcattcgctagttataaatgccattcagccacttgaccagtcgaggcggtgttaccggatgattggaggtgtccttgtcgagagaaccatcaaagaggttctccctgctgtgcaacgaaacaaagaaaggctcgaggaagtaattgctcgtcttaacgagaccctggagaagaaaaagaaagaaattgctgatttcgagacaaaatacaaaattaggatcaaaaagtccgatgatgactcgaaagatgaaagcaaca

SEQ ID NO: 27083 - DNA, 419 bp, Gossypium hirsutum
  Clone ID: LIB3147-058-Q1-K1-D9
cccacgcgtccgcccacgcgtccggtgaagaagcttcaaagctttatccacaagtggagtacactcgcatggatgattacatgaaaatttatgtttaaatcaaactaatgtaagaatcgatgactttcacttcagccaaacaaaataagggatatctaccggaatattgctcacgtcttccctcatataggaattcataactttttccacctcaaatcaaatcaaattcatgactttcatgtatttctttttctttttcttttttttttccttttctgatatactctcatatccattttcttaaaagaaaaacttatttctttatttcttttgttataccataaatataatatgtaggaccttaaaattctttattaaattatttaagacataataataaatttagtccattatgtcaa

SEQ ID NO: 27084 - DNA, 216 bp, Gossypium hirsutum
  Clone ID: LIB3147-058-Q1-K1-E1
cccacgcgtccgcagagatgtatgggaatctatactccaaccgatagccaggaaggcactaggcgattcatttttgtgtggatccagtgggcactgagataatgtagtaagaatcaatacttacaatttttttgcattcctaataacataatcatacatatgtatccacaatattaatgcttacattggtttctaaagcatcctaactccggtctc

SEQ ID NO: 27085 - DNA, 452 bp, Gossypium hirsutum
  unsure (1)..(452): unsure at all n locations; Clone ID: LIB3147-058-Q1-K1-E10
gcttacacaccagccggcgaacccattcctaccaacaagagatttaatgcggccaagatctttagccaccctgatgttgttgctgaggagccttggtatggtattgagcaagagtacactcttcttcaaaaggatactaagtggcctcttggatggcctgttggaggattccctggaccacagggtccgtactactgtggtgtaggtgctgacaagtcctttggtagggacatcgtggactcccactacaaggcttgcctttatgctggcgttaacatcagtggaatcaacggtgaagttatgcctggtcaatgggaattccaagttggtccatctgttggaatatctgcaggtgatcaaatatggattgcacgatacatactcgagcgaatcactgaaatcgcaggagttgttctttcttttgatcccaaacccattncgggtgactggaa

SEQ ID NO: 27086 - DNA, 468 bp, Gossypium hirsutum
  Clone ID: LIB3147-058-Q1-K1-E11
gggcgacttgtacgcactgagagactaagaaccaaagacatcacccatcgagtcaaaatgaagaattactggcagggaggagtctgcctggcatttgctgatgaggtactgtgctggctttacggaacagtcaaagagaatgaggactacatactacaattcgcaccaccattcaaccgattggagcttctacaagcacaatcttgccctgatgcgattactaatcacgttgaacaatcatagtcatcgacagacttatttgttagtttgtaattcagatagttcaaatacaggatcaaaacaaagaggatggtttatatttttactaactttgattttgcagatgaacatcacacatgataaagttcccccaagttcagcctttgtttgtaaaggcaaaccccccaacttggtagattcataagttaaaaaattgtcctttggtaattagatttaaatagctcccat

SEQ ID NO: 27087 - DNA, 434 bp, Gossypium hirsutum
  Clone ID: LIB3147-058-Q1-K1-E12
cgaatataactcatttttcggaattgcttttctttgcgctttttagcaggttttttcatggcttcccttactgtacacctgcttccgccattgcttttacaagatagaaagacccttttcgggacttttccaaaactcccagtttcttataccggagggaggcgaaactgtgctgtttttgtgaaggctaccggtgatagctcagagtcttctacctcacttagtattgtcaagtctgtgcgaaatgtttgggataaatctgatgaagatagggtaggtctcattggtctgggatttgcagctattgtggccctgtggacttcaactaatttgatttcggttattgacaaattgccaattatcccaaatgtgctggaaattattggcatacttgtttccttggggtttatttaccggtatctattgttcaaacc

SEQ ID NO: 27088 - DNA, 429 bp, Gossypium hirsutum
  Clone ID: LIB3147-058-Q1-K1-E2
cccacgcgtccgcccacgcgtccgcgtcgtcagtacttaccgtgatcacgtgcacgccttaagcaaaggcgtctctgcacgtgctgtcatgagtgagctcttcggtaagaccaccggctgctgccgtggccaaggtggatcgatgcatatgttctcgagggagcacaatgtgctcggcgggttcgcttttattggtgaagggatccctgttgccaccggtgcggcttttacatccaagtataagagggaggttttgaaagaagcggattgcgatcacgtcactttggcatttttcggggatgggacttgtaacaatggacagttctttgagtgtttgaatatggcagcgttgtggaaattgcccatcgtgtttgttgttgaaaacaatttgtgggctattgggatgtctcatttgagggctacttctga

SEQ ID NO: 27089 - DNA, 389 bp, Gossypium hirsutum
  unsure (1)..(389): unsure at all n locations; Clone ID: LIB3147-058-Q1-K1-E3
gttttcttcttatttatcttcttgaattctctcaagaaagccctaaatacctcggatcaggtgtcaacttgtggttgttaagcctatttgatcaactaagtttcatgtctgatctcgacgtccagattcctactgccttgatccctttgctgatgcaaatgctgaggactcaggtgctggtgcaaaggagtatgtgcacattcgtattcagcaacgcaacggtaggaaaagcttgacgactgtccaagggttgaagaaagaattcagctacaacaagatactcaaagacctcaagaaagagttttgctgcaatggtactgtcgtccatgaccctgaattanggcaagttattcaactgcaaggtgaccagcgcaagaatgtgtcaacct

SEQ ID NO: 27090 - DNA, 412 bp, Gossypium hirsutum
  Clone ID: LIB3147-058-Q1-K1-E4
ggcgcatgaacaaaaggtagttactatatttagcgccccaaattattgttatcgctgtgggaacatggcatcaatcttggaagttgatgattgcaagaaccagtcattcatccagtttgagccagctccaaggagaggagaacctgatgttacccgtagaacgcctgattacttcctctgaagctgctacattccataactgattcaagatactccgcttttcggcctctcctctccccctttacattgtcaggtagttgccgatcctttacagaaatcttttgcatctactgttcttttggtgatttggggggggggtaccaaaagcatacatgggaatgggttgggttatgaacttatgatctataatcctatcatcgagttgatcaatttatcttacacttggatattc

SEQ ID NO: 27091 - DNA, 456 bp, Gossypium hirsutum
  Clone ID: LIB3147-058-Q1-K1-E5
cccacgcgtccgaaattaacaggttaagtcggtttctttaatctttaaatataaagataccagattcctttggattctttaaaaaaaaaaaaaaaaaaaaaaaaaaaaaaaaaaaaaaaaaaaaaaaaaaaaaaaaaaaaaaaaaaaaaaaaaaaaaaaaaaaaaaaaaaaaaaaaaaaaaaaaaaaaaaaaaaaaaaaaaaggggggggccgtttaaaagaaccaaagttaactaccccgtcattgcaaagaaaaatttttttaatagggcaacaaaaataaaataaacggcccggggtttaaaaacgggggaatgggaaaaacccgggggtaaccaaattaaatggcttggaaaaaaatccccttttcgcaagttgggtaaaaaaaaaaaaggcccgaaccaatcgcctttcaaaaaaattgccaaacttaaatggaaaatggaaccccccttt

SEQ ID NO: 27092 - DNA, 466 bp, Gossypium hirsutum
  Clone ID: LIB3147-058-Q1-K1-E6
gatacactcatctccaccattccttacttcaataaacatggttttgggggagagaaggtgaactcatcttctttggaggcatggatggaagagagcaaggcaccagctctcgaccacacattcaagctcttccatgacattaaagatagagggatgaaaatctttctaggctcttcttaaggggtttcgaagatgaatacatgcatgtggaacaatacaagtcccaagtgaggaaaacattaatggatcaagggtaccgcatatggggaatcgttggagatcaatggagcagcttaaagggtttgccagaagcaaagagaacattcaagctgccaaattccatttactacatgtcttaacttcatctgaataaatttttatgcactcattttcccacctcatgtgcttttgtatttgcttgcggttgttttcaaaaatccaatataaaatatcagtaaaaatatct

SEQ ID NO: 27093 - DNA, 204 bp, Gossypium hirsutum
  Clone ID: LIB3147-058-Q1-K1-E7
gtccgggacgcgtgggtcacgatagccttgaaaagtttacttttaaagcccttgcccttactctcaggaaggtgtttgatggtgtctatggaccggcatggcattgtattgtggggacgagttttgggtcttttgtaacacattcagttggtgggtttttttatttctcaatggatcaaaagttatatgtcctcttgtttaata

SEQ ID NO: 27094 - DNA, 440 bp, Gossypium hirsutum
  Clone ID: LIB3147-058-Q1-K1-E8
cccacgcgtccgatccctttcaagttcctctcttttgtcatttcacatgccctatttttcataatacccgttcaacaaccactctttcggtgaatattttcttcgattgctccttggtatttcattttttcgtgtccatgcctttcaggcctttcttctctttcaagcgttgccagtttcctcttatcttcctccagtgccagtagcgccttccttgataatcagttctctagatcagtgttccttagactctccattgttactcttgtaagttcatgtgcaactccgttaccagatctagagattttctgaaactgacactctttaaatcttctgcttagtatttgtatatcttgtatgtatgaacacaacactgactgatcctcttttgatgcctgaactcattgtacaatactgagtgcatctccttcgatgactac

SEQ ID NO: 27095 - DNA, 386 bp, Gossypium hirsutum
  Clone ID: LIB3147-058-Q1-K1-E9
ctgaaaaggatgaggaagaccaaggtcttgttatgaacttctacaaggattcttgtcctcaggctgaagacattatcaaggagcaagttaagctactgtacaagcgacacaaaaacactgctttttcttggctgagaaacattttccatgactgtgctgtccagtcatgtgatgcttcactgctgctggactccacaagaaggagcttgtctgagaaggagacagacaggagctttggcctaaggaatttcaagtacattgagaccatcaaagaagctgtagaaagggaatgtcctggagttgtttcttgtgctgatatccttgttctgtctgctaaggaaagcatcgtttcgttgggaggcccttatattcctctcaaaactgga

SEQ ID NO: 27096 - DNA, 460 bp, Gossypium hirsutum
  Clone ID: LIB3147-058-Q1-K1-F10
aatctctatctcttaagaaagtagaaaatggcgagcagcaggacttccacaccattactttcattacttgtttgccttgtgctcctgtgtgaggtgggaatgctgatggctcaactttctgcagcacaagccccaggcccccaggttccagacgcatgcccgaacaagtgtgcaaagcggtgcaacctttcatggaagccaaagatgtgcaataaaacatgcatagcctgctgccacaggtgccccgatcactgtgtgcctgatggtcctagagctagccgagattcctgccattgctactcacagatcaagacccataacaagttcaagtgcccttaaattttacattacatcctcttctttttttctcttcttttattttttccagagtgggagagtttggaaactaaaataaaaggaataataaaatgacgttactgtttctgtggtggtttcaatt

SEQ ID NO: 27097 - DNA, 392 bp, Gossypium hirsutum
  Clone ID: LIB3147-058-Q1-K1-F11
gttctagatctcgattgagataaagcgtcatgtttaatgtgccaatcactgattttcaattatgttattgtgacgtcctttttctcctgttgccataatattgaaaattatttatacttccttttttatctttaaataaaatgataatatattttaatatatttaaaaaaaaaaaaaaaaaaaaaaaaaaaaaaaaaaaaaaaaaaaaaaaaaaaacaaaaaaaaaaagaacaacctaaaaacaaaaccattgctgctgttgaaaaaactaatgaaaatgaatggcattatcctatattaagctgggaagccaccttatgttgataaggtacatacccgaaagggccaagtattaaaagaacatgggggcctacaataaaaaacaggctggg

SEQ ID NO: 27098 - DNA, 470 bp, Gossypium hirsutum
  Clone ID: LIB3147-058-Q1-K1-F12
cgccctttgacttccctcgctttttagatctcatgtccaagcatatgaaacctgagcccttcgataggcagctacgcgatgctttcaaggttctggataaggacaatactggctttgtctccgttgcagatctgagacatatactgactagcatcggagagaagctggagccctcggagttcgatgagtggatcagggaagtggatgtcgggccagatgggaagatccgttacgaggaattcattgccaggatggttgctaagtgagaaagcttattaacgtttgttttccttgcttgttgttttctttttgggggaaccaggctttgatccggcggaagatattgtgttttcaattttttgttctctttggtttgtttctatggaacctttggaactaatggtaacactctttcttaaagaatttgattggtggggggtacttatgtattctcatattaatattcttgg

SEQ ID NO: 27099 - DNA, 461 bp, Gossypium hirsutum
  Clone ID: LIB3147-058-Q1-K1-F2
ctgagaatgctgctggtgagccagaacagaaacatcatgaggagtcatctgaaaagccaaacgtaaaacttaaaggtaaaaaggcaaaatcccatgactcaagttccagttccagctccagctcgagttccagtgattctgaatgaaaaaacaacaaaaagaaagaaaaatatagtttggcatttccagttttattctaaaaatggttctttttcccctttcctttacaagaaacgaatttttaggtttcctagtttggttatcatcatgttttgttgattgattgattgagttattaaagaatgagttatggtttgatttgttttttttttggttaagccaaagcaatctgaagtgtaaaattgattttgatacttgaaagatttgtgtaaattattgtattttgtttgtaaaaatgaagaattgttgaattctaatatatatacagttgggcaatggat

SEQ ID NO: 27100 - DNA, 453 bp, Gossypium hirsutum
  Clone ID: LIB3147-058-Q1-K1-F4
agattgtgaacagctaagaaaagccttttcaggatggggaactaatgagggcttaatcatagggatattgggtcacagaaatgccgagcaacgaaacttgattcgaaaaacctacgctgaaacctatggagaggatctcctcaaggcactagacaaggagctctcgaatgactttgagaggctggttttgctttgggctcttgatcctgctgaacgtgatgcccttttggctaatgaagccaccaaaaggtggacttcaagcaatcaggtccttatggaaatagcttgcacaaggtctgccaaccaactgcttcacgcaaggcaagcttatcatgctcgttataagaagtcgcttgaagaggatgttgctcatcacacgactggcgacttccgtaagctcctcctacctctagtgagttcatacagatatgagggagaggaggtgaacatgaa

SEQ ID NO: 27101 - DNA, 456 bp, Gossypium hirsutum
  Clone ID: LIB3147-058-Q1-K1-F5
cccacgcgtccgctctaaccctagccctctatcaggattcaaacatgaaaggaggtaaatccgagtcggatgccaagagcgccaagctctccgtgaataagaaatcaatcacgaaagctggaaagaaatcggggaaggcagctaaggatccaaacaagccaaagaggcctgctagcgccttcttcgttttcatggaggagttccgcgagcaatacaagaaggagcaccctaaaaacaagtccgttgctgctgttggcaaagctggtggagataaatggaagagcctttctgaagctgaaaagcgaccttatgttgataaggcagagaaacgaaaggtcgagtatgaaaagaacatgaaagcctacaataagagacaggcttggggtccccaagaagatgaagaggaatctgaaaagtctgtatctgaggtgaatgatgaaaaaaaagatgatgatg

SEQ ID NO: 27102 - DNA, 406 bp, Gossypium hirsutum
  Clone ID: LIB3147-058-Q1-K1-F6
cccacgcgtccggaagctccaaaaccctacctgactgagtcagatgttgttgagcctcctttgcctcccgttgccaaaacaacctcgatttctactccatctggcactgtagcagcagccccagcaccaaacggacagcctaaagttgctgcctctatcattgtaccacttatggctatgcttcttgccatgtattaccgttttgaaatctgataagagtcggccttgctctcaattttttataaatcttattgctttggatatcgagtaggttgaaggttttgctgcaggagtgcagtgcccgcggcaaagaccagtttttcttagttgtcttcccctttttctaaaagcacagttcttgagagctacatatctttaatggatgcattccctatttgatttgggt

SEQ ID NO: 27103 - DNA, 280 bp, Gossypium hirsutum
  unsure (1)..(280): unsure at all n locations; Clone ID: LIB3147-058-Q1-K1-F7
aaaaaaaaaaaaaaaannaaaaaaaaaaaaaaaaaaaaaaaaaaaaaaaaaaaaaaaaaaaaaaaaaaaaaanaaaaaaaaaaaaaaaaaaaaaaaaaaaaaaaaaaaaaaaaaaaaaaaaaaaaaaaaanaaaaaaaaaaaanaaaaanaaaaaaaaaaaaaaaaaaaaaaaaaaaaaaaaaaaaaaaaaaaaaaaaaaaaaaaaaaaaaaaaaaaaaaaaaaaaaaaaaaaaaaaanaaaaaaaaaaaaaaaaaaaaananaaaaaaaaaaaaaaaaa

SEQ ID NO: 27104 - DNA, 449 bp, Gossypium hirsutum
  Clone ID: LIB3147-058-Q1-K1-F8
caactatcaatctttaggtttattgcattaaatagatcatgaaatctttcctttctttttttgcattcctgtcacttctcctgtttgtagacaccattgcagcagctaggaaagatgctggagagtactggggagctgtaacgaaagatcagcctatgcctgaggcactccaagagcttgttcggattgaggctgccgttgtcagccccgatgagaaaaccaagtgccatacatcaggtaatattgagcttaaagaagagaagattattgttaatgaggagttcgaaccaaagccaaacgtttcaacttatggtgatgacgctaatctaaaaagagataaatcatcatcttttgctgaagattttgaaccgagacctaacgtttcggcttacgggggcgatgatgctggtcttaaaagacagaaagaatcattcactaaaaatttcgat

SEQ ID NO: 27105 - DNA, 469 bp, Gossypium hirsutum
  Clone ID: LIB3147-058-Q1-K1-F9
cccacgcgtccgaaaaaaaaaaaaaaaaaaattttaaaaatttaaaaaaaaaaaaaaaaaaatgggggaattgtaaaataaaaaaaaggggttgcctttttaaaaattctaaagtttaggttctcgtgttttaaaatttaaattttttttattgtgttttttaaatttaataaatttgtcattttttaaaataatttaaattttgtaaaacccttttattaccttatttaatttttttttagatatttatctttatttaatttgctttaggaaaaaaaaatatttatccttttattatttcttttattaatattttttattttttattgtaaatttgattcttctttttattatactttaatcttctttgttttttttgttattctaacgttacttttttttttttataatcttaacgcctttttttttgatttttttactttttttttttataaatttagtgtttttt

SEQ ID NO: 27106 - DNA, 465 bp, Gossypium hirsutum
  Clone ID: LIB3147-058-Q1-K1-G1
gccgctgataccgccatctctgtgagcaaagaatgcagtaggacatgtgagtcagagttctgtgtcagtgcctccatttttgaggtatggcaagtattgcggcctattgtacagtggatgccctggagagaaaccttgcgatggacttgatgcttgctgtatgaagcacgatgactgcgttcaagctatgaacaatgactatctgagtcaaaagtgcagccaaagcttcataaagtgcataaaggatttccagaaaggaggagaaaggagtttcaagggtaacaaatgccaagtggatcaagtcattgatgtcatctctgttgtcatgaaagctgccctgattgctggaagagtgcttcataaaccttagtctatttacccaacccaacactgtcagacacgacattcttctgcttctgcaatcctaagattgatgatggcatggcatccctcaattaaatcatt

SEQ ID NO: 27107 - DNA, 468 bp, Gossypium hirsutum
  Clone ID: LIB3147-058-Q1-K1-G10
cccacgcgtccgatccctttcaagttcctctcttttgtcatttcacatgccctatttttcatagtaccccttcaacaaccactctttcggtgaatattttcttcgattgctccttggtatttcattttttcgtgtccatgcctttcaggcctttcttctctttcaagcgttgccagtttcctcttatcttcctccagtgccagtagcgccttccttgataatcagttctctagatcagtgttccttagactctccattgttactcttgtaagttcatgtgcaactccgttaccagatctagagattttctgaaactgacactctttaaatcttctgcttagtatttgtatatcttgtatgtatgaacacaacactgactgatcctcttttgatgcctgaactcattgtacaatactgagtgcatctccttcgatgactacttgtcggagtcttagatctaatcccacc

SEQ ID NO: 27108 - DNA, 179 bp, Gossypium hirsutum
  Clone ID: LIB3147-058-Q1-K1-G11
gaacgaccgaggcgaccgggccgtgagaggtacacctacactatcagtattttaaggttcatgtgcaattactgtatctcggatcaatgctgatagttaatgaaattaggcgtcatggtaacatggcaatatcctattttttcaaataaaagaatatatctaaagtctctataccattc

SEQ ID NO: 27109 - DNA, 464 bp, Gossypium hirsutum
  unsure (1)..(464): unsure at all n locations; Clone ID: LIB3147-058-Q1-K1-G12
agtccttgagtactgcaagaagcatgtcgatgttgctgcttacaaggaaaagactcccgatggcgaactcagggcttgggatgctgattttgtcaaggttgaccaaaataccctctttgacctcatcctggcagcgaactatctgaatatcaagagcttgctggacttgacctgccaaactgtggctgatatgataaagggaaagacacccgaggagattcgcaagaccttcaacatcaagaacgatttcacccccgaagaaaaagaagaggttaggaaggagaatcaatgggcattcgagtgataagaaagcctttaaatttaatgttgatattattataagttctatgcttttctcgctaggttttcaagttggggaaaaaaattaaaaacattggctttcttttggcttatttntgtatatgcattagtgtcttctattctagaggatatttaatatgaac

SEQ ID NO: 27110 - DNA, 464 bp, Gossypium hirsutum
  Clone ID: LIB3147-058-Q1-K1-G2
acagaaatgccgagcaacgaaacttgattcgaaaaacctacgctgaaacctatggagaggatgtcctcaaggcactagacaaggagctctcgaatgactttgagaggctggttttgctttgggctcttgatcctgctgaacgtgatgcccttttggctaatgaagccaccaaaaggtggacttcaagcaatcaggtccttatggaaatagcttgcacaaggtctgccaaccaactgcttcacgcaaggcaggcttatcatgctcgttataagaagtcgcttgaagaggatgttgctcatcacacgactggcgacttccgtaagctcctcctacctctagtgagttcatacagatatgaaggagaagaggtgaacatgaatctggcgaaaacagaagcgaaagtgcttcatgaaaaaatttcaaacaaagcttacagtgatgacgatgtcataaaggttttggct

SEQ ID NO: 27111 - DNA, 426 bp, Gossypium hirsutum
  unsure (1)..(426): unsure at all n locations; Clone ID: LIB3147-058-Q1-K1-G3
cccacgcgtccgggagagactacctacctatatttactcccgtgttcgaacttccagtatctggcttccggcttaaaccttcgtatttacttgaaataattaatgagtaatgactttaaacacatactcttgaatgcttagtttttagtaatttttggttaaatgtcttgacccttgaatgatattattgaaattatgttcagttcttctccctaaaaaaaaaaaaaaaaaaaaaaaaaaaaaaaaaaaaaaataaaaaataaaaaaataaaaaaaaaaaataataaaaataaaaattatttataatttaataaaaataaaaaaaaaaannannngggggggcccttttaaagagtcaaagtttttttccgggtgtatgggaagtataaattttttttaaggggccccaaaataaaattacctggc

SEQ ID NO: 27112 - DNA, 446 bp, Gossypium hirsutum
  Clone ID: LIB3147-058-Q1-K1-G4
ctctctctccacttcctcttcaataggctttatgaaggggaaagtagaaacaaagggaacatatggcaagtgaggcggcggaggaagctaacgtccctgcagcggctgcggcggaagcacccacaacagggaccgagaagcaaccacataagcttgaaagaaagtggaccttttggtttgataaccaatcaaagcctaaacaaggcgctgcttggggttcctctttacgcaaagtttacacttttgacactgtagaagaattttggtgtttgtatgatcaaatattcaagcctagcaagttgcctggaaatgctgatttccacttgtttaaagctggaattgagcccaaatgggaagatcctgagtgtgctaatggaggaaaatggtctgtcactagcaacagaaaggctaatcttgaaaacatgtggcttgaaagtttgatggca

SEQ ID NO: 27113 - DNA, 457 bp, Gossypium hirsutum
  Clone ID: LIB3147-058-Q1-K1-G5
gcagggtcatgaggtggattgttatggaatattaacctatttggtcacttgctatgctcaagcagctttaggttgtgttttcaagcttgttgagatcaataatcagccacgcatcaaactttcagaggatgtatccaaggtctctataccatgcaaaaaacgatgttacaggttatatggaagggaaggatattcgctggtagatataatgacaggggaaaatgaaccatgtccaaaggtgggagaacgtattctatgtcgccacccttttaatgaatccaaaagagcatatgtagtaccacagcgcgtggaagaacttctgaagtgttactggcctgggaagtcaagtaaagtaagaaaagagttaccagctctcaaagatattaaggaccattgcatcaaacagcttgagcaaatgaggcctgatcacattaagagattaaaccccacaccatac

SEQ ID NO: 27114 - DNA, 458 bp, Gossypium hirsutum
  Clone ID: LIB3147-058-Q1-K1-G6
cggacgcgtgggcgagaattctacactgttatctatccctctttgctgcaacttgagagcggggtcactgatagtgaagataaacaacagaaagcggcatgcgtggaaaggtatcgtagaagagaagatgaagagtataagcagcttaccgatattgatttcgaaagagaagaagaatgtggaatatgcatggaaacaaacagtaaaatgttgctgccgaactgtaatcacaccatgtgcttgaaatgttatagggaatggcggtcaatatcacagtcatgccctttctgtcgtgatagtctcaaaagagttaactcgggggatctttgggtatatacagacagccgggatataatcgacatggccacagtgacaagggagaatcttagaaggcttttcatgtacatagataagttaccacttattatccctgataccatttttgatacttatgattc

SEQ ID NO: 27115 - DNA, 373 bp, Gossypium hirsutum
  unsure (1)..(373): unsure at all n locations; Clone ID: LIB3147-058-Q1-K1-G7
gtatgtatgtatgtgtatgtgcatgcatgcatgcatgcacgtatggttttcggtcccaagaggttctatgtgatgagtttgatattggtgtgatgaggtgtgatctccatatttgcataataaatatatttttttgtttaaaaaaaaaaaaaaaaaaaaaaaaataaagaatccaccaaaaaaaaaaaaaaaaaaaaaaaaaaaaaaaaaaaaaaaaaaaaaaaaaaaaaataaaaaaaaaaaaaaaaaaaaaaaaaaanggggggcgcccgttttaaagaaccaaattttactaccccgtctttgcaaattaaaaatttttttttagggcccccaaaataaaatccctggcccgggttttaaaaacgggggg

SEQ ID NO: 27116 - DNA, 401 bp, Gossypium hirsutum
  Clone ID: LIB3147-058-Q1-K1-G8
accacgcgtccggcataccatgaacagatatcagttcctgagatcacaaacgctgtgtttgagccctcaagcatgatggccaagtgcgatccaaggcatggcaagtacatggcttgctgcctgatgtatcgaggagatgtggtgcccaaggatgtgaacgctgctgttgctaccatcaaaacgaagaggaccgtgcagtttgttgactggtgcccaactggtttcaaatgcggtattaactatcagcccccagctgttgtccctggaagagatcttgctaaagtgcagcgagcttgttgtatgataagcaataacacaacagtggcagaggtgtttgcacgcattgaccacaagtttgatctgatgtactcgaaaaaagcatttgtgcattggtatgttgg

SEQ ID NO: 27117 - DNA, 211 bp, Gossypium hirsutum
  unsure (1)..(211): unsure at all n locations; Clone ID: LIB3147-058-Q1-K1-G9
ttccgcccacccttccaatcattctgtcacgcttgattagaataaatgtatgagatgtatatcttcatctgattaaaagttaaaattctcatactggatcatggtattttatcattatattacaaataaagattaaattctgagctgcnnannanaaaaaaaactaaataacctgttatacaaatgaatttggaaggatgtacaagggttc

SEQ ID NO: 27118 - DNA, 442 bp, Gossypium hirsutum
  Clone ID: LIB3147-058-Q1-K1-H1
cccacgcgtccgcccacgcgtccgcccacgcgttcgaatgaattaattcctagggaattaatggctatttttaatgacaaggagctggagttactgataagtggtctaccagaaatagatatggatgatatgagggcaaataccgagtactctggttttagtgctgcatcacctgttatacagtggttttgggaggttgtccaagggttcagtaaggaggataaagctcggcttctacagtttgtgactggtacctcaaaggtgcctttagaaggttttagtgcacttcaaggaatttcaggttcacagaagttccagatacagaaagcatatggcagccctgatcacttgccttctgctcatacctgtttcaatcaattggatttacccgagtatccatcgaaagaacatctaaaaaaaaagttgctgcttgcaattcacg

SEQ ID NO: 27119 - DNA, 467 bp, Gossypium hirsutum
  Clone ID: LIB3147-058-Q1-K1-H10
aatcgataaaaatggcgatggcgagtgttcgatctggtctcctacgagcagcccttcgcggcggctctcgtgctactgctcctcccacgcgtggcttcgcttcctcttctcatcacgatgatgcttatgaaaccgcaaaatgggaaaagataacatatttaggtgttgctacctgcactgttttagcgatttataacctatcaaaaggtcatccccaccatgaagagcctcctgcatacccatatttgcacattcgcaacaaggagttcccatggggtccggatggtctgtttgagaaaaaagagcatcactagggatggccggatggatgcatatctttccgagttcggcgcatttttatcatttctctgagaaatcaatcagataattcttgggatcttttgtaattttagcactcgatttccaatttatggacttttaattgcaagttcatcaagttttctata

SEQ ID NO: 27120 - DNA, 411 bp, Gossypium hirsutum
  Clone ID: LIB3147-058-Q1-K1-H11
gataaagacaaggaaaaaaagaaggatagaagtgggcatcatgattctggtgctgatcactcagaaaagcaccatgaaaaggttggaagttttttacctcttacatgttttgccccgagtatagtggaaaaatggttaaagtcaatcagtctgttaatttatccattatttgttcaagaataacattgtttcttttgagctatgcatgggatgttttcttttgatcagttaagctttggtatagtaagggataaaataatggcgaaagttgattggcatatcaatatgttcctggattgtgaaagacgcaattttgtcatacaggcataccatagagatttattggagcacatgcctgcaccagttgcggtgatacgacgcccaccaacattgccgaatattattacccgt

SEQ ID NO: 27121 - DNA, 251 bp, Gossypium hirsutum
  Clone ID: LIB3147-058-Q1-K1-H12
gccgacccacgcgttcgcccatgcttgcacccacgcatcccgtcacccgtatggacaagcgttttcatatgggtggactgccaatcattgtctactctccagagacattcatatacatctacaactacaagcaaaggccttacacttctatcaccttcactaaaaaactcatgatcaagataagtgtatagagcattgactcatcattaatattagcttagaccgactcaattacgatattcttacaggcg

SEQ ID NO: 27122 - DNA, 353 bp, Gossypium hirsutum
  Clone ID: LIB3147-058-Q1-K1-H2
ctctctcatgctttatacatggattgaggcatttccagagctgattccaagaccgcggccctgtgcgccaatctctactcaactacgaaatctaccacgaaagctgggaaggcatctaaggatgcaaataagcctccaaagcctgctaacacgtctgttagctccatgttcgagttcatcgagcaataccagaagcaacacactaaagaccactctaatgacactgtcggcactgctggtggcaataaatggaaaaatctatctgagactcttaatcaaccttatattcatcctgacgatgatcaagccgtcgaacgtgaagtcgactttgaaacctacattaaaacacacgc

SEQ ID NO: 27123 - DNA, 399 bp, Gossypium hirsutum
  Clone ID: LIB3147-058-Q1-K1-H3
cccacgcgtccgaaatcctcgaggcgatcaaggcgaacttcaatgataagtacgatgagtacaggaagaagtggggaggtggtatcatgggatccaagtcacaggcccgaaccaaggcaaaggagaagcttcttgcaaaggaagctgcacagaggatgacttaaaagatcaccatttttatccttccggttgtactttcagttttgttttcgattttgtttagattaaatggtcctctttttaagtaaaagctgcaatcaactttcaaactttagtttcttttctttttaactgaagaatatttatagatttctgtttgaacttttgaaataactttctagctacttgtttgatgaaattttgtgggcttataatgaaaaactatcaattatgcggttg

SEQ ID NO: 27124 - DNA, 339 bp, Gossypium hirsutum
  unsure (1)..(339): unsure at all n locations; Clone ID: LIB3147-058-Q1-K1-H4
cggacgcgtgggcggacgcgtgggcggacgctttggtgcaaattcccttatgcaggccacggggaactggctaaaactgcttcaggtataccacccanattttcagttttttgcctcacatgggatgtacctcgggtgaaacaaaaagataaaccagtgtgtgattttcttccttttccgtgtccgaaacttgcacctccaatgcagtcaaactgaggttaaatgctttaaatttttggtacggtgatggcataccattcgagagaagcttttttactggatcggatttcctttacttgcaaagaaagaaattgaaacagttaagagacctatagacat

SEQ ID NO: 27125 - DNA, 387 bp, Gossypium hirsutum
  Clone ID: LIB3147-058-Q1-K1-H5
ctaccatagtgcgattgggaggacgaaaccaacaaagaaaagcggacagtgaggagcaacagcggcaacaatggtgaagttcctgaagccaaacaaggcggtggttgtccttcagggtcgctacgccggtcgtaaggcggtgatcgtcaaatccttcgacgaaggaacccgcgaccgcccttacggtcactgtttggttgcagggattaagaaatacccaagcaaagttatccgaaaggactcttccaagaaaacggccaagaaatcccgcgtgaaatgcttcctcaagctcgtcaattaccagcacgtgatgccgacgcgttacaccttggatgtggacttgaaagatgtggtcaccgtcgacttccttcaaagcaaggacaaaaa

SEQ ID NO: 27126 - DNA, 442 bp, Gossypium hirsutum
  unsure (1)..(442): unsure at all n locations; Clone ID: LIB3147-058-Q1-K1-H7
gttaaagataaatcgactctgtttccactgggttggattcatacacacccaactcagacttgtgggatgtgatcggatgatcttcacactcattactcatatcagattatgttaccagaagcaatagcaattgttatggcccataccgatacattcagcccacatggtatctttcatctgtccgatccaagcggtgtgatcatcattcggaactgtcaacaacgaggatttcatccgcatgaggagcctgtagatggaacaccaatctacgagcatngctctcatgtatttatgaacccaaagataaagatcgacgttgttgatctccagtgcggtaaaattgtattgaatcaaactgaaaaaaagtagaatggcaatacagggtatactcacttaaaatttttatgaattatattcgtagaattatgaacctatgtatatt

SEQ ID NO: 27127 - DNA, 353 bp, Gossypium hirsutum
  Clone ID: LIB3147-058-Q1-K1-H8
cacggctaatggaacctgtatattatgtggagatacaaacaccaatcgactgtgtctctgctatctatactgttttgtcccgtagacgtggtcatgttacagctgatgtgccgcagccaggaacccctgcttatattgtcaaggcatttttacctgtgatagagtcatttggattcgagactgatctaaggtaccacacgcaagggcaagccttttgtctctcagtattcgaccactgggccatagttcctggagatcccttaaacaagaccataagtttgcggcctcttgaacctgcaccaatacagcaccttgctcgggagttcatggtgaaaacgaagcgtaaaaaggga

SEQ ID NO: 27128 - DNA, 413 bp, Gossypium hirsutum
  Clone ID: LIB3147-058-Q1-K1-H9
agcggacaaggtgttgttgcctgaggagttttttgaagctaaatccccagcggctgcaccttgaccggcgacaaagaaatcatcaacagggtctaaatcgaactcaagagcatcagcaaccgcagatgagccagcttctgctgataattcaggatcaaccggaaggaatatggggttgggattcgttgttgggcttgcattggcttgcattggatttctctcatgagcggatatatatgaagtttgtctgcattttttactataaattttcgtttttcaaatggatcgataaggctctgattggtcgttgaacatattcttgttatccacattatttgtatttccaaaatttttttggtgattttgcttctgcgccctgcttgatgttaataataatatatgggagtttcttg

SEQ ID NO: 27129 - DNA, 431 bp, Gossypium hirsutum
  Clone ID: LIB3147-059-Q1-K1-A1
cccacgcgtccgctctgcacgcgggacgcttggatgcaagtgttattacaaatcgaagacgggtatatcaactgcgctctcaattccgatttcgttaaactcgtcttcgaattcaaacagcttaaagggaaatctaatagtttcaacaccgtttaccaagagaacaccgccgatcaatacacgctcgtcttcgctaactgtttgagtcatgtcaaagtatcgatgaatgtccgatcggcgatgtacaatctcgacgggaaagaaaaacatcgggattatctttccccccggaaaacgaatcttcctaagggttacttcattttcgcccttctttatttcacaatggcagggatttggatttacgtgctttatttaaaacgacttaacggtttcagaatccatttatttatggtggctgtgaatattttaaa

SEQ ID NO: 27130 - DNA, 186 bp, Gossypium hirsutum
  unsure (1)..(186): unsure at all n locations; Clone ID: LIB3147-059-Q1-K1-A10
atcaaaacagttttatcatattgagctagaatccgaacagatcatttgtatagctgcagtcgaaactcaatgaactataaccagttttggatggttatgtacatactttttatgtatttatcattgtcatgttgcccttataacctaatgcccaccagcggcaatgacccatgtttttggaccana

SEQ ID NO: 27131 - DNA, 432 bp, Gossypium hirsutum
  Clone ID: LIB3147-059-Q1-K1-A12
caaaaatggttctccaaaacgatatcgatttgttgaatcctccagcagagcttgagaagaagaagcacaaactcaaacgtcttgtccagtctccaaattctttcttcatggatgtcaaatgccaaggctgtttcaacataacaatagtgtttagccactctcaaacagtggtggtatgtggtaattgtcagactgttctttgtcaaccaacaggaggaagagctagactcaccgagggatgctctttcaggaagaagggtgattgatctcatattttgctattttatgattcacaaaaacaaaagaaagtaatctttggatcaaatatgggaatcatatgagtaatctttttcatgtgtttcagttatgacatatgtgtgaagtttatttttgtagtaagttggtacttgatgatggtattaatccattatg

SEQ ID NO: 27132 - DNA, 391 bp, Gossypium hirsutum
  Clone ID: LIB3147-059-Q1-K1-A2
ctcatctctctcctttgttttcccttttgtctctctctctctttttccaaccctaaccctacctcaccaaccaggattcaacatgaagggaggaaaatccaagtcagatactaagagtgccaagctatccgtgaaatccaaagctggaaagaaatcggggaaggctgccaaggatccaaacaagccaaagaggcctgctagtgccttctttgttttcatggaggagttccgtgagcaatacaagaaggatcaccctaaaaacaaatccgttgcggctgtcggcaaagctggtggagataaatggaagagcttgtctgaagctgaaaaggcaccttatgtagctaaagcagaaaagcggaaggttgagtatgaaaagaacatgaaggcctac

SEQ ID NO: 27133 - DNA, 341 bp, Gossypium hirsutum
  Clone ID: LIB3147-059-Q1-K1-A3
cccacgcgtccgcccacgcgtccgcccacgcgtccgctcgactttggtctcttccaattaggttagataacccgaaatctgaaactttagcattaaaattctcatctaaaagaatattctgagatttgatgtccaagtgaagtatcttttggttgcattcttcatgaagataggccaatcccttggctatatctagaattatcttctttctaatttgccatccaagagcaggttcttggtttttgttgaaaatccattgatctaaggagccatttgccatgtactcgtaaactaaaagcctattggaattttcagcacaaaatccaaccaaagttaccaaa

SEQ ID NO: 27134 - DNA, 142 bp, Gossypium hirsutum
  Clone ID: LIB3147-059-Q1-K1-A4
cagtttttctgctttggaagtgactgatcataactttgcacattttgtatgttatgtttttaaaaaacatgtccatgatttggtctacccaaacccaaccccaaccccaaccccaaccccatccccaaacaccaaccacaag

SEQ ID NO: 27135 - DNA, 445 bp, Gossypium hirsutum
  Clone ID: LIB3147-059-Q1-K1-A5
cccacgcgtccgcggacgcgtgggccagtatctgaagacatgtttcattggcaagcaacaatcatggggccctcagatagcccttatgctggaggtgtgtttttagttaccatccatttccctccagattatcctttcaagcctcctaaggtcacgtttaggaccaaggtcttccatcctaacatcaacagcaatggaagcatttgtcttgatatcctcaaagaacaatggagccctgcactaaccatttccaaggttctgctctcaatctgctcgttgctgaccgatccaaaccctgatgaccctcttgttccggagattgctcacatgtataagactgatcgggccaagtatgaagccactgctcgtagcttgacccaaaagtatgccatgggatgacagtggttggtgtgtaatacctatcagcttttttatgtgttttggg

SEQ ID NO: 27136 - DNA, 366 bp, Gossypium hirsutum
  unsure (1)..(366): unsure at all n locations; Clone ID: LIB3147-059-Q1-K1-A6
ttaaaggaagaacaagagggacattagtggtaatcccagggctcttaggaggttgaggactgctngtgaaagggcgaagagaactttatcatccactgctcaaacaaccatcgaaattgactccttgtatgagggtatcgatttttactctaccattacccgtgccaggtttgaagaacttaacatggatctattcaggaagtgtatggaaccagttgagaaatgtttgagggatgctaagatggacaagagcactgtccatgatgttgttcttgttggtggttccactagaattccaaaggtccaacaacttttacaagatttcttcaatgggaaggagctttgcaagagcatcaaccctgatga

SEQ ID NO: 27137 - DNA, 266 bp, Gossypium hirsutum
  unsure (1)..(266): unsure at all n locations; Clone ID: LIB3147-059-Q1-K1-A7
cggaattgaccgggtgcgatcccacgcagtctcgtaactggttggatagaggctggttggtctctcacccatctttgtctattattanntctcaaccagcgcagaaacgagattcacggcttcactttttcgggttacangnnttcaagggtgannagttattggggagccaatcgtttggggagannggaacanncttgtgtnctttagaacccactctcagcgttttacctggctgcnncacacttnngagcattggcatgcac

SEQ ID NO: 27138 - DNA, 298 bp, Gossypium hirsutum
  unsure (1)..(298): unsure at all n locations; Clone ID: LIB3147-059-Q1-K1-A8
cggacgcgtgggctgaaggttgattgtcaaagatcaaaggagatgtttcaacagctgagaaaagtttatgataacttacaggaattttgtgtcaatgagctcttagatgagcaaacaatggaaggatccaaagggaattaactcagatacccctcaaacccttttctttttacactttttttcttcaaattttcattgttgaatttgtttccattataaacaagaatcccatagctaatttttgtaccttaattgtgaagcatattctagaaagattatatggatttatgacagcnna

SEQ ID NO: 27139 - DNA, 348 bp, Gossypium hirsutum
  Clone ID: LIB3147-059-Q1-K1-B1
cggacgcgtgggaaaatttgtaactggacattggattcataaataatttggtttactttatttctgtgggatatatttttttttattttttggttttctggtttattataggcccgggcaaatttggcctattacgtaaaggatagtaatcacggtactaatttgcataatagaataataatgaacgtgataacatgaataacaatataatagcaaaaaataaaaaaggggtaaataataataaaataataaaaccaaccaattacataaaataaaagaaaagaaaaataaagtaacaaataaaaactaaaatttaattaaaaaaattgatagtaattactaatgggt

SEQ ID NO: 27140 - DNA, 390 bp, Gossypium hirsutum
  Clone ID: LIB3147-059-Q1-K1-B10
cccacgcgtccggatgaagtccaaacgagagaagtatttgatgatgatggctggtttcatagaggagacattggtttgtggttacccggaggtcgtctcaggattattgataggaaaaagaacatatttaagttggcacaaggcgaatacatagcaccggagaagatcgagaatgtatatgcgaaatgcaaatttgtttcacaatgttttgtatatggtgatagtttcaattcatctttagtagcagtagttgcagtggaacctgatgttctaagagactgggccgcatctgagggtatccagtatgaggatttacgacagctgtgcaatgatccaagagcaaggaatgctgttctcgctgagatggatgatgtgggaagggaagcacag

SEQ ID NO: 27141 - DNA, 387 bp, Gossypium hirsutum
  Clone ID: LIB3147-059-Q1-K1-B11
acgcccacgcgtccgcccacgcgtccggggtgagaaagatgacaagattattgctgtctgtgccgatgatcctgagtatcgtcactacaatgatatcaaggaactcccacctcaccgcctggctgaaatccgtcgcttctttgaagactataagaagaatgagaacaaagaagttgctgttaatgactttctgcctgcctctactgcatacgaggcaatccaacactccttgaatctctacgcggactacatagtggagagcttgaggcggtaattgtcggttcaccgtgccccgtctatatacaaatatatatattaatatgaatatgaatatgttgctactatacaagaaattcatcgtctccttgtgcgggcagaaacaccctg

SEQ ID NO: 27142 - DNA, 302 bp, Gossypium hirsutum
  Clone ID: LIB3147-059-Q1-K1-B12
cccacgcgtccgcaaataggtgctgaaactgataagtttgctcaggaacttgtcacggagagttcttcaggagaaaggttggaaaaagaggtttctgctttaaaattagagtgctcgaattcgattgctaaaaaaaaaaaaaaactataaaaaaaaaaaaaaaaaaaaaaatttctaaaaaaaaaaatttttcatatttttaataaaaacaaatcaatttaacaaatctttgaatttattaactattctatatatttaaaagcatttaagttgggggggccggtttttaaaggttccatgtt

SEQ ID NO: 27143 - DNA, 283 bp, Gossypium hirsutum
  Clone ID: LIB3147-059-Q1-K1-B2
atcgactggtcttctgtgagaaatgtcatggatatgaaagctgtttatggagggtttgctgcagccctgaaagacttgaaagtctgggttatgaatgtagttccaatcgacggtgccgatacacttccagtaatctatgaacgtggattgtttggaatacatcacgattggtgtgaatcatttaatacatacccgagaacgtatgatgttcttcatgcagatcatctcttctccagtattcagaacaagtgcaagttggttgcggtaattgcagaagttgatc

SEQ ID NO: 27144 - DNA, 232 bp, Gossypium hirsutum
  Clone ID: LIB3147-059-Q1-K1-B3
gctcccaccataagcattcagcattatattgatcgcatcttcaagtatgctggctgcagtgcgttgtgctttctcgttgcatacatttatgtggatagatttgttcaacaaacggatgtgcatttgacttcccttaatgttcaccgactcctcataaccagtgtattggtagccgcaaagtttattgatgatgcgtttttcaacaatgcatattatgcgcgagtgggagggg

SEQ ID NO: 27145 - DNA, 419 bp, Gossypium hirsutum
  Clone ID: LIB3147-059-Q1-K1-B4
cgggtcggcccaagccgtccgccaaagggaggtttttcgaacctgaaaaggaggttaggaggaacctgccggaggccaggaaggaggtgcggaattttgccgttgcttttttattaaagtccatcgagggagtccaaaactggaaggcctaccttgccgcaggattttcgctaaagtctggcatgaaaccacatgaacttgtcttctagaagtaagttgttagctaagtcccctttacattggtgtgttttggtttttgagtatcattgatcctattttcggatgctatataggtaacctaaatcattttgtgaggcaagaaccccaaatttccatttttgtgttttcttctaatctctactggattttgtttttattttttttattgaagttatagtatggaattttgcccactagag

SEQ ID NO: 27146 - DNA, 172 bp, Gossypium hirsutum
  unsure (1)..(172): unsure at all n locations; Clone ID: LIB3147-059-Q1-K1-B5
aatccaagaatacgttcgtgaaacttttgcttggatgcattattactggtaccttaccaacgatggcattgaatttttaaggacttaccttaatctcccctctgagattgttcctgctactttgaagaagcaaactatgcccngcggtggtcgtcccatgggtccttctgat

SEQ ID NO: 27147 - DNA, 320 bp, Gossypium hirsutum
  Clone ID: LIB3147-059-Q1-K1-B6
cccaaacacctcttttttcgcaaaattttctaagttttagccatttagaaaaaaagctttttgttgttgaaggccatgactatgagtaacaatattgggcaatttggtgacacaactttaaccaaagttttcgttggagggttagcttgggaaactcccagagaagccatgagagagcactttgagaagtatggtgagatccttgaagctgtgattatttctgataaagtcactggcagatccaagggttatggattcgttacgtttaaggaagctgaagctgctaagaaagcttgtgaggatgctaaccctatcataaa

SEQ ID NO: 27148 - DNA, 372 bp, Gossypium hirsutum
  Clone ID: LIB3147-059-Q1-K1-B7
attgggttcctgaggagagaattcttaccaccaatctttggtctgcagagctttccaagcttgctgccaatgctttcttggctcagaggatctcatccgtgaatgccatgtctgctctttgtgaggcaaccggggctgatgttacgcaggtctcttatgctgttggtaaggacacaaggattggacccaaatttttgaatgctagtgtcggttttggtggatcctgcttccagaaggatattctaaatctggtttacatctgcgagtgcaatggccttcccgaggtggcagagtattggaagcaagtcattaagatcaatgactatcagaaaaaccgatttgttaatcgtgttgtttcctcgatgtttaaca

SEQ ID NO: 27149 - DNA, 269 bp, Gossypium hirsutum
  Clone ID: LIB3147-059-Q1-K1-B8
tcaacctgctgttggcagaattccatctgaacttgccacatcacttgcggctgcggcagcagcagaactaccttgcactgtaaagcttagaatatggccacatgatatgaaagacccttgtgctttccttgatcccgagaaatgtcgcttgatcattccacatgctgtgctttgtagtgaaatgggtgcacatttttcaccttgtgggagatttttagcagcctgtgttgcctgtgtgcttcctcatttggaagccgatcctggagttc

SEQ ID NO: 27150 - DNA, 290 bp, Gossypium hirsutum
  Clone ID: LIB3147-059-Q1-K1-C1
cccacgcgtccgcccacgcgtccgagaagacagaaagcagctatcaaaatggctactttgctagcggctgcaggtcgtagagcaactactctatctcgatccccggctctgtctcaagccgcttctctcattcctcgccgtggtcttgccggcgctgcgggtattctccgttttccctttttttattgttacaatttacaagtttttgttgactcaaatatatgtaaagtttgtctgaacatttttgaatctcgtttaccttagattatagttgaagctaaaggatctta

SEQ ID NO: 27151 - DNA, 456 bp, Gossypium hirsutum
  Clone ID: LIB3147-059-Q1-K1-C10
ctcaattctcaaaaccctaatttctctgcttttccttttgcttaatcaatcgatcctcgtcaatggccaacagtaatctccctcgaagaatcatcaaggaaactcaacgtctcctcagtgaacctgcacctggaattagtgcttcaccatcagaggataacatgcggtatttcaatgtgatgatccttggtccaacacagtcaccatatgaaggtggggttttcaagttggaactatttttgcctgaagaatatcccatggctgctcccaagagcaaactctcgctggttcgatttcttacaaagatatatcatcctaacattgacaagcttggaagaatatgccttgatattctcaaagacaaatggagtccagctctccagattcgaactgtacttttaagtattcaagcacttttgagtgctccaaatcccgatgatccactctctgaaaaca

SEQ ID NO: 27152 - DNA, 354 bp, Gossypium hirsutum
  unsure (1)..(354): unsure at all n locations; Clone ID: LIB3147-059-Q1-K1-C11
aacgaccggccgaccgacgcgtcccngactcatttcggactctgttttgacgtttgggcggacgcattaaccgaggggtggtgtgactcttggagtcgtggagttagcagtggtagtgggcatagctcattgggctatctgtttgggagtggagaagctccaaaaccagttacaaacaaatccgaagctgctccaattgaagcacaggatgtgtccaaacctgctcctgctcctcaacaagttgccaagcaaattcctgcgggtattaacagttcgcgtgctgatggtcagaacactggctatttcattactgatcgaccatccaccaagattcatgcttcccctggaagtgga

SEQ ID NO: 27153 - DNA, 338 bp, Gossypium hirsutum
  Clone ID: LIB3147-059-Q1-K1-C12
gccaatcctaaatcggatagttctttgaagactgctgctcaggccatatattacgagtttggtgggacggatgccgagtccaatggcgcatatcatcttctactaaaagaggatgacattgagggactccttgaaaccgatcacataaacgatctcatacctcagaacaacacagtgttcattaaagttttcaaagctgatgagaaaactgacgaaagtactttgctgaccgaggcactcaccgaaaaaccttccattggaacggtcatagctgctggacctgctactgtacatgaggcaggaaacctagaaccactatcagtctcaccttgaaacac

SEQ ID NO: 27154 - DNA, 477 bp, Gossypium hirsutum
  unsure (1)..(477): unsure at all n locations; Clone ID: LIB3147-059-Q1-K1-C2
gaaagcaggccataattgttgnggtacaaaaacattaacatcaattatttggtacaatgcaaatttagtcatctcataacttataccaagttgaaattgcatggaaaattcaaaatatatgattggttgagcttcacaaattcaacaagaacatacatccaaaaaagccttggcaaacccaagcttcacattatttgagactgcggtggcatgttaacattagcaggcatcaagatcacggcatggaggaggtttgggatcggttagcaaagtggtatttccaccttctggtccgctcttgattcgttttggattttgagtgccaggcggtagcttctctccccttcttagcatctcaactatctcaataactctttttggggtaatatcttcataagaattatatgtgtatccttcagatccattggagtaatcagcaactgtgatcataggagcatttacacaacattccataca

SEQ ID NO: 27155 - DNA, 325 bp, Gossypium hirsutum
  unsure (1)..(325): unsure at all n locations; Clone ID: LIB3147-059-Q1-K1-C3
ctccatcaagggtatcggaaggcgtttcgccaacattgtttgcaagaaagccgatgtagacatgaacaagagggctggtgaactgactgcacaggaattggacaatctcatgacgattgtggcgaacccgaggcagtttaaaatcccagattggtttttgaacaggcagaaggattacaaggatggaaagtattcccaagttgtgtccaatgctctcgacatgaagttgagagatgacttggagcgcttgaagaagatcaggaaccaccgtggtctgaggcactactngggccttcgtgtacgtggtcagcacaccaagactact

SEQ ID NO: 27156 - DNA, 339 bp, Gossypium hirsutum
  Clone ID: LIB3147-059-Q1-K1-C4
cttccttctgttgctacagcgacttacaattcaatgagctatgcaccaaatggggctggagtgaagttcccgaatcacaaggaggatcatagtaactctatcacgatcggtgtttctgatgagcatataggactggttcttggtcgtggtggaaggaatatcatggaaatcagtcaggtaagcggtgccaggataaaaatatcggataggggtgatttcatgtctggaacaactgacaggaaagttacaatcacgggatcacagagagcaattcatcaagcagagtccatgatactgcagaaagtagcaaacgccagtgaaagggtgatggattagttt

SEQ ID NO: 27157 - DNA, 390 bp, Gossypium hirsutum
  unsure (1)..(390): unsure at all n locations; Clone ID: LIB3147-059-Q1-K1-C5
cccacgcgtncgcccacgcgtccggcctgagcatagatgattgtgagatgatacaaganatcatagcatgtgagggtgaagaaatacaaggcaacattgttttccccaaactgaagtatttggaactaagttgtctgccaagtctagcaagcttttccttggcgcatcacttgttggagttcccagtcttgcgaatggtgaaggtgaaaaagtgccccaaaatgacgaatttttgtcaaggagagttaagcacaccaaggctggaacaaacacacttaacaggagatgaagacggtgaactgcagtgggaaggcgaccttaacactaccataaaacacatgttcgatgaaatgaatgtgcaaaattctcaagtgatcgaggttactaatc

SEQ ID NO: 27158 - DNA, 451 bp, Gossypium hirsutum
  unsure (1)..(451): unsure at all n locations; Clone ID: LIB3147-059-Q1-K1-C6
ccaacccttccggccaaacccggatatgtttttctaggtaagaaggaatccggaggtattagtattagggaggtccaatatggttttgcttcatcgaaatctatgatgagccaatgcctcccggccaatgcaatatggttggggaaaggcttggtgattatctcattgaacagggtttttgatcttgctgctgtggcctattttgtttcaaatcttctctatttctatacaaaactcgtatccaccacctcttatagtgatgggtgggtgcaagtgaataatagtattaccagttactagtgtgaaactcatagagaacttaacgaaagctcaatgtntgtaatggcgatgttattgatcgcttactttggatttgtgccttgcttgatgaatggtatcatgaaaattgttgaggtccaattgcctaccttaacaattctggatttttttt

SEQ ID NO: 27159 - DNA, 172 bp, Gossypium hirsutum
  Clone ID: LIB3147-059-Q1-K1-C7
gagaaaaaaaaaagggaaaaaaggattagatgctcttttttttcttttgctattgggggtggtttaagagaataaaattctctttttcactttttcccctgtttgtaatcttatagtatgcttttgctacattgatatggacagataaaattaaaaaaaaaaaactctattc

SEQ ID NO: 27160 - DNA, 418 bp, Gossypium hirsutum
  unsure (1)..(418): unsure at all n locations; Clone ID: LIB3147-059-Q1-K1-C8
cccacgcgtccgcccacgcgtccgcaaaaaagggaatnngatatcgaacattggcacgacagatgttaatgctgtaacttggggagtgttcccagccaaagaaatagtccagccaacagtggtggatcctgccagcttcatggtgtggaaggatgaagcattcgaaatctggtcaagagcatgggctgcactgtacccagaaggcgatccgtcgaaaaaattgctagaagaggttcagagcagctattatttggtgagtttggttgataatgattacattggtagtgatgtntttgctgtttttggagacctttaagatgagattgctgccttcaagccctgaacttaccaaagcttttaagccccatatagtatcattatgtttgaattggcaagttaattttttataatgattttt

SEQ ID NO: 27161 - DNA, 335 bp, Gossypium hirsutum
  Clone ID: LIB3147-059-Q1-K1-C9
aatggagattgcagaacaagaccaaggactattcctgcgctcgtgtggtgaaagagggtgaaactttgtcttccatttcaaaggtgtatgaattgtccgttcattcaattgcagcagctaataagaacattgttgatattaaccttgttttccaaggccaactccttaacatcccttcttcatccctactagacactcaacttgaccgagccaagaaaagtaggttatggcaatccatccgtgcacttaaagctccttcagggcaaaagtttttcaccatgataacttcacattgtttaataaaatgctaaatccactggttattttctagttct

SEQ ID NO: 27162 - DNA, 318 bp, Gossypium hirsutum
  Clone ID: LIB3147-059-Q1-K1-D1
agcttcggtaagccaagcccttaacctgtttcatctaatgctggtacgcagtcttggagtgggtccactagtaccgaagaacagataatatgcaaggcctcagtaccttcaactccatctacccctattagcaaattggagagtccaaatttggtgaataccatgggatctgatgctgccaccggcatgatgccttctgttccacaggctcgcaaagcttccttggctcggtttttggagaagcgcaaggggaggataatgagtacagcatcaccatacaatcttagcaagaagtctctagattatgcaactaccatg

SEQ ID NO: 27163 - DNA, 332 bp, Gossypium hirsutum
  unsure (1)..(332): unsure at all n locations; Clone ID: LIB3147-059-Q1-K1-D10
cccacgcgtccgcccacgcgtccgcccacgcgtccggctgagagcactttgttggcttacaagtctgcacaggatattgctctcggtgacctancgccaactcacccaattaggctgggacttgctcttaacttctctgttttctactatgaaattcttaactcacctgatcgtgcttgcaatcttgcaaaacaggcttttgatgaggctatttctgagttggatacattgggtgaggaatcctacaaggatagtacattgatcatgcaacttcttcgggacaacctaaccctttggacatctgatatcacggacgaagctggagacgagat

SEQ ID NO: 27164 - DNA, 302 bp, Gossypium hirsutum
  Clone ID: LIB3147-059-Q1-K1-D11
cggaacgaccgacgcgtccactcgttctctcacgcctacgcccacgcgtctttctacgcgtacggaggacaagtactccatgccctagagaggaagataacagatgcctctcagctgaactatgattacaaaaaccgattagcgacttggggggtaacttatgtgccaatctaacggcgacaggaagatgtgtcctatccatattgcactgctcgcttattccatacccaggatggggcattgattgcattatgtgatatcgcctttgtcagggcatacacaacatgaatgatattgtcttc

SEQ ID NO: 27165 - DNA, 338 bp, Gossypium hirsutum
  Clone ID: LIB3147-059-Q1-K1-D3
cccacgcgtccggcgccatccattgaagaccctgggcacttcccaactcttgggggcaagtgaagaagtgagattcctttagagccccacatatgatatccatgggttttattggaattttaggtacttttaaatttcgggctgggaataagataaaaaaataatctggtttcctgtcgccaaagcatctccgaattttatgttgtaaaatgtatgtttcagggtttttctctctttttgtttttttggggttattgcccccactattgttatgctgtgatcttacttgtattgctcactgctcagttttctttttgaataaatggaactagtttgct

SEQ ID NO: 27166 - DNA, 431 bp, Gossypium hirsutum
  unsure (1)..(431): unsure at all n locations; Clone ID: LIB3147-059-Q1-K1-D4
gaacttatcaaggataagatagaagctcaaatagaagtaaaggctaaagagcaagaagagaaagaagtgattgcacaacagaacatgtatgctcagttactacctcttgccttgcctgcaccgccaatgccaggaatgggaggaccaacaatgggtggtggatttgcacctccaccaccacccatgggaggaatgggaatgcctccgatgccaccttatggcatgccaccaatcggcagcagttattaactcatgacaggttggtttgaaagatattttttagccgagttgattccttctgttgctgtgacaaataagacattgatatcatagttccaatcatggcaatttcttcaggcttgaagatcaagttataataatgccatttctatgnttcatctgtgtgatattatgtgatattattatgttct

SEQ ID NO: 27167 - DNA, 381 bp, Gossypium hirsutum
  unsure (1)..(381): unsure at all n locations; Clone ID: LIB3147-059-Q1-K1-D5
ctcnttctctgaagccgccgcctgcgtctctttcttcatctctctgaaccaaaaagtcttgagcttttggcttcgagagagaccatgttggtttaccaggatctcatctccggtgacgagcttctttctgactcattcccctacaaggaaatcgagaatgggatgctgtgggaagttgagggaaagtgggttgtgcaaggagctgtcgatgttgacattggtgccaatccttcagccgaaggtgctgatgaagatgaaggtgttgatgaccaagctgtgaaggttgttgacattgttgacactttcaggcttcaggagcaaccccctttcgacaagaaacagtttgtcgtgttcatcaagaagttcatcaagaacttgaca

SEQ ID NO: 27168 - DNA, 209 bp, Gossypium hirsutum
  unsure (1)..(209): unsure at all n locations; Clone ID: LIB3147-059-Q1-K1-D7
gcanccncagaaancgagccancccccaaatctaanagncagnnngnacacgagggcggaggggnnggacaaggcgaagaacgnngnggccganaagggggccaanangaagaagccngaggcnagcancacggangnngancngacccangcgggcnnngacggcanccagnanaaagcnaaagncnccgncaccaaccccaaaagcg

SEQ ID NO: 27169 - DNA, 78 bp, Gossypium hirsutum
  unsure (1)..(78): unsure at all n locations; Clone ID: LIB3147-059-Q1-K1-D8
antntaagggggnnngccaatattnncacaattttaatgaataaattttagtaggaaagactattttgtttttctatc

SEQ ID NO: 27170 - DNA, 263 bp, Gossypium hirsutum
  unsure (1)..(263): unsure at all n locations; Clone ID: LIB3147-059-Q1-K1-D9
aaaaaaaaaaaaaaaaaaaaaaaaaaaaaaaaaaaaaaaaaaaaaaaaaaaaagggggaaagggaaaaaaaaaaaagaaaaaaaaaaaaaaaaaaaaaaagggggcggccgcccaaggggacccaggcaaccgcccccgggcaggcgacgaaaaagcccnacaagggggcccccaaaanccaacccccgggccgccgnaaaacaccgccgggccggggaaaccccgggcggcccccaacaaaaccgccgggcagcacaccccc

SEQ ID NO: 27171 - DNA, 154 bp, Gossypium hirsutum
  unsure (1)..(154): unsure at all n locations; Clone ID: LIB3147-059-Q1-K1-E1
ggaggacgggaaagccaaggccaccaaggaggccgcnccgaggancgacgngacacagnncgggnaccccaaagnccncggcaaaggggnnnngccggagaancaaccggnggncgncaaggctaagnnggngncgaagaccgcngaaaagaaa

SEQ ID NO: 27172 - DNA, 394 bp, Gossypium hirsutum
  unsure (1)..(394): unsure at all n locations; Clone ID: LIB3147-059-Q1-K1-E10
cccacgcgtccgctgtgttagattaaagagttaataaagagagtgaaagacccggacactcgcagtctccgaccgtgcgagagccgaccgacccctcccagaatgctgcgtcgagcattggggctcttgccccgacccatagcagctgcaagggctcgatccttttccaccgatctgcccgccgctcacactgccgatgccaccttcatggaggcctggaacaaagtcatgcccaacacggatcctcctaagacccctctatctttcatgcacccttgcccgcctaccccttcctccattcctcccaaactcactgncaatttcgttcttccttatgcttctgagttgtccaccaaggaggttgacatggttatagtaccagccacaaccgggc

SEQ ID NO: 27173 - DNA, 430 bp, Gossypium hirsutum
  Clone ID: LIB3147-059-Q1-K1-E11
cccacgcgtccgcccacgcgtccgggatgggttaggggggttttggaacagaggaatctcggcgtgcgctgtgtgtgatggggcagctccgatcttcagggagaagcccttggcagtgatcggtggaggtgactccgccatggaagaatccacttttctcaccaagtacggttccaaggtttacatcattcacaggagggatacgttcagggcatccaagattatgcagaacagggttatttcgaaccctaagatagaagtcatatggaactcggtggtcgtagaggcctacggcgatagggttttgggagggctcaaggtgaagaacttggtcaccgaagaagtttccgatttgaaagtcaatggtctattctttgccatcgggcacgagcctgccaccaagtttttgggaggtcagctggagctcgac

SEQ ID NO: 27174 - DNA, 407 bp, Gossypium hirsutum
  Clone ID: LIB3147-059-Q1-K1-E12
tacagctttgttttatgcatccatcaaaatacaagtttgaacatcctcggttttgctttgagcggttggagtatgtcggccagaagatccaggatctggttatggcggagaggttgctgatgaagcatctagacgcccctggaagatggctacaagagaagcatcgccgtgttcttatgaacaagttctgcgggaggtatttgcgggaaaagtatctgcatcattttatcatctactcggagcaagttcaagatgcatatgagaacaatcgaagactccggaaccctgccacaactgctgttcagcaggccctccatggcctatcatacactgtgtatggtaagccagatgtgagacgccttatgttcgaggtttttgacttcgagcaaattcaaacctaatttgtg

SEQ ID NO: 27175 - DNA, 396 bp, Gossypium hirsutum
  unsure (1)..(396): unsure at all n locations; Clone ID: LIB3147-059-Q1-K1-E2
atcggtcctcatgaatgtgaataatattttctatcaaccaagaggtttattagtgcaaaaagatttgtggcaatatcttgctatactatgaggctttacttgtttgtgaagttggcaacttggtttaatggcccacacttttccaactttcatcagtagaggagagcacctatacaagtttcatcagaagaggagagcacctatacaagtttctttctttctttctatctaaaataatgtataaacatcaaatattatatcaatagctattatcacagtcattcattatatgagcttgaattggaatctcaaattttttggggcttttctaattgaatngatgttattaatatggataaatgacaatagcctggaatctgtatcttgcttctttgc

SEQ ID NO: 27176 - DNA, 428 bp, Gossypium hirsutum
  unsure (1)..(428): unsure at all n locations; Clone ID: LIB3147-059-Q1-K1-E3
ccagcaccgcctaacaagccaccaagnccaccatggccgccgggaaggacaaaaaagganggcatcccattatgtggacaaaggtgcaaattacactcaaggactaacctatgcttgagagcttgcatgacatgctgtgacagatgcaaatgtgtcccaccagggacatatggcaacagagaaatgtgtggcaaatgttacactgatatgagaacccaccgcaacaagcacaaatgtccttgaaaaacccaaccaaagcccccaaaaaacgacacttcttgagtatgtgtntttcatattgtaatagctgaaaagcttgcagtaataagttctgtgagaagagaggaaaatggatggattcttgtagtgtcttcgtttgtaatccagaactatgaactgtcaatagtttaattaacttttactgagat
